United States Patent Application Publication US 2005/0228172 A9 - sequence listing, part 198

SEQ ID NO: 895955 - DNA, 732 bp, Homo sapiens
gtggtgtatccaaataacttctgaaagcagtttagtgtagtggttaaaagtgtgggctccagcatcaggctgtgtgggttcaaatccctgttctactgcctggtggttgtaaaaccctagacaaagtgttaagcctcagtcccctcatgtgtagagtgaggttaataacagtacctctaacatagagctgttctgaggactcaggaaaataattcatttgcatcattcagcacagtgcttagtatctaaaattcccgataaatgtttgcagtggctgctactattgtaattattgcttaatgccaacaggcctgcatgtttaaattgcatcatgaggtcttgataactacagtgcaactgctatatgtttaaatgacatgcttagtatatcagtttcctagagctatcataacaaattaccccaaaccaggtgactttaagcaactgaaatttattctctctcagttctggaggctagaagtctaaaatcaaaatgtcagcaggtccacactccctctggagactctggggagaaacatttctgccttctccagcttcaggtggctggcagcrttccttagtgtgtgactacataactccagtctctgcctctgtcttcatatggccttctcctcttcccttttccttttctgtctcttatgaagacatttgtcattctatttagtgcccacaaggttaatccaagctgatctaatcttaagattcttaatt

SEQ ID NO: 895956 - DNA, 465 bp, Homo sapiens
atgacaggatattatccttttttatggccgaataatactccatggtatatacatacggcattttctttatccattcatctgctgatggacacttaggttgcttccaaatcttagctatggtaaacggtgtggcaataaacacaggagtgcagatatctctttgataaactgacttcctttgtttggggtatatacccagtagtgagattgttggctcgtacagtagckcaattttcagttttctgaggaacctttaaactgttctcaatagtgtttgtactaacttatatttccatcaacagtgtactaaagttaccttttctccacatcattgccagcgtttgttattgcctgtcttttggatatgagccattttaactgagacgagatcatatctcattgtagttttgatttgcatttatctaatgatcagtgacgttgggcgctttttcatatgtctgtttg

SEQ ID NO: 895957 - DNA, 640 bp, Homo sapiens
tgtgaacttctgtggctccaccccagtgtgcactccttccagtgcacaggctagttagtgtttttatggggattccttcccatctgtctgtctcattgccacctctaaagaagtacatctaactgctgttggaataagaataaggataaggatgaagactaatcttaactgcttcctgctgacagggggtgctgttttgagaaaatggcagtcagatcccccttggaggcctatctaagggttcccagaagaaaaggccattgtccaaggctctggttgcatgaacttttggaggttgatagcctgaagacaagaaaagacagacaaactgtgttgttagaaagcgtgtcaaaatgaaacaaggggagggataagaacaaataaaaaatsatgaggcattttaccagttgcacagggagagggaagccaaaagcctgactggtaaaaaaacaaaaagaaaaaaataaaaaaaaaacaaaacaaacaaaaaaaaactgtaccttttgctgggatgtttggtttctgggtttcttcccctgagccaaataataagccaatcagtttaagatttgggaaattaactctttccagtttggaggatgcatctgaggggaatgttgtatagtatggaggcacaatt

SEQ ID NO: 895958 - DNA, 663 bp, Homo sapiens
ccaaaagtatgatttattatgtaaatttaaaggaatgggccgggtgctcaagcctataatctcagcactttgggagaccaaggcgggcggatcacatgaggtcaggagttcgagaccagcctggccaacatgtgaaactccgtctctactaaaaatacaaaaattagctgggcgtgrtggtgcatgcctgtaatctcagctacttgggaggctgaggcaggaggatcacttgaacctgggaggcagaggttgcagtgagctgagattgtgccactgcattccagtctgggtgacagagggagacttcatctcaaaaaaaaaataataatggtgatatgatttggctctgtatccccacccaaatctcatcaggaattgtaatccccacatgtcaagggagggacctggtggaaggtgattgaatcatggagatggtttccctcatggtattctcatgatagtgagtgagttctcacaagagctgatggttttaaagtgtggcacttccttgctctctctctctctttcctgttaccttgtgaagacgtgccttgtttccccttcatcttctgccgtgattataagtttcctggggcctccccagccatccagaactgtgaatcaattaaacctactttctttataaattacccagtctcaggt

SEQ ID NO: 895959 - DNA, 663 bp, Homo sapiens
ccaaaagtatgatttattatgtaaatttaaaggaatgggccgggtgctcaagcctataatctcagcactttgggagaccaaggcgggcggatcacatgaggtcaggagttcgagaccagcctggccaacatgtgaaactccgtctctactaaaaatacaaaaattagctgggcgtgatggtgcatgcctgtaatctcagctacttgggaggctgaggcaggaggatcacttgaacctgggaggcagaggttgcagtgagctgagattgtgccactgcattccagtctgggtgacagagggagacttcatctcaaaaaaaaaataataatggtgatatgatttggctctgtatccccacccaaatctcatcaggaattgtaatccccacatgtcaagggagggacctggtggaaggtgattgaatcatggagatggtttccctcatggtattctcatgatagtgagtgagttctcacaagagctgatggttttaaagtgtggcacttccttgctctctctctstctttcctgttaccttgtgaagacgtgccttgtttccccttcatcttctgccgtgattataagtttcctggggcctccccagccatccagaactgtgaatcaattaaacctactttctttataaattacccagtctcaggt

SEQ ID NO: 895960 - DNA, 612 bp, Homo sapiens
ggatcaggagagcacttcaaaagataaggacttgtacataggatgttaaagcctgctaaacaggtcctcacaggcccaccttttactgcttcctcttgaaataagcctcttctgcccttcccaccctgtcattaccactgtccccaataccacaaagtggaggattgtggaaatcccttaagaaaaagaaaagaagctcattgtctacatcagaaattctctgtaactcccatcctcccacttcctcatgctgcctgactgccttccttatcactctacawcagttggattgtatcaacgtttggcctttcttaaacctcctactctggtgtccaaaggacagatttctgtcccagagcagatatgaatgttacaaggggagtgtttgatagacaaaggaccccatgttacttctgcagttgaaactagcctctgtataaggaattaaaagactatgagaagaaagtaatgatggagacattattctccctattgtcatggatcaatggcatcatctggggattaggccaatggctgctttgaaggaatattttataaagtagacattatcagtgatgaatttgagtgtgagttgaaatggaagtatagtaa

SEQ ID NO: 895961 - DNA, 606 bp, Homo sapiens
cttccacgttgaaattagaaacaatatcagtggcggcttgtacaccttctgtgatatttaaagtaatatcatcctcttccctccaggatcatgggaataatatccttgggcggtgtacgttttctgcgatatatgtggtaatatcatcccctttgccttggaatattatgaaggaccatctcacatggggttgyagaacccttgcgatattgggaatattattatcttctttcccctctgcatatttggataaatatcagagtgggtgtacacctcctgcgatatggggattaatatccttttctttctttctggatattagaaacaatatcacacgggggtttacactttcttccatatctggagtaatgtcatcctctcctgttctgaatggcaagaacaatatctcaggggggatgtacaccccctgccatattggggtaatattacgctgtctcccccttgatattaggaacaaaatcccagcgtgggtgtacacctcctactctatggaaagtaatgcggtcctctcccttcctgcattttagggacaatatcacaggatgggtgtacacagcctgcgatattgaaagtaatatcatcctc

SEQ ID NO: 895962 - DNA, 606 bp, Homo sapiens
cttccacgttgaaattagaaacaatatcagtggcggcttgtacaccttctgtgatatttaaagtaatatcatcctcttccctccaggatcatgggaataatatccttgggcggtgtacgttttctgcgatatatgtggtaatatcatcccctttgccttggaatattatgaaggaccatctcacatggggttgcagaacccttgcgatattgggaatattattatcytctttcccctctgcatatttggataaatatcagagtgggtgtacacctcctgcgatatggggattaatatccttttctttctttctggatattagaaacaatatcacacgggggtttacactttcttccatatctggagtaatgtcatcctctcctgttctgaatggcaagaacaatatctcaggggggatgtacaccccctgccatattggggtaatattacgctgtctcccccttgatattaggaacaaaatcccagcgtgggtgtacacctcctactctatggaaagtaatgcggtcctctcccttcctgcattttagggacaatatcacaggatgggtgtacacagcctgcgatattgaaagtaatatcatcctc

SEQ ID NO: 895963 - DNA, 606 bp, Homo sapiens
cttccacgttgaaattagaaacaatatcagtggcggcttgtacaccttctgtgatatttaaagtaatatcatcctcttccctccaggatcatgggaataatatccttgggcggtgtacgttttctgcgatatatgtggtaatatcatcccctttgccttggaatattatgaaggaccatctcacatggggttgcagaacccttgcgatattgggaatattattatcttctttcccctctgcatatttggataaatatcagagtgggtgtacacctcctgcgatatggggattaatatccttttctttctttctrgatattagaaacaatatcacacgggggtttacactttcttccatatctggagtaatgtcatcctctcctgttctgaatggcaagaacaatatctcaggggggatgtacaccccctgccatattggggtaatattacgctgtctcccccttgatattaggaacaaaatcccagcgtgggtgtacacctcctactctatggaaagtaatgcggtcctctcccttcctgcattttagggacaatatcacaggatgggtgtacacagcctgcgatattgaaagtaatatcatcctc

SEQ ID NO: 895964 - DNA, 651 bp, Homo sapiens
cacctaaatcacaaatacagtgagttagttttttttgcataagaatgaaagtagtaagtgtgtacttttacgtgtgtattttcctctaaatgtgttctatataagaactgaaatttttaattaaaatttatttcccctattaggctgggcgcagtggctcacgcctgtaatcccagcactttgggaggctgaggcgggcggatcacctgaggtcaggagttcgagaccagcctggccaacatggtgaaactctgtctctgctaaaaatacaaaaattagccaggcctggtggcacacgcctgtaatcccagctactcgggaggctgaggcaggagaatcacttgaacccaggaggcagaggttacagtgagccgagattgcgccactgcactccagcctgggtgacagagcaagactgtytcaaaaaaaaaaaaaaaattatttcccctatttactattttaaattcccaatctgtatgatttagaatttccatgcattaaaagaaacagcaatgtttttaagaacaagggaatggcaaagacttacagtggtgttgtgaaaaaaaaaaaaagtatttgatgaactgaatatttgcacatgttacttgagagttttctcactgcttattaaatgaaatacatcctactgaa

SEQ ID NO: 895965 - DNA, 562 bp, Homo sapiens
acttcagcattcctcctcctttctcacccccacaccagattcaaaacgtatagatgacagctgcattcaaaagttatgaaagccaacaggcttttctctcattttacctacaaattcaatccattcaatttgattgatcaaccactagtgcaacacttcagactcaaaggatagccagacactcacaaaactgtaccacttctgtcagatttggaggcatgatctatggtgccaagcagctggttgtccagttaaaaaaaaaccctaatagaaatgtctgctccattattaatttactaattcactctacattgatcttcgtgktcactgagacagttgctgagcatctactctatgctgtctgcatattatgatttgctgagtatctgctcaatgttgggtattgcagccggtgctctcagggacacaatggatgtgaggattcactgtacctaaatgatttagactctaaacatcactgtgtaatcgtcacaataaaagaggggactcctgtaatttaatgaaggtttgtgttgcttttggagtatttaccctctgtatc

SEQ ID NO: 895966 - DNA, 566 bp, Homo sapiens
ttcctctccctgtgtccatgtgttcagctcattgttcagctcccacttatgagtgagaacatgcggtgtttggttttctgttcctgtgttagtttgctgaggatgatggtttccagcttcatccatgtccctgcaaaggacatgaactcattcttttttatggctgcayggtattccatggtgtatatgtgccacattttctttattcattcagtcatcgaagggcatttgggctggttccaagtctttgctattgtaaatagtgctgcaataaacacacatgtgcatgtgtctttatagtagaatgatttataattctttgggtctatacccagtaatgggattgccaggtcaaatggtatttctggttctagatccttgaggaattgccacactgtcttccacaatggttgaactagttcacactcccaataacagtgtaaaagcgttcctatttctctgcatccttgacagcatctgttgtttccagactttttaatgatcacattctaactggcgtaagattgtatctcactgtggttttgatttgcatttctctaatgacc

SEQ ID NO: 895967 - DNA, 566 bp, Homo sapiens
ttcctctccctgtgtccatgtgttcagctcattgttcagctcccacttatgagtgagaacatgcggtgtttggttttctgttcctgtgttagtttgctgaggatgatggtttccagcttcatccatgtccctgcaaaggacatgaactcattcttttttatggctgcacggtattccatggtgtatatgtgccacattttctttattcattcagtcatcgaagggcatttgggctggttccaagtctttgctattgtaaatagtgctgcaataaacacacatgtgcatgtgtctttatagtagaatgatttataattctttgggtctatacccagtaatgggattgccrggtcaaatggtatttctggttctagatccttgaggaattgccacactgtcttccacaatggttgaactagttcacactcccaataacagtgtaaaagcgttcctatttctctgcatccttgacagcatctgttgtttccagactttttaatgatcacattctaactggcgtaagattgtatctcactgtggttttgatttgcatttctctaatgacc

SEQ ID NO: 895968 - DNA, 620 bp, Homo sapiens
cacgatttcctgtggtcctatcctcccagcacatgctaactctgacacctgaactcactctctcatctctcgtgcgctctacctctatacacacacacacacacacacatcatcatcatcatcatcatctgcaaatggtccattaggagacaatcttggaagtttaaatggtgaggcaaagtgtatggcttcccaagattatttctgaagttggagggaggagacaagagtactcacatacattgcttccgagcatgtaaattgacatagccattttttagaatcattgagaacaattcastcataaataattgaataaatatatatgtgcacataaatatatatgcacactttttatataagagaaatcataatgcagatgcagtttaatatccgtttcattttagttaaagtcattaacataaagctatgcatgtcatcatgctataattttatgtagatctgcagtgatgactttcttttattcttgacattgttcatttatgtgctaattgtgtggagtgtggaggggaaactttgattaggacagaaaggagcatacggcagccacagccaggagagtccatccacaactgctctgttcttttccttgggccttg

SEQ ID NO: 895969 - DNA, 620 bp, Homo sapiens
cacgatttcctgtggtcctatcctcccagcacatgctaactctgacacctgaactcactctctcatctctcgtgcgctctacctctatacacacacacacacacacacatcatcatcatcatcatcatctgcaaatggtccattaggagacaatcttggaagtttaaatggtgaggcaaagtgtatggcttcccaagattatttctgaagttggagggaggagacaagagtactcacatacattgcttccgagcatgtaaattgacatagccattttttagaatcattgagaacaattcactcataaataattgaataaatatatatgtgcacataaatatatatgcacactttttatataagagaaatcataatgcagatgsagtttaatatccgtttcattttagttaaagtcattaacataaagctatgcatgtcatcatgctataattttatgtagatctgcagtgatgactttcttttattcttgacattgttcatttatgtgctaattgtgtggagtgtggaggggaaactttgattaggacagaaaggagcatacggcagccacagccaggagagtccatccacaactgctctgttcttttccttgggccttg

SEQ ID NO: 895970 - DNA, 548 bp, Homo sapiens
cataactaactgttaaataaaggagtgctagagatatgtactattatcaatgtggatgccactactctctatttttattgttccttttttaataatacacattcatacccaaacatagcatttatttgtgctattttaataatattgtgcatccttgttgaaacccaggtagatgcaattattagttgatttatatgtctagacaataaaagtgttaatttgaaaattcctataactgaatttagctctgttgagcttgaatgacttttgtaaggtattttttgttttgagacaagctctaactttgttgtccagactgaagtgcagtggggtgatcatggatcactacaccctagacctccggggctyaagtgattcttcccattttagcctcctgagtagctgggactacaggcctcaaatgatcctctcatctcagcatcccaaagtgttgggattataggaataaactaccgagcctggcctctaagaaaatgtttttaaagggataaaatgttgaagaataaacacactgcaagcttctaaaa

SEQ ID NO: 895971 - DNA, 628 bp, Homo sapiens
gtgtctggcgtatgctggaaagtggggtcacagtggtgatcttcggaaggcactggaaaaaataaggaggtcacgggctccgagagagaccacacagtgtgatgggccgtggaggagggcactcagaagctgtatctgcccacctgcggtgaggggaggagaggggaggcttcctggtgaaggtgatacctggaggacagggggaagtcagcctctgtgagtgtgtgtgtgtgtgtgtgtgtgtgtgtgtgtgtgygcataagtgtgcatgcatgttggatgtaagtgggtagaacgtgaagattctagacagaaggtacccttgtgagatggtttaggggagagacaggatgggtggggaagtccctacttgaaaggcctctccctacacccaccccccgcttctctttttgacaaaactcaaggctttcttggccagaaagtgacataaggcaacctgagtcagtagacatggccgggtggctgagggaattatggtgggagatgcttttgcagatggaggcatgcattttcctagccacagccttctccttctctgcttttctccaaggacccctggactctcagaggtggttctgcatccctggcttgcctagaaattgcacca

SEQ ID NO: 895972 - DNA, 628 bp, Homo sapiens
gtgtctggcgtatgctggaaagtggggtcacagtggtgatcttcggaaggcactggaaaaaataaggaggtcacgggctccgagagagaccacacagtgtgatgggccgtggaggagggcactcagaagctgtatctgcccacctgcggtgaggggaggagaggggaggcttcctggtgaaggtgatacctggaggacagggggaagtcagcctctgtgagtgtgtgtgtgtgtgtgtgtgtgtgtgtgtgtgtgtgcataagtgtgcatgcatgttggatgtaagtgggtagaacgtgaagattctagacagaaggtacccttgtgagatggtttaggggagagacaggatgggtggggaagtccctacttgaaargcctctccctacacccaccccccgcttctctttttgacaaaactcaaggctttcttggccagaaagtgacataaggcaacctgagtcagtagacatggccgggtggctgagggaattatggtgggagatgcttttgcagatggaggcatgcattttcctagccacagccttctccttctctgcttttctccaaggacccctggactctcagaggtggttctgcatccctggcttgcctagaaattgcacca

SEQ ID NO: 895973 - DNA, 628 bp, Homo sapiens
gtgtctggcgtatgctggaaagtggggtcacagtggtgatcttcggaaggcactggaaaaaataaggaggtcacgggctccgagagagaccacacagtgtgatgggccgtggaggagggcactcagaagctgtatctgcccacctgcggtgaggggaggagaggggaggcttcctggtgaaggtgatacctggaggacagggggaagtcagcctctgtgagtgtgtgtgtgtgtgtgtgtgtgtgtgtgtgtgtgtgcataagtgtgcatgcatgttggatgtaagtgggtagaacgtgaagattctagacagaaggtacccttgtgagatggtttaggggagagacaggatgggtggggaagtccctacttgaaagrcctctccctacacccaccccccgcttctctttttgacaaaactcaaggctttcttggccagaaagtgacataaggcaacctgagtcagtagacatggccgggtggctgagggaattatggtgggagatgcttttgcagatggaggcatgcattttcctagccacagccttctccttctctgcttttctccaaggacccctggactctcagaggtggttctgcatccctggcttgcctagaaattgcacca

SEQ ID NO: 895974 - DNA, 626 bp, Homo sapiens
gatcggctacaaacttctacaaatgacatcatgttatagatgaagaaaccaaggccagggtgacttacccaaatcccccagagagtagtggaagagccaagagctgatgctgggtttaggggacctgaaggacaccctggcggagatgtgtctgaactctggagtgaggtcagggctggaccctgggggctttgtcatcagagaagtcaaggagttgatctcgtcaagtcgtgggcatggctgagctcagggagccgggatgcaggagaaccttgaggatgaacccttgaggaagatygctggctggggcctgggaaaataattacacttgtttgttgaacagtgtgctgggttctgtgtgcacagcatcgcactttgattcttgtatccccttaagaggtaggcaaaaccctctcttttttactaatgatggaagaacaaggctcagagagattgggcaacttgcctaagatcacagaatggaggtaggatttcagccccggttctctgactccaaagcacttgctcctttctaccacactatcctgcttccagaataagaccggaagacgggagcagcacctactgtgggtgaattctcaggagcccagatggccttcctcttt

SEQ ID NO: 895975 - DNA, 567 bp, Homo sapiens
tggcccaagggaccatcatgtgacctagttggagccaatccactttcttccctgaaatctgctatttggataatagggagaaaggacatctactgcttttggatcaaggtctataaggatgtgggctcagccccatcaagggtatcttccatgttccctgaaggacctggactctgggaggtcacacccgaacaggccagggtgcacggagcccacacacacctacacattcacacccatcaggacacagtgtctggcggagaaattggcccaggccacagctgttatcaggtgtcaccgtctttattgacaagagctagagacagaagcagcaaagggtttcctaactggcctcccagggaccmttctaggacattactctcctgtcctaggcagcaagaaggcaggatcagccagagaaggccagaaggccagggcatccttcctcccttggaccctcagatcttcctcaagaaaccccagaccaagtcccagggccgggcctccagcctccatctccacacaaaatgtggttttgtaaacttccttctcttctgatggtcccac

SEQ ID NO: 895976 - DNA, 640 bp, Homo sapiens
cttgacttccgcccgcccctcctccgatcagatacaaagcagaagtgaacagggctggggcaggcgagggcagataaggagccatgcatcagaatcagctgaggctggtggacaaatgggcccgcccccacctagatgggtcacagccaaagtcggggccacagggcccaggccaggagagctgagtctctcaaagccttgggctgctcctctgtagaatgggaaggctggacaggaggcccccttccagctagaacatgcyccagggtgagcctgtaggctggaccctaagatgtggctgctggcaggcatgacagattgacaaattggacctgtccttttattttgtgtttttttaagagacagcgtcttgctctgtcacccaggctgactgcagtggcaccattatagctcactgcagcctcaaactcccgggctcaggcgattctcccacctcagcctccccagtagctgggactgcaggcgcatatgccaccactcctggcttaaaaaaatttttttatagacataggttctcgctatgatgcttaggctggtctcaagctcctggcctcaagcaatcctcccatcttggcctctcaaaatgctaggactacaggcatgagccactgcacctggc

SEQ ID NO: 895977 - DNA, 640 bp, Homo sapiens
cttgacttccgcccgcccctcctccgatcagatacaaagcagaagtgaacagggctggggcaggcgagggcagataaggagccatgcatcagaatcagctgaggctggtggacaaatgggcccgcccccacctagatgggtcacagccaaagtcggggccacagggcccaggccaggagagctgagtctctcaaagccttgggctgctcctctgtagaatgggaaggctggacaggaggcccccttccagctagaacatgctccagggtgagcctgtaggctggaccctaagatgtggctgctggcaggcatgacagattgacaaattggacctgtccttttattttgtgtttttttaagagacagcgtcttgctctgtcacccaggcygactgcagtggcaccattatagctcactgcagcctcaaactcccgggctcaggcgattctcccacctcagcctccccagtagctgggactgcaggcgcatatgccaccactcctggcttaaaaaaatttttttatagacataggttctcgctatgatgcttaggctggtctcaagctcctggcctcaagcaatcctcccatcttggcctctcaaaatgctaggactacaggcatgagccactgcacctggc

SEQ ID NO: 895978 - DNA, 669 bp, Homo sapiens
acgctgtgctgagactgtgggtcagagaggccaggtgtgccccgtgaccaccctggggcttcctccctcacaggccacctgaggactttgttctggatacttctctatgcccctttctttttccatccactgctagtccacggggcaacctctgtgttaatttaaataataataataatgtattaaatgcagtgcggtaccccagattagaacctggaacagaaaaagaacatttgtggagcttcagtaagacagaaagagtaagttctggtgtcctgttacacagtagggtgactacagcaaatctcaatctcgtgcatatttcaagacagctggaagrgaaggtttcaaatgtcgcaacaaagaaatgataaatattaaaagtgatggatgtgggaattacctggatttgattgatcattatacggtgtatacatgcattggaacatcacattgtaccccataaatatgtacgattattatgtgtcaattacaaattaaaaatttttaatacattttttaaaagaattcatttctagttcttgaagggggaaaaagaaacaagtgtttcatctataaatgcagcttcttgaagcaatttaaacgattaaattagctttaaaaaaaaaagaacatcaggccgggtgtggtggctcacgcctgtaatac

SEQ ID NO: 895979 - DNA, 596 bp, Homo sapiens
tcttatttaaaagtaaactggccatctatgcaaaatccaaatacaatttgtatcagaaaaattatagggttggggtgtgtttatatgataagagagagaggagggggaccattttagtctatgttttcaaggctttacacttcactcaacataactgcagctgaaactttagtttttctaaagtcatggtggggaattccttacagaaagtctcacagcatcttcttttgtgattcacctgtatctctggtattctttgtcatctgatcatctactagtctaaatkaggtttcattcagcacacctccaaggctgttctgacaaacaggcagctgccactacagcatcttcttaaatggctccataaatgaagtaaagagtatggctgttccagtggcctgttttggctcaatggtacaatcttccagctggtgaattccccagtaagtaagcactacaagaacaatttgtttgattgatgcaatgaagcctgaaaattgctatggcacaaagctgcctccagattgggaggaaactttggctagcacagtcccttgaagacataaatgttaaaggccatctaacattttgttttg

SEQ ID NO: 895980 - DNA, 624 bp, Homo sapiens
ttctactgatatttacttataggtactcaggaagcttgaagttcctcccccccacaaccctcctgtaaaaatattatattattggtaatgaacaaagcatgactttgcatttgcaaaagtaaggactaggcattataataaggcaacatttgttatgggtttgcacataactagaaacagcatcgagttgtataaaagttgcattgtcattgccatttttcaaactacaggcttggtggaatgtcggaaaaaaaacatcctggggtttgagtatcagttttcctgccaactcgtcttaaacttcargaaagctccatctatactctgggcatctacttccacaccgataaaatgacagatctaagttacatgacctccaaggcctatggacatgaaagttcttcgaatttagttagtccaccactaatcaaaaagacaatagttttgagggttttcatttgctacatcaaattgaaaaaaaaaaatcatgcagcacaggaatcctgaagccctggggtaagcttcccccttagtgcagaagaggactatatggcagagtggttaagagcatgggctttataactaggaaacttaattgcgaatcttgatccagtagcacattag

SEQ ID NO: 895981 - DNA, 627 bp, Homo sapiens
gaggtcaggagttcaagaccagcctggccaatatgatgaaaccccatctctaataaaaatacaaaaattagccaggtgagatggcacacacctgtagtcccagctactcagcaggctgaggcagaagaatcgcttgaacccgggaggcggaggttgcagtgagctgagatcatgccactacactccagcctgggtgacagagtgagactctgtctcaaataaataaataaataaataaataaataaataaataaataataaataaataaatcatagcatgaatgtgagcataagaaaaaaaatgaaaaaaaaatctccaatgaggttgtggcctagtcctttgcaaagacattgaaatttggtgtcctggtgactttctacatagttcctagggagtaaagaacatgtcttctacacacataccctcaagagctcattaattgcactgctgggtagaaacacatgcatacacctgaaaatctatcrcttatggtgctctaataatacctgagttttgaagctcaggagaagtccaaagcagagacttgcaggtacctagtggtccaatggagtgattgtgcaccaaggctttgaagccaagaagaattgggttcaaatcattgactt

SEQ ID NO: 895982 - DNA, 583 bp, Homo sapiens
taccgccaaagcacatttcaagccttttcttacatcatctactaacttcccattgcccaaagcaaatcacaaggccaagcccctcagtaatggggtcagggagtatgccacattcagggaggatgactcagcccasggtgttcttgtgggaatggtgagagatagagagagaatataaatgcctgcagtacaggcaggtaacatgcaagggtgtaagtgggccaagacgaaaggcaataaggagaggtagggcgtgtggaactgtgagaccatgccttcaactccaactgattgttgctagatcgtatctttcaagagatgctgacatgaggatctctataaagaaagcttcctctgtcttaaatcaatgagcaggacaacagaacaagctgatgggccacatttcctcgagccctgctcttcaccacattacctgtccctaaggttcttgttggtctttctgtgactgaggatctcagtgtgagtccctagaaatattcacaagactcagatcatggcaacaggtgaaatggcagccctgccacatcctgagttgacagtatgtagcaggtgtcctaagatt

SEQ ID NO: 895983 - DNA, 583 bp, Homo sapiens
taccgccaaagcacatttcaagccttttcttacatcatctactaacttcccattgcccaaagcaaatcacaaggccaagcccctcagtaatggggtcagggagtatgccacattcagggaggatgactcagcccagggtgttcttgtgggaatggtgrgagatagagagagaatataaatgcctgcagtacaggcaggtaacatgcaagggtgtaagtgggccaagacgaaaggcaataaggagaggtagggcgtgtggaactgtgagaccatgccttcaactccaactgattgttgctagatcgtatctttcaagagatgctgacatgaggatctctataaagaaagcttcctctgtcttaaatcaatgagcaggacaacagaacaagctgatgggccacatttcctcgagccctgctcttcaccacattacctgtccctaaggttcttgttggtctttctgtgactgaggatctcagtgtgagtccctagaaatattcacaagactcagatcatggcaacaggtgaaatggcagccctgccacatcctgagttgacagtatgtagcaggtgtcctaagatt

SEQ ID NO: 895984 - DNA, 630 bp, Homo sapiens
tgagaattatttaatgttgacaactctttgacgtgggaactgttatcatctctagtctatagaggaatctgaaattaaagtgccaagtcatacagttgtgactactaagcagagacaggacttgaaccccagcagagtatcatggatggggacccaggctcctaaacagcacacactgctgcctatggtaataatgtacctacatggtgctgggaaaggctgtttatggagaagatggacaggacctgtctccctgagacttgtcaacagtgactcactctaacaaacatcagtaaaaatcatgtagttatcaactgatgagcacggcttctctaccagagagtgtatccccaaagcaggagagaccatgaaagggaatgagttggggaaggaggaaccacatggggtgtgctagctaccgaactagccaccatcaggaacaaccagttcctcgatcttgcrggcccatcctctacaaatgcatcttgggatgctttaccaggaggtgggagaggagtagggaagaagaatttaccccttgactcctacaacccatgggttaagagttcatcctggggtgaagtgggtagagaaaaacaacactttcaagtctcaaggtgcctgacactt

SEQ ID NO: 895985 - DNA, 629 bp, Homo sapiens
gaagtcaggcgcctttgggatttcacaggctggagaccccatgcatttttctaattccaataggataagcctcagaggcccttaatgcaagatgggttttgagtgtttccaagcttcctgagaaagataaagcctgccttcttcatcagaattattcaactgtggtgtaactgcttagcaagggaatggggagggcttataggactcctgtagctcctcctacccaccctgaagatttgcttgtggctaatactaccctgagcacaccacattttctttcttggcctctccacatcttatcttcccaagactggcttcccatgcctcaaaccgcacattgcagacaactccctttcctcaaccctcctgagaagcacctcttccctattccyttactcacgaattccaattttctcaatgagacctgctcctggtagaggccaggaaagcaatcaatcccaggaaactaatttgagccattgacatactccaaggctgttttctttttaaaaaggagtgttgcctgagttctggtctcagctttgccacttattatgtgtgagcttaagcaagcctcctggccttagtagctgcaggttactcatcagtaaaacagagataataccaac

SEQ ID NO: 895986 - DNA, 644 bp, Homo sapiens
ggtggccttgcctcaggttgcaggtctgccgggtggcgggtatggttgtggctcatgtgtctttcactttcctggaaaggcaggctctccagcaaacccagcccttctctaggcaatggcagaaggactgagtgaaaacacacacgtgcacatgcacacgtgcatgcacacgatgcttctccaggctcaggactcggcccgttactctcacccacatcccattggctaaggcaaatcacatggccatgcccacatcaatgggatatgggaagagaccccacctctagcaggaataactccaaagtcccccrgcaaagggcatggatatagaagagacgaaatattggacacaattgtgcagcctaccacagcaaccctgccagtccacctggtgggaactcagacgtccctgggcactgacctctctctccaccgccctctccacagctgttgcgtcccgctccttcaggatgtctgttgtgagccaccagcttgcatttaggatgctggaaggaagcagacactccggccaactttggaatgtccactcttcatgggaagcataaggcccccaacccctttcctatcaaagccagagggggtagcatggcctccctcaaacagcatcacctctctgcctgcaa

SEQ ID NO: 895987 - DNA, 615 bp, Homo sapiens
ttcaagggctggcctgaaatgagacttgtctccagaaagtggccagtaagtgaaattggatttagttattaaaatatattcttcttcatgctagaccacaaaaggatatttacccctatctttctagctttgtactcattgtgactttagaaatgtcaagataggaattgagggttcacttcaaatataccatcacatttgaaatctctattttgctttgccagtggcaagttgatactaaacttttaaaatatattaaatatatatttatgtattacttattttattgtatttttttctagagacgggctctcactctgtcacccaaactggagtacagtggcacaatcatagctcactgtagcctcaacctcctgggctcaagtgatcctcccacctyggcttcccaagtagctgggactacaagtgcacaccaccatacctagatatttttttgttgttgtttttggtagagatggtttctcattatgttgcccaggctagtcttgaactcctgggcttgagtgatcctcctgcctaggcctcccaaagtcgtggaataataggcatgagccgccacattcagcctatttttaaaaatattttagaaacaag

SEQ ID NO: 895988 - DNA, 585 bp, Homo sapiens
caccttatcacatcgatggaaacaggcacaaagaaatctagggatgctaccactaaaacggatggcttaaaatgcccactgacttcaccaggcgcagtggctcacacctgtaatcccagcactttgggaggccgaggcgggtggataacctgaggtcaggagttcgagaccagcctggccaacgtggtgaaaccccgtttctactaaaatacaaaaattagccgggcgtggtggcaggcgcctgtaatcccagctactcgggaggctgaggcaggagaatcgcttgaacctgggaggcggaggttgcagtgagtcgagatcacgccattgcactccagcctgggcggcaagagcaaaaaactccgtytaaaaaaaaaaaaaaaaaaaaaaacccactgatttctggtggaaaagcaaaagccataaatgagatgcaggagttaaagaatgcttttgttaactttaagtgttacctaaaagagaaaactgagttgactttagatggcatttttctagaagtgttgtctgatttaactcaggccaaacccactctttcctctgttacagctgaagtttgggttgacc

SEQ ID NO: 895989 - DNA, 667 bp, Homo sapiens
tttaactccaattttatggataagtacactgaggttcagcaagtttaagtgatttgcccaagcacatagctagacaggaggtagaaccaaaaatcagattcacccctgcatttctcctaatcctgggggttgtttttaattgttttttcataatgctgatgtaaaactggggccaagtcctgaaaaagttcatgatcagtgaagtcgacctgaaatgctgagagcaggtagcagttacatgagtagtacagcttgtaagagtcacacaggctataagaagaaatactgcctgcaaggtcacacagcttgtcagtgacaaaggcaggactgtcaccaaaatgtatgagatgtcaaagcatgtgcctgatggtttattacagaggtaagactctggctgagccttgagggacatgcaatgtttggaatggaggagaagaggaggtgagagaggtggatgggtgggcgaccaaaacaatcacaaagtgagtgagagtttcttttccttatttggccaccaaccctcwtttcttcctccttcaattacctttcaccagctgtgtttctcctgcacttggctcccatgcttttgcctaggctaatgcttcctcctggaatgcctacccaactcaatcccacccgcttgtcaaggtcagcctagcgtctacta

SEQ ID NO: 895990 - DNA, 591 bp, Homo sapiens
gatgagagggttgatatttgcatagagacttgaacgaaacaaaggagggatgcacacagacactagggatgcaaatcctgctgggtgtgctcaagaaacagcagagaaggggcacacctggggcaaggtgaacaggaggaagagtgggaagagacggtggcagagggaacagaagcctcactatccctgaccagaatataccactctttgccctccacattctcgccatgacccccaggacatttgtttttacatctcccattctgcctcaagtcgcactctggtcaattgtgaacatatcagtcccgcagtagactgtagcccagtgaagctaagggcyttgttctcatcagcactgtagcccttgcacccagcactgaatgccctcgtagctcagactagcaacagtcagtgtggaaaagagcacagcacaacccagtggggatggggaggaagacgtctaggaaggagcagagcatggagtcagcccccttggcatcctgtggtctaatacaccttatctgcaggagctcaacaacttaggccaatgggtctgatcccttgcatgtgtgatactcagagccagtgagt

SEQ ID NO: 895991 - DNA, 652 bp, Homo sapiens
aaaaagtcacagtgtcaacttgatttttgattggttttaatctcacagtaccttttctggagtagggttataccccacagtagctgcaaattctgcagagccccaattctactgatcaggatgaaaagaaagaaggctgctgcctccacagaagcccagtaactatgactcgactcttgaatatatctcctatcatttattgtttttctacattaggcaataaaatttgtagtaacactgagtttctaaggctttttgatgaagggcacaagctttggagttggatccttctagatgcaaatccagctctgataaaactagccatgtgaaccaattgaaaaaaatttcctcaaacctcagtttctttatctgtaaaatgatgacagtagtgcctgcctcagagggttattgtgaagacagaataggtactatatagaaagcayctctcacaatgtttggcatataataaatctttaataagtgctgactcttgttattgtaaactgtagttggaaagcatctcctttgtgaacagatgtgttatgttactgtgcaagataccacccccttctatgcattggatcaagatcctgtcaagaagttctgcaagatgcagatataatgaagagaatgcaagacccagaatggcaga

SEQ ID NO: 895992 - DNA, 439 bp, Homo sapiens
cgtacccatccttatggagtttatatttaaagaggctgagatagagaagacagaaagtgctaatgcaggatgagaggatggagagtaggtatatagctaaaggtggcctctgcaaccactttgcagtggcgtcatttgagcaggaaactgcatgaagtgatagagccatgtaacagtctgaagaagtgtccctgggagaggrgacacagaataaggcagcagaagcttgggtgcatggccacagcatggagcaagtgtggctaccacagagtgtgctggaggggaatgctgggtgctgagaccggacaggaagccagggcctgacttgtagagctcttactaactcatggtaagaaatttgggaatttggaaaaaggaacacaggtgagcatgttcacatgtaactggattttagccaacagtttctctgtgatctcag

SEQ ID NO: 895993 - DNA, 581 bp, Homo sapiens
aatttaaaaatatatataacaaagcaaaaaaaaaagacaaacaaaaattccacccagagccatgcaatgaaaccacagtggaaggacaagaagaggtcatggaggatgttaaaagatacaaaactgtggtcagaaattcgctaatatgtaaggagggacttcaggggacaaataagtacsctgagacttcaaaatcccatctggttgattgagaaaaatggattagagaggggtaagaaaggaagaggagacatcataatagtttcaaatgagacagtaatttttttcttctgtttccttttttaaaattttgtattccgtatgtttaagatgtacaacatgatgttttgaaatatgcatatatggtgaaatgattagtacagttaagcaaattaatcgatctacctgtcactttccacagttaccttgtgtgagtgtgatcgtgtgtgtgtgtgagtgtgtatgtgataagagcacctaaaatctactttcttagcacgctttcagtacattatgcaatattattaactacagttctcatgctgtgcattaggtctctggactttctcatcatacataac

SEQ ID NO: 895994 - DNA, 581 bp, Homo sapiens
aatttaaaaatatatataacaaagcaaaaaaaaaagacaaacaaaaattccacccagagccatgcaatgaaaccacagtggaaggacaagaagaggtcatggaggatgttaaaagatacaaaactgtggtcagaaattcgctaatatgtaaggagggacttcaggggacaaataagtacgctgagacttcaaaatcccatctggttgattgagaaaaatggattagagaggggtaagaaaggaagaggagacatcataatagtttcaaatgagacagtaatttttttcttctgtttccttttttaaaattttgtattccrtatgtttaagatgtacaacatgatgttttgaaatatgcatatatggtgaaatgattagtacagttaagcaaattaatcgatctacctgtcactttccacagttaccttgtgtgagtgtgatcgtgtgtgtgtgtgagtgtgtatgtgataagagcacctaaaatctactttcttagcacgctttcagtacattatgcaatattattaactacagttctcatgctgtgcattaggtctctggactttctcatcatacataac

SEQ ID NO: 895995 - DNA, 596 bp, Homo sapiens
ttaatagatctggacagaaactttcacataagaaggataagcagcacattccagatgatgcattaaatctgttcagtccctttccattcttcaagggttacttcaaacactaactcttccatgaagtcttcctagatttacccccaaaatgaaataaatctattttcccccgaactccctgaactcctttcatgaaataaatggaagcactaaaataagtccatatgaccattatatcattactattagactcactactattactatgactattggacacattactattatcattactattgtcctgaaagtagggtccatgtctgatacttaggaaatactagaacaaactttttattttatatgaataaagagatgagaaatggcaaagtgaggaccagagtctgggattctatctttttctaggacaycacaccttcttccaccaaaacaaatcttcccaacctcctacctttaggaccccaggctgggtggaattgcttcctaaagatatgcatctaagaaagatatctgcgccaatgtgctctatagctaatgcgtttctctgaacaggtgatgatagtgagcagttctct

SEQ ID NO: 895996 - DNA, 600 bp, Homo sapiens
gtgggggttaggcttgaaaaggagagaaaggcaagatgaggttgatggataggaagaaagtggaaggtcaaagattagagggctccgagaaaagaatgtgaatgagaacggaaatgactggaggttgtggttgggaagtgaggtgttaaaattttaaatttctgcttcaggaaacagcagggccataatggtggatggctgacaytgggtgaggaaaggatccccagagactaggaagcagagggtgtgagagatcagcatgctgatgacttgttgggatcatggaaggacgtggagaaggaggttcaaggtgttgaatgacgtgacagcaggctggctgaggatgcacattctgcagagatgtctgcttaaaccatagccctctgggaacagtgtcccttcttcagtacaggcaatttccaatgagtagctagactgtcaccttctcccagttctgtgtcctgttttggactgatacttgtcttccttaacatggatagctgtcaccataattagggttggaggctgtggttcccagtcaatcaggatcctgccattgacgattttgctagtgctttcctaggcttgcagcctttgcac

SEQ ID NO: 895997 - DNA, 669 bp, Homo sapiens
ttcttccccttgtaaactttcattccagcagggagagacagataaatatagtaaataagtaaattatatagaacataaaatactataaatcacaatgagatattactttacatccattatagtggtgatatcaaagagaaaatgacaagttgtggcgaggatgtggagaagtcaaaaccctcgtacgtcgctggtgggaatgtaaaatggggcagccactttggaaactattttggcagttcctcagaaagttcagcagggagttactatgtgatccagcaattccactcctaggcatatacccaaaagatcgaaaacgtatgtccacataaaaacttctcagaatttaytcataacagcattattcatgttagtcaaaaaggagaaaaaactggaatgttcatccactgatgaatgaataaacaaagtgtaatatatccatacaacctggatatatcctacaacctggatgaaatttgaagacattatgccaagaaagaaggcaggcacaaaatgccacagatgttgtgattcaacttatataaaatgtacagaatagtcagatccataaagacagaaagtaaatcaatggttttcaggagctgagcaaaggaagcattggagagggagtgctagtgggttcagggattctttgggggatgatgaaaa

SEQ ID NO: 895998 - DNA, 669 bp, Homo sapiens
ttcttccccttgtaaactttcattccagcagggagagacagataaatatagtaaataagtaaattatatagaacataaaatactataaatcacaatgagatattactttacatccattatagtggtgatatcaaagagaaaatgacaagttgtggcgaggatgtggagaagtcaaaaccctcgtacgtcgctggtgggaatgtaaaatggggcagccactttggaaactattttggcagttcctcagaaagttcagcagggagttactatgtgatccagcaattccactcctaggcatatacccaaaagatcgaaaacgtatgtccacataaaaacttctcagaatttattcataacwgcattattcatgttagtcaaaaaggagaaaaaactggaatgttcatccactgatgaatgaataaacaaagtgtaatatatccatacaacctggatatatcctacaacctggatgaaatttgaagacattatgccaagaaagaaggcaggcacaaaatgccacagatgttgtgattcaacttatataaaatgtacagaatagtcagatccataaagacagaaagtaaatcaatggttttcaggagctgagcaaaggaagcattggagagggagtgctagtgggttcagggattctttgggggatgatgaaaa

SEQ ID NO: 895999 - DNA, 669 bp, Homo sapiens
ttcttccccttgtaaactttcattccagcagggagagacagataaatatagtaaataagtaaattatatagaacataaaatactataaatcacaatgagatattactttacatccattatagtggtgatatcaaagagaaaatgacaagttgtggcgaggatgtggagaagtcaaaaccctcgtacgtcgctggtgggaatgtaaaatggggcagccactttggaaactattttggcagttcctcagaaagttcagcagggagttactatgtgatccagcaattccactcctaggcatatacccaaaagatcgaaaacgtatgtccacataaaaacttctcagaatttattcataacagcattattcatgttagtcaaaaaggagaaaaaactggaakgttcatccactgatgaatgaataaacaaagtgtaatatatccatacaacctggatatatcctacaacctggatgaaatttgaagacattatgccaagaaagaaggcaggcacaaaatgccacagatgttgtgattcaacttatataaaatgtacagaatagtcagatccataaagacagaaagtaaatcaatggttttcaggagctgagcaaaggaagcattggagagggagtgctagtgggttcagggattctttgggggatgatgaaaa

SEQ ID NO: 896000 - DNA, 623 bp, Homo sapiens
aataaatattggtaaatattggttgtttgttggttgatttgttgactgttttaataaacaaaaacagttcttatgttcttatatcttggcatctaatctgtgctaaaccactgttgacaaattataccacaagactgtacattaaaaagtgtaaatcttctctatcaatcatgcaagccaygtgccctcaactctgggttgtgacaactttcacggtatagtacagaacaggagtttagacagaagctttggagtcaggttcctgagttgtaattctgattctccaactagctctgtaaccaggggtaagatatttgattcctttgtacttcaatacctaactatagaaataaaattatgacacatttcatagggcacttgaaagaatttaatgaagcaatatgtgtaaaattgaaatgtgtttgatacatagcacatgctcaatacaagttagcatagggtgccattatttttattagtatttaaatcacacaaagaaggaagaaacatctgctattcaatttatatgttattgcaggtgaagagaaggcatttaaatgaagatttggaggggaccataaaacttttccaattttctataattctacactgactctcaaaat

SEQ ID NO: 896001 - DNA, 579 bp, Homo sapiens
ttcaccctttgggcagaaatttgggccttgtggggagatacccagtacccttctgtattagtctgttcttacactgctaatgtgtgagatataaagacatacctgagactgggtaatttataaagaaaagaggtttaatkaactcacggttccacatggctggggaggcctcactcatggcagaaggcaaatgagaagcaaagtcatgtcttacatggcagcaggcaagagagcttgtgtaggggaactcccctttataaaaccatcagatctcataagacttattcattatcatgaaaacagcatgggaaagacccacccccatggttcaattacttcccaccaggtccttcccatgacacgtgggaattatgggagctacaattcaagatgagatttggctggggacacagtcaaaccatatcaccttgttttcccagaaaattaaggatctggattgtgtttctgtcagaggattttaatctttcccctgagttatttctctaatcttgtcataattaactggcttgaccacatactttttcatgccttctattaaatgagttagtatgtgatttc

SEQ ID NO: 896002 - DNA, 659 bp, Homo sapiens
ggcataagggacttgccttgtctcggatgagactttggactgaggacttttattttttcatttttttttttgagacagagtctcactctgtcatccaggctggagggcagtggggcaatctcagctcactgcaacctccacctgctaggttcaagtgatcctcctgcctcagcctcccaagtagctgagattacaggcatgtgmcaccacgcctggctattatttgtatttttagtagagacagggtttcaccatgttggccaggctggtctcaaactcctgacctcaggtgatctgcccacctcggcctccgaaactgctgggattgcaggcacgagccaccacacctggccaggactgtggacttttgagttaatgctgaaatgagttgagactttgggggatggtttggaaggcatgaattggttttgaaacgtgaggacatgaagtttgggaggggccaggggtggaatgatatgatttggctgtgtccccacccaaatctcatcttgaattcccatgtgtcatgggagggacacaatgggaggtaattgaatcatgaaggcaggtctttcccatgctgttctcgtgatagtgaataagtctcacaagatctgatggtttcaaaaaatgggagagtccctgcacaagttctctct

SEQ ID NO: 896003 - DNA, 659 bp, Homo sapiens
ggcataagggacttgccttgtctcggatgagactttggactgaggacttttattttttcatttttttttttgagacagagtctcactctgtcatccaggctggagggcagtggggcaatctcagctcactgcaacctccacctgctaggttcaagtgatcctcctgcctcagcctcccaagtagctgagattacaggcatgtgccaccacgcctggctattatttgtatttttagtagagacagggtttcaccatgttggccaggctggtctcaaactcctgacctcaggtgatctgcccacctcggcctccsaaactgctgggattgcaggcacgagccaccacacctggccaggactgtggacttttgagttaatgctgaaatgagttgagactttgggggatggtttggaaggcatgaattggttttgaaacgtgaggacatgaagtttgggaggggccaggggtggaatgatatgatttggctgtgtccccacccaaatctcatcttgaattcccatgtgtcatgggagggacacaatgggaggtaattgaatcatgaaggcaggtctttcccatgctgttctcgtgatagtgaataagtctcacaagatctgatggtttcaaaaaatgggagagtccctgcacaagttctctct

SEQ ID NO: 896004 - DNA, 659 bp, Homo sapiens
ggcataagggacttgccttgtctcggatgagactttggactgaggacttttattttttcatttttttttttgagacagagtctcactctgtcatccaggctggagggcagtggggcaatctcagctcactgcaacctccacctgctaggttcaagtgatcctcctgcctcagcctcccaagtagctgagattacaggcatgtgccaccacgcctggctattatttgtatttttagtagagacagggtttcaccatgttggccaggctggtctcaaactcctgacctcaggtgatctgcccacctcggcctccgaaactgctgggattgcaggcaygagccaccacacctggccaggactgtggacttttgagttaatgctgaaatgagttgagactttgggggatggtttggaaggcatgaattggttttgaaacgtgaggacatgaagtttgggaggggccaggggtggaatgatatgatttggctgtgtccccacccaaatctcatcttgaattcccatgtgtcatgggagggacacaatgggaggtaattgaatcatgaaggcaggtctttcccatgctgttctcgtgatagtgaataagtctcacaagatctgatggtttcaaaaaatgggagagtccctgcacaagttctctct

SEQ ID NO: 896005 - DNA, 516 bp, Homo sapiens
tgaaggagtcattaaagctcttcatgccgccatcctggagatcgtctttgcccacaaatattaacaagtagaacataatatctactgaaatctatggaaaaaattatttacactctgaaaggggtcaagttattctcagaatctctctctctctctctctctctctcwcacacacacacacacacacacacacaccactttgaaattcacataatctatcttccttatatgacaaaaaagaatagctctaaaaactggccttaaagatgcatatgaagggtttgacaaacttcaatgttccttgtagaacttgtagaagttacatatcactgagaagtgttagtgtttgaagaaaaatatggaaaatatgaagacgaagtatatgacctacattttatctgctgcattcatgaagcactcaaaatttatggcaaaataatttttttgtttttaaatatttcttgcctttttatagttacagttatatacgtataaaatacatataatttatatcta

SEQ ID NO: 896006 - DNA, 640 bp, Homo sapiens
attagaacaactctggaagacaattacccataattctggccaaaaagaaagacacctgctcaaccttgccaattggatattgcaaatagaagagattagaaagagtagaagccaaatctagcgaccaagactcttgccttccatatagaattaatatcaaatcattcamattaaatcaggatcattagtacataaacaagagtatgaataacaaaatccattatactgactttcaattaaatcttaaaatttaaaatgaagatgctcatagtcatagtaaaccaataacatactacattgctctatatgttaaaattttcttaatgtcttaactcttcttggtatctgtttctgtttctgcctttctttatcttgatttaattcccagatgtattttgtttgactatccgtatgtttactctttattttctttgattctgttttctatttactatctctcttgtcctatgtctgtttcaatatactgtttattatctttcaacttttcttttataacttcacttcgattttaaaagagtatcacttgagttgaaattagggcctgatttcatgcccaaaaaagtgattgatggcttgtttcaatttgaaggcatgttctaaaagttatggttactgacta

SEQ ID NO: 896007 - DNA, 584 bp, Homo sapiens
atgcctgtacccccattgtatcttggaagtaactaacttgctttttattttacaggctcatagggacttgctttgtctcagatgagactttggacttggacttttgagttaatgctggaatgagttaagactttgagggactgttgggaaggcatgattggttttgaaatggtggtttctcccatgctgttctcgtgacagtgaggaagatctcatgagatattatggttaaaaagtgaaagtttcccctgctcactctctctctctctctctctactgctgccttgtgaagaaggtacttgcttccccttccccttccttcatgattgtaagcttcctgaggcttccccaaatttctctgcaatagaattttttctgkatattgtctatgatgtgaattctccacccctatcctaggaactctaattactctagtatatttcacctcctaagaataatgtgctaagtatcatgtgataagattatagtgctctattcgagaacttcatgaagcatacacaagtatcaatagtcaaattgatcaagtggaagagaggatatcagagattgaagatcaacataat

SEQ ID NO: 896008 - DNA, 641 bp, Homo sapiens
atgatcttatatgtggaaaacacgaatgatactacacatttagaaaacacatttgaaaataataaatcaattagagaatgttgtcagatccaatattaatatgcaaaatcacttacatttctacataataacaaagaacaaacctaaaatgatattagtataggtaaatttaaaaagacaaaaatattagttgttgtataggactggagagagggtgatatgaggagttattgtttaatggatacagaatttcagtttgggaagataatattctggatttggatgaagttgatggttgcayagcaatgtgaatgtacttaataccattgaaccatacacataaaagtggtttaaaatggtgagttttgtgttatgtatattttaccacaatataataaatgtaattaaaagaaaaagagaaaacaatcctacttaaaataacatcaacgagaacataaaatgtctaaaatatttagataatataaaacaagaagaataaaaacttgttcaaaagaggactttgtattgaatctttgataccaactcagccatagtaggacagggcactggatctagatgtgaagcccccattcttggctctaacacttgaacaacatttctagacacaccctgggctggaa

SEQ ID NO: 896009 - DNA, 669 bp, Homo sapiens
gttcagagaacaccaagcaggataaatccccccaaatctatacctaaacatactatattcaaactggagaaaactaaagacaaagagaaaatcttgaaataagccagaaaatcttaggaaaacacccttatctatagaggaacaaagataatgaattataaacatcaggcttcttgccagaaatcatgcaaccaagaggagagtggactgaaatatttgmagtgttgaaatatttcaacagtttaaacctagaatgctaaatccagtattctctgtcagaaataagggagaaataaagactttctcagacaaataaaactgagagactttattaccagcagccctacccttcaagaaatgtaaaaagacattctttagagagaaggaaaatcatacagatctacatcaagaaaagaagggtgtcggagaaggaataaataacggtaaaataacatcttttttttctcactcttagttgatcaatggagtaataataacaaccatgtgttgggtgattaaaagcacacgggtaaatgaatgacagccatgtcatcaggtacagaagggagaaattggaaatacccttttataagtttcctgtacttcccattaagttgtattatgttacttaaaggtgggcttaggctagctctaaatgtatactgtaaa

SEQ ID NO: 896010 - DNA, 538 bp, Homo sapiens
tggggggcggttctctgtgaaatggagccctccatttcggccgctcccgcgtcaggcccaaaataggtgcctgctggtcatcacttctgcgatcatgctttcatctccactcaattacgtcgcctccgcgtacttctgggctgctggtttatcatgtaagaatataatttaaaagtgatccgcccctcactttccatakttagaaaaaaattaagtaaaaagtaatgaatgccacccatctctcgacaatcacacgtaaaaacctttcaattcttcatggaagacgcagagatgagcctggaagtcagggcggctgtagctgacatcaggtctgtactcacattagccagcaaacccaccgtcaggaggccagctcggcttgttaagtggagctggggtgatattgccctgatccacgataatgaattcatattttaaatgcattttcaatttaggatgtattttaaagcaatttgcaatttgtagacaactgtaaatcagagcattaaattaatcacgtaatgaatatggtggagcc

SEQ ID NO: 896011 - DNA, 525 bp, Homo sapiens
agttcttggcaagtctctatgaactcggccaactatgcacaaaagaactggtatcaattttaatgtagttaatatattatgtaagcagtttagcctagttctcttaagagcatggattttaggtttagctgaccactagctctgccacttacttcatgtataccctcagacaaattacatggcctctctaagcctttactttcttatctataaaaatacaaatgataaaacctacttcagagggccattatcagcattaaataaaataatctatgtaaaagtctcagtctggtgccaggtacatagtwagcactcaaaaattagctaatatttacctaccaaaccactaagtattacttacatcaaaagcaatctctactgagcatgacatttttttcacaaaagttcctagagggaattaagaggtcatagaaaacgaattgggttagaacattcatgcactcatcactaccaccatgcagaagttgtgcaatgtgaactccaaagtgtgtaaaggcttcattt

SEQ ID NO: 896012 - DNA, 628 bp, Homo sapiens
gccctggaattgctccagctagcagaataaatcaaggctagaaccagatcagaatttcttacgagatgacagggatctgaaggactttacctctatagtcgttttgcctttttaggcactgggtgacctggtcccatgtccatcctagtgggccctgtatgatccaatccaaaggcccctttaggtttgcgttttatcattccctctttctcagaatttgatgtttgtatgtaaaagcactctggaaaatatttaaatcatggtacaaatataagagaagtcatgcaggtatggaattgctttgagaagtatcattttattaatttgtctggcttgataccaattacctgatgcagttgttaagggcagatccatccakaaacctttgggttctctgctccctgattttgttttgcaaattatataaccatacttcatagaaaacaccagtggtggctatgttgttcacagacacaaagtgattctaaggcaaccacaggagagagacacaaaagaaatcacacaaaaatctctcatcacaacataaatattgtgacaattgtgtggtactttttgtcttttttgttctctctgttccttttttgtcagtacaagtaagtcatcatga

SEQ ID NO: 896013 - DNA, 610 bp, Homo sapiens
aagacccatccttattttagatatgaacttcaattaaatacagtattagggttctctggaggaacagaactaataggatagatgtatatatatgaaagggagttcattaaggagaattgactcacacgatcacgaggtgaagtcccacgataggccatctgcaagctgaggagcaaggaagccagtagtggctcagtttgagtcccacaacctcaaaagtagggaagcagacagtacaaccttcaatctgtggctgaaggcctgagagcccttggtaaaccactggtgtaagtccmagactccaaaagctgaagaatccggagtctgatgttcaggggcaggaagcatccagcacaggagaaagatgaaagctggaagactaggaagtcagctaattccaccttcttcttcctgctttgttctagccacgctggcagccagttggatagtgctcacccagattgagggtgggtctacccataacactctgctgactcaaatgttaatctcctatggcaacaccctcacaaacatatccaggaacaatactttgcatccgtaatccaatcaagttgacacttaatattaaccatcacactgtccatcatca

SEQ ID NO: 896014 - DNA, 610 bp, Homo sapiens
aagacccatccttattttagatatgaacttcaattaaatacagtattagggttctctggaggaacagaactaataggatagatgtatatatatgaaagggagttcattaaggagaattgactcacacgatcacgaggtgaagtcccacgataggccatctgcaagctgaggagcaaggaagccagtagtggctcagtttgagtcccacaacctcaaaagtagggaagcagacagtacaaccttcaatctgtggctgaaggcctgagagcccttggtaaaccactggtgtaagtcccagastccaaaagctgaagaatccggagtctgatgttcaggggcaggaagcatccagcacaggagaaagatgaaagctggaagactaggaagtcagctaattccaccttcttcttcctgctttgttctagccacgctggcagccagttggatagtgctcacccagattgagggtgggtctacccataacactctgctgactcaaatgttaatctcctatggcaacaccctcacaaacatatccaggaacaatactttgcatccgtaatccaatcaagttgacacttaatattaaccatcacactgtccatcatca

SEQ ID NO: 896015 - DNA, 699 bp, Homo sapiens
aatgaaataaactgtgtgccagatgtccctgaaatttacaaagaaccaagaaccaaaaatgacagttagctccgtaagcccaacaaaagaaaaaaaaaaaaaaaaggaaaagagcaaaaaagcaaaagaacaaaagaaccttgagcataaggaagtggctatggttttttctacatgctctagctgggggtggggaaaagtcataaaagcattctatgctggaccggttcgtgttaagtctgagttcctcaatcgctggctctcaggagctgtttggaaaattcrttgccatgcatgagtcgggggattggttttttttccactggaaattgttaatggggactgcattagcggccccttatcgctttgcctgatagagagacagcaggttcgcccaaacaattctggaaccctgatcactgccaattaggggagtattgtctggctgacataatcaagtaagtataaatatatttatcgtgattggaatggggaagggagactgcagaaagattgaggcagaagctgccacccactgcctggctccagcctggatccagcccagtttgtcaccctgtgctcagcagaggcggtcactggctttctgaggtggaatgcacagttgagaattcaggactagaattgcttctcccagagagaaacttgtctcttctcatttttcctcccctcttcttctct

SEQ ID NO: 896016 - DNA, 657 bp, Homo sapiens
atatataacattttctttatccaatctataattgaggagcatctaggttgattccaagtgtttattatggtgaatggtgctgtaataaacagatgcatatgtttttatggtagaacaacttatattccttcgggagtatacacaaaaatgagatttctaggtcaaattgagaaatcaccatagtgctttccacagtgactaaactaatttaccttcccaccagcagtgtataagcattaccttttccctatggcctcaccagaatctattatttcctgttttgattttttgataatagccattctgactggtgtaagatggtatctcattgtggttttaatttgcatttctctggcarttagtgatattgagcttttttcatatgcttgctggatgcatgtatgtcttctttagaaaactgtctgttgatatcctttacccactgtattaggccattctattattgctgtaaggaaatacatgagacagggtaatttatatagaaagctaacttaattggcttatggttctacagattttacagaaagaatggtcttgtcacctgcttggcttctagagaggtctcaggaaacatacaattatggaggaaggaggcatgtaaggtgaccagagcaggaacaagagaaagagagagtg

SEQ ID NO: 896017 - DNA, 671 bp, Homo sapiens
atgatctggaatcagaaaacccacatgatcgcttggtgttctacctctctgtggcaaagttcgtacctaaggtgcaagacaaagtcacctttacttttccctctgttttgtcaagcagaaaaagtctcttgccacagtcaccacagctggaaatgtgctgagtctcacctgaagccagcgagtctcaaagcctcacccaagttcctcgatgtagtagtatcacttctggttattctgggctcaaggggtcttaagtcagcyatgatgaattctagcaaaactaagtctttcctctcaaggcagcagagtgtgttgttccatttttgcccagggtatgtctggaaatgtcatctggttgctagggcctggaaagagaacctcatgaccctcatcattgccctatcctgcttttgctgagctggtatccaagatgcaagacaaagtctcccccattcttccctctccttttctaaagcagaagaaaggagtctcttttggagctggaagctgtgcaacctaggattttggaaatgccagcactcccttagttgctccatctagtgtctcagtaggtcatgtccccccgtctcctggttcttggctcagttcagcactaagactcacctaatgttgcagtcctttggcctagactgcctttcaaatttttttag

SEQ ID NO: 896018 - DNA, 606 bp, Homo sapiens
cggccatactgcccaaagtaatttatagattaagtgatatcccatcaagctaccattgactttcttcccagaaatagaaaaaaactaccagggcagttctcctggataatatcctgaagagtgttttccaacttggctccattctcccccatcactttcaggtacaccagtcaaatgtaggtttggtcttttcacatagtcccatatttcttggaggctttgcttgttccttttcattcttttttctctaatcttagtttcacactttatttcattaagttgatattcaatctctgatatcattttttccgcatgatcratttggctattgatacttgtatatgcttcacgaagttctcatgctgtgtttttcagctccatcaggtcatttatgttcttctctaaacttattattctacttagaaatttctctaaccttttttcaaggttcttagctttcttgcattgcgttagaacatgctcctttagcttggaagagtgtgttattacccaccttctgaagcctacttctgtcaattcgtcaaactcattctccgtccagttttgttcccttgctggtgaggagttgtgatcctttagagcaga

SEQ ID NO: 896019 - DNA, 651 bp, Homo sapiens
tattaactgtttctattcttggttgtcatttttgaagttaattattttgggctccacctcttgccttatttagtcattgctaccttttttttattttttatttttttaatttttgctgttttctaaattgttttgctattgtatcttattaatttttgctttgttaaaatcattattttttcattgggaactataggagaattgaaggagaaatatattgtcagttaccatttttctcttccatttaaaactgaaaatctgaagataggcttttatgtgtcccaagtctagaattattagaacattatgaaacaactttatgytcctgtatctgagtaattttaagatagtttcaatgtaaataataccttacaaactctttttaaattacaaaggtgcataagctaggaaagcatgaaaatttgactcccaaagaaatagtagaaatcttgatcaaacaaaattatataaaaaggataaagtgttcccagtgaatatgttttacacatgcaaataatgatagaagtcttatttaaaggcacacacacaaaaaaactaaaatgtcttccttgggaatcatttctatttatttttcattgttattatattttggtctcatccactagattaccaatatggaagtattaaaat

SEQ ID NO: 896020 - DNA, 554 bp, Homo sapiens
ttgtttaggattactttggctgctcaggcttttttttttttctttgttccaaatgaattttagaaggtttttttctaattcagtaaaaaatgtcattggtagttttgatagatatgccattgaatatgtaaattgctttaagcagtatggccattttaacattaatatattgattctttctatccatgagcatacaatatttttccatttgtttgtgtcatctctgatttttctcagtggtgttttataattmtcattgtaaagatctttcacctctctggttagccatactcctaggtattttaatatttgtgtagttattgtggatgtgatttcattattcatttagctcacaggttggaaattgtcattgctaatgatacttgcacaataatttgcattctcagactttgatgaagttgttaatcagatatcgaaagctgagcagagactatgttgttttctaggtacaaaatcatgtcatttgcaaatagagatagttggactttctgtcttactatttggctgcattttcttttcttttcttcctaatt

SEQ ID NO: 896021 - DNA, 589 bp, Homo sapiens
ctccaccaaaacgcaacataatacatacattcttcttatcatctcatggcacatactttaaattcaacaacataatcaaacaagaaatactcttcagtaaatacaaaataactgaaatcataataaccactctctaggaccaatgctcaataaattagaaattaaaactaagaaattcactcgaaatcatacatratatggaagttggataagctgattttgaatgacttctgggtaaataatgaaatttagacagaaatcaagaaattatttgaacctaatgtgaaaaaaaatacaatataccagaatctctgtgacacatctaagacaatgttaagagggaaatttatagcagtaaatgcccaaataaaaaagttatgacaattttaatttaacaacctaacatcaatggtattcacatggtatcagtgctattcatgtggtatcagtggtaacatcaatggtatacacataagtgtaagaactttaaaaagtacttatttgcagatgacatgatcttataaagagaaaatcctaaagattccaccaaaacactcttagaactgataaacagcatcagtaaagttgc

SEQ ID NO: 896022 - DNA, 623 bp, Homo sapiens
aatattttatatataaaaatagtgttaaggagatatgaaacaagttaaagactctggtaaaaaaatatttttagctatctttatttcacagattattgcctgcatgttggaaataaatattttgaggtaaaaattacagttacattttgcatgtttacttcactgttatagttttgtgacttttgagtagaagatgtttattttgttgctttaagacttattttcctttgaaaatacttaaattatgtttcattcttaattataattttatgtccacttgccaaagcactttccatgagactatatttttagttttataacycaaacactggtaaaatactgtcctcttgatctaactttgttttatgcaacactactagaattaacctattctctgaagtaagagctaccagtaattcattaatagactagtttttgactcatcttcactcaacttagtttcacatggctaccactaagcggcagtgtagcaacattcttctgtgtagtgttgctctcacttattccacttcacattttgtttcctttaagaatgtcaaagttttttattcattctattttttaaatggatgggacaatggtatttctggtcttaatttctg

SEQ ID NO: 896023 - DNA, 681 bp, Homo sapiens
aattttgagtttggtttgctcttgcttttctagttctttaatatgcatcattagattgtttattcgatttttttttcttttttgatgtaggcatttatagatacaaacttccctcttcacacatcttttgctgtatcccataagttttcatattgatgtggtttagatttgtttccccacccaaatctcatgttcaattgtattcttcaataatgaaggtgggtcccatgggcgtgtaattttataaatagctgagaacaatctcttttgtgatattctcataatagagtattcataaggtttgttcatttaaaagtgtgtggtacctccccatggtctctctttcttctgcaccagccatgttagatgtgcctgctttccgtatgccttctgctattgtaagtttattgactgtaagttttctgaggcctccctagaatcaaaagccaatatgctttctctacatcctgaagaacaatgagccaatttawcctcttttttatataaattacacagtgtcaagtatttcattatagttatacaagaacagactaattaaagtatgttgtttttccattatcatttgattcatgatatttttcaattttcttcttaatctcttcattgatccactggtcattcaggagcatattgtttaattttcatttacttgtatagatt

SEQ ID NO: 896024 - DNA, 352 bp, Homo sapiens
ttgtcacatgcgtcttcatgaattcaactgccattaatgtttgcctttaatcaaagaggcttttatgggataaaaagaaattcttataagattttgctaacttttttagaatgcccatacattaaaatacatttgttgtttgyacgttttgtttatttgaggcctttacttatttttttatttttatttccccataaatattgttttatatctaataaattattaatagattaaactggcagactgtgcatatgggttgattaattaaatattcacacttgaataacttccttagcccaatttaaaacccagaacaaaatgtaaaaatattagtttagacatacaacaatat

SEQ ID NO: 896025 - DNA, 352 bp, Homo sapiens
ttgtcacatgcgtcttcatgaattcaactgccattaatgtttgcctttaatcaaagaggcttttatgggataaaaagaaattcttataagattttgctaacttttttagaatgcccatacattaaaatacatttgttgtttgcacrttttgtttatttgaggcctttacttatttttttatttttatttccccataaatattgttttatatctaataaattattaatagattaaactggcagactgtgcatatgggttgattaattaaatattcacacttgaataacttccttagcccaatttaaaacccagaacaaaatgtaaaaatattagtttagacatacaacaatat

SEQ ID NO: 896026 - DNA, 669 bp, Homo sapiens
ttaataattcaattggaaatattaacataaaaataaacaaagctggttaaagaatctcagagttctaagaccagttcttcatattaactcagtcagacaaaaattttaaaaaagaataaaatataaacaaaacttccaagaaatatgggtttatataaacagacaaaacctatgactcaaaggcatctctaagagggaaagacagcaagcaacttggaaaacatatctgagratattgtccacaaaaatttgtcctactttgctagagaggtcagcattaaaattcaggaaatgcagagaacccttgtgagatgctaaccaaggtgtctatctgcaagacacataatcatcagattctccaagataaatgaaaaaaaattaaaggcaactagagataaagggaatgtcacctaaaaaagcaaccccatcaggataacagtggacctctcacagaaaccttgcaaggcagaagagattaggggtctacattcaccattttttaaaaaaagaatttccaaccaagaaacatatccagacaaactaagcttcataagcaaagtaagacaaacaaatgctaagggaatttattaccaccagacctaccttacaagacgtccttaagggagtgaaaaacttggaaacaaaaaaccattaccagccaatgacaaa

SEQ ID NO: 896027 - DNA, 631 bp, Homo sapiens
tatatataaaaataacatgatcacatttaattatacataaaacatcatgaataaaataaaatgaaattacatgatactttcttttggtatttggctttgcatgaattttcatacaagaagacatttatttataacctctgaagatgaaaaccaaattagagtagaccaaaaaactaaacacatgattatatatttataattcaatcagtggtacttaaaatcatattcmtataaagtatcactaatatacaggctgcagttcaaatttaaagtatatgaagaacacttttcaactcatttttaattatcttgactattcaaggccaccaagactatgtacagagctcctatagttcctccactggtatcccacaaacattgtatgtataagatttgattgatgattttagtactgcttcataactacttcacaactagattcatttcctcatacaccctcagtgtactactcaaccagactgtggccagaaatcattgaatattctcccctgaatccactgcttatctttatcaacgaagttaaaagatgagaaatattaaatagaaagagttataaaaaaattctaactataatgtaggccttatcctttaacactttctggcctctagt

SEQ ID NO: 896028 - DNA, 633 bp, Homo sapiens
agacatacatttgcagtctgactcaatgcagtcatagtgatggtggccataggagagcttgtgtcacgccacaccaagctttcattggttttatacgttgtaagaagacataattcatttcccattgtcactaagatacacaattggaaaatgatattatcttcaataaatggtgttgggaaaacaatatccatgtgtacagtaataaaattggaccttttyctttcatcatacacaaaaattaatgcatgtgaagtttacattggttcagactcaaaagattaaacaattcaaagtgagggcttacaggtcataggcagattcaaacattttctgattggccattagttggaaaaatcttatttctgaaactatatgttcacaatggaaaattcctatgtgcatagaactcattttagaaactcaccctaagaatatttaaacgtacaaaattgataaatctgttcacttcagaccattataaatatgttgctattgacaaaatagagaggtaataacgagttagaaactctaatatctatattatcaccaagcagaaaaaagcatctcagttacttggtgttagatgctgccagttccaacctccatctcactaatcaagctctataaaat

SEQ ID NO: 896029 - DNA, 633 bp, Homo sapiens
agacatacatttgcagtctgactcaatgcagtcatagtgatggtggccataggagagcttgtgtcacgccacaccaagctttcattggttttatacgttgtaagaagacataattcatttcccattgtcactaagatacacaattggaaaatgatattatcttcaataaatggtgttgggaaaacaatatccatgtgtacagtaataaaattggaccttttcctttcatcatacacaaaaattaatgcatgtgaagtttacattggttcagactcaaaagattaaacaattcaaagtgagggcttacaggtcataggcagattcaaacattttctgattggccattagttggaaaaatcttatttctgaaactatrtgttcacaatggaaaattcctatgtgcatagaactcattttagaaactcaccctaagaatatttaaacgtacaaaattgataaatctgttcacttcagaccattataaatatgttgctattgacaaaatagagaggtaataacgagttagaaactctaatatctatattatcaccaagcagaaaaaagcatctcagttacttggtgttagatgctgccagttccaacctccatctcactaatcaagctctataaaat

SEQ ID NO: 896030 - DNA, 633 bp, Homo sapiens
agacatacatttgcagtctgactcaatgcagtcatagtgatggtggccataggagagcttgtgtcacgccacaccaagctttcattggttttatacgttgtaagaagacataattcatttcccattgtcactaagatacacaattggaaaatgatattatcttcaataaatggtgttgggaaaacaatatccatgtgtacagtaataaaattggaccttttcctttcatcatacacaaaaattaatgcatgtgaagtttacattggttcagactcaaaagattaaacaattcaaagtgagggcttacaggtcataggcagattcaaacattttctgattggccattagttggaaaaatcttatttctgaaactatatgttcacaatggaaaattcctatgtgcatagaactcattttagaaactcaccctaagaatatttaaacgtacaaaattgataaatctgttcacttcagaccattataaatatgttgctaytgacaaaatagagaggtaataacgagttagaaactctaatatctatattatcaccaagcagaaaaaagcatctcagttacttggtgttagatgctgccagttccaacctccatctcactaatcaagctctataaaat

SEQ ID NO: 896031 - DNA, 651 bp, Homo sapiens
ggcttacaggtcataggcagattcaaacattttctgattggccattagttggaaaaatcttatttctgaaactatatgttcacaatggaaaattcctatgtgcatagaactcattttagaaactcaccctaagaatatttaaacgtacaaaattgataaatctgttcacttcagaccattataaatatgttgctattgacaaaatagagaggtaataacgagttagaaactctaatatctatattatcaccaagcagaaaaaagcatctcagttacttggtgttagatgctgccagttccaacctccatctcrctaatcaagctctataaaattattttctaattaaaatgcttcacattttgaatgatcagaatttcattattagcatatgtgagccaaataacttttggctctgatatttttcagcctttctcaagtttaagaattctaattttcaaatatttaaataataaacaaagctattgtgagaatattaatattatttcttgtcattaacacagaaaagtattatcacacaccaccaataattgtaaagctcaagttctttacattttggtgaatctagatgataaaataacgtggggagcaagatggcagaatagaaggctctatcaatcatcccctggcaa

SEQ ID NO: 896032 - DNA, 651 bp, Homo sapiens
ggcttacaggtcataggcagattcaaacattttctgattggccattagttggaaaaatcttatttctgaaactatatgttcacaatggaaaattcctatgtgcatagaactcattttagaaactcaccctaagaatatttaaacgtacaaaattgataaatctgttcacttcagaccattataaatatgttgctattgacaaaatagagaggtaataacgagttagaaactctaatatctatattatcaccaagcagaaaaaagcatctcagttacttggtgttagatgctgccagttccaacctccatctcactaatcaagctctataaaattaktttctaattaaaatgcttcacattttgaatgatcagaatttcattattagcatatgtgagccaaataacttttggctctgatatttttcagcctttctcaagtttaagaattctaattttcaaatatttaaataataaacaaagctattgtgagaatattaatattatttcttgtcattaacacagaaaagtattatcacacaccaccaataattgtaaagctcaagttctttacattttggtgaatctagatgataaaataacgtggggagcaagatggcagaatagaaggctctatcaatcatcccctggcaa

SEQ ID NO: 896033 - DNA, 637 bp, Homo sapiens
ttatcttcttgaaggcagagacttacaaatatattttagaatttttttgcaaaggagatttgcttcttcttcccaatttattcaagcatttatttacataagtataaatttatgaatatttcttttgtactttgcattataatctgataccattttaatatttcrttgtgcaaattgttccagatttggtgattatgagctaagttggctcttatatcccttcgattcatccctatcaaggtgggattgtttaaaatgacctcctcattttcttgtactaaaagatgctccaagctcattttgcatatttcttgtcccagttctagcatcagtcatttctccaaggaaccctgttttttttttttaccagagaatgtgtttaaaaaccacatctgggtcctaggtatgcttgtagctactgaggtgtttctagcacccaagtctcagagatagacatgttattatttattaaaaacacttttctctctttttcctatagtaatataaattatgatactttctttgcaatagctagaaataggaaagagttcacctgttcttgccagaccctgaaattatctccaagatctaattcccttgccaaccaaattagtttctctgagatcaattttcaagc

SEQ ID NO: 896034 - DNA, 637 bp, Homo sapiens
ttatcttcttgaaggcagagacttacaaatatattttagaatttttttgcaaaggagatttgcttcttcttcccaatttattcaagcatttatttacataagtataaatttatgaatatttcttttgtactttgcattataatctgataccattttaatatttcgttgtgcaaattgttccagatttggtgattatgagctaagttggctctyatatcccttcgattcatccctatcaaggtgggattgtttaaaatgacctcctcattttcttgtactaaaagatgctccaagctcattttgcatatttcttgtcccagttctagcatcagtcatttctccaaggaaccctgttttttttttttaccagagaatgtgtttaaaaaccacatctgggtcctaggtatgcttgtagctactgaggtgtttctagcacccaagtctcagagatagacatgttattatttattaaaaacacttttctctctttttcctatagtaatataaattatgatactttctttgcaatagctagaaataggaaagagttcacctgttcttgccagaccctgaaattatctccaagatctaattcccttgccaaccaaattagtttctctgagatcaattttcaagc

SEQ ID NO: 896035 - DNA, 526 bp, Homo sapiens
ttgttgacccaatgattattcaggagcaggttatttaatttctatgtatttgatatccatttttgttccactgtggtctgagtgcttgatataattttaatttacttaaatttattgagacttgttttgtggctactgcatcatctatgttggagaaagtttcatgcactgatgaatagaatgtatattctgtggttgttgggtagaatgttctgtaaataactgttaagtcatttgttctaaggtatagtttaaattcattgtttctttgttgactttctgtcttgataacttgtctagkgctgtcagtagagattgaagtcccacactattattgtgttactgtctatctcatttcttaggtctagtagtaattgttttataaatttgggagctccagtgttaggtgcacatatattcaggattgtgatattttcctgttggataggcctttcatcgttatttaatatccctcttttttcaactgctgttgctttaaagtttgttttgtctgatacgagaatag

SEQ ID NO: 896036 - DNA, 521 bp, Homo sapiens
aaaaaatcctccagcctttacagaagctacatagaaatctcaaactacagtatgaataataaaaaagtgatacattagttacccaactttgcccctttactgagtagacaacatgtaatctagtcaaatgtattattagatgtactaagctggggaaagaatattataacattactgttgccactggacaaaactcttaatcctgtcatacagttcccatctctgatcattgkcccttctaccatttctattgtcattattctactttgttttacacctagactattgaaatagcttctaataatctttcatttgcaaagttttctccattgattttttcaagttgtagactttgtagtttataaaaaatttccagcacatatttttatttagtattttatggatgaggatgttgctgagagattttgtattactaagaacacatagcttgagaggaacagagttaagacaagaacccaggtccccatacactgaaactagtctgctttctatcaccaata

SEQ ID NO: 896037 - DNA, 603 bp, Homo sapiens
catatattcatcatatttttaaaatatatagtaagctgaatttttaaagtacagacagatcaaacatttctgatttgtcatattgtttttcctttttgatagagtaaaaagaattatgatgagtacaaatcatatgaattggatagttatcttgcacctggcaccactttaccacccttccaacacaaagatctcttttttcttgaacatttctcatctcctaagagctagtcctatttgattcggtcacatgttacggtaaacaggttcatccagactctggctttactcasattgtcctagtttatctccaccaatgaggaaactagtaggacaatgcaattgcagtttgctctatctgcatggttccttttacactgggcagctttcgtggtggttcccaaactccgaaactgtttaagtaattaataagataaagtgggcataaacaagtaaatattcgagttaacagtaaatagcagcagtattctcttaaaggagctagtctttagttgttccagctgcacagcaacaatgtacaagatattcaatcttttactccagagtccaagaattagaaacactatttgttctctttaaaac

SEQ ID NO: 896038 - DNA, 667 bp, Homo sapiens
cttagtatggcaggaaaacagttttgctagaaagatcatttcttcttgtgcttcaagaaggctgaattaaatggtctttgtaatatgttggcattttaagaagcataccatctgaatggtatgaagataacttttagaagcttagaagttcatattctgtagtttgttatcataacttagctagaattaggatagtattgtgctgtctataaaaagaaaatgaactttcaactaaaatatcagaagagatttaagaaagtatgtttgttgaacattgtaaatcaaacaatgcaccattcaacatggtacattggagaggcagccccatccaggtggctataaaacccatcaagatgcaaaaaacaagtggcaacctaytgtaatttagtttagtcctgtaaccacttaggtaaaagggaagggagatttcccatccctcctgttttagatcacttcaggaatcctttagcccaatgggaagcagtatcctagtccttgaccttccaatttgtgctcaatatggacaaatgactttaaattctaagatgactttatatggtctctctggacagtacaacctcccttatgaagaggtagttaggcagagacaggcaaaggactccatatactttgatgtcacagccaaacactaaacacattcgaagta

SEQ ID NO: 896039 - DNA, 645 bp, Homo sapiens
agagtgggtctcagctctttctctgctttgggcaactccatattcttaattgttgtagatattggggttctacagaaaattttacttaaaaacattattttcttcttgaaaaaaaaaagctgaaaaaccccactgctatacaacatgacatctttccattaacacggacaggcaagcctggactgcaattctactgaagtctgacccttctacatctctaggcatctcatcctggtacagctaaaaccacaaagcttcaggtcattctaacaaggataagatgggccatctgaaaatataactgatcttaagtatcacagtgtcrtgtatgctgtctatacatagtcccaaaattcttatccaaaggaaatagcagtgagagtatgcaaaagccctttggaaataagatgtaggcccctaaatcggcccatcaagacagcatctgttcataatcagtaatacttgacatggtgtaccaagaagaaaaaatgagataaaagaatatgaacaataaacacaattcaagtatgaaccatcatcatgggatgcatacacatgcaaaagcaaaacatgtaaaaatatttgataatctcataaaaaggtggagtcaaatcaagagtttttcaggcaagaaatctatctcag

SEQ ID NO: 896040 - DNA, 645 bp, Homo sapiens
agagtgggtctcagctctttctctgctttgggcaactccatattcttaattgttgtagatattggggttctacagaaaattttacttaaaaacattattttcttcttgaaaaaaaaaagctgaaaaaccccactgctatacaacatgacatctttccattaacacggacaggcaagcctggactgcaattctactgaagtctgacccttctacatctctaggcatctcatcctggtacagctaaaaccacaaagcttcaggtcattctaacaaggataagatgggccatctgaaaatataactgatcttaagtatcacagtgtcatgtatgctgtctatacatagtcccaaaattcttatccaaaggaaatagcagtgagmgtatgcaaaagccctttggaaataagatgtaggcccctaaatcggcccatcaagacagcatctgttcataatcagtaatacttgacatggtgtaccaagaagaaaaaatgagataaaagaatatgaacaataaacacaattcaagtatgaaccatcatcatgggatgcatacacatgcaaaagcaaaacatgtaaaaatatttgataatctcataaaaaggtggagtcaaatcaagagtttttcaggcaagaaatctatctcag

SEQ ID NO: 896041 - DNA, 645 bp, Homo sapiens
agagtgggtctcagctctttctctgctttgggcaactccatattcttaattgttgtagatattggggttctacagaaaattttacttaaaaacattattttcttcttgaaaaaaaaaagctgaaaaaccccactgctatacaacatgacatctttccattaacacggacaggcaagcctggactgcaattctactgaagtctgacccttctacatctctaggcatctcatcctggtacagctaaaaccacaaagcttcaggtcattctaacaaggataagatgggccatctgaaaatataactgatcttaagtatcacagtgtcatgtatgctgtctatacatagtcccaaaattcttatccaaaggaaatagcagtgagagtatgcaaaagccctttggaaataagatgtaggcycctaaatcggcccatcaagacagcatctgttcataatcagtaatacttgacatggtgtaccaagaagaaaaaatgagataaaagaatatgaacaataaacacaattcaagtatgaaccatcatcatgggatgcatacacatgcaaaagcaaaacatgtaaaaatatttgataatctcataaaaaggtggagtcaaatcaagagtttttcaggcaagaaatctatctcag

SEQ ID NO: 896042 - DNA, 645 bp, Homo sapiens
agagtgggtctcagctctttctctgctttgggcaactccatattcttaattgttgtagatattggggttctacagaaaattttacttaaaaacattattttcttcttgaaaaaaaaaagctgaaaaaccccactgctatacaacatgacatctttccattaacacggacaggcaagcctggactgcaattctactgaagtctgacccttctacatctctaggcatctcatcctggtacagctaaaaccacaaagcttcaggtcattctaacaaggataagatgggccatctgaaaatataactgatcttaagtatcacagtgtcatgtatgctgtctatacatagtcccaaaattcttatccaaaggaaatagcagtgagagtatgcaaaagccctttggaaataagatgtaggcccctaaatcggcccatcaagacagcatctgttcataatcagtaatacttgacayggtgtaccaagaagaaaaaatgagataaaagaatatgaacaataaacacaattcaagtatgaaccatcatcatgggatgcatacacatgcaaaagcaaaacatgtaaaaatatttgataatctcataaaaaggtggagtcaaatcaagagtttttcaggcaagaaatctatctcag

SEQ ID NO: 896043 - DNA, 656 bp, Homo sapiens
tctttgcctcttctttctgcaagggatgtatgtatcagctaaagatcctcaaatccagcagcccttccctctaggtcagagtgaggatttggctgcttgcctgcccaataaagaaacagaaaaaaacccaaccataataacaatttaagggttagagctgcataagaacaattcagcagtaaaagaatctacatgagcttgtgtggaaagacaagtgctattttctgcttcagtctgtgactggtagaraatcactcaaccctatgattgtattatttatacagaactcactagggcaccatctggtgctaagctaactgcaaaaacaggaaaatcaaacccaaagccaattgtcttcattggagttttcactaatgacctgttctttgccaatattccaactgatcacattctagtttcaaacaggaaaagacatttaatgtttcaaagagaattcttaacgggaatttagttagacatacccttgaaaagtttctgtacctatctagatcttctcagttgaaagggcattgcctctatttcaggtcttattacatcttattaaattgtcagatcaagttcataatgtcccatctcagtacccagtcaccaagagataagggtgagaggtgatcctgcaagattatgtcctggag

SEQ ID NO: 896044 - DNA, 647 bp, Homo sapiens
ttcaaaaactaccatatatcagtagctgtctttccaggactgcaaaatgtggttttagaagtcctaaaatggcttcgacacaggctgctgttgaagtgcagagaaagtcagtgcagaagtgggtgcagggagggtttggcttggaggtcaagaaaggtacctacaggaagtaaattctgtctgaactgagcctcagaaggagtcatttgaatatgaaaaagggagcaagctatgaaggcaaaggtaacagcatttgtgagtggtcaggtccawgagatggcatgttgtgagtggggaatcaaaggtcctagcagatgctgaatgagtgtctgttgggcgtggaagtgtggtacctctctgaatgtaagcctctgtttccctgccccagcaaccttgttttccaggatagattggtttttatatattgctagttctcacctttctggtccctgtgtaattctcattattcattgctttttacaatcctctcagttgagagccatctgtgaagttaatttcagcactgtttactctttcctcctaaatcactaatgaagatgaaacattcaatggaattgagctttgcacccctttctgggaaattccaccgaggcttgctcttgtttcaggtaatcatcttgaaatca

SEQ ID NO: 896045 - DNA, 627 bp, Homo sapiens
taatctagaaagtaaacactatgcagctattccaagtgctcaggaaaacacatcaatgccctcgaggggaaaagggtaaacattttaattgctgtacatggtgacacaaatccatgttgttaatgtaagtggaaggggctgaagcacaaaacgtaattcaaagagtttacttgatccaaaatgaggacagctacctggaagaaacagacccaagtatccttggatatgaactccatttggagctttgcaacaagcagtttcttaaaggcaaaaaagggtccagaagtgggatgatgcaaagaggtttgtcataaattctcattggcttatggaaataacatttattagtgactggytatacactgttacaccattattgggtgtggattatagtgtctggtgtgacattatttgttaatttatagctactgtggcaacagcaagcagcctagatgctcaaagaggagcaggacagaactgctgtctcatttgaatatctctctgggcctgattatttaaaaggacttgcatttctcacatgaaagttattttcttttctcaatgtccataaatgagaataaatagacataaaatagatctttttgaggatgaagtaaatggaataaa

SEQ ID NO: 896046 - DNA, 572 bp, Homo sapiens
cctaatacaggagcaccaagattcaaaaagcaagttcttagagaccttcaaagagatttagactcccagacaataatagtgggatacttcaacaccccactgacaggattagacagattgttgagacagaaaattaacaaagatattcaggacttgaactcaacactggaccaaacggacctgatagatatctacagaactctctacccaaaaacaacagaatatatattcctcccattggcacatggcacatactctaaaattgaccacgtgatcagaagtaaagcacttctcagcaaatgcaaaagaactgaaattgtaacaaacagtctctgggaccacagcaygatcaaattacaaatgaagactaagaaattcattcaaaaccatacaattacatggaaattgaataacctgctcctgaatgacttttggataaataatgaacttaaggcaaaaatcaagaagttttttgaaaactaatgagaacaaagatacaacatatcagaatctctgagacacagctaaggcagtgttagagcgaaatttatagcactaaatgcccatctcga

SEQ ID NO: 896047 - DNA, 656 bp, Homo sapiens
ctcctattcagcatagtattggaagttctggccagggcaatcaggcaagagaaataaataaagggcatccaaataggaagagaggaagtcaaactatccctgttggcagatgacatgatcctatatctagaaaattccatagtctcagccccaragcttcttaagctgataagcaacttcagcaaagtctcaggatacaaaatccatgtgcaaaaattactagcattcctatacacaaacaacagtcaagcctagagctaaattaggaacaaactcccattcacaattgccacagaaagaataaaatacctaggaatacagctaactagggagccaaaagatctctacaaggagaactacaaaccactgctcaaagaaatcagagatgacacaaacaaatggaaaaacattccatactcatggataggaagaatcaatatcgtgaaaatggccatactgcccaaagcaatttatagactcaatgctattcctattaaactaccatggagtttcttcacaaaactataaaaaagtattttaaaattcatatggaaccacaaaaagagcctgaatagccaagcaatcctaaacaagaagaacaaagctggaggcatcatgctgtctaacttcatactatagtacaaggctaaagtaac

SEQ ID NO: 896048 - DNA, 656 bp, Homo sapiens
ctcctattcagcatagtattggaagttctggccagggcaatcaggcaagagaaataaataaagggcatccaaataggaagagaggaagtcaaactatccctgttggcagatgacatgatcctatatctagaaaattccatagtctcagccccaaagcttcttaagctgataagcaacttcagcaaagtctcaggatacaaaatccatgtgcaaaaattactagcattcctatacacmaacaacagtcaagcctagagctaaattaggaacaaactcccattcacaattgccacagaaagaataaaatacctaggaatacagctaactagggagccaaaagatctctacaaggagaactacaaaccactgctcaaagaaatcagagatgacacaaacaaatggaaaaacattccatactcatggataggaagaatcaatatcgtgaaaatggccatactgcccaaagcaatttatagactcaatgctattcctattaaactaccatggagtttcttcacaaaactataaaaaagtattttaaaattcatatggaaccacaaaaagagcctgaatagccaagcaatcctaaacaagaagaacaaagctggaggcatcatgctgtctaacttcatactatagtacaaggctaaagtaac

SEQ ID NO: 896049 - DNA, 656 bp, Homo sapiens
ctcctattcagcatagtattggaagttctggccagggcaatcaggcaagagaaataaataaagggcatccaaataggaagagaggaagtcaaactatccctgttggcagatgacatgatcctatatctagaaaattccatagtctcagccccaaagcttcttaagctgataagcaacttcagcaaagtctcaggatacaaaatccatgtgcaaaaattactagcattcctatacacaaacaacagtcaagcctagagctaaattaggaacaaactcccattcacaattgccacagaaagaataaaatacctaggaatacagctaactagggagccraaagatctctacaaggagaactacaaaccactgctcaaagaaatcagagatgacacaaacaaatggaaaaacattccatactcatggataggaagaatcaatatcgtgaaaatggccatactgcccaaagcaatttatagactcaatgctattcctattaaactaccatggagtttcttcacaaaactataaaaaagtattttaaaattcatatggaaccacaaaaagagcctgaatagccaagcaatcctaaacaagaagaacaaagctggaggcatcatgctgtctaacttcatactatagtacaaggctaaagtaac

SEQ ID NO: 896050 - DNA, 681 bp, Homo sapiens
actgcaatttccgttatttattattatctttatctttatatatatatatatattttttttaaattatactttaagttctgggatacatgagcagaacgtgcaggtttgttacataggtatacacgtgccatggtgatttgctgcactcatcaactcatcatctacattakgtatttctcctaatgctatccctcccctagtgccccagaccctgaaaggccccagcgtgtgatgttcccctttctgtgtccatgtgttctcattgttcaactcccacttgtgagtgagaaaatgcagtgtttggttttctgttcctgcatcagtttgctgagaatgatggtttccagcttcatccttgtccctgaaaaggacatgaagtcattcttttttatggctgcatagtattccatggtgtatatgtgccacattttctttatccagtctatcattgatgggcatttgggtgggttccaagtctttgctattgtgaatagtgctgcaataaacatacgtgtgcatgtgtctttatagtagaataatttataatcctttgggtgtatacccagtaatgcgattgctgggtcaaatggtatttctggttctagatccttgaggagtcatcatactgtcatccacaatggttgaactaatttgcactcccaccaacagtgtaaaagcatt

SEQ ID NO: 896051 - DNA, 472 bp, Homo sapiens
ggtctgtagtgggtcactgcaatttccgttatttattattatctttatctttatatatatatatatattttttttaaattatactttaagttctgggatacatgagcagaacgtgcaggtttgttacataggtatacacgtgccatggtgatttgctgcactcatcaactcatcatctacattatgtatttctcctaatgctatccctcccctagtgccccagaccctgaaaggccccagcgtgtgatgttcccctttctgtgtccatgtgttctcattgttcaactcccactygtgagtgagaaaatgcagtgtttggttttctgttcctgcatcagtttgctgagaatgatggtttccagcttcatccttgtccctgaaaaggacatgaagtcattcttttttatggctgcatagtattccatggtgtatatgtgccacattttctttatccagtctatcattgatgggc

SEQ ID NO: 896052 - DNA, 598 bp, Homo sapiens
gcatgaaagaaggggcttggttttgttgactactatgtctccttccctagaacagagtgtaaaagccaaaaaatgctagatatgttgaatgaatgataaatccaattgcaggtatgtctttcattacacaaaatctgtcttcatgaaaactgtttgtaaataatatgttttaaatattccttaattcttaggagactccttatggtggagcaattctttttacttgtttatttagcaaatactcattgggtgcctgtgatatgccaggcactgttcaaggcatgggaaattaacagtgaaaaaagacatatgtatgccctacccttgtggwgtttaaaatatagcgggaaattgacatgttaaaaaatccttctgagcagtatgaatgcctatttgggatgtttcaatcattgtataatatgtttagttagagtagagtctagctacactaaaataatcacaaccaatgatgggcttttgacatttgggtctgtgttaactagttctgatgtattcagtgggctgaggttattgaggctataggtacaccctcctatatttcccaaagagcctgtctgaatctgaacacacacaaact

SEQ ID NO: 896053 - DNA, 657 bp, Homo sapiens
ctcaatcagatctggtggtgatggcctccctcagattttgtttgtctgggaaagtctttatttctctttcatttttggaagacagttttgattggtgtagttttctaggttagtaggtttttttttttctttttttttccccaacactttgaatatattatttctatccctctggcctcccaagtttctgctgacaaatttgctgatagtcttactgtagctctcttgtacatagtgagtcattttcttctcttgctgtttttttgttgttggttttttgtttttgtttggtttttgttttcttgagacagagtctcactctgttgcctaggctggggtgcaatggtgtgatcttggctcactgcaacctctgccrcccagattcaagtgattctcctgcctcagcctcctgagtagctgggattacaggcacctgccaccacacccagctaatttttttgtatttttagtagagacagggtttcaccatcttggacaggctggtcttgaactcctgacctcgtgatccacccacctcagcctcccaaagtgctgggattacaggcgtgagccactgtgcccagcccaattttcaaacctctttgtaattgactttgaaattttgattacactatgtctcagtgaggacttctttag

SEQ ID NO: 896054 - DNA, 657 bp, Homo sapiens
ctcaatcagatctggtggtgatggcctccctcagattttgtttgtctgggaaagtctttatttctctttcatttttggaagacagttttgattggtgtagttttctaggttagtaggtttttttttttctttttttttccccaacactttgaatatattatttctatccctctggcctcccaagtttctgctgacaaatttgctgatagtcttactgtagctctcttgtacatagtgagtcattttcttctcttgctgtttttttgttgttggttttttgtttttgtttggtttttgttttcttgagacagagtctcactctgttgcctaggctggggtgcaatggtgtgatcttggctcactgcaacctctgccacccagrttcaagtgattctcctgcctcagcctcctgagtagctgggattacaggcacctgccaccacacccagctaatttttttgtatttttagtagagacagggtttcaccatcttggacaggctggtcttgaactcctgacctcgtgatccacccacctcagcctcccaaagtgctgggattacaggcgtgagccactgtgcccagcccaattttcaaacctctttgtaattgactttgaaattttgattacactatgtctcagtgaggacttctttag

SEQ ID NO: 896055 - DNA, 635 bp, Homo sapiens
ttattctgaggattaaatgaggttaatgtaaagaatataacacaatgcttggcacacagtgagttctctacacaataaatcatctctatacctatatgccacaagccatagcatatgaggagatcgtgtccgtaagaaaaaagagaagcagacttacctctgtcccgtccaygttgccttggtgatagaggaaggtgggctgggaattgtgtactgatgctaagtatatataaatacctcaggtagtgtttttattattattgccagctgctggaggcttttatttctatcgccttctcttcttcccaggtgctgcctctttattcttctatctctgatggtaagactgagcctcttggaaagtggcatcattttctctgtattctgtatccagatcgactttggccaaaatgcaaaagctaactaacatcaggcaaaaatctagctaatgccaggtagtaactggaataactagcaagtgagagggttataacaaagttgactttcacacacacactttttcaaacatgctggttcacgaatgtcactggtattgactgtctgtattccacactctcaacaaatcaaaacatgttttgtagagcctgtcaggaggattactctggtattttctg

SEQ ID NO: 896056 - DNA, 611 bp, Homo sapiens
atggcagatagatctccaaagtgagaaaatggagagaaatggcaatgatgaagctgtaatgccttttctttaaaatacaggcgtgcaatgtttaataataaatgggataacaatcatctcaagtatttatcctttgtgttaaaaactatctatccaattatactgttttatttatttttaaatatacaattaaattattattcactacagtcaagctgttgtgctatcaaatatgaggtcttatttattctttctaactcctttttagaacccatgaactatcttcacacctccaaacccaccactcttcccagcttctggtaattatcattttactgtctarttcaataagttcaattgtagtaatttttagctcccaaaagtaagtgagaacatgtgaaggttgtctttctgtgcctggcatatttcacttaacataatgaccaccacgtccattcatgtggttgcaaatgacaggatctcattcttttttatggctgaataatactccattatgtatatgtaccccattttctttatccatttatctgttgatggacacttaggtagcttccaaatcttggaattgtgtaacagtgctgcaacaaaca

SEQ ID NO: 896057 - DNA, 575 bp, Homo sapiens
tacttttgttgtctgtgcttgtattgctcaaaaaatctttgcccagagcaatatcctggagattttccccaaagtttccttgtagtagtttcatagtgtgagtcttacatttaagtctttaatccattttgatttgatttttgtatacagcaagagataggggtctagtttcattcttctgcatatggatatccagttttccctacaccatttattgaagagactgtcctttccccaatgttgttcttggtgactttgttgaaaatgagttcactttagatgtatggatttgtttctaggttctctattctgttccactgatctgtgtgtctgcatttatgccagtaccatgctgttttsgttactatagctttgtattataatttgaagtccagtaatgcaattcctccacttttgctttttgtgctcagtatagctttgggtattctgtgacttttgtggttctacataaattttaggattgtttctctatttctgtgaagaaagttattgctattttgacagggattgcattgaatctgtaaagtgctttgggtagtatggacattttaata

SEQ ID NO: 896058 - DNA, 628 bp, Homo sapiens
caattttatttttaggaatcataaatgggattactttcctgatttcctttccaaatttttgctgttggaatatagaaatgctactgattttttaatgttgattttgtattctacaactttactgaatctgttgatcagttctaagctttttggtggagtctttaggtttttcctaatataagaacatatcatctgaaagctagcataatatgacttctaactttccagtttggatgcccctaatttctttctcttgtctaattgctctagctaggactcccagtactatgttgaataacagtggtgaaagtgagcatctttgttatgctcctgatcttagaggaaaggattttggyttttctgcattctgtatgacactagctatgggtctgtcatatatagtttttattatattgacgtatgttccttgtatactcagttttttagggctttttatcacgaaaagatgttgaattttatcaaatgctttatcagcctcaatcgaaatgatcatacagtgtttgcccttcattctgctgctattgtgtatcatattggttgatttgtgtatgttaaaccattattgcatacctgggataaatcccatttggtcaagatgaatgatctt

SEQ ID NO: 896059 - DNA, 626 bp, Homo sapiens
tggacccccagaacaataaataattcagaatttaaaatgtacttagtttagcatcttttgaagtcaactaaaagaataaaagataaaggaaggaataaacaatatagtaagaataggtaggttttgaaaatatataaataagaatgtacattgaaaaacgtaattatggraattaaaactcaacgtattagttaaacaatatattagagatagctgaagagagttaaatgaactggaagataaatctgagggcatcactgaaaacgcagcaaaaagagatagagagatggaaaatatgaaagaggttaagagacatgaaacatagattcagaagagacaacacaaggcaatcaggagttttagaagattacaatataaatgcaatctttaaggtaataactgccagaaatttttcagaattaaaaaaatctagcgtccccagattcaagtagcatcttgaatctttaggaggataagttacagcaaaccacacctagacacactgtggtgaaatttcagaacaaatagcagccagaaagaaaataacgattaactgcaaaggaaagaaatgcatgttggctgtagatattgcattaccaatgagatctcagaaaacagtgagataa

SEQ ID NO: 896060 - DNA, 568 bp, Homo sapiens
ccgtctctaaaataaaaaagaaaaagaaaaaagaaaaatgcctctagtatttggttcaaccaattataaagtatattaaagtcaattatggctaattaaaatagatattctcaagaatccattaaatttgacaatatttgtgaagggccttaaacatgtatatatgtttcaaacagtaattctactaggaatttatgatgaggaaatagttgatcaaaatatagtcaaatgaattcatagtagaattatttggaattgttttttgtaatagcaagaaatgaaaccagaaaaatgtccggtaataaaggactggttaaataaattatggtacaattgaatgacatgccaccaygaaaatgtttttaacaaaactgaatgacttgaaaatatgcttataataagacgttaaatgttaaaaaccagagtaaaaaaccatgaataaaacctgtccatttaaaaaatatatatctatgtatccctcagggatgacaatttggagaagatatcaaatgcaatagatatctctaggttaagaaattatagatcatttttattctttttggttttt

SEQ ID NO: 896061 - DNA, 647 bp, Homo sapiens
ggtggaggttgcagtgagccaagattgatccactgcactccagcctgggtgacaaagggagattctggtttttttttttaagattatctttttggtcctttgcatttttttatttaacaaaaatttatgctgggatttttatagggactgcattgaatataaacataaactctggaagaagtgacataccaatttatatttgtagtagctttagttagactttcaaagttgtgtaggatcatagcagttcttaattgggtaggactgcacagagcatcgttgaatgccagaataccctagcctcatgcattaaatattactgataatcactgtaataaccaaaaccatgttgatatccaagaactgaaaaagttcatccagtaatgtttctttcctayggctgaagtctgtaattcctattgttcattatttaataatcatttacttagtatctaataagtgatcttttctacctcttatcaattttgacatttatatctagctaattgaatttatcccatagtacagatggaagaaatctctttaattattaaattgtgaattctttaaaatagaaacaatgtcttatttttgtatctctagtaccccctatacagtaggcttttaaatagatgtttagcaaatta

SEQ ID NO: 896062 - DNA, 605 bp, Homo sapiens
catcaggtattttttgactttttaataatagccattctgactggtgtgacatggtatctcattgtagttttgatttgcattactctaatgaccagtgatgttgatttttttttcatttgattattggtcacatgtatgtcttytttggaaaagtatctgttgatgtcctttacccactttttaatagggttgtttgtttttattcttgtaaatttgtttaagtaccttatagatgctggatgtcgacctttgtcagatgcatgtcttgccaaaattgtctcccattctgtaggttgtctgtttagtcttttgatagcttattttgctgtgcaaaacctctttagtttaattagattccatttgtcaatttttgcttctgtcactattgcttttggcatcttcataataaaatctttgcccatgcctatatcctgaatgatattgcctaggttttcttctagggtttttatagttttggattttacatttaagtctttaatccttcttcagttgatttttgtatatggtgtaagaaaaggttccagtttcaaacttctgcatatggctagtcatttatcccggcacaatttattgaatagtgactc

SEQ ID NO: 896063 - DNA, 620 bp, Homo sapiens
cagcaggaaagcaaaggccaggaacacccattcatgaataaatttggcttgctcttacccaaagaataagcttcagtttatagcctctccttttagttcacctaatgttccgtcctcattctctcctcccaatacacagcttcggggtgattctaccataaagtgaaccaggcaattgcttatgccccaaaaccccactcatccacaattaacactcctcaggcttgagtcacgatggcagaaggatgtattagttcccacatacacacttctactttacccaaataagtgtgtttgtgtgaaggctacaccacaaatgtgcatatgcagctgggcatcctttcaagggaaacatggtgctcagggatgttttatctagagaatccattgaacttgacattgtcagaaattkatttaggacaaatgcaaactagcaggaactgtgtaaaatattcagcacacaacatgagttggacacaatcaggtacccctgccgcacccttgagaatctggcttgtggatgctcttccaacactgggaccgtttgaccacaggtaaattcagctcatagaggtcatcattgcctgagccaagcctgtcacacaaagtggtctgtctga

SEQ ID NO: 896064 - DNA, 650 bp, Homo sapiens
gcccatcttagtaatggacaccagtagtcatcaatttcttcccaaataccccgattaccttcacttttccccatcccattgccattgtggtggtccaagccaccatcacttcttgcttagagctcagcagcaattgccttcctgtctcccagtgtcttcctgcctccagggttggttctctccttccatatcccaccakcttcttccaggttgttgctcatcctccaacctcccctccatggtctccaggtgcttggcctaacacatttcctatcattgtcttaggatcggccatgcttagtatttttcccccaaaactggccaatcatcttactcacacttctgaacctttgcacaaactactctcccagcctgaaatgttcctcttctcagcttcccttgcaccctctaaccacccccagcttggcctaggtacctctttctcattcctacatgtcagtttaaatatcctgtcctcagggaagatgtccttcagcccctaaggttgagtttggtctccctgccccatggcctcacaatatcctttgtattattttctttacttcgatgtggtcgttcttcatctgtatactcctcctgcttgtctgtaggttcttggatgcagggactacgtttgtcctgatcaccat

SEQ ID NO: 896065 - DNA, 593 bp, Homo sapiens
aaatgaccacattcactcttcagcaaggattcagaactgagctgaggctgagatggctgaaatgacaagtacaattcagaatattgataggagcaaagttcactgagctataggagtacactgtaactcaatgcgaggaatcaaaaattatgataaaaaattacagaagctgacagacaaaatagccagaatagagacgaacataaccaacctgatagagctgaaaaacacactataaaaatttcataatgcaatcacaagtattaacagcagaatagaccaagtggagaaaaaaatcttagagcatgaagactggctttctaaaataaggcaggcagacaagaatagataaaaaaagaattaaaaggagtatataaccccccmaaaaaaatgagattatgtaaagagaccaaatctatgactgattggtgtacctgaaagagataaggagaatgggaccaacttggaaaacatatttcaggatatcatccatgagaacttccctaatccagctagagaggataacattcaaattcaggaaatgcagagaaccccagtaacatgctccacagaaagaccatccccaagacaca

SEQ ID NO: 896066 - DNA, 602 bp, Homo sapiens
catggagcccaggaaactaaaatccagtggcttgaaattctcacagtcagcacagcagcaatctgaggtccacctgggacattcaagcttggtggagggaggggcatctgccattgctgaggcttgaataagcggttttatgatcacagtgtaaacaaagcttctgggaagttcgaactgggcagagcccactgtagctcagcaaggatgctgtggccagactgccagatttctcctctctggacagggcatatctgtaaaaaaggtagcagccccagtcaggggcttatagcagacataaaagttcctgcctgatggctctgaagagtacagtggacctcccagcacagtgttcgtgctttgctaagggtcagacrgcctccacaagtgagtccctgacccccgtgtgtactgactaggagacacctccaagtaggggccaacagacatctcttacaggagagctctggctggcatctggaaggtgtacctctgggtcaaaacttccagaggaaagaacagacagcaatctttgctgctctgcagcctccactggtgatacccagggaaacagggtcgggagtggacctccagcaaactcc

SEQ ID NO: 896067 - DNA, 630 bp, Homo sapiens
atcaatagctgaatagatcaagcagaagaaaggatatcagtgattgaagaccaacttaatgaaataaagagagaagacaagatcagagaaaaaaaaaaagtataaaaagaaagaacaaacactccaagaaatctgggactatgtgaaaagaccaaacctgtgtttgattggtgtatctgaaagtgatggggagaatggaaccaagttggaaaacactcttcaggatattatccaggagaacttccccaacctagaaagacaggacaacattcaaattcaggaaatgcagagaacaccacaaagatacttctagagaagagcaaccccaagacacataattgtcagattcaccaaggttgaaatgaagggaaaaatgttaagggcagccagagaaaaaagtcaggttacccacaaagggaagccaatcagactaacagcagatgtctctgcagaaaccctacaagtcagragagagtgggtgccaatatttggtgttctcaaagaaaagaattttcaaaccagaatttcatatctagccaaactaagcttcataagtgaagaagaaataaaatcctttacaggcaagcaaatgctgagggattttgtcaccgctagatctgccttacagag

SEQ ID NO: 896068 - DNA, 579 bp, Homo sapiens
ctgggttcagaaatcctagcttttctacgatctagctctgtgatcttaaaaacatttctttttttttttttttttttttttttttttgagacggagtctcgctctgtcgcctgggctggagtgcagtggtgcgatcttcgctcactgcaagctccgcctcccgggttgacgccattctcctgcctcagcctcccgagtagctgggactacaggcgcccgccaccatgcccggctaatatttcgtattttttagtagagacgggttttcatcgagttagccaggatggtcttgatctccggacctcgtgatccacccacctcggcctcccaaagtgctggaattacaggtgtgagccactgcgcccggccttaaaagcatttcttaactttttgkgtctctgatgtcctttaagaaaaatggatttgataatagaatctaccttttagagttattgtgatgaattaaatgaattcatatatgtaaaacttatagaatattgtctggcatactaatcctatataaatgttaactattactattattactatcatcaagtttttggtaactagccatttttt

SEQ ID NO: 896069 - DNA, 625 bp, Homo sapiens
attacatggaaaagttctttagtggtgatttctgagattttggtggacccatcacccaagcagtgtatactgtacccaatgtgtaatcttttatccctcacctactcccccccttccactcagtacccaaagtctattgtgtcattcttatgctgttgagtcctcatagcatatctcctacttataagtgagagctataagtgtttcattttccattcctgagttactttacttagaataatagtctccagctccatccagttgctgcaaatgccattattttatttctttgtatagctcagtaatattccatggtgtgtgtgtatgtgtgtgtgtgtgtgtawgtgtgtatatatcacattttctttatctactcattgattgatggacatttggactggctccatatttttgtaattgcaaattctgctgctataaacatgcatgtgcaagtctttttcactaatgacttctttctctcttggtagatacccagtactgagactacttgatcaaatggtagatctacttttagttctttatggaatttccatactgtttcccatagtgatcgtactagtttacattcccaccagcagtgtaaaagtgtttccttttcaccaca

SEQ ID NO: 896070 - DNA, 632 bp, Homo sapiens
ctctcagcggccctcaatccactcagctagactcttctttacccttcagtaggtcagctcctgtagggatagagtaaggctatacaatgtttgttcagttgttgaattgcttataatctttcctaatgacaaaggtaatgtatgatcagtttaacaaaagtaatcatatacagaaatgtagaaggtgaaaggtaaaaagccctgtttcctcaatctcattccccagacaaaacctctaaatatagtttggtgtgtatccttctacaatcaattgtattattttattccaaactgtcctgtcaaaatggaaaaatacaaagcatttcaataaaatgtgtaaatattttgtttcttgtatttattttatagggaatattttgatgttgaactatagtagcacataatttaaggtagtaaatgtccgtcatcaccatcagtttctatatattttggagatcgctgtacccygctacccttatttttcttgctcatcatttaggcagaaagaatccaggggccaagcacagtggctgagccctgtaatctcagctttggcaggctgaggtggaaggattacttgagaccaggagttcaagaccagcctaagcaacatagtgagaccccatctttac

SEQ ID NO: 896071 - DNA, 597 bp, Homo sapiens
taagtggtctatgaaagttgtaataaggttaataaaagtgaatttttaaagggattatataactcagttggatataattaaagggaaattacaataatctttctagagatgggtctttaatattaaaatatgcaccaatacagaactaaataattggttaaaacaagattttattacaaatattgacttacttttaatgcaagacatttttaaatttttaacttctctaatctatctcttyaacattcttcagattgatttttttttttttttttttgagacggagtcttgctctgttgcccaggctggagtgcaatggcactatctcagctcactgtaacctctgcctctcaggttcaagcaatccttctgcctcagactcccaagtagctgggattacaggcacgcaccatcatggctgactaattttttgtatttttagtagagatggggtttcaccagttggccaggcaggtctcaaactcctgacctcaggtgatctggccgtctcggcctcccaaactactgggattacaagcaagagccaccgcacctggtccagattgatatcttaaaagtgccactctttctctttta

SEQ ID NO: 896072 - DNA, 597 bp, Homo sapiens
taagtggtctatgaaagttgtaataaggttaataaaagtgaatttttaaagggattatataactcagttggatataattaaagggaaattacaataatctttctagagatgggtctttaatattaaaatatgcaccaatacagaactaaataattggttaaaacaagattttattacaaatattgacttacttttaatgcaagacatttttaaatttttaacttctctaatctatctcttcaacattcttcagattgatttttttttttttttttttgagacggagtcttgctctgttgcccaggctggagtgcaatggcactatctcagctcactgtaacctctgcctctcaggttcaagcaatcctyctgcctcagactcccaagtagctgggattacaggcacgcaccatcatggctgactaattttttgtatttttagtagagatggggtttcaccagttggccaggcaggtctcaaactcctgacctcaggtgatctggccgtctcggcctcccaaactactgggattacaagcaagagccaccgcacctggtccagattgatatcttaaaagtgccactctttctctttta

SEQ ID NO: 896073 - DNA, 565 bp, Homo sapiens
atcccttaatcttataataaggccacagttccttgatggcagtgcagttggtggcaggggttggggaggtccaggaatcaactccctctaccaatttcacatgcccacctgccccaccaggattgcccagtaaaaagccctgcattcttcaaatctttctggaccttagctttctcacttgtwtagtaaagggatgaatcccatgatcactaacagccctgccagctctgacatgccataagcttatgattccaacagtaaaagcctgataaatatccatccctgtaaccacaagcagatgctacctggaatggatggaatttcatctagactaggaacaatctagcatcagtccgagtcaacaaacattccctggggtaatccctttttcaagtcttgatcttatatattggggagaaggaaaataggtcccgtcctcaaaaaactctgaagcttcttgggaaattaaatgttcttccaccccaaggcagtcagaggctagaccagggttacaaatgactggagggaaggatgtaggggtcagaatttgggaacagtgaagtcc

SEQ ID NO: 896074 - DNA, 669 bp, Homo sapiens
cctttatcttaacagtctgataaaatcatgatttctgggtaaagttcaagtatccagagttctcctgggtccccggtattgactcgaatgttgaatgtgtgcttctaaacattcaattcctcctcttcctcctccctctccccacactatctgttttgttcagtgaatataattttttaaatataaaaggaacatgtgtaaccaatatgccaaaataaaaaacacactgacagtaggtagcagttttcataatttaatgaaaaagtattggtaaaaaggkgacatttgaaaaaggactgagcttatcttggaaaactggactatataagacaaaatgaaaaaaattaacaaagaaggttaagaggtaatacttcaaacaacaaaatgtagcaaatacattttggggtaattgaaatttacaactgaaggctccttcatttacctaggaatatcctgtaaaaatattacaactatatttccctgacgaatgatattttagtcaatactctcccaatggcattacatatggaatttggctgaagcactgttttgatgtttgcttttcctcccactcagaattgaaaggcatgaagggacaaaggctaccgcactggcctctgacataaggaatttataacacagctccatcataatttcattaccatgaag

SEQ ID NO: 896075 - DNA, 625 bp, Homo sapiens
agtggggacagggaggaggtgtcttggtccattcttggtttgttttatgctgctccaaaagaataccatagactggataatttataatgaacagaaatttattggctcacggttctgaaggctggggagtccagtggctaragatgtctttttgtgtcatcacatggcagaagggcaaagatgaggagtggaaaggtagaaagagagagagagagagagagagagagaaagggggtgaactcgccattttataatgagcctattcctgtggtaacaaattaacaaacccattcccacaataatggcattaatccagtcatgagggtgaagccctcatcatgacccaatcgtgttttaaaggtcctactttttaatactgttataatgacaattaaatttcaacatgagaactgcctataatcacagcactttgggaggcccaggcaggaagattactttaatccaggagtttgagaccagcctggaaaacaaagtgagacccccatctctacaaaaatcttttaaaaaatttagttgggcatagtgatgtacacctgtggtcccagctacaaggaagactgagttgggagaatcacttgaacccaggaggtcgaggttacagtga

SEQ ID NO: 896076 - DNA, 660 bp, Homo sapiens
aaaaatgaacaatctactttttgttctctatttttgcttctttaccacttttctgcctataaaaccaaccctctctgctctgctcattggaattccttctattttatggatgggatgctgcccaattcatgaatcattaataaaagccatttagatcttttcaactcaacttgttgaaagtttgcttttcgacatcwttattgttataattactatcttgtggaatttcctccacagctttggaagacaggcagcatacgccctcccatcattttacctgtgagcatatgaaagacagaggggttaagtggctcatctagcttgtaagtaccacagtcacatctggaactctgatattctgccaccccatgcattgatcaactccttcaagatcctttccaactctaaaattctgtggtttcaatataaatgaatctcagggtcagcattttaaaaactttgagttttttgtctcaagaaagtagcaaagggtagggctcacattagatagagtcgtccctctgtatctacagaggattggctctaggaccctcatggataccaaaattctcagatgctcaagtctctgatataaaatggcgtagtatttgcacataactgatgcacatccttctttatataaaccatctctagattact

SEQ ID NO: 896077 - DNA, 594 bp, Homo sapiens
gtgcacagcagaacaaaaaataaacaaagtagaaatatgttgttggctttgtttaggatgagatggcttgagaaaaaaaattgtcctgaatctgcaaaatgaatatctagtatttcatgtgttatacagcagaagtgtggaaattactttaaaaaggagaaagaaaaagaatatatttgcagatatattcaagtattttactggagatgtgagaaaaacatggggttccaggaaacatttccataaaaatagttgactgtacataattatttattccagtctgctaaatgtcactattgatgtcttaatattttgttagaattcttaaaatttttatggattctaagattccctttttttcacatttttacatatctaaactttggatgtatcttacaatcaaagacattttacaattgtttttcaagtggcaactmtaatacagtagtcatttcctgaacttgtgatcacatcagaaggattagcatcaccaacatgtgcagagtagatgtcagaggctgagagcccatagtggagtgtttagtttaacccctatgagacaaaggattgtaggaagagagtagaagagttggt

SEQ ID NO: 896078 - DNA, 683 bp, Homo sapiens
gagcagttaggttttttggataactctttcaatttttcattcacctggaatgtaagacattcacaatattttgcattaataacctcatatgctgggttcatacatagaatatagctattcttctttattctttagtatctgtgaaatctttttattggaatgaggtggactcactaatcgatttcagagaggtgggggtttttattctactagaaactttctttaagacagcacttttctcgggacagttgttttattatttatttggcaacayttaaatggtattactatgtaaatattaataaaatctcatcactgtgttttggtttgaagtgaatgagtgaatattaatgtaataactgaggtttataaaataattggggacatttttatgtaattacactaactgcaaacaccaaataagattaaacttcattactacaccctaggggttagttccagatggggcacataaaactgagaccactgttttcactgctttggggaatcgggattaaagtatacaacatttggcgaacatgtcttacagcttatgtgttttaaattactgaatgatttccaaaagaaactaagatactagaactaaattttgatcttattggtgaacggtaaaatagcatttaatgggcagaatgtcataactaataagtcatatgattgtt

SEQ ID NO: 896079 - DNA, 683 bp, Homo sapiens
gagcagttaggttttttggataactctttcaatttttcattcacctggaatgtaagacattcacaatattttgcattaataacctcatatgctgggttcatacatagaatatagctattcttctttattctttagtatctgtgaaatctttttattggaatgaggtggactcactaatcgatttcagagaggtgggggtttttattctactagaaactttctttaagacagcacttttctcgggacagttgttttattatttatttggcaacacttaaatggtattactatgtaaatattaataaaatctcatcactgtgttttggtttgaagtgaatragtgaatattaatgtaataactgaggtttataaaataattggggacatttttatgtaattacactaactgcaaacaccaaataagattaaacttcattactacaccctaggggttagttccagatggggcacataaaactgagaccactgttttcactgctttggggaatcgggattaaagtatacaacatttggcgaacatgtcttacagcttatgtgttttaaattactgaatgatttccaaaagaaactaagatactagaactaaattttgatcttattggtgaacggtaaaatagcatttaatgggcagaatgtcataactaataagtcatatgattgtt

SEQ ID NO: 896080 - DNA, 593 bp, Homo sapiens
accacaatgggtgcacacacagtatggcacctgctactatagttcatatctagagggaaaaggaagggaccttatgtgagcaaaataatgccctagagaagtccccaaattgcagtcaactcaagtactggactagcaagggcaaataaactctccttgatcttggacaccaccaacaagggtgggagaggctgagagcactcctacctacattttcctcaaaatactaagtatcttagggtttaaccttgctggcttcttgttactttgttttgtgtgtgtgtcatagattcttccagttaactctctgatgagctccagcattctccccttaacactycatttgggctgtgattattcatctataattttggttcttcattctgaggaacattggtcattgagttctctagtcagctctctggagaagctctccaatgcctcaggatattgacagatctgtgggatgtgcaatagctgtgctcaactcagcttccatagtgggcaatgttgaatggagctgacccaaactgatctgtcccctagtctcccagtaacaggtgtaagcaccagctctaataagagtggcaggg

SEQ ID NO: 896081 - DNA, 683 bp, Homo sapiens
gagcagttaggttttttggataactctttcaatttttcattcacctggaatgtaagacattcacaatattttgcattaataacctcatatgctgggttcatacatagaatatagctattcttctttattctttagtatctgtgaaatctttttattggaatgaggtggactcactaatcgatttcagagaggtgggggtttttattctactagaaactttctttaagacagcacttttctcgggacagttgttttattatttatttggcaacacttaaatggtattactatgtaaatattaataaaatctcatcactgtgttttggtttgaagtgaatgagtgaatattaatgtaataactgaggtttataaaataattggggacatttttatgtaattacactaactgsaaacaccaaataagattaaacttcattactacaccctaggggttagttccagatggggcacataaaactgagaccactgttttcactgctttggggaatcgggattaaagtatacaacatttggcgaacatgtcttacagcttatgtgttttaaattactgaatgatttccaaaagaaactaagatactagaactaaattttgatcttattggtgaacggtaaaatagcatttaatgggcagaatgtcataactaataagtcatatgattgtt

SEQ ID NO: 896082 - DNA, 643 bp, Homo sapiens
ctgacaaagcttccccatataattgcttttatcaccatctctttcaccctttatccttcccttatagttaactttttaattaatatttagtttaacctaactttttaaaactataagcaaatatatacacacattgtatgcatatgcatatatacacacattgtatgcatatgcatatatacacacattgtatgyatatgcatatatacacacattgtatgtatatgcatatatacacacattgtatgtatatgcatatatacacacattgtatgtatatgcatatatacacacattgtatgtatatgcaaatacacatacatgcatatatgtgtctcctcattctttggaaaatgacattatctgtaaaaactagaagtgctctttaatggcttctttcttgatgaattaaaaatattaaaaacagttaattaattaatttatttccaataaagatgggtgtctcactatgttgctcaggctggactcaaactccagggcttaatatatcttgcctcttcagccattcaagtaactgggactaccagtgcacaccactatgtcctaatgaaaatgacattttatttcccatattgaatcaatgaatatgtgagcaagtattgtgattttgatactttgtatt

SEQ ID NO: 896083 - DNA, 609 bp, Homo sapiens
tacttttatgactattaggagaataataccaagaatttggagtattatttttatccagtgtccccataatccaaaccacctaaaatcaaatagatcaaagaatgagctagataaagagtctactcacttaactaagcagtctctttgttaatcccctacacataaatctgtataatacctaatattttctccataggccataagtgccagcagctgcataagtacttctgtttagccagtaagtaatctagagtaattctattatttagcacaactttcacaagagtatttmaagtctttcgtgtaactatagcctttacagtagcacctgctatggagcctatcatgagggatacattgctaatcattgtttcttttactccaaaccatggaaaaatgacctaacaaatgaagcccttctagaagactgaaagccttctggcaatgttcttttaactcatgatgtgggttaagaggagtgaaacaatgtttgtttctgactaattatgaggcaatttatgtaccattaaagtttctcacctccattgggccttcatctttcatgtatcaaggtataacgttatccacatataaggctggctgcaaaat

SEQ ID NO: 896084 - DNA, 580 bp, Homo sapiens
ttaccttaagggttccaatgagtgtacagttccaagaatatggagggatccttctcagttgtgagattatgaacccaaggttcaaggtcctggagttttgttgcagtgtgagtggcaagggcactctttctctgatgttctcagaaaatccaatctttgggttctagattgtgaaaaagctgattttcctcagtgaaccataaaaagcttcctttacctggtaaaaatacactgtgacataataatttactattataacatcagccttcttgcatgggaaagcttttatacaaccagaaaacatgcattgaaaatgacaatttaataaaatcactccataaatatttaaatggcccatcaggtagctgaatgtacctaaagctttgattgtcttcccrggaatatgggtttgacaaaacaaacattggtcataaactattttatcattttatcttttccagtataagtcattgaatgcagaacttttaataaaattttaaaggctcaggaaagacaaggcagccatcatggttctccatgagttcatgcttaacattggacttatgtccacttgaatacc

SEQ ID NO: 896085 - DNA, 659 bp, Homo sapiens
ttgctcaaagaaacttgaacagctcaaaacacaaatctgtagagctctgaaatctgagcgagaacttaccatgatccccagctgctccaagagatcaatggacacaaatgggttctgcagctacctcgctttggtcgcccaggactcctagggtttgttagaagctctacttgggaccctgcttctgacaccatctgataaaagaaaaacttcacctgaattaaatttttaaaacattaattttgtaatgaacagttcatgagtccagcagccttatgagccagyggaggctcagagactccagtgcagccatgcggtggaagaagatttacaaacagaaaaaaaatagtgaggtgcaaacagaaaatggaagtgaggtacagaaacaactggattggttatagcttggtgtttgccttatttgaacatggttcaaacagctggctacttatgattggccaaaactcagtgattggcacaggtgtggtctatggtgtgcttacacctccatttgctatagttcacagtgcacagaaaataatttaggctggacttaaaatatgtaaggaggtaactttaagctaaacattatttaacaatgtaaaaggcctttatatattttatctttttagatcctgttttggggattttttttttta

SEQ ID NO: 896086 - DNA, 658 bp, Homo sapiens
tatcatccaaactgctgagagtttctctccatgtggcaggacatgcctttaatactttggcaggcagtttacaactctgccttagtctgcatttctggtttgcctaaaacctcaaggtcaagtataggttaaatatgttaactttctcagtatttttctggacatgtgcacagctcttcaatgtgcatagaattayacatccccaggaatatgttggagctttcaaaagttctctatgggcaacttatatcccaactttttcctgttagatttttagtcagccttgagatagccccagtttatttatttatttatttatgtatttatttaatttttctctctttttatatattttagcatagtttaagttctgggatacatgtgcagaacgtgcaggtttgttacataggtatacatgtgccatggtggtttgctgcatccaccaacccataatctacattaggtttttctcttaatgctatctctcccccagccccccaccccctgacaggccctggtgtgtgatgttcccctccctgtgtccatgtgttctcattgttcaactcccacttatgagtgaaaacatgtggtgtttggttttctgttcctgtgttagtttgctgagaattatggtttccagcttcatccatgtccctgc

SEQ ID NO: 896087 - DNA, 599 bp, Homo sapiens
cctgcagcatttacaggtgcacagtgcaagtgttggttgatctaccattctggggtctggagaatagtggtcctcttctcatggctccactaggaagtgcctcagtggggacactgtgtgggagctccaatcccacatttccccctctgcactgtcctagtagaggttctccatgagggcttcacccctgtaacacacrtctgcctgaacatccaagcattttcatacaccctctaggtaagggctccaaatctaggtaagggctccaaaacctcaactcctgccttctatgcacctccaggcccaacaccatgtggaagctgccaagttggagcttgcactttctgaagcaacaacccaagctgtaccttggtccattttagccacagctagagctgcagtggctgggaggaaggatgccatttcttgaggctgcacagagcagtgagacgctgggcctggcccacaaaactattttttcctcctagtcctctgggcctgtgatgggaggggctgccataaaagtctctgaaataccttggaggcattttcctattgtcttggctattaatatttgtctctcctttacttatgtgaat

SEQ ID NO: 896088 - DNA, 628 bp, Homo sapiens
attattgatttatagttgtattctactgcggtcttataaaatgtttgacactattattataataattattattattactgttttaagacgtgtttggctagacacagtggctcacacttgtaatcctaacacattgggaaaccaagcaggtgcatctcttgagctcaggagttcgagaacagcctaggtaacatrgcgaaactccatctctacaaaaggaaaagaaaaatacaaaaattagccaggcatggtggcacatgcctttagtcccagctacttggtggtgctgaggcaggaggatcgtttgaacctgggagtttgaggctgcagtaaggtgagatcatgccactgcactctgtcctgggtgacaaagtgagatcctgtttcaaaaaaaaacaaaaacaaaaaacttgttttttaacctaacatatgctgggattacaggcgtgagccactgagcctgatcagatatgtctcttttatttctagtttattgtagtttttatcaggaaagggtgttggatttaatcaaattttttctacatctattgagataataatttgtttatataattttattaataggatgtattgcattgattcagtttttatattttgaaccgggttt

SEQ ID NO: 896089 - DNA, 628 bp, Homo sapiens
attattgatttatagttgtattctactgcggtcttataaaatgtttgacactattattataataattattattattactgttttaagacgtgtttggctagacacagtggctcacacttgtaatcctaacacattgggaaaccaagcaggtgcatctcttgagctcaggagttcgagaacagcctaggtaacatagcgaaactccatctctacaaaaggaaaagaaaaatacaaaaattagccaggcatggtggcacatgcctttagtcccagctacttggtggtgctgaggcaggaggatcgtttgaacctgggagtttgaggctgcagtaaggtgagatcatgccactgcactctgkcctgggtgacaaagtgagatcctgtttcaaaaaaaaacaaaaacaaaaaacttgttttttaacctaacatatgctgggattacaggcgtgagccactgagcctgatcagatatgtctcttttatttctagtttattgtagtttttatcaggaaagggtgttggatttaatcaaattttttctacatctattgagataataatttgtttatataattttattaataggatgtattgcattgattcagtttttatattttgaaccgggttt

SEQ ID NO: 896090 - DNA, 607 bp, Homo sapiens
tgtttaaataatttaaaaatttagctttactatacatagatatgtcatattttcattttttaattaaaaatttttaatagcttttgaataaaattattttaggcccaccaacataataaaccaatttatttgtcaataaatgcacatataatttatattgtataaatatgtatatatataaaacatttactacctatgtatagataatttaaattaaaacaacacctcaaatgtttagctgctgcatcagcaggaagtggagcctccaaggaggttaaataacttattcaagtcctcatgatkgataagtggtataatattttggcattttattgagtgctttttttgtattatcaaatctttaaaaaatattattaataaaattttattaatgtagctaaagagtcccattcctctctctgtccttcccaaatttctgccattttaaaatatcttgttctctattgttttcaaattaaatattgagcaaaattaaaataacattataaaggattgttggggtaccaagatgaacccttcactgtacaccccggcagtaagcatgaccttcaggagttgatgttacctctgcagcccggaggcttca

SEQ ID NO: 896091 - DNA, 508 bp, Homo sapiens
aacgttattagccctcaaaaaggagtgagaactggggtttttcttaccacctggtgattctgcagaagctttgcccttgctgtgaaccaaggctggatattctaggcattgtatggaagatggaagggagagggagtgaggatggcaagggcttagagaagttgctccaaaccacrtgcactctgtgtggctttaggagaaaagaaagaaactttggcttgatataaagaaaccttcttaaaccctcagatctgaggtgaatggcctagagatgtagtgagtatcctaactctacaggtgtgcaagtagagactgatcatagtttaaggggttgggtttggtaacttctgtggctcctttaaacttttatattctatttgtccccatttcacagatggggaaactgagactccatgagatgacttgtccatggattccatggcagtaagaggcagatgccagacccaggcctctttccattttgcctcagctcagagctgggagatgg

SEQ ID NO: 896092 - DNA, 566 bp, Homo sapiens
ggggtcccaagcccaaatgtgggatagtccatcctcagagctgtccttcctacacccctgttctcctcccgggccgggatgcagcgctgcccctggcccctctggagctcagcagggagccccatgcccttccaggtgtggagagcagcctgcgtgtcactggctgccgccagatcttacggagcctcccagagcacaactacgtcgtcctccgctacctcatgggcttcctgcatgcggtgagtggggaaggggggagcttggggtgaagcccagtggccttccctcccatgctsggcccgcatggaccagtcccctccttgccctgggtctggggtcatgccctgcttgggcctcggaataccactccctgccccccaaggacctcatccaaggcctggtcaggcacccatgctgctgcggacctcctgcctgtcagacagggcgtacctgcccctgcctgctcctgtacctgctgtccctcagccattgccagtgacttttgttattggggtcctctgcccccatgtcatttcctgcttgggctgagtctctaggaggtggga

SEQ ID NO: 896093 - DNA, 614 bp, Homo sapiens
acagagggagggccctgcaaagggggtggatatggggagggtgaagaattgggcataaagcagccaagctgcccgagggctctggggtgcgacaggactctgcagtctcaggcaggctgactcttgggctggcaaaacgggccctgtatttccatcaratatggtagagaaggatacaacttcttagtgccacagtcccagcaaaaaagccccaggttcaccctgattggacaagcctaggtcacatgctcaccttagacccattgctgcagccagggaaggctctgattggcttaggcctgagtcttgtgccccacccagaccaggcagtgggggaggagtggcaggccgctgcaggggattacccacgagtcccacgctgccgtctccccagctcttgatgcagggagaagcgggggaggttctggggagcaaaggacaaaagtcccctctacagatcccccatggtggcccctccgtgcctgcttggggtgttgaccgagttgtgccgggacccccggtacgcgttaggatgcttgggggaatcactggcagccccaggccaaacccacacccagggctctcctctgaaacttagagggtgcggtctcctc

SEQ ID NO: 896094 - DNA, 614 bp, Homo sapiens
acagagggagggccctgcaaagggggtggatatggggagggtgaagaattgggcataaagcagccaagctgcccgagggctctggggtgcgacaggactctgcagtctcaggcaggctgactcttgggctggcaaaacgggccctgtatttccatcagatatggtagagaaggatacaacttcttagtgccacastcccagcaaaaaagccccaggttcaccctgattggacaagcctaggtcacatgctcaccttagacccattgctgcagccagggaaggctctgattggcttaggcctgagtcttgtgccccacccagaccaggcagtgggggaggagtggcaggccgctgcaggggattacccacgagtcccacgctgccgtctccccagctcttgatgcagggagaagcgggggaggttctggggagcaaaggacaaaagtcccctctacagatcccccatggtggcccctccgtgcctgcttggggtgttgaccgagttgtgccgggacccccggtacgcgttaggatgcttgggggaatcactggcagccccaggccaaacccacacccagggctctcctctgaaacttagagggtgcggtctcctc

SEQ ID NO: 896095 - DNA, 554 bp, Homo sapiens
aaaatggtctcagaattctgttgccagggaaaaaaaaaaaaactgaaataaaaatgatggctccctgaagagcccaccattgtgagcaccagaattaacaatgacattaaatcaaatctcatgcattatgcagagaggtttacagcaaaatgcacgtctgtgaaatatatgtttcaaatttcctgactccaaraggtggccccaagatgttctcctgtggcttctttgataacagtttccctgtcacaaacgttaattgtggaatcctagcttagcactgcgtggcctcatcacccttcccttgtatcaaagcacaatttcctgatcatttccacagcaaaagaaagtgattacagagataatgtggtggaagcacatcagcacatttcagcttaaaacaatgaaatgcggtgctgaaatgaggactccagggtgtctctattgacaggacgcacagaataaattgtccaaacattcacctttgcagtaacgacagagatttttaagtgactccagagattaggcgggctgcccagaacttgtaactgacatcc

SEQ ID NO: 896096 - DNA, 601 bp, Homo sapiens
cctttgaaaactggcacaagacagggattccctctctcaccattcctattcaacacagtgttggaatttctggccagagcaatcatgcaggataaaaaaaaagggtattcaattaggaaaagaggaagtcaaattgtccctgtttgcagatgatattgtatatttagaaaaccccatcatctcagcccaaaatctccttaagctgatatgcaacttcagcaaactctcataatacaaaatcaatgtgcaaaaatcacaagtattcctatacaccaataacagrcaaacagacagccaaatcatgagtgaactcccattcacaatggcttcaaagagaataaaatacctaggaatccaagttacaagggatgtgaaggacctcttcaaggagaactacaaaccactgctcaaagaaataaaagaggacacaaacaaatggaagaacattccatgctcatggatagaaagaatcaaaatcgtgaaaatggccatactgcccaaggtaatttatagattcaatgccatccccatcgtgctaccaatgactttcttcacagaattggaaaaaactactttaaagttcacacagaaccgaaaaaga

SEQ ID NO: 896097 - DNA, 621 bp, Homo sapiens
cttcactccatagataatattgttgttattgtcgttgttattattattattattaggtgtagggtctagttttaccctgccaagggtattttaattatttggtggaggctctacattttcaaccagccaagagtatccatttccttttcactggctctagttgaatagcagagcagctcagattctaagtttccatttctctactgccgcactgattataatgtcggcctttattactcccagcagagcagtgaaatacaatccctacaccactaccaattaaggcagcttcaattmtatctacatgttcttcctctgtgcagatgccagcagatctgttccaagacccttccggttgtttagtattctgctcagaggagtcatttgctgatcatcttctttcttaattagggatctaatgtattgcagctgacccttgaacaagagaaagatggagacctggctggaaaggaggtgtgaccattcatttcaaggtaatcagctttgaagctgcttgacatctgctattgattttcttgtgcctggaaaacctcctgagaaaggtttctgatctcagaagtctgagcaatctacgcatttacttattcactcactgtgcaa

SEQ ID NO: 896098 - DNA, 585 bp, Homo sapiens
acgcggcaaagagatcactctctggtgtggagggtgggtgtctctggggattagggaggcagcctggggaagggaccggcctccaagcaagtcagccaagggcatctgtgcctcccctgccagaagagcaggccctgctttgtccctttacctcctctaggcccaaagcacacccaggtccctcccctgccctgacatctaatctgggaggatccctgattggaatctccaagtcaccacagccttgagccaggccttcctttctgcctcagtttctccatgtgccaagatggcgtttttcacactttcttrgtagaaatgatggggagaccatatgttaggaagcaagttggcatagtgggaagagggccagccacaaggcaggagtgcccaggcagggtgcctctccctgctggcctgtgtcctcgtccttatagcagtgtggacaagatggtgtcggcaccccccgctccaaaaggcttgagacagaaactgtagtccgagatggcaaggattttgaactcacaaaatgcagctcttcatgtttgcctgtctgcctaggcaccggcccactctgttctgcct

SEQ ID NO: 896099 - DNA, 632 bp, Homo sapiens
ttcctaaagaacttaaagcatacaccttcaaattaccaacagttacttatgaagcacccattctaggtttagccatgttctcttgaagtgactcaggcagtgaataaatgtgaaaccccatttatttgcttctgtgacttactcagatacttatttttcttagaatggtcaatgatcataaaacgttgagtccctggtgggtggaaatgtaaatcctggcaagcagtggaagacaaatcaactctctaaaaataaatggaaatgttaagaaaattcacagctatttcttcaggtccccaggttaagtataccatggagacagtaagtgaagtttatatctcactttcastatttaatatgtggatttcatattgtattagtccaatatgtttatatgcagctacgcaatatagtgagttaaggactgcatagaaaagtcttacctccagaattcatgattgttttttcttcttcctagccagagctttttgcattggtttgatgtactgtagttacttggggtttaatcttgtataataattaacttcaattgatccactgcagtgtgttagcaaagtgcccgagcctattaaatccgactaagaatcctccattgctttccgaatttccag

SEQ ID NO: 896100 - DNA, 590 bp, Homo sapiens
ttgttcattctcttcctccttctgctctgggccttctgatgtgggtggctctcagaaaatacttgctgctggcaaagggcctttactcaggcatttgctttgacttgatgtcaccaagagactgaggacattggcaggcttagtaccacctgctcctcatcttaggagcctccttttcaaataattaggctctgttcccattktaaaactctgcttgggctgatattggccttcacctgtgactggacactttactagaggcccattttcactaaacaataaaatctaaataaattggaaggaataacaaccacaaaggaaagaaaagagttggtctggattgatgatcactgaggatctgtatgtgaagcacccagagcagtagttttgcctgtgagtcatcttcacacatgctcttttctctgcctggatctctcttcccctccttacctggccagtcctgtttatcatcaggccttgtcttggatatcacatcctctggggtcttcctttcccctctcacctaggaccctcattaccggctctcatagcacagtctactgctttgtacgaactctaagtattctttt

SEQ ID NO: 896101 - DNA, 590 bp, Homo sapiens
ttgttcattctcttcctccttctgctctgggccttctgatgtgggtggctctcagaaaatacttgctgctggcaaagggcctttactcaggcatttgctttgacttgatgtcaccaagagactgaggacattggcaggcttagtaccacctgctcctcatcttaggagcctccttttcaaataattaggctctgttcccattgtaaaactctgcttgggctgatattggccttcacctgtgactggacactttactagaggcccattttcactaaacaataaaatctaaataaattggaaggaataacaaccacaaaggaaagaaaagagttggtctggattgatgatcactgaggatctgtatgtraagcacccagagcagtagttttgcctgtgagtcatcttcacacatgctcttttctctgcctggatctctcttcccctccttacctggccagtcctgtttatcatcaggccttgtcttggatatcacatcctctggggtcttcctttcccctctcacctaggaccctcattaccggctctcatagcacagtctactgctttgtacgaactctaagtattctttt

SEQ ID NO: 896102 - DNA, 590 bp, Homo sapiens
ttgttcattctcttcctccttctgctctgggccttctgatgtgggtggctctcagaaaatacttgctgctggcaaagggcctttactcaggcatttgctttgacttgatgtcaccaagagactgaggacattggcaggcttagtaccacctgctcctcatcttaggagcctccttttcaaataattaggctctgttcccattgtaaaactctgcttgggctgatattggccttcacctgtgactggacactttactagaggcccattttcactaaacaataaaatctaaataaattggaaggaataacaaccacaaaggaaagaaaagagttggtctggattgatgatcactgaggatctgtatgtgaagcacccagarcagtagttttgcctgtgagtcatcttcacacatgctcttttctctgcctggatctctcttcccctccttacctggccagtcctgtttatcatcaggccttgtcttggatatcacatcctctggggtcttcctttcccctctcacctaggaccctcattaccggctctcatagcacagtctactgctttgtacgaactctaagtattctttt

SEQ ID NO: 896103 - DNA, 631 bp, Homo sapiens
ttcacactcaacatggaacacttctgtgacaaggtgtgtgagtttgtttcccccacacaccaagcaattctccagcagacaccaactgggtatcctgtaattcaattcagttctgacattacctggaaatagtgtcagatcccacaggttgagggctccacctcccaagacagccaacactttcgatgccagtcacgagtctgggccacgcatactcctgactgaccaactacaaactagagtccttgacttccttgggttcagytaatttcctaggacagatcgcagaattcagggaaacatgttcaccggtttattataaaagatacagctgaacagcccaatgaaggaggtacacagggcaagattgagggagagggagagagagtggagcttccatgccctctctgggctcacactctctcagcacgtcactaatctggaaggaaccactgtgtcctgctgcctttattagcatttagtgagcaccaattgtttgtcaggtactgtactatgtactggcagtacaaaaatggataagatatgacccctgttttgggggggtacatagtgcactgaactaaattgctatctataataatctcttggggggaaaataggaagttcattc

SEQ ID NO: 896104 - DNA, 617 bp, Homo sapiens
ctttgtgttcatgagttctcatcatttagctaaaactgataagtgagaatatgtggtattttgttttccgttctggcattagtttgctaagaataatagactccatctccatccatgttcccacaaaagacatggtctcattttttctatagctgcatagtattccatggtgtatatgtaccacattttctttatccagtctgtcattgataggcatttaggttgattccatgtctttgcttttgtgaatagtgctgcagtgaacatacacatccatgtgtctttatggtataatgatttatgttcctctgartatatacccagtaatgggattgctgggtcaaatggtagttctgcttttagctctttgaggaattgccataccgcttgcccaatggttgaactaattacactcccaccaacagtgtataagtgttcccttttctccacaacttcaccagtatttattattttttgactttttactaatagccatgctgattggtgtgagttggtatctcattgtggttttgatttgcctttctctaatcagtgatgtcgaacttttttaacaatatgattgttggttgcatgtatgtcttcttttgcaaagtgtc

SEQ ID NO: 896105 - DNA, 656 bp, Homo sapiens
cagcagggcagaatatctgtcacttccccaaatccaatgcaaaagccaaggctgtctgacttcctatgctgccttttttttttcattaattccccgcaagttacctacagttcctgttactagttatcagtgcttcaagtaatattatccttgtattattgttaatgttcttttttattttagagaaaatactaacygagaggaagcagcagttatgaaactatctctacagtgatcatcagagctcagggttgggcagaaagctggtttctgctgagctaccaacacttagttggactcaagggtgagagagtgaaatggactctaagtagcagcaggaaggagggaaagtaagaacaaggcctatacagtgtttggaaactcttcagggcagacaggactggctacataatttgcagggcttagagcaaaaatgaaagtgctaggcaccttcttgaaacatttttaagaatttcaagacagaaatggcagtgcattaatccaagcatgagcccttctagcatggagccctgtatgactgcacaggtcacactgagggcagtgcctactatagagaagaatgggccagtctggagcacctccctcttcagttacctgggcccttgactccaggccccagggaggaagctcattca

SEQ ID NO: 896106 - DNA, 619 bp, Homo sapiens
tgagctggccaaactaatagccctcactcgggcactagaattaggagaagagaaaagggtaaatatatatacagactataagtatgcttacctagtccttcatgcccatgcagcaatatggagagaaagggaattcctaacttccaaaggaacacctatcaaacatcaggaagccattaggatattattattggtggtacagaaacctaaagaggtggcagtcctacactgctggggtcatcagaaaaaaaaggaaagggaaatagaagggaacyaccaagcagatattgaagccaaaagagccgcaaggcaggaccctccattagaaatgcttatagaaggacccctagtgtggggtaaccccctccaggaaagcaatccccagtactcagcaggagaaataaaatggagaacctcacgaggacatactttcctcccctcaggatggctagccaccaaagaaggaaaaatgcttttgcctgcagctaaccaatggaaattacttaaaacccttcaccaaacctttcacttaggcattgatagcacccatcagatggccaaattattatttactggatcaggccttttcaaaactatcaagcaggtagtcagggcctgt

SEQ ID NO: 896107 - DNA, 470 bp, Homo sapiens
tgcattcacagtagtaaagacatggaatcaacatcaacacaaatgcccataaatgatagactgcataaagaaaatgtggtacatatacagcatggaatactttgtagccataaaaagaaatgagatcatgtcctttgtagggacatggatggagctggaagccattatcctcagcaaactaatgcaggaasagaaaagcaaacaccgcacgttcttacttataagtgggagctgaacaatgagaacacatgaacatagagaggagaacaacatacactggggcctgttgtggggtgcaaggggagggagagtatcaggaaaaatagttcttgcgtagtgggcttaatacctaggtgatgcatggacaggtgcagcaaaccatcatggcacacgtttacctgtgtaacaaacctggacatcctgtacatgtacctcagaacttaaaataaaaataaaaattaatagaaaag

SEQ ID NO: 896108 - DNA, 649 bp, Homo sapiens
ccattttgctagtgctccagcaatggaccagaggtcgcctggctctgccttcttgcctgcattgggtgttgtcagggtttcagctgtgaaccattctaataggtgtgcagtgggatcacattactgtttaaattggcaatatcttaatgaccactgatcctgaggattcctttgtgtgcttatttgccctctgtatatattcttccgtgaggcatstcttcagttctttggcccactttttaactgggttgttcccttattgttgaatttcaagaattctttgtatattttggtacaagctctttaccagagatgtgttttgcaaatgtttcctcccagcgtgcagcttgtcttcagcatcctcccagcatcgttcacagagcagaggtttcatctgaataaagtctaaggcttttttgccttcaaggtctgtgttttcagtgtcatatctaaaaactcatcaccaagcacaaagccatcttgatttcctcctgtttctttctagaagctttgcgatgtttttcattttacctgcaggttagatttttgagaggtatcgtaaacaagaggtggaccgtgtggagagtggagtgaggtaggtttgaggagcttttggggcctctgattattttgtgtgaaaatatttaac

SEQ ID NO: 896109 - DNA, 636 bp, Homo sapiens
gatgtccttgagtttcccaatgagatcccacccagctcaccaaaatcaatgtttgtcagggattttctgggcctaactagtaataaagaatgtgcatttgactgctgtgtcttctgtgtagtgtgtatctcagggcaggtttgctcagaggtggcagcttaaatccgcatctgcccttcatcccactgaagtgaagaaaagttcaatctcattcactattggagggcccctcctcttctaaggagttacccaagaatgggggcaaggtactatgtggacttagacaatgattcccccctacactcattgtctaagtccacatagtaccttgaaggtgggcatttctgctgctgtggggccagtgggagatggaaatrtctgctgatggtggaagccttgatgcctagggtccagcctccttacatgcaccatgtacccattctcctttggggccctgctttctttctggggtctttgcatagagtaaggggtgcttagttatcatgagcagaaatctccttcttttctttctgttctctaagtcactcttctgtcagcataattctttcaagatgttcaggattaaagaaaaccaaatacaggctggaagcataaacctcccctaagataaggcag

SEQ ID NO: 896110 - DNA, 623 bp, Homo sapiens
gctcactcatgtagttattggcaggtgcggtagacagaataatggtcactgaagatgtatgtgtcctaatccttggaaaacatgaatatgttatttcacatggcaaaggagtattaagattgctaatcaactatccttaaaatagggagattatcctggataatctgggttggtgcaatgtcataataaggggtataaaaggtggaagtgagaggcagaagagtagtcagtatgagagtgatgcaatgtgagaaagatattcatacacttatgaatgttccgtactaattttgataggggtattgagttcttaacttactttgtgtcgactgcaggtcatatcctgtattcagtgaaccacataccctaacatttttcattgcagaattaaattgatcaaggatttcataggaaaagtaactaaaggacttaaattatagattattacaaaatacagaaacctctcctaatctcttaycagagacacagaaacagagctttaaattaaataagctgattcttgaaaaccatgtacacaaaggtcttacatgtgtctaaggccttcagctctttttcgtggagtttatcatgaccctgaatagctcaatatttagacatgtaga

SEQ ID NO: 896111 - DNA, 652 bp, Homo sapiens
ttaaaaaaccatgttgatgtcactgtgagttaagtttaaaaatgaagataggagattaaagtttggatttagactcaataaaagtaaaataaagttttgtttgataattacctatctaatgctggcataaggctgatggatggaatcagtttrtctagtgtgatgaaaatatcctggttgaaaggctttgattttcatgaaggaaaggaaatagtgaaggtcttagctttgtgcactgaaatgtataattacatagattatgagtttggtttaatgactgaccataaaattagtattgcagacttcaacattgttatgagttatactgttcaaaaatttaaaaatatgttaggtgaggaactattggtacaattctgattcattatgcacatttgcagtgaccaacttctcttaaatatttttgttgttataccttaagtcacttcctactggactattgcaatgacttctcatgctaactatctggagttaagcaaaacctcaccagttaaggtcataaccatcaacaagactgctcttatgtcacatatcagtcaccagctcagagtttcccaggccactcacacttctaaccaatgggttacaaattcatggttttctactattccctcagttcaataattcacaagaa

SEQ ID NO: 896112 - DNA, 652 bp, Homo sapiens
ttaaaaaaccatgttgatgtcactgtgagttaagtttaaaaatgaagataggagattaaagtttggatttagactcaataaaagtaaaataaagttttgtttgataattacctatctaatgctggcataaggctgatggatggaatcagtttgtctagtgtgatgaaaatatcctggttgaaaggctttgattttcatgaaggaaaggaaatagtgaaggtcttagctttgtgcactgaaatgtataattacatagattatgagtttggtttaatgactgaccataaaattagtattgcagacttcaacattgttatgagttatactgttcaaaaatttaaaaatatgttaggtgaggaactattkgtacaattctgattcattatgcacatttgcagtgaccaacttctcttaaatatttttgttgttataccttaagtcacttcctactggactattgcaatgacttctcatgctaactatctggagttaagcaaaacctcaccagttaaggtcataaccatcaacaagactgctcttatgtcacatatcagtcaccagctcagagtttcccaggccactcacacttctaaccaatgggttacaaattcatggttttctactattccctcagttcaataattcacaagaa

SEQ ID NO: 896113 - DNA, 618 bp, Homo sapiens
tggaggttaagtcattctatgagttaattacgcaaaaatcaaaatgagaagctgattagctttgttaccagaaagttgtacttttttctttgtaaacctgtaatgacgtataatttctcagaaatactgaattcagttcctcctgacctgtttctaactacagaaccagaaaatatatacagaaacatgtcaaatgatttctaataaagtagttcctgaacagcatcttgttttgttattgaaattctctctcctatttaaaatatacacatgactaaataaaaagtgttttattactcataaagagctctttatttaaaatgatggcatttttgaaaattataaaaacataatacagctacaggaagatttctgaagattcttaaggaaaataacaaaataataactattggaaacagagttcaggttttgcagttattcataaaaaacaatgtataaactaygctatgttctgcataaacatattttaagtagaagcaaaactggcacttactataggacaacctgttatataaaaaatacaaacttaaaaaaatagaacaagaaattaggaaataatcataattaggatttaaatgaacaccaagtgttccacca

SEQ ID NO: 896114 - DNA, 603 bp, Homo sapiens
gacatgataatttccaaaattcgttagggtcattcttccattgtcttggacaacaagtcctgacttctgtttagatgattgactaatgttcccattgtcttgatgaatagctcctagtttcggttgaggtggcagattcatattaatttatcagatggtaatttggccatatacttggaattctgtctgaatcatgctttctcattctttaccacatggctgagatgagaatttttcaaatcttttaagttctgcttcccttttggtgaacaattttgtctttaaatcatttctctcttttctcattttcctataagcagtcaaagggaaccaagccatacagttcrcactttgcttaaaaatagcttcagctaaatatttaatgatattgtttggctgtgtccccacccaaatctcatcttgaattgtaactcccacaattcccatgcattgtgtgaagaacctggtgggagtgattcaattatgggggtgggtccttcctggactgttctcatggcagtaatgagtttcatgagatctcatggttgtaaaaatggcagtttccctgcacaaactctctctctttgcctgatgccatccatg

SEQ ID NO: 896115 - DNA, 614 bp, Homo sapiens
aatctgttcttttaattttacttctgcccctaattagttctatgattctcctgattaaaatgctgttgtagtaataacaatctattttttcccaaggcataacaaattggataaaatcaccattactctaagcctaagaaaaatattgagatttgcaagccaattaaatggaaaaaatgataaatgcaaaataacactgatgaatggcytaaagacaaatgcctaaataaaattcagctaccaggaatgtttgacatggtaggtaatatggcacttggaagaggctaagttttgttattatatcacaaatttgagggagacgaccataataataagtaaaattttgattcctctttcacataggaagcagagctttagcagtgagatacataaacctccttagatatcacaatttcataaaagggccagaaaaaggaggaggaaagggaaagggataaaaaacatttactgagtactcattatttgtgaaaacctttacaatccattttcacatgtactacattctatgagtaaagttacataaaccagtgtttcccaaacctgtcaggtctttatattcatctgggacaattgttaaaaatgcagattctctg

SEQ ID NO: 896116 - DNA, 614 bp, Homo sapiens
aatctgttcttttaattttacttctgcccctaattagttctatgattctcctgattaaaatgctgttgtagtaataacaatctattttttcccaaggcataacaaattggataaaatcaccattactctaagcctaagaaaaatattgagatttgcaagccaattaaatggaaaaaatgataaatgcaaaataacactgatgaatggcctaaagacaaatgcytaaataaaattcagctaccaggaatgtttgacatggtaggtaatatggcacttggaagaggctaagttttgttattatatcacaaatttgagggagacgaccataataataagtaaaattttgattcctctttcacataggaagcagagctttagcagtgagatacataaacctccttagatatcacaatttcataaaagggccagaaaaaggaggaggaaagggaaagggataaaaaacatttactgagtactcattatttgtgaaaacctttacaatccattttcacatgtactacattctatgagtaaagttacataaaccagtgtttcccaaacctgtcaggtctttatattcatctgggacaattgttaaaaatgcagattctctg

SEQ ID NO: 896117 - DNA, 586 bp, Homo sapiens
taaagagcactcatggtatactaaggaatttagaaaccccacatactcacccaggataggaaacatgctcagaaaagacctcaaaagactcttaagttttcaccactggcttatctatatgctcagggaagtaaggaagtgaargcttaggcaaaattataaatgtcctggctaaatataaaagaagggcctggaataaagtcaacctgcaaagactgggaaaggcgggttttttgtttgtttgtttgtttgattttctagacggagtctcacattgttacccagtctggagtgcaatggtatgatcttggctcactgcaacctccatctcctgggttcaagtgattctcctgcctcagcctccctcgtagctgggattacaggtgcccgccaccacacccagctaattttttgtatttttagtagagatggggtttcaccatgttggccaggctggtctcgaactcctgacctcatgattcacccacctcagcctcccaaaatgctgggattacaggcataagccaccatgcctggccttcccccccacccccatccaagctactgaagttcaaggaaaacccag

SEQ ID NO: 896118 - DNA, 586 bp, Homo sapiens
taaagagcactcatggtatactaaggaatttagaaaccccacatactcacccaggataggaaacatgctcagaaaagacctcaaaagactcttaagttttcaccactggcttatctatatgctcagggaagtaaggaagtgaaggcttargcaaaattataaatgtcctggctaaatataaaagaagggcctggaataaagtcaacctgcaaagactgggaaaggcgggttttttgtttgtttgtttgtttgattttctagacggagtctcacattgttacccagtctggagtgcaatggtatgatcttggctcactgcaacctccatctcctgggttcaagtgattctcctgcctcagcctccctcgtagctgggattacaggtgcccgccaccacacccagctaattttttgtatttttagtagagatggggtttcaccatgttggccaggctggtctcgaactcctgacctcatgattcacccacctcagcctcccaaaatgctgggattacaggcataagccaccatgcctggccttcccccccacccccatccaagctactgaagttcaaggaaaacccag

SEQ ID NO: 896119 - DNA, 586 bp, Homo sapiens
taaagagcactcatggtatactaaggaatttagaaaccccacatactcacccaggataggaaacatgctcagaaaagacctcaaaagactcttaagttttcaccactggcttatctatatgctcagggaagtaaggaagtgaaggcttaggcaaaattataaatgtcctggctaaatataaaagaagggcctggaataaagtcaacctgcaaagactgggaaaggcgggttttttgtttgtttgtttgtttgattttctagacrgagtctcacattgttacccagtctggagtgcaatggtatgatcttggctcactgcaacctccatctcctgggttcaagtgattctcctgcctcagcctccctcgtagctgggattacaggtgcccgccaccacacccagctaattttttgtatttttagtagagatggggtttcaccatgttggccaggctggtctcgaactcctgacctcatgattcacccacctcagcctcccaaaatgctgggattacaggcataagccaccatgcctggccttcccccccacccccatccaagctactgaagttcaaggaaaacccag

SEQ ID NO: 896120 - DNA, 596 bp, Homo sapiens
aagacctcaaaagactcttaagttttcaccactggcttatctatatgctcagggaagtaaggaagtgaaggcttaggcaaaattataaatgtcctggctaaatataaaagaagggcctggaataaagtcaacctgcaaagactgggaaaggcgggttttttgtttgtttgtttgtttgattttctagacggagtctcacattgttacccagtctggagtgcaatggtatgatcttggctcactgcaacctccatctcctgggttcaagtgattctcctgcctcagcctccctmgtagctgggattacaggtgcccgccaccacacccagctaattttttgtatttttagtagagatggggtttcaccatgttggccaggctggtctcgaactcctgacctcatgattcacccacctcagcctcccaaaatgctgggattacaggcataagccaccatgcctggccttcccccccacccccatccaagctactgaagttcaaggaaaacccagccacaacacaggttgaacacaagctaagctttcaacaactgaaaacaacataccctagggaataagaaaaatctgaaatcaaga

SEQ ID NO: 896121 - DNA, 592 bp, Homo sapiens
tcctggttgggtgctatttctctagaccacatagtatatatctcatatcatgtttcctcacaaatatcagaatatcctggcacttaaaagagatttttgtaaattcttatagctgatagaatgtatagtatatgacattcagtaattcacttattcatcatcgcaataagcatataacttacaatgctgcaggccytgaagtggatagtgttgaaatatttgaggcattcacagaggtatcactaccgaataattcttattaaataaatctctaggagcattattggatataaatgcgtaaatttttctaagagacctataattcttcatttgaaagggttttcagaagtcacactatccatttcctacctccaagcagagctgcatccaactttgatgactgcaatcatgtgtagtatcactgatctaagattatatatatagagagtatagtatcactgatatatagtattgtatcactgatctaagattatatatatatatatatatatatatagagagagagagagagagagagagagagaaagagagagagagagatttaatccacaccataattctaacagataga

SEQ ID NO: 896122 - DNA, 619 bp, Homo sapiens
cacagccctggttcccgctcgtgtctctccctccacacctccctgcaagctgaaggagtgggctccggccttggccagcccagaaaggggctcccacagtgcagtgggggactgaagggctcctcaaatgccaccaaagtgggagcccaggcagcggaggtgcygagagcaagcgagggctctgaggactgccagcacgctgtcacctcagtgtgaccaatgccctatattataaatgccattttttgaattggaaatgatccagacattcaacaagtacttaaaacaattttaaggttttaaactacacaaaaagttcacccgtaagcatttatctcttacatttactcaatttattcatttttagcagtttacctagattactcattggaacgaagacattagacaaagttactcatcattctgaattattttttctgttaaactgtgaatgtcaggtgttcacctaggcaagaactttaaagttaaacacatgggcatttttgccaataactcaggaattttagctgttttcactgacctaacaatattaaattagtcatacttaccaaaaaatcacacaaataaagatcattctgtttttggctgggtttacaga

SEQ ID NO: 896123 - DNA, 543 bp, Homo sapiens
ttgatagcctctgacatgaagatggccagtgctgcaactacccttaaacagtgaggccagccttttgctactacatcaatttccttacttaggtatgccactggttgtggggttgtcccaagagtctgagtaaggactccaagagctatccctgctctctctgtgacatataaagagaagtttgtgggaaggcttaaagctggaacttgtacagggcctgctttaaggttttgaaggctgtttctgcccctggttaccattctactagataagtatttgccctctgggtctccttgattagagtatggaggggcctgactatctcactgtatccagggatccatagtcggcaaaagccggtgattccaaggaacccctgmaactgttttaatgtcttagggcaaggataagccagtataggctgtattcattccttgctgagggccctggtccctctggctaagattaggcctagatatttagcctgctgtaagcaaagctgcacctttgacctagatgccttgtacccttgattaggtagaa

SEQ ID NO: 896124 - DNA, 614 bp, Homo sapiens
tttggctgggcgcagtggctcacacctgtaatcccagcactttgggaggccgaggcaggtggatcacgaggtcaggagatcgagaccatcctggctaacttggtgaaactcccatctctactaaaaatacaaaaaattagcygggcgtggtggcgggcgcctgtagtcccagctactgaggcaggagaatggcatgaacctgggaggtggagcttgcagtgagccagagattgtgccactgcactcccgcctgggtgatagagtgagactccttctcaaaaaaaaaaaaaaaaaaaaaaaaagaaaagaataaagagagtatttttccagctttactgaggtatggttgacaaattaaaattatatctatttaaggtatacaatgtggtaatttgatatgcatgtacatttgaaataattactgcaatcaagctaattagcacatttatccccagatagttattgtgtgtgtgtgtgtgtctgtgtgtgtgtatgtttgtgtggtgagagtatttaagatatattttcagcaaatttaagctatatattaactatggttaataatgtaaatgtatcatgctgtacattcgatcgccagaatttattcatttggc

SEQ ID NO: 896125 - DNA, 471 bp, Homo sapiens
tccaaaactcatgtaattaaccagtatgatatattgaaagatgaaaattcttgtccctgtccaccaggagtttgtagtctactgtactgtaaaatgtgtaactactagcaatgtgtggttaattaaatttatattacttaaaattaataatattaaaaattcagtttatcagtcacatcatatggattccacgtgtgcgatrgccaatatattagcttttttgctgctcagtatagtaactatagtgactactctattggacagtgcaatttaaattatttctgtcatcagagcaagttctattggacagtatttgtctataggatatgcacacaattaaatataaactattgtactgctaaaatggatgagcaaagtgctatgcagagatttaataatgagactgattctaactcatataatttttaaatgttcacgaaagatgttctgaggtttataaacatatttagg

SEQ ID NO: 896126 - DNA, 592 bp, Homo sapiens
taggagaaaagcatgtaaccagaaggaacagcaagtgaggagtcttcctagagtgactgaataagaaagtactagaatatcactgagctgaatgactgaggggtaagtagcaggagatgaagttaaagaaataataaagagtttagacctgggctgcccaatatggtagtcactggccacatgtgattgctgagcatttgaaatgtgattagttcaaatatgtttttaaaatggccaaraaatcaaaagagacatttcccaaaagaagacatatgaatgttaaacagacatatgaaaagatgcttaacatcattgatcatcagagaaatgcaaataaaaactacagtaagatatcatctcaccccagttaaaatggcttatctccaaaagacaggcaataaaaaatgctggcaaggaggtagagaaaagggaactcttgtacactgttggtgggaatgtaaattagtacaaccactatggagaacaatgtaattttttatattgttcaatataaaaatataacaatttttgtgaagtttcctcaaaaaactaaaaatagagctgccatacatctagcaatcccactattgag

SEQ ID NO: 896127 - DNA, 653 bp, Homo sapiens
caattctctttcctacatctattgttctgttctcttttattgttttggtaagtagttaggagcaagaaaagatgtgctagagaaaacrgagtcctatgtatctgcatgaatgtatatgcattgtgacctcaacacggctctgtcctggggacatgtgttaagacggcattacaaataaggctatggtgtttctggttgatcagtaattaagccttctgctacaagaatcaaaatgaatctattcatgatcattcccacactcatagccaggtctagggtttctgtcctgtgctgtaaaagactttggtatactaatttgtgtgtggataacaaggcagaaatgaagagttctcttcttatcaagttttatcacatgcaaacatgttatggaaacttggaagaagttgcctcactttttgagaccttgttttcttcacaacactttacttagtattttacttctattaggctgtatttatccattcctgattatagtttacttcaaaattataaattagtaggtgtgccctttcatcagtctatgaactgttcctaggaagcttttattcaaagaaaatcttttccttcagaaattatattaaagcagcagcagtactttggcaggaaaaaaataatctagtatcacaatggaa

SEQ ID NO: 896128 - DNA, 593 bp, Homo sapiens
taggagtgctaatatatcttcaagatcctggtttcagttgttttgaataaatacccagaagtagattcttcaattatgtggtagttttatttatttatttatttattttgaggaacctctatactgttttccttagtggctgcatcgttttgcatttcaaccaagagtgtgcaaaggtttaaatttctccacatcctcaccaacacttattgtctttttttttttataaaagccattctgacaggtgtgaagtgatatctcattgtggtttagtttgcatatccctaataagtgacatggaacattttttcatatatttgttggkcatttgtatgtcttctttggagaaagtccttagcccatttttcaactgggctattagtttctttgttagtttgtttgttttctactgagttgtataaattccctgtgtattttatggattaatccttatcaggtatatggcttgcaaatattttcttccgttctataggttgtcttttcattctgtcagttgtttccttcctgtgcagaagctttttagtttgatgtagtcccacttatttttgttttaatttggcttatctgactca

SEQ ID NO: 896129 - DNA, 676 bp, Homo sapiens
caaatattttcttccgttctataggttgtcttttcattctgtcagttgtttccttcctgtgcagaagctttttagtttgatgtagtcccacttatttttgttttaatttggcttatctgactcattcatttactctacaaatacgtattttataactcttatgtattaagagttataaaatacacttatctaggtgtctttatctaggagttataaaatactagtatacatacacttatctaggagtataaaatacacttatctaggagttataaaatacacttatctaggtgtatctaggcatttatctgggtgtgctacttattaacctattaactcccagctccagattgacccttccgcactctgttgtatgccacaatatcttttcatgttaaattatatatgttataaaatggaaagtgacatggtttctattttcttcactgtcagaccccagaatttctgctctgtgtccagcacctccctgggaactaaaratacagaagtaagcaagagcagatgcagttcctaccatcacagaactcatagtctagtccaggagatagacactaatcagttaattataaaatggcactgaaatttcagatggtgatagtaatactgaggaaagaggcatctggtagtgaatgctaggagcatgggctgtgtggtc

SEQ ID NO: 896130 - DNA, 676 bp, Homo sapiens
caaatattttcttccgttctataggttgtcttttcattctgtcagttgtttccttcctgtgcagaagctttttagtttgatgtagtcccacttatttttgttttaatttggcttatctgactcattcatttactctacaaatacgtattttataactcttatgtattaagagttataaaatacacttatctaggtgtctttatctaggagttataaaatactagtatacatacacttatctaggagtataaaatacacttatctaggagttataaaatacacttatctaggtgtatctaggcatttatctgggtgtgctacttattaacctattaactcccagctccagattgacccttccgcactctgttgtatgccacaatatcttttcatgttaaattatatatgttataaaatggaaagtgacatggtttctattttcttcactgtcagaccccagaatttctgctctgtgtccagcacctccctgggaactaaagatacagaagtaagcaagagcagatgcagttcctaccatcasagaactcatagtctagtccaggagatagacactaatcagttaattataaaatggcactgaaatttcagatggtgatagtaatactgaggaaagaggcatctggtagtgaatgctaggagcatgggctgtgtggtc

SEQ ID NO: 896131 - DNA, 594 bp, Homo sapiens
gtgcactataggttctgcattctattccagaaagagttttgatatgtgattacatgtaattacatgtgttggtttcacttagatttgtgtaagttaatatattttttaaattttttaattatttattagaacatgtacaaaatttattccctcagattattttaggtggaagaaatggtcactttacatgagcaattaaagtgtcctttttgcatttatatatatatatattttgcatttatatatatatcagtatatacatatcagtgtacatatatgtgtgtgtgtgtgtrtatatatatatatatacactaagcaatttgaaaggcaatatgtaattgagtttagaatgcgactgatagtttggaggaggtagaaggagcatactcctttctgtttgcttctttttcgtatctggaaggaaatgttttctttctttattttttcccccattttaacccggttttacacctttaccacctcccaactgctctattgtaacaatcttgtaactggctttctgcctttagtgtaaacctgcacacatacacacaccttccattctgcaccaatagtcataggcttaatcttaat

SEQ ID NO: 896132 - DNA, 597 bp, Homo sapiens
gtatgagtcaactatgttttcttagaaaaaggaggaggaaaaggaggatgagaacgtagtacgagttataggcaaatattgctacttcttttttttttttttttttttttttgagacagagtctcgctctgtcgcccaggctggagtgcagtggcgcgatctcggctcactgcaagctccgcctcccgggttcacgccattctcctgcctcagcctcccgagtagctgggactacaggcgcccgccaccacgcccagctaattttttttttggtatttttagtaaagacggggtttcaccgtgttagctaggatggkctcaatctcctgaccttgtgatctgcctgcctcagcctcccaaagtgctgggattacaggcgtgagccaccgcgcctggccaatattgctacttctaaaataattgcaaagctaaacatatgggatgcaaggtcagatggtacaaatgccaagtggtactccattctacattcagcaaaaatgtattgtgtacctatatgtgaaagacatcatgtagggtagacatctatgatcaattccttttggcatctgggctatagactcatttttaagtaaaaag

SEQ ID NO: 896133 - DNA, 659 bp, Homo sapiens
aggaggctgtggcccacataatgtcggttcaatttggcctttaagaaatctcagctatatcagtggggtggtgggagtgatagaaaagttgcaaggttttaaaaaatatatagataccaaagaaagtatgggtataaagtgtacacaaatactttgagacatwaaaatgagaaagggaagctagggtgaagtgaggggatcaaaagagaaggaagagtgtcggctcctctgctgcatttatacatcacctttgtctgaataaagataggctatttatattaacagagggtttaactcacacacatgccagtcagtgaagatctgttccagggcctgccaggttcactcccaatcctgtgagtcagatgactttcaattatgtgctgctacaattatgggagaaaaaagaagagagaaatgtatagcaatattttccaaatatatacaagaacacccttcaatttgcccaaaactctacccatcagcaaatttttatcaagcatctctatgagctacgttccatgctaagcactatttttcaagttagcaacaggatgtttttgctgaagtactgagtcccaaatgtatcatgattgcaattctctttcctacatctattgttctgttctcttttattgttttggtaagtagttaggagc

SEQ ID NO: 896134 - DNA, 683 bp, Homo sapiens
ctctaaaccatatgcaatacagatttgggtctttcattttttatgggaggctgtgttttttcacccagatccctgggcagacacaagccactggcaccttgtaatagcccagcagcctttggagggtcctagctttaagcagaggtctcatttcacccagcccaagaacgtagtccctgtccctgccagtttcttgtctgataacagtccccacagttaccacatcatcagctttccttctcatgccactggctttcagttccctcttcatttcttcctttcttgtgagttcaaccatgtcttgtaactgttttatattgtatttaatattgggcttttcgttgttattgttgttgttgtttgaggcagggtctttctctgtcacctaggctggagtgcagaggcgccatcatagctcactgtaaccttgaattcctgggctcaagtgatcctcctgcttcagcctcctgagtagttgggactataagcacgtgccaccatgtctggctaatttttaaaattttttttgtaaagacrgggtctcactatgttacccacattagtctcgaactcctggcctcaatcaatccgcctgcctccggctcccacattgctgggattgcaggcatgagccatggcacctgatctcttgtttctgaagctggaaaggttcctctttagct

SEQ ID NO: 896135 - DNA, 548 bp, Homo sapiens
ccctgaatacatgatcatttccagggaactttctagatgcattccctctctgcctgtttcacctcagggtgatcagtaagaacctgcagtgggatgttggaggttgtgcctggattctggggggaaaagctcatagtagggtgagggctgaggccccaggccctctacctgagggcaagcaaagagtcctgtggacaccttgctaggagcacaggtgatgaatcagcagaagacacttctgtttccatgacaatcggatataagccagtctgaacttttaaatccaattatttagtaaactcttagggttagaagaaggtctatgtggaggattgttattatccattaaagaygttgttttgtttggtttggtttgaagtgctgaataggtcagagttgttttgctgttggtgaaaccctgtaatgcatttagggcagagcagcaaaatgtgagttttcacatacattctagttctatttctgcaaacaaaaactgtgtgacctaggtcctagggtatgtccttcctttatccatccatccatccaac

SEQ ID NO: 896136 - DNA, 522 bp, Homo sapiens
ggatctcgactcactgcaacctccacctcctgggttcaagtgattctctggcctcagcctcctgagtagctgcgattgcaggcatgcaccaccacactcatttttgtatttttaatagaaatggggtttcactatagtagccaggctggtctcgaactcttggcctcaagtgatcctcccaccttggcctcccaaagtgctgggattagaggtgtgagccaccrtgtcgagcctgatgatgatgataataaagatttgacaattcgctatgttccagatattgttctaaatcctttacacgtttgagctcatttaatccatacgataaatagtctatatgatctacattcatgttgagaacgttcatgtgtagcataactgaatgtacctactatgaataatgttgagcaaaataaaaattgaaagataaacttttcgagtgtaattttcctattaaaggccttaatactcacctgggggaaagagcctattgcatgatattaaaggcatttgcattttgtt

SEQ ID NO: 896137 - DNA, 646 bp, Homo sapiens
tgatggcagtggtaaagctgagaactatacctgacttgattagaatttgttggaggaggggcagggggctatgaagagttgcattgggaggagggggttgggctgagatgccttaaacgggtttgagctgggaatggggatttttctctctcaagccacaacaaagattacaaggcagtcgcaaagagaactggcttgagtacaattatggctagtaatttagtcaggggctaatttagcagcttcctctcatctttgaagggttcaacttttytacacctttcatccactcagtctcaagtgatgcattatcatcttcgttcgtcagaagcagcagcttctggtttcccaaatccattcagccaataatttgctgtgtctctatctgtggtataaatagcaaaggagtagaatgaccttttacagaaatgatggaatccagcatttaaaattgtctattttaagttgcctcaatttttgcttttgcttagaataactgcctttttttttttttttttttttttttttttgggagagagcagtgggaggtctgtatttgagtgataattcagggttatgttgctgtatgcatttatttcttaaactccttattcttcaactcaaagtatgaataatgttgcattgg

SEQ ID NO: 896138 - DNA, 661 bp, Homo sapiens
gtacactacagcctcgtactcctggccttagcatcttgagtagctgggactgcaggtgcacatcacagtgcctcgcttactttttccatttttgtctgttgatcctctctctcttcctttggggtaaaaattgtggcttgtgatggtggtttgtggggaaagaaaaagttggtaagctacaagctmtgagcctttaatgtgtttttgttaaccatgcagacagacattagatacatagatacaacatagatgagttaaatttgaaagaaggcaccaaactttgttactttaaagcaggatttctcaaagggacactgttgacattgatttcagaagtgagattttcatggtttttaatgttattattataatggtatggatagtgttttgccctctaagaagtagctaggagtgtttccatagatgcatttagtttatatcacttatgtattctgtctctattttgtaagaaaattgcctatgaacagaattttttctgtatgtggatttaatgtcttcttctaaaggaaacatgggtgtggttcacatttccttagttttgagtagcatggcttaagttgtgatccaattttaaaaaatcagttgaataaataaatagaaaataaaaggataatttctgtactaaaaaagtcagctggac

SEQ ID NO: 896139 - DNA, 637 bp, Homo sapiens
taaagaaaataagactctaagggaaaggattggaaaataatgtgtctactgtgtgttagcaactactatttttttaaaggaatataaaattatttattaaccactgttcaccagtatttacaataaagtaaacaatatacagttgaataacattctgattactacaaagttgttcttcctggcttttgctgaaccagtaaagcaaagtgaagattgagcctacatgtaaggaatgagttggggtaaagaaaaaacatgcaggtcaataggttagattacaaaaggttgttcacacatttgtagcagcaggtcctaaactgccaacatctctaaccatctgatcaggtttctatgagccaagtcttacatattccattcatcattaccttttagtcaatgtagtaacagggatttcaacattttgttarggaatggcacactagggaaattttttaatgttcatttaatttagttttgtttagctagttaaaacacactagcatttgtctagtttcctcatctggatgaggaaaactgctgtgatggcagtgataaaatttttccttttaggaattttgcaaataaaccactgcaattatagatgatttaaaattatccaatttaaattgtcctattt

SEQ ID NO: 896140 - DNA, 586 bp, Homo sapiens
tgaagggttaagtgctgagagtatggacagcacaaagtgtcctcgtccagcctctgtccgcctccatctctacaaagaccttgaatcatgtttcatagggaagattaaggccaacggtcatgagcttgatcagcgtcttccccaaacatctctaatccaattcccttatctgcccactttcaacttcatcatgcctttctcaggagaaagggtaatctttatgcagttcagagtcaaatctttctactgtcatctttatcctgccttctcccacttcctcacaagttattccctctctttcatgtttcaaatgtctgaattcttaaggaaaacaacaacaacaamaaaaaaaactaaaattaaaagagcaaacagcccaaccttgcactcagtgtccatttacagtcaagtaccttaacagaattatctacacatagggtctcaccacccattgactcctctatcttcaacgaggcctctgcctctgccactgccctgaaattgctaagaggcaaagacctcctctacaccagttccaacatcccttttctggcctaacttgattgcttttctgggccatctaaca

SEQ ID NO: 896141 - DNA, 578 bp, Homo sapiens
agaaatgagaaatgacagtttctgtcactgagaaaattgcctcagtgacaaatactcaggaatttcatgataaaaatcagtaggtcatttaaaaatactttacaccaaggtgcactcaatatccaacacggtgtagagcagtartgaagaccaaggtacccgctgtaatacaaccttgtttaccttctagacagttctgactaaacttttattcttgaagctgtgctatttttgtcattttaatatatgtgaggacagactatatccaatgaatttctagaatttcacaaattctggggaaaaatcttttcctgggacctttgcagtttgatgatatcattccaggtggtatgaatgggggcaggctcaccaaccccatgggtaatcagacttgggccaactggattttggaatcacctgcagtgtttacatttctcccaaggagggtagggacctgtcaggaaggaaaaaagtagcctgaaagggaacgttgaacagctgttttccatcttccctgaagaaaagaagggggaaattaacttaaagcaagcatcaagaaggatttatggtaaatacag

SEQ ID NO: 896142 - DNA, 634 bp, Homo sapiens
ttcaattgttagactgctagataagctagaatttatttatagcttatcttagaaagtgtaaccgtttcattttctcttttggccttctgtaagcaaaattagatgccccagtactctcataagtgacgtttgtacactcgtatctctaccctcgtttccctttgcctccatgaaaataatacagattttactttttttctacatatgaaatgataaccaatctctgaaaagctggatactaatggtttgtagtttagtagtaacatgcaccaggctaayctctaccactaaattatgaatttagttagatagccactacatttctcactcaggtggtctctggtggatgggggaggaacccttcagacttgacatcagaaaatgtttgtgagcactttaaacatattttacatgaattattctaatataaggaagttatacaattatcatcactggtataacaaagaaagtgggcttcacattatataatgaaaaagtgtgctgtcttcatgaaaacctttcaggggacaatgatagaaatgttctttgactgtacagagctgcagttaataaaagcctgacctaaagtttttttttaatgttgtattttaaggtggtgaacaccgttattata

SEQ ID NO: 896143 - DNA, 634 bp, Homo sapiens
ttcaattgttagactgctagataagctagaatttatttatagcttatcttagaaagtgtaaccgtttcattttctcttttggccttctgtaagcaaaattagatgccccagtactctcataagtgacgtttgtacactcgtatctctaccctcgtttccctttgcctccatgaaaataatacagattttactttttttctacatatgaaatgataaccaatctctgaaaagctggatactaatggtttgtagtttagtagtaacatgcaccaggctaacctctaccactaaattatgaatttagttagatagccactacatttctcactcaggtggtctctggtggatgggggaggaasccttcagacttgacatcagaaaatgtttgtgagcactttaaacatattttacatgaattattctaatataaggaagttatacaattatcatcactggtataacaaagaaagtgggcttcacattatataatgaaaaagtgtgctgtcttcatgaaaacctttcaggggacaatgatagaaatgttctttgactgtacagagctgcagttaataaaagcctgacctaaagtttttttttaatgttgtattttaaggtggtgaacaccgttattata

SEQ ID NO: 896144 - DNA, 635 bp, Homo sapiens
cccaagcgctactacaggagacatccgaaaagcttcaaaagttgttcagggaaatttgagaatgatacttcacaaatttttaataataaaaaattatccattgatggaaacctcactaatttttgaggcaatcatgatggaatgacatagagacctccaggctatagtcactgaatacaatataaacagaatagcatccttagtgaacgccaamagcatagataacaaaaagagtaggttgggactctggtttcctgaaggaggaacagccataatttttaaatctcttaatactgaagggacccttaggaaatctctacaatttctctgcaaatcgctttctctcttttgcttcaatttcctctcttccagctccagagaacatccctcactcatacactcacccacaatgtcttcacctccacaggggctcatcacggtggtcagggcaagggcccccagcatcagagctttgtttaggatcatcctcttcccaaggcagccttagcagttgctgttctgagttgtagagcaattgtgaggacctcgagacaaggcaatctgaagacacccaaaccaaaccctgccaagtcaggttttggctaattagaaaaatcccctatgatgacacctca

SEQ ID NO: 896145 - DNA, 610 bp, Homo sapiens
atgggaatatgtgattttagagatgggagatgataaaatttcagcaattaccatgagaagatccggaaatctcttgagaagaagggagtaaaacttggtatgaaagattagtttcagtaaagagaggcggaatggtggacacrtaccattggtggcagcggtagagttggactgtctcatcatgaattccaaggtgtgttttcccacagccatatttctcagtgcactctgcgggtcaaaacttataaatttgctaaacataggcaactgccagacagtctctttcgtctccaggtccacgtagaactcctcgtctccatcaaattcatgggtgtactggccagagggaccgtgagactggtagaagttcacaccataggaggcaacatggtcagctgacgagtgaaggtgacaagcaggagggtggaacacagggagaaagaaccttaatacagaaagtgattgaagaaactcactttcaaatattatgggcttcatctttggcacagtccctgaacaatcttcctaacacctgcttcctccttgcctaacgttggtagtcatcaggttagaactgattctgtctttctcactataacatatgctccac

SEQ ID NO: 896146 - DNA, 610 bp, Homo sapiens
atgggaatatgtgattttagagatgggagatgataaaatttcagcaattaccatgagaagatccggaaatctcttgagaagaagggagtaaaacttggtatgaaagattagtttcagtaaagagaggcggaatggtggacacataccattggtggcagcggtagagttggactgtctcatcatgaattccaaggtgtgttttcccacagccatatttctcagtgcactctgcgggtcaaaacttataaatttgctaaacataggcaactgccagacagtctctttcgtctccaggtccacrtagaactcctcgtctccatcaaattcatgggtgtactggccagagggaccgtgagactggtagaagttcacaccataggaggcaacatggtcagctgacgagtgaaggtgacaagcaggagggtggaacacagggagaaagaaccttaatacagaaagtgattgaagaaactcactttcaaatattatgggcttcatctttggcacagtccctgaacaatcttcctaacacctgcttcctccttgcctaacgttggtagtcatcaggttagaactgattctgtctttctcactataacatatgctccac

SEQ ID NO: 896147 - DNA, 603 bp, Homo sapiens
caatgtactttggggagttctgtgaggaggatatcgacagccttacagtccgacattcttcacaactatctgccaatcaaaccaaactacacttcctttcatgtctttgcaagggtctgttttttctccctgaaagaagttatcttttaggatttcctggagaaatcctaaaattcatccttgaggtttctacttagttaacaactttgcagctaagtsctctcaacatgtttttgaccgcgttgtgacctccaacgcctcaatggaatctcaatgtctggctctccaagtttgtctgttcctcctccagctcaccttcttccctacccagcatgactgccctggttggttacttaacaggccaccaacaaagactccttatccttacaataaactttgactccttgttcaaacatgaatatatgtggaatacatgcaatccttcttttcatctggtacttgtcctgggtgctgagtgttgctggaggacatcactctactggcccagctggaaccaagtcatttttatagtttcagcctctgctgggccactgtcctgctcagcagggccttctgctttcctgtgccccatactgtttccat

SEQ ID NO: 896148 - DNA, 603 bp, Homo sapiens
caatgtactttggggagttctgtgaggaggatatcgacagccttacagtccgacattcttcacaactatctgccaatcaaaccaaactacacttcctttcatgtctttgcaagggtctgttttttctccctgaaagaagttatcttttaggatttcctggagaaatcctaaaattcatccttgaggtttctacttagttaacaactttgcagctaagtgctctcaacatgtttttgaccgcgttgtgacctccaacgcctcaatggaatctcaatgtctggctctccaagtttgtctkttcctcctccagctcaccttcttccctacccagcatgactgccctggttggttacttaacaggccaccaacaaagactccttatccttacaataaactttgactccttgttcaaacatgaatatatgtggaatacatgcaatccttcttttcatctggtacttgtcctgggtgctgagtgttgctggaggacatcactctactggcccagctggaaccaagtcatttttatagtttcagcctctgctgggccactgtcctgctcagcagggccttctgctttcctgtgccccatactgtttccat

SEQ ID NO: 896149 - DNA, 580 bp, Homo sapiens
tactgcacattaactttacccttctcaataatcatggaatgtttaacttcagaggagagttcataagttaatagggtgaatcaattgagttaatagaaattgagatgattgagatgatatttttaaacaaaaaagtttttgaaaataaagaacagaaaactttatttgaacaagaaaaagttaagaatgttacatttcaaaaaatttaaattatttttaatttacaaataattgagtacttataaggtacaattgacatttcgatatatgtatacactatgaaatgattaaatcaagctaattaacatatccatcacttcacatacttatttttttatgtggtrtgaatatttaaaatctgtcttagcaattttcaaatatacaatacagctggccctgtatttgtgggttttgcatcctctgattcagtcaaccatggattgaaaatatttggaaaaaatgataaaatacaacaatacaacataaaaataatacagcttaaaagaatacagtataacaactatttacatagcatttacattgcattaagtattataagtaatctaaagatgatttaaag

SEQ ID NO: 896150 - DNA, 580 bp, Homo sapiens
tactgcacattaactttacccttctcaataatcatggaatgtttaacttcagaggagagttcataagttaatagggtgaatcaattgagttaatagaaattgagatgattgagatgatatttttaaacaaaaaagtttttgaaaataaagaacagaaaactttatttgaacaagaaaaagttaagaatgttacatttcaaaaaatttaaattatttttaatttacaaataattgagtacttataaggtacaattgacatttcgatatatgtatacactatgaaatgattaaatcaagctaattaacatatccatcacttcacatacttatttttttatgtggtatgaatatttaaaatctgtcttagcaattttcaaatatacaatacagctggccctgtatttgtgkgttttgcatcctctgattcagtcaaccatggattgaaaatatttggaaaaaatgataaaatacaacaatacaacataaaaataatacagcttaaaagaatacagtataacaactatttacatagcatttacattgcattaagtattataagtaatctaaagatgatttaaag

SEQ ID NO: 896151 - DNA, 634 bp, Homo sapiens
ttccagttgccaaaattaagtatctacatctttttttttcccccaatattgtcaaagctgaaaatattgacattctgctgtagcaataagattccttgggctttgctcacagattaattctaaatttgaaaaaaaaagtttatcactttctaaatatcacttatgtagtcaggtattctttgcttgccaagaaactgctgtagtaggatccsttttcagtgagatcctgggttaaacccagtttcctggattccttaccttcctatatcctgattaacaatctcaattggtcatatccttagtcaatttctagtaaaactctgcgtggtaggtaaattttatgtcctttcacattcacaggtatttttattctttctccatgcctgattgtgactttgaaaagatctacatttattaataaaaaataattttcctttagaacttcaaggactttctcattatcttaataatagaagtattttttttgttgtcagtttgtttcattttggtttccgccactggaatattttatgacttttctataacacctgaagttctgaaattttgaaaatgagatatttagaagtgagtctgttaattttgctaaatacctgacaagactattccatggaag

SEQ ID NO: 896152 - DNA, 634 bp, Homo sapiens
ttccagttgccaaaattaagtatctacatctttttttttcccccaatattgtcaaagctgaaaatattgacattctgctgtagcaataagattccttgggctttgctcacagattaattctaaatttgaaaaaaaaagtttatcactttctaaatatcacttatgtagtcaggtattctttgcttgccaagaaactgctgtagtaggatcccttttcagtgagatcctgggttaaacccagtttcctggattccttaccttcctatatcctgattaacaatctcaattggtcatatccttagtcaatttctagtaaaactctgcgtggtaggtaaattttatgtyctttcacattcacaggtatttttattctttctccatgcctgattgtgactttgaaaagatctacatttattaataaaaaataattttcctttagaacttcaaggactttctcattatcttaataatagaagtattttttttgttgtcagtttgtttcattttggtttccgccactggaatattttatgacttttctataacacctgaagttctgaaattttgaaaatgagatatttagaagtgagtctgttaattttgctaaatacctgacaagactattccatggaag

SEQ ID NO: 896153 - DNA, 609 bp, Homo sapiens
taaatcactaaagggctaaggaaaacaaatgtacttttcatataatatgatccattctttttaataaatccattataaacataactgcagtgttttcttatatatttatatactacgtgtaaggcactgtctatataccaagattattcaaattctgtcaataactctgcaaggaaaatattatcactcccacattgtggatgagaaaaataaggttcagaaatgtcaatcagatactttacccagtaaagtttaaaataytagcttcaaaatactgagtcaagtatttggatttaggtttctttgtacaaaactatgctgtatcaattattatgttaatgttttgtctcttttttttctcctattacattttaaactcactgatgcagatagcatggacagaaatatcctggcagatttcatagctgtttagagccctcaggtctctgtggacccatttcctctgagagattttctattaggagaccacgaatccagtgtaggacacaacacccactactgctgctacattgtctcaactgtcttgttcttcctaggatttctctctcataggctcatgctttccttagccaggaagggggaggagca

SEQ ID NO: 896154 - DNA, 609 bp, Homo sapiens
taaatcactaaagggctaaggaaaacaaatgtacttttcatataatatgatccattctttttaataaatccattataaacataactgcagtgttttcttatatatttatatactacgtgtaaggcactgtctatataccaagattattcaaattctgtcaataactctgcaaggaaaatattatcactcccacattgtggatgagaaaaataaggttcagaaatgtcaatcagatactttacccagtaaagtttaaaatattagcttcaaaatactgagtcaagtatttggatttaggtttctttgtacaaaactatgctgtatcaattattatgttaatgttttgtctcttttttttctcctattacattttaaactcactgatgcagatagcatggacagaaatatcctggcagatttcatagctgtttagagccctcaggtcyctgtggacccatttcctctgagagattttctattaggagaccacgaatccagtgtaggacacaacacccactactgctgctacattgtctcaactgtcttgttcttcctaggatttctctctcataggctcatgctttccttagccaggaagggggaggagca

SEQ ID NO: 896155 - DNA, 611 bp, Homo sapiens
catttgtggtttttaaaaaaaattgccctgatgatttgtgcagaatgtactatagaggagctagaattgaggtagaaaaagcaattaggagtcagcgaatcataatctatggcagggatgaagagggaagaagatggtaaatagtcaaatttcagattttttttttragagtagtgaaatgcagtagtgagaagggaggagtgagttaaaacaaggagtttgatgtctaactaaccatgagcaatcagttgagaataactcactgcctttcgaccaccctcagatttattttgatgttagatagatcagatgatctttctaatggattagatgtgaacagttagggaaagggacgatttaagggtgtatcctgggctttttacctgaataactggagagatggtggtaccgtttactgagatacagaagccttgaggaagaacaggctctgtttgtatgtatgtgttttggggaagtggaaataagaagagtgttcaaataactgttttggctacattaaagatcaggtgcctattagaatttcaagtgaagtgttgagtagacaattggatatgtgagtttagaactcagcgtagctggaccagagattg

SEQ ID NO: 896156 - DNA, 575 bp, Homo sapiens
agccatcattctcagcaaactgacacaggaacaggaaaccaaacaccgcagtgagttgaacagtgagaacacatggagacagggaggggaacatcacacaccggggcctgttgcagggcggagtgcaacaggagggagagcattaggaaaaatacctaatgcatgcggggcttaaaacctagatgacaggttgacaggtgcagcaaaccaccatggcacatgtataactatgtaacaagcctgtacrttctgcacatgtatcccagaacttaaagtaaaatttaaaaaattgaaaaaaaagagattaaatatatacatatgtgtatatttatgtattatgtatactatatggagatatttacttaatatataacacatatatacataacataatttatgcatatatactatatacatatatagacatatacatatgttaactatatgtgatatattacatatatgatgtatatacatatatagtgtatatatacaatatacatgcatatacatatatacaatataatatgatgtattatataaaaatatataggcactatatatgtatattgtat

SEQ ID NO: 896157 - DNA, 579 bp, Homo sapiens
tattgaggaacaaagtttgcacagaatcaggggctgcagatggtatgaaatgatttcctaatagtacaggatattatggccatgccctctcctctctttatttgctggtaatagcctgatccagagcaactttggaaagcaatggatctcattaggaatcttgctgaaaacagagcccaagagataatccgccattctcttgataaataggtaccatagtttctggttatcttttatgatattccaattagcagagggttggggtaagaatgaacaaatgattgaattgtgggtcctgataagtgtatattatctagcatgactgagtgccttttgtatgccrggaactttaacgaatgctttatgtacattatcttaatcttttatatacatatatatatataaatatatatatataagcaaactcattgtatatatagatgacaaaactgagacttgaggagaatgtgtagcttctcaaaagccatatagcaatcaaaagagctgaaatatgaactcagattttagggactcaacttcattgtattatagaccaatcattatttgtcttcccatgtt

SEQ ID NO: 896158 - DNA, 628 bp, Homo sapiens
ctatagaaaggatattaggacacattttgttgaataaaattagaaatgatggttaggcattactgaaatgttactatatccacatacatttggagataaatacacttctatagtcccaactgaggacctaaccatcatttatagcattgtttctcaaagcattggctgtgtatcactttcatcaaaattgtctgcagtgtttattaaactgcaaaaccctgagcttcagctcatatctactgaacctaaatatcttgaagcaaatttctgggactctatatttgtaacaagttctctacctccaggtgtacaccaaaagattggaaccacatttaaagcataacsacagtctttatagagcaatacatgccattctaaaattactcaccaattttgtatatagagcattaataattgagagaggcatgttcccttcctttgacaaccagtaatgttttcccactgccctcttttttttctatttgtttttcttttacagtggcaaaacatatataacattaaatttaccattttaatcatttttaagtgtacaattcagtgacattaattatattcacaatgttgtgcaactatcaccatgatctatttctgaaattttttatcactc

SEQ ID NO: 896159 - DNA, 595 bp, Homo sapiens
tttgtttatccatttatttattgatgggcatatatgttgtttccaaattgaagatattacaaaattatctccttgtgaatactttcaagatttttacctaggtccatgctacttaaaatgtggtctttagatcagtgctaatccattaactgatagttacatgtctgtaacgagataaggagctggtcccagaatgcaaatcaacatgctaactaaatttactatataattcagttgataattattttcataataagaatttctcaataaagaaagcactgaattaatttacactttgacacaggctccttatctcatggaagacagataaaaaatagtcctcagaccagtgaccctgagtagcttttgttctgattaaaagtggaatttctgagtcctaggatgagtgcatcttcaacttcactagctattgcttaattggcccrtaaaatatttgttttgttgttgttgttgaggaatgacattttattttttaatttctgtgggtagatagcagatgtatacaattatgaggtatgagatgctttgatacaggcatggaatgagtaataatcacatcatgaagaatggggta

SEQ ID NO: 896160 - DNA, 638 bp, Homo sapiens
cattttgatttaatttttatatggcaaaagatagtggtctagtttcactctgcctatggatatccagtttttctgtcaccacttatagaagagactgtctttcccccagtgtatgttcttagcaactttattgaaaatgagtttgctgtgagtgtgtgaatttgtttctgggttctctactctgtttcattggtctgtgtgtctgcttttatgctggtaccatgctgttttgattactacagctcagtagcataatttgaagtcaggtaatgtgattcccctgagttttgcactttttsctcaagatagctttggctatactaggtcttttgtggtttttataaattttaggataatttttttctatttctgtgaagaatgtcattggtattttgatacagattgcattgaatctgtagattgctttgggtagtatggacatttgaacaacattcttccaatccatgaacatggaataactttccatttgtggtgtcctcctcaatttcgttcatcagtgttttatagtttccattatagagattttactcctctctggctaagttaattcctaggtatttaattttatttgtggctactgtaaatgaaattactttttaaatttctttctcacattg

SEQ ID NO: 896161 - DNA, 596 bp, Homo sapiens
cctcccacaacatgtgggaactcaacatgagagtttggtggggacacagccaagccatatcattccacccccggcctctcccaaatcttatgtcctcacatttcaaaacaaatcatgccttcccaacagtcccccaaagtcttagctcatttctgcattaactcaaaagtccacagtccaacatctcatttgagacaaggcaagtccctttcacctatgagcttgtaaaatcacaagcaagttagttacttcctagatacaatgagggtatgggcattgggtaaatacaaccattccaaatgggaaaaattggacaaaacaaaagggctacaggccccaagcaaatccaaaatctagtggggcagtcagatcttaaagctccaaaatgatctcccttgaytccatatctcacatccaggtcatgctgatgcaagatgtgtgttcctatggtcttgggcagctctacccctgtgagactgcagggtacagcctccctcccagctactctcacttgctggcattgagtgtctgcagcttttccaggcacacgatacaagctgtcagtggatctaccattctgggatctggaggatggt

SEQ ID NO: 896162 - DNA, 648 bp, Homo sapiens
cagtcagatcttaaagctccaaaatgatctcccttgactccatatctcacatccaggtcatgctgatgcaagakgtgtgttcctatggtcttgggcagctctacccctgtgagactgcagggtacagcctccctcccagctactctcacttgctggcattgagtgtctgcagcttttccaggcacacgatacaagctgtcagtggatctaccattctgggatctggaggatggtggccctcttctcacagctccactaggcagtgccccagtagggactctgtgtgggggcttccaacccacattttcctcctggacttccccagcagaaggttctccatcccctgaagcaaacatttttctggacatccaggaatttccatacatcctctgaaatccgggtggaggttcccaaaccccaattcttgacttctgtgcacttgcaggctcaacaccacgtggaagcagccaaggcttagggcttgcaccctctgaaacaacagccctagctgtaccttggtccattttagccatggctggagtctccaggattctgagcaccaagtccctagattgcacagagcaggggggccctgggcccagtccatgaaaccattttttcctcctaggcctccagacttgtgatggg

SEQ ID NO: 896163 - DNA, 577 bp, Homo sapiens
aggggaagagctgtgattgtcagctcacctcaaaagggtcacctattctctgcaattgtatttcatctagtgcatgttgcttccacagctctccttttcctttaaagtacgaattttgtgttttaaatttttaacttttctagctggtgtactgggagtgttgagttaatctrgcagtatcccacagagaagtcaaagtcgtatatttatgttctgttatgtttttcttggattttattattttttgttttcttatatattttttaattgatgccatgcagaagaaaaatatgagtgataatttgaggctccaggaaatattatatttctctagaggttatttagttttgcttgtgtcaggcaatgaggctatgaggctaaggtcattaatatctcaaatcacccaaatctagtctaggattagttagttagaactcaagattcagttcctatgaaggatgatctgtttctatttcaccttattccacatattagacttccaaggtttctatggaaagcgtatttttatcttatggagtccttcctttatttgtgaggcatgaaatccaaatttgtc

SEQ ID NO: 896164 - DNA, 577 bp, Homo sapiens
aggggaagagctgtgattgtcagctcacctcaaaagggtcacctattctctgcaattgtatttcatctagtgcatgttgcttccacagctctccttttcctttaaagtacgaattttgtgttttaaatttttaacttttctagctggtgtactgggagtgttgagttaatctggcagtatcccacagagaagtcaaagtcrtatatttatgttctgttatgtttttcttggattttattattttttgttttcttatatattttttaattgatgccatgcagaagaaaaatatgagtgataatttgaggctccaggaaatattatatttctctagaggttatttagttttgcttgtgtcaggcaatgaggctatgaggctaaggtcattaatatctcaaatcacccaaatctagtctaggattagttagttagaactcaagattcagttcctatgaaggatgatctgtttctatttcaccttattccacatattagacttccaaggtttctatggaaagcgtatttttatcttatggagtccttcctttatttgtgaggcatgaaatccaaatttgtc

SEQ ID NO: 896165 - DNA, 656 bp, Homo sapiens
aaaacaggcttgtggcttcatggagtgcattagtgataaagacggtgaaaaagataaagtggacaggcttggcatgtatttttgcttagcttgttaatgaattactgtaaagggggtggaacaatcaagtttattcctgaggattttgttttgacaaataagtgggtggtagttttgtttattgagataggaaaaactgtgggaggaaatgatttgaagtgggtggttggaaataaaagttttgtttaaattagagatgatttattgacatttatgtagagcaatcagaaggtcagtggcatttaagagactcatggtgaggtgaggctagggcktcagatatttatgttggcggcatcaatacgtgtagtgtgttaaattctagggagtggaagaggatacatagggagatggattgtgtggagaaaaaagaagagggcacaggccagcaaagtgggctgagacagagcccagggatgttggagaaaaaccaagagaacataatgcgtgtaagtcaaggaaaatatatttttttcagggagaagggagaggccaattgtggtgagtaccactaagcagagggggaagtgagaacgtgacagagaagcaagtgctgggtttggtggagttgatatttgtagtcaatggagtatcca

SEQ ID NO: 896166 - DNA, 656 bp, Homo sapiens
aaaacaggcttgtggcttcatggagtgcattagtgataaagacggtgaaaaagataaagtggacaggcttggcatgtatttttgcttagcttgttaatgaattactgtaaagggggtggaacaatcaagtttattcctgaggattttgttttgacaaataagtgggtggtagttttgtttattgagataggaaaaactgtgggaggaaatgatttgaagtgggtggttggaaataaaagttttgtttaaattagagatgatttattgacatttatgtagagcaatcagaaggtcagtggcatttaagagactcatggtgaggtgaggctagggcgtcagatatttatgttggcggcatcaatacgtgtagtgtgttaaattctagggagtggaagaggatacatagggagatggattgtgtggagaaaaaagaasagggcacaggccagcaaagtgggctgagacagagcccagggatgttggagaaaaaccaagagaacataatgcgtgtaagtcaaggaaaatatatttttttcagggagaagggagaggccaattgtggtgagtaccactaagcagagggggaagtgagaacgtgacagagaagcaagtgctgggtttggtggagttgatatttgtagtcaatggagtatcca

SEQ ID NO: 896167 - DNA, 565 bp, Homo sapiens
actattttagagataaatatcaagtcatagttttatagacaaatgagcaacagttcatcgtgtttcaaatattccttcctctcatcttaatgtcatatctttctccccaaccccaaatttcactcagcttttccactcaaagacacatcttcaaatataaggtggtttcaagaatcagtcagactactctctcggtaataaaataggcatctgagactatgtctaacagaatgggtaaggccagtcttcagtgtccaayctctttgctcattaaatctggaatgaacgatgttgatatgtaaatcctgcaatgtttatggattcttctgtcttccttctccccactctaaccccatctgctcccctccatcccatgcattctgagatccataccttggggtttcagattcactctactgaagatagagttatatcattgctcagtagagatctcccaacaaaccaaccccactttaggttttcctgatgaggactagaccacaacaagagggttgcctgcagatgcacaaaatgagaccaagcccaaatgaaccgggatatgtct

SEQ ID NO: 896168 - DNA, 565 bp, Homo sapiens
actattttagagataaatatcaagtcatagttttatagacaaatgagcaacagttcatcgtgtttcaaatattccttcctctcatcttaatgtcatatctttctccccaaccccaaatttcactcagcttttccactcaaagacacatcttcaaatataaggtggtttcaagaatcagtcagactactctctcggtaataaaataggcatctgagactatgtctaacagaatgggtaaggccagtcttcagtgtccaatctctttgctcattaaatctggaatgaacgatgttgatatgtaaatcctgcaatgtttatggattcttctgtcttccttctccccactctaaccccatctgctcccctcyatcccatgcattctgagatccataccttggggtttcagattcactctactgaagatagagttatatcattgctcagtagagatctcccaacaaaccaaccccactttaggttttcctgatgaggactagaccacaacaagagggttgcctgcagatgcacaaaatgagaccaagcccaaatgaaccgggatatgtct

SEQ ID NO: 896169 - DNA, 565 bp, Homo sapiens
actattttagagataaatatcaagtcatagttttatagacaaatgagcaacagttcatcgtgtttcaaatattccttcctctcatcttaatgtcatatctttctccccaaccccaaatttcactcagcttttccactcaaagacacatcttcaaatataaggtggtttcaagaatcagtcagactactctctcggtaataaaataggcatctgagactatgtctaacagaatgggtaaggccagtcttcagtgtccaatctctttgctcattaaatctggaatgaacgatgttgatatgtaaatcctgcaatgtttatggattcttctgtcttccttctccccactctaaccccatctgctcccctccatcccatgcattctgagatccataccttggggtttcagattcactctactgaagayagagttatatcattgctcagtagagatctcccaacaaaccaaccccactttaggttttcctgatgaggactagaccacaacaagagggttgcctgcagatgcacaaaatgagaccaagcccaaatgaaccgggatatgtct

SEQ ID NO: 896170 - DNA, 582 bp, Homo sapiens
cccttatgtcttctggcttttagagtttttgctcagaggtatgccgttagtttaatgggcttctctttgtatgttgcctgtcctttctctctagctgcctttatcagtttttttttttttctcatttcaaccttggagattctgatgaatttgtgtgttgggtataatctttttggtaagtattttgtagaagttctctgcatttcctgagtttgaatgttggcctctctagctcggttgagaaagttatcatggatgctgtcctgaaatatattttccaagttgcttccattctgcccatgtctttcaaaaacaccaatatgttgtagatttattctccttacattattccatatttctcagaggttttgttaatttctttttatattttgtttattcttgtctgaatgtcwtatttcagaaagccagcctgcaaactctgagattctttactcagctttgtctattatgctgttaaaatttgtgattacattatgaaattattgttgtgtgtttttcagctctatcaggttgattttgtcttttctatactggctattttctctgtcagctcctgtgtta

SEQ ID NO: 896171 - DNA, 565 bp, Homo sapiens
gaacagcaaatattgctgcctgatccttcctctggacacttcaccccagaggggcacccacctgtatgaggtgtctgttggctgctactgggaggtgtctcccagtcaggctacagtggggtcagggacccacttgaggagccagtctgtccgttatcggagctctaatgccatgctgggagaaccactgctctcttcagagctgtcaggcagggacatttaagtctgcagaagctgtctgctgccttttgttcagatatgccctgcccccagaggtggaatctagagaggcagtaagccttgctgagatgcagtgggctctgcccagttcgaggttccctgctgctttgtttacactgtgagcatagaacctcctactcaagactcagcaatggtgaatgcccctcckcctgccaaacttcagcgttccagttcgatctcagactgctgcactaacactaagcaggcatcagtgggcgtgggacccgccaaaccaggcacaggaggaaatctcctggtctgcctgttgcaaagaccatgggaaaagagcagtatttggacagga

SEQ ID NO: 896172 - DNA, 649 bp, Homo sapiens
cttgacttccgcccgcccctcctccgatcagatacaaagcagaagtgaacagggctggggcaggcgagggcagataaggagccatgcatcagaatcagctgaggctggtggacaaatgggcccgcccccacctagatgggtcacagccaaagtcggggccacagggcccaggccaggagagctgagtctctcaaagccttgggctgctcctctgtagaatgggaaggctggacaggaggcccccttccagctagaacatgcyccagggtgagcctgtaggctggaccctaagatgtggctgctggcaggcatgacagattgacaaattggacctgtccttttattttgtgtttttttaagagacagcgtcttgctctgtcacccaggctgactgcagtggcaccattatagctcactgcagcctcaaactcccgggctcaggcgattctcccacctcagcctccccagtagctgggactgcaggcgcatatgccaccactcctggcttaaaaaaatttttttatagacataggttctcgctatgatgcttaggctggtctcaagctcctggcctcaagcaatcctcccatcttggcctctcaaaatgctaggactacaggcatgagccactgcacctggcctggacctg

SEQ ID NO: 896173 - DNA, 649 bp, Homo sapiens
cttgacttccgcccgcccctcctccgatcagatacaaagcagaagtgaacagggctggggcaggcgagggcagataaggagccatgcatcagaatcagctgaggctggtggacaaatgggcccgcccccacctagatgggtcacagccaaagtcggggccacagggcccaggccaggagagctgagtctctcaaagccttgggctgctcctctgtagaatgggaaggctggacaggaggcccccttccagctagaacatgctccagggtgagcctgtaggctggaccctaagatgtggctgctggcaggcatgacagattgacaaattggacctgtccttttattttgtgtttttttaagagacagcgtcttgctctgtcacccaggcygactgcagtggcaccattatagctcactgcagcctcaaactcccgggctcaggcgattctcccacctcagcctccccagtagctgggactgcaggcgcatatgccaccactcctggcttaaaaaaatttttttatagacataggttctcgctatgatgcttaggctggtctcaagctcctggcctcaagcaatcctcccatcttggcctctcaaaatgctaggactacaggcatgagccactgcacctggcctggacctg

SEQ ID NO: 896174 - DNA, 648 bp, Homo sapiens
tcagagaggccaggtgtgccccgtgaccaccctggggcttcctccctcacaggccacctgaggactttgttctggatacttctctatgcccctttctttttccatccactgctagtccacggggcaacctctgtgttaatttaaataataataataatgtattaaatgcagtgcggtaccccagattagaacctggaacagaaaaagaacatttgtggagcttcagtaagacagaaagagtaagttctggtgtcctgttacacagtagggtgactacagcaaatctcaatctcgtgcatatttcaagacagctggaagrgaaggtttcaaatgtcgcaacaaagaaatgataaatattaaaagtgatggatgtgggaattacctggatttgattgatcattatacggtgtatacatgcattggaacatcacattgtaccccataaatatgtacgattattatgtgtcaattacaaattaaaaatttttaatacattttttaaaagaattcatttctagttcttgaagggggaaaaagaaacaagtgtttcatctataaatgcagcttcttgaagcaatttaaacgattaaattagctttaaaaaaaaaagaacatcaggccgggtgtggtggctcacgcctgtaatac

SEQ ID NO: 896175 - DNA, 619 bp, Homo sapiens
ccaagagtcttcagagggagcacggccctgtcgccaccttggttttggacttctggcctccagaatgggagagaataaaagtctactgttttttaaggccccattgtgtggtcttttattatggcaactccaggaaacctgctacagcccccagctctggctctggccgtgggagattccttgaattactatgacaaagagccctctsagtggaactggttgctttgggggccaccagacacctgcaccctgtcctgtcctggtgagttcaccattgtttgactcttctactagggaagtgcccaggccaggaggctgaggtcattggctccaactgggtcagccaatcagaggctcccctgggactttgctccagctggctcagccaatcagaggcttccctgggactttgcatctagagcttgtgaggcaaagaagctggtgccatcagggagtgatcatggtagagactgtgcctccagtgtggcagtgccagcacccacagcaagggctgcctggccactctattcccacagctggacctgcttctgtcctgggacaccaggctgccctcgactcctgtcccctttcttggctaggatttgggctcctgtagatt

SEQ ID NO: 896176 - DNA, 626 bp, Homo sapiens
gtatattggttgttctaatttttaactacattaataaagtcaatatattaacaatgcaatggcgaatttccttgcacatgcccctttatgccccacatgtgattatttctttagtacagactcctagaagtagaattccttggtcaaggaatattctcaatttaaatagtgatagatatcawcattgtcttccaaagccactttaccactgtacactcctatcagcaatgaagagtacttcctgactaccaatcacagagttaggtaccagaaacagaaaaatgcagaaggcattgttcctgcctttggagtgcttaataatgatgagacagacatgtaaacagatatctttaatatagtatggtagattctatgatagggtgctaaaagagaaacatcatatctctttgtgaaatgtaggtagtccaagatcatcactgctcaacagaaataattgtgaaccatgtatgtaatttaaagttttagagtagccatattaaaaaagtaagaaacaggtgaaattaatttaaataaatattttatttaacctgatatatccaaaatattatcatttcaatgtgtaaataatataaaaatattaatgtgatcttttatattttttcttt

SEQ ID NO: 896177 - DNA, 585 bp, Homo sapiens
ggaaactagtgttacatgactaaggggaatggaaaaggaaagggtcacagcagtgagaagttaagtctaattgtactatagttgattccaatttctaatcctatcattgggatagctttagcctcaaaatgttaacaacagctactttaacagctgttaacacttatatgtgtgtcgtagcatgtaagtagctacatgtatgatgtataggtataaactcccagttacttggcctaactaaaagaaaactgttcgtaacatttttaggtgcaaagggatacctggcttggagatgttctcagtgagtctggaataaattaatgtatggcttgttctcttgcagcagtgcatttgttcggcctgacttggcagttgcaaccagttgaaggagagctgtatgcaaatggagttagcaaagggaacagggggaccgagtccayggacactacttactctccaattggaggaaaagtttctgataaatcagagaaaaaaggtacagtgatcaaaatgattgattgttgattacttttcttctaatttggtcattagaactgtagctgggatggtttcacttcacattaa

SEQ ID NO: 896178 - DNA, 575 bp, Homo sapiens
cccaaaagagaaaactgtagaggcttaatgacccatgggaccactggaacatgagattcatatatttgaattgcttccattctgaggattttagaatggaggctgcttattttgagaataaaatgaaccaaggtttgcccccattccgcccaccatttttttgggatccctggaaagctcctgctttgccaagagactaaaataggagatggcctattgcagacagaaaaatggccctgtacctactgtcactgccagctcagaagggtctacaagtcttttgagacttcaaaatctattaatraactaaaaatttattaaggatttcttgacttttttcctatttcatttgaatctctaaatattttcttgcatagccacaatgttatgagcacacctaagaaaactaatagtttttctttaatatcatctaatactcaagtcatattcaaatttcccaagctatcctaaacatgtcttctaacctttggtttgtacaaagatccaaacaaggtctacatattagttattatgtctctttagtcacttttaatctatcactgacccccacccac

SEQ ID NO: 896179 - DNA, 615 bp, Homo sapiens
gggggtagaaggatccttcataatagcatcatatcatcaacaaaccaccaccaaattgttatacaaaagcttacaggtaaagtcacccagagggaaaacagccttccaaattatattatagtccttgaagggagattggctataaatccacaagagtaagtaaaggtgtttaacacctcaaaatccacacatttgtgttagttttgggaaagctaaatgcatcaactctgtatcacttccctagtggagaatggtgctttgttttaggtggtgtttygggagataaaatatagctttgaccatctaggactaggattctgcaccactgtgtggtcctttgcatttggaagaataatcactcaggattaagttcatttagaattatttgtttttagtcatccactaatacgacttcatcaggtttttatggcagaatatgaactccgggcagtctggccaggaatgcagcctgaattagatttcaccttcatctctatgaatttgataaggtcacattaatacttacaataagtaaactacatttgtttgtggataattcagatttggcagaaaatcttaaaaacattgtaagactccacaaacaaaaaatctctt

SEQ ID NO: 896180 - DNA, 605 bp, Homo sapiens
cctcaacaaatcacctttagcagagctatttaacttctctgaaaaccaactgctttgttctttgataaaaaacagtgtcagggctgggcgtggtggctcacgcctgtagtcctagaagtttgagacaagactggacaacatggtgaaactctgtctctacaaaaaatacaaaaaattagccaggcgtggtggcttgcacctgtagtcccagctactcaggaggctgaggtgggagaatccattgagcccagaagtcaagggtgcagtgagccaagatggtgtcactgcacccagcctgggagacagagcaagatcctgttgcccaggcaaaaaccaaaaaccaaaaatcaaaaccaaccaaacaaacaaaaaayacacaaaaaaggcagagaggtactcaaaacactagacatttatcattagttctggttttgtcaccaaatttgaacatttagacaactcacttaaatttttgatactttttactttaatttttccataagagctaacatgaagcttttctttggcatatccagtacagaaaggctgtcatatcacttactacattttacaaatacattttgcagttaatatgatcaagaaga

SEQ ID NO: 896181 - DNA, 718 bp, Homo sapiens
ccatgatggcaggttgattgatcagtggtttaagctaacctctgcttctatgtataggcctcaatttcttttttgtaactcatatggatttggtgaatttttttattttgttctgttttgttttgtttgagacagggtctcactgtctcatccaagttggagtgcagtggtgcaatctcggctcactgcagcctcaacctccccagctcaagtgatcctcccacctcagcctcccaagttgctgggactacaggcatgcaccaccatgctcaactgattttttttttttatttttggtagacacgagatctctctgtgttgcccaggttggtctcatactcccaggctcaagcratcctcctgccttgacctcccaaagtactgggattacaggggtgagccaccatgatgagccttggatttggtgaagtttagatgaaatattctgtgaaaaactcaaagcacagtgcctagaacatagtaaatgctcaataaatagtatcatatcctaccttccaaactgtgtgacaatttttggcacctgctttccccagaacaatagtttcactttggtagtgattacaacacatttcattataaaaaccttttgctgtatttctttcctttctatccctgatatggtttggctgtttccccaccgaaatatcaacttgaattgcatatcccagaattcccacgtgttgtgggagggacccag

SEQ ID NO: 896182 - DNA, 632 bp, Homo sapiens
gtaagtaaaagacatcatccagtttatgctcttgaattggccaaaagattgtttccagaagagagacattggaatgttttattctggaaaaacagttatacaatttttgttgtgttatgtttcgttttattttgtttgagacaaggtctcactctgttgctcaggctggagtacagtggtgtaatcacagctcactgcaggcttaaattctgggctcaagcgatcctcccacctcagccccccaaattgctaggactacaggtrtgtgccactatgcctggctaactttttcactttttgtagagatggaagtgtccctatatttcctgggctggtcttgaactcttggccttgggtgatcctcccacctcagcctcccaaagtgctgggattacaggcatgagccaccatgccaggccagctatacagttttgagttttatcttcttatctcgtttagggattgttaagaataattaataatatacacctttatttgggcaggatccatgatgggttcatcaatgtgttcccttagggcttagagtatagtatacattcataaattcttgaatttattgttgttaattaatttcttagacttgtctactcttccccaccacctgcaataga

SEQ ID NO: 896183 - DNA, 626 bp, Homo sapiens
gagcagaattggcctcagctctaaatcatcgttccttcattcctcccaaacttccataccactgtcctgtctctgaaagtcacattgacatctctggaaccactggaaaattttcagagccccaaagttttccaaagtgctgacttaggaagctggcttgcttggtgtgcatttatagaacttttccatgggttttctattcatgtggtgaggcaatcaatatggatgaagtgattatataaagctctgacccttgcctcattatgaaataaccacacagatcaatcatacctgggacctcacggggcatttgggagaaccaactgggatgggataggaagataagtggtgatgatttcctggaartaaataaataataccttcaagggatttacacaatctacttagaatccagcggggcagaagtagcagggtaagcagggagattctttgtgtcagcaccgccagggcgttggggttccaagcagggacagggtccttgtgcagggctaccttgttgcctcatcctcccctccaaactcactttcttgagccccaaaggatggcagacatggataagacagtgtgcttagtgcagtcaattttcaaggtgagagtatggggtg

SEQ ID NO: 896184 - DNA, 626 bp, Homo sapiens
gagcagaattggcctcagctctaaatcatcgttccttcattcctcccaaacttccataccactgtcctgtctctgaaagtcacattgacatctctggaaccactggaaaattttcagagccccaaagttttccaaagtgctgacttaggaagctggcttgcttggtgtgcatttatagaacttttccatgggttttctattcatgtggtgaggcaatcaatatggatgaagtgattatataaagctctgacccttgcctcattatgaaataaccacacagatcaatcatacctgggacctcacggggcatttgggagaaccaactgggatgggataggaagataagtggtgatgatttcctggaagtaaataaataataccttcaagggatttacacaatctacttagaatccagcggggcagargtagcagggtaagcagggagattctttgtgtcagcaccgccagggcgttggggttccaagcagggacagggtccttgtgcagggctaccttgttgcctcatcctcccctccaaactcactttcttgagccccaaaggatggcagacatggataagacagtgtgcttagtgcagtcaattttcaaggtgagagtatggggtg

SEQ ID NO: 896185 - DNA, 632 bp, Homo sapiens
caaaaattttcaattttcttgaagttcaagtgtctattttttcatttattgtctgtgcctttggtgtcatagacaagaaataatttcaaatccaatccgagatatttgacttttaattatagttgccacttttcttcctctgttcaccarggtagattatttttctgcctacttactgaatctataaaacatgtgcataattacagttttggtgtactttatatatcccttttttcattttaacatctcagtttttttaatactttaagttctgggatacatgtgcagaacgtgcatgtttgtcacataggtatacacatgccatggtggtttgctgcacccatcaatccatcatctatattaagtatttctcctaatgctatccctcccctagccccccaaccccctaacaggccctggtgtgtgatgttcccctccctgtgtccatgtgttctcattgttcaactcccacttatgagtgagaacatgcagtgtttggttttctgttcctgtgttagtttgctgagaatgatggtttccagcttcatccatgtccctgcaaaggacaagaactcatcctttttatggctgcatagtattctatggtgtatatgtgccacattttttttatc

SEQ ID NO: 896186 - DNA, 508 bp, Homo sapiens
atttgggatggcttccactgattgttcccttctttctctggattacaaaaatctattcagacaactaaaaaatagcaagtacttatgcaaattgttaattatgaggcagcgataatcataatcttgtatatttatgaaactgcatatacaatggggattaccaaaaatgttatttgttttattgctttactagtggttgaaaaatatgctagccttgcaaatagttttcatacatcattcagctcaccaaaattcaaaaagggccccattgatatttaccaaaacygtttctttcccatctcaccatctgtactcctcttgttttctctcattaagaccaggtattagttgctctggcaataatctggtccaactaatcaacaccatagtaaaaataaagagtgtgtcaggatttgctttgttatacagcaaaactgttttaaagagatggtcctatcatctagcaattttaaagcaaaaagaaaacaaaattctcaagacttcccca

SEQ ID NO: 896187 - DNA, 590 bp, Homo sapiens
catggcctgctaagcacgatctgacaagcaacaagaagggacagcctatcaccttcctcattcttgacaccatttctcttaatgtggcctcagatcacatggaccattttggcggccacaccacaccactgatacacagtaagctcaattgtttcatactttcacatatatgccacgctggaackcaatctatattgtcaggaactgatgcagtgtatttgtggccctgtttaatctcttcttgatggaggaaatctaagcctgtcaaaagacatctacattctgattatatcccccaatatcttcaccatactttcctgttcctgttggcaatgcctggattcaggcattgatcaaaacagagcaagatgcaggtgagagcaagtctctgatagttgctggaaatctttcttcaggttgacatgaaactgaagggtgccgctgaatggactgactgaattttaactgaatgaggccagttcagccccaggaaaatcatacgccacctgtttcacttagtagtaattggacaggactttcttgtgaccaaatgtatcacctaattaaaatgacaaggtgtcacattttta

SEQ ID NO: 896188 - DNA, 619 bp, Homo sapiens
gcttatagccctattcaaaaaacactttgactgaactggcctgctgtcctgggtaaaacactacagaattagtccatttcttttcaatgtgttcttaatagaccattataaacactatcttgggagatgtgaattactttttccctccttttaaaactcatcttctcggcccacgacttttaaaatgcagcagtattaaattacctggaaaggatctcgtgtttctagctccattatttgtgttgatagtggtgacgggggcttgtctcacgatttgtttgtactttagtcagcaaagccagccccmtcatttaacagcagagaaaacagattcagagaggctaggtgactttctcaaggtgtcagagttgcttagggttaggtatggggacagatgtccacagtcatttgactctcagggttttttgcatccagcttagtcaattaggacaaaccctaagtcattggaatctgccttaaaagaactgtgcactactgaataagcaactctgttaatgaaaggactactgtgggttgaaagagggatgaagatgaacaggaggaggagaatgttgtgctgagatggggtaggggatgcaactttcaacagacactgcag

SEQ ID NO: 896189 - DNA, 518 bp, Homo sapiens
tcactagacaaatcttaataagttgcatatttttaacagctccacactccttgggtatcttgtcttagtctgacaaggtacaacatcatgagtgatccatatgtgagggacaaaggggcactgtggctggcaggtgttaccctctgacttctgcaaggctcaaaagcactggctaaaacccatcgggtgaagaaacaacaggaaaagtatctgttttcaagtttgttgcttggagtcygggagacaggggaagttagttgtttatagaacaatttatggttacaatttcaatggctgattacttgatttcttcatccagctcttaatcacagatcaaacactggttccaataatgaagtaattttaggcatgattacagtctcctactgaggacttttgcctaggaacaaggagctcccagcccacgctcagtttaacaatgatcaggacaagtgatgcaactgcagttcttccgcccgggtgacacagcccttaggactatcacttccccgctttca

SEQ ID NO: 896190 - DNA, 557 bp, Homo sapiens
aaaaagaactgttgtaaaatgttgctgaattcagtctgctggtattttattgaaaatttttgcatctatgttcatgggagattttgacctttagttttcctttcctatagtgtccttgtctagctttggtataagagtaatgctggcctcataaaattagtttggaagtatttcatctactttttcctggaagagtttaagaaggaatggtattagctcctccttgaatggagttcagctgtgaaggcttctggtcctgagctattctttgctggaaggtttttttattactccttattcattattggtctgttccggcttttatttttsttaattcagtcttggtagattgtatgtttctaggaatatgtccattccttttaggttttgcaatttgttggcacataattgttcataatagtgccttatgaggtaagtgttggtgagggtggggaccccttgtacactgttggtgggaatataaattggtacagccattacagaagtttgaaacttcctcaaaaaattaaaaattgaactaccaaaggatccctcaa

SEQ ID NO: 896191 - DNA, 628 bp, Homo sapiens
tttattattattatactttaagttctagggtacctgtgcacaatgtgcaggtttgatacataggtatatgtgtgacatgttgttttgctgcacccatcaactcatcatttacattaggtatttctcctaatgctatccctccctctctcccccaccccctaacaggccccagtgtgtgatgttccctgccctgwgtccaagtgatctcattgttcaattcccacctctgagtgagaacaggtggtgtttggttttctgtccttgagatagttcactgagaatgatggtttccagcttcatccacctccctgcaaaggacatgaactcatccctttttatggctacatagtattccatggtgtatatatgccacattttctcaatccagtctatcattgttggacatttgggttggttccaagtctttgctattgtgaatagtgccgcaataaacatacgtgtgcatgtgtctttatagtagcatgatttataatcctttgggtatatacccagtaatgggattgctgggtcaaacggtaattctagttctagatccttgaggaatcaccacactgtcttccacaatggttgaactaatttacactcccacaaacagtttaaaagcatt

SEQ ID NO: 896192 - DNA, 628 bp, Homo sapiens
tttattattattatactttaagttctagggtacctgtgcacaatgtgcaggtttgatacataggtatatgtgtgacatgttgttttgctgcacccatcaactcatcatttacattaggtatttctcctaatgctatccctccctctctcccccaccccctaacaggccccagtgtgtgatgttccctgccctgtgtccaagtgatctcattgttcaattcccacctctgagtgagaacaggtggtgtttggttttctgtccttgagatagttcactgagaatgayggtttccagcttcatccacctccctgcaaaggacatgaactcatccctttttatggctacatagtattccatggtgtatatatgccacattttctcaatccagtctatcattgttggacatttgggttggttccaagtctttgctattgtgaatagtgccgcaataaacatacgtgtgcatgtgtctttatagtagcatgatttataatcctttgggtatatacccagtaatgggattgctgggtcaaacggtaattctagttctagatccttgaggaatcaccacactgtcttccacaatggttgaactaatttacactcccacaaacagtttaaaagcatt

SEQ ID NO: 896193 - DNA, 679 bp, Homo sapiens
gtaaccaagtgctaaaaaaattaaatgggcttgactacattgacactgtgacagctagctcaaccacatggggatatatgtagtataattccaaggtaaaagtggaaatatttccaaaaggaaaataagttctcttaagttagaatttataagtgtttaccatacaaggaatcaagtatcatgcttaacgtgcagcaaaacatatccatatgatagataactagcaatattatctatcactaacagacatctgatacatgaatgggaaatcattagatttactcaaaataaattttctcaattgggatcacctcaaaatctacaytttacttaacattaaagatcttcctagatttttctttttattttggtaattccaggagaaagtgcctgagtgaaaactcactctgttccaatagccacatctaatctatcagaaacttaaggaaccttgagtatcatcgattccaactcttccattttaaaaatgaggaaattgaagcccagagtagcgtgatgctttatgcaaagtcacacaacaaagtttcacaggtgggactggaatccacagcttctggatcaacttccacattctttccattgtttatgcacttgactttttatctcctggaccacatgacttagaacactgattctcaaactttagcatgaatgagaa

SEQ ID NO: 896194 - DNA, 578 bp, Homo sapiens
ttttttaattgagtggaggcatcagtgactgcacactgctggagagacagacagtatatagttatttcggtaaataaataacaataatagcaaataacaaataaataacaaaataaataaataacaaaaatagcaacaaccaaaccaggggagagaggaatcagagtccagggttgctacaatatattatcaaaactgtccagctttaaacaaaaagttatgagacatgcaaaaaataaaaacaaaaacaggacagtgtgactcatacacaagaacaaaaacagcaggcaatagaaactctgaaagaccctaggtgacggacttaccagaygaagacttcaaagtaggtgttattaatatgttccaaaaacataaaggaaaccctctttaaagaatcaaaagaaaatatgattcccaagaaaaaataaaaatgtttgaagtgagagatatcccaattaccctgatttgaccattacacattgtatgcttgtatcaaaatatcataggtaccccgtaaatatgtacaactatttatagcaatagaaatgtaaaagacaaaacagaaaatataacagtga

SEQ ID NO: 896195 - DNA, 621 bp, Homo sapiens
ccaccaaatgctgaatcacaccatggcagacagaaaattcttacacacctccaggttgcactgggagaggccccttgggagtggggataggggttcctgtgggaaggggggtgttctctagacctctggcagttaacaacctcttcttattcatccctgtttgctccattttctttctcaaataaaagatactttctgaatagtcactgcatgtaccaagcatgatagatagacagatagattagatagatagatggatagatagatagatagatgatagataaataaatagatagaggcacatagatatataatttaacaaacacttatatggcacttgttgcctgacactcttctaagtgctttacaaacgttgttarctcatttcacccttgcaaccatacgagatacgtatgctgttattacccctcactttaacagataacaaaggagtgatttgtccatctaataactgagagccagtatttgaagccagactgttctctagaatctgtgctcttaaccactgttatgttgcctctcaaaaacagcattgtgtttaattctgcaaattacttagtgaagtcagtgctctcatctccattttatgaacaaggagac

SEQ ID NO: 896196 - DNA, 528 bp, Homo sapiens
atgccctatttctctgactcccttgcagctaggcttttgcacatgagcaggttttaccaatgggaattcatacataaggcaaagaccatgttcctactgcttttctgcctttaaacagagatgtgtagtgtttccgaggctgatttccaatgtttaatttgcactacagggrtgtcatatgttcttgctttgtggcttctatttctttatttccttcttcccaatcagcttcccccttctttgtattctgaatacaaaccccagactggagtgtgcaggttctgaagaatggtgaggtaactcaatgtgtctgggtgacctttggagacacatgggggattgtaggagagggacatcaatggggacttcctggtccctggatggtgtgtttcagtggtagcctcctctgagtcttcaccttctcaattgtatccggggcaggatttcttcgggtcaataagttctgtgatgtttgggcaacaaacatcttcaaacaattgtctagcccttcaaacaatatgggaagca

SEQ ID NO: 896197 - DNA, 627 bp, Homo sapiens
ttggcaagctggagacccagaagagctgatggtgtagttccagtgagtctgaaggccagaatcaagagagtcaatagtgtaaattctagtccaaaagtcatcaggctcaaggcactgtttcagaccgattctaaagactggaaaaaaaaaatcaatgtacagctcaagcagtcaagcaggaggtgttctctcttgctcagccttttcactctattcagtttttcaattgattaggtggggtccacccacattagggagggcaatctgctttactcactccaattcaaatgttaatctcatccacaaccaccctcacagacacactcagaatgtttgaccaaatgtccatgcacctcataacccagtcaggtgattgatacataaaattaacattgyagtcagccttcctataaatgttaattcttatatttgaaataaaagccaagaatcttcagacattagaaaggaaatctaatcatgaatgaaaaagattaagttacagaactagcttctagagagagataattttaggagcagaggaaaactcaaaagcacagtgcacagttttgtggtgatactgtatacataaaacaagaagacaatgcaatgataaagaaatgatccaag

SEQ ID NO: 896198 - DNA, 616 bp, Homo sapiens
actgtatgttcttccccacatgttgaactatatgcttaccatgagtcaactgtgtttgttcccaaatatgttgactccagaatatccacagtagggaatttctcaagtaagaagaatggttagtggtaggccaaaagaaaaaaaaaaaaaagacaaatgtccactctaaattgaaaggaaaatgcatggcatcatgacacatataccacggggacctgaggttgtcaggggaattggagaaagtttccctgaggaagtgagaccaagctggratttgagggaggaacgaaaatcatctaccctgggggtaaggcaggagggaatacagccagctgatggatcagaaagaaagccagtgtggttagaacaggggaactccaagagcagcatgaacacaacaagaaaggaaagccatgggccaggccatacaaggctgtgtagaccctgtgagcattgtggtcttcttcttatgaattgtagaacccttctgtgccaggccaattctccctgacggtcacacagacaagcttccatagcactccagttatacaagcaaacttccacagtgcttgccttaacattaagttaataattaaacctagggaaatggatgcct

SEQ ID NO: 896199 - DNA, 616 bp, Homo sapiens
actgtatgttcttccccacatgttgaactatatgcttaccatgagtcaactgtgtttgttcccaaatatgttgactccagaatatccacagtagggaatttctcaagtaagaagaatggttagtggtaggccaaaagaaaaaaaaaaaaaagacaaatgtccactctaaattgaaaggaaaatgcatggcatcatgacacatataccacggggacctgaggttgtcaggggaattggagaaagtttccctgaggaagtgagaccaagctggaatttgagggaggaacgaaaatcatctaccctgggggtaaggcaggagggaatacagccagctgatggatcagaaagaaagccagtgtggttagaacaggggaactccaagagcagcatgaacacaacaagaaaggaaagccatgggccaggccatacaaggctgtgtagaccctgtgagcatygtggtcttcttcttatgaattgtagaacccttctgtgccaggccaattctccctgacggtcacacagacaagcttccatagcactccagttatacaagcaaacttccacagtgcttgccttaacattaagttaataattaaacctagggaaatggatgcct

SEQ ID NO: 896200 - DNA, 595 bp, Homo sapiens
tttttcgctatttctgtgaaggatgtcactggtattctgatagagattgcattaaatctgtagattgctttgggcattagggacattttaacaatattgattcttccaatctaagaacacgggatatctttccatttgtgtgcgtgtgttctcttcaatttttttcatcaatgttttacagttttcattagagcaatctttcacttatttggttaattcctaggtattttattttatttgtagctaggtaaatggggtattttcttgattttttttcagattgttcattgttgtcatatagaaatgccactgatttttgtatgttgattgtgtatcctgcaactttactgaatttatcagtcctgatattttttttgtgtggagtctttaggtttttccagatataaggtcatatcatctgcraacaaggataatttgacttcttggcttccaatttggatgtcctttattttgttcttttctgattgctctagctaggactttcagtactatcttgaataacagtggtaaaagtgggcatacttgttgtgttccaaatcttacgggaaaggctttcagtgtttccccactcagt

SEQ ID NO: 896201 - DNA, 642 bp, Homo sapiens
ctttcccagcttcctaaggtacgaaccctctttccacaaaagtgcgtgtaccccaccaaccctaaacatgcacaaacctgcatagaatttcaaatggtccacagactttcctagttgagaactcctggtctaggctaagtaatatggtcagaaagtgagagttcctgggacattgtcttaaacctggctgaggggctacttgggtggggatagattggcaggcagtgaccctaccgcaaggccagcctcctcctgagtttcctggagggraggaggccagaggtgagaggcctagcaggctgcattcctttagcagaagaaaacaatactagttagttgtgaaaattaaacacttccataagtggaaaagataggagatcatttttctataatcggataaaaacaagacacttgttaggcttgtgaaattaaataatttaaacttaaagctgctggaacttcaaattattctgagccttgagaggaatgtggctatgcagcttgaatcacagggcatgaagctgcaacttctgcctttttttccccctgtaaataattaagacaaaatgccaccagagataagactccctcagatcattacccctcctcatggaataataaatagctgtggcatttgcatag

SEQ ID NO: 896202 - DNA, 635 bp, Homo sapiens
ggaaggatttacttctgcctttttgctatttgttttctatgtatctgcacctttttggttcaattccccattactgcacttttctgtggttaattgaatttttttcttgtgtacttgtttgattctgttatttcttttttgcatatttttaagtttttttctttattggttccyctggggaacacaattaacatcttcgtagcacatttttcttttatataacaataccaatttattttcaacacaagaactctattttttatagctccatcccccctttatgttgttattgttacaaataatatatttttaccaagtgtgcatattaacatagttttataattattgttttatgcatttgtcttttaaatcatataggaaaaaaagaggagttataagccatatatgccatactacttgcttttatattttcctgtgtagctaccttactgttgttctttattttctcatatgactttggcttacatatcttgtatccctttatttcagcttggaagtcttgtaagacttggcagaggtcagtaaatacatatgcaaatgaatctaccttctatgatataaatgtaccttaaattattcaatcaattccccattaattaacatgaaattatttg

SEQ ID NO: 896203 - DNA, 552 bp, Homo sapiens
caacatggtaactagttaataaacaatgtattgtattttgaaaatcactgagagagtagattttaattaagtgttctcaccacaaagaaattgtaagtatgtgaggtagcacacatgtaaattagctcgattgagccatttcacaatgtatgtacatacagtatrtccttatgaggttcattttatgaggtttcagttacccactgcagtctgaaaatattaaatggaaacttgtagaaataaacagtttctaagttttaagtagcatgccattctgagtaacatgatgcaatcttgtgccatggcgcatcatcccgcctgggacatgaatcatccctttgtccagcatatctgtgcagtacacggtacccactcctagtcacttaggagccaatttggttatcagatcaccttttgaggtataacagtgcttgtgttcagggaacccttattttgcttaataatgtccccagcgtgcgagagtagcgatgctggcaattccagcttgccaaagagaagatgtaaagtgcttcttttaagagaagaggtgaa

SEQ ID NO: 896204 - DNA, 630 bp, Homo sapiens
ggtaatgaaattttggggcttgcatttttgttacatgcatagattatgtagtggtcaagtcatggcttttagggtgtccatcaccaaaataacataccttgtacccattaagtaatttctcattgtccactgcctttccacctccttgccccttttggagtccccagtgtttattactcccctctgtatttccatatctacacattgtttagctcccacttatgagcgagaacatgcaatatttgtctatgtctgtctcatttcactcaatataatgacctgtccggttccatccatattgctgcaaaaaacawgattccattttttatggctgaataaatattccgtagtgtgtatgtaccatgtttgcttcatcaaatcgtctgttgatggacacttaggttaattccctatgtttgctattgtgaattgtgctgcaataaacatacaagtgtaggtgtctttttctttttcattgggtagatacccagtagtgggattgctggctccaatggtagttctatttttagctcagaaagtaagtatttttaagctaaaaatctatataacttgctgattgagtctgtgtgagataggagggaaagaggaatcagggaatgcaccaagctt

SEQ ID NO: 896205 - DNA, 601 bp, Homo sapiens
agaaatggctactgaaacaggctaataataataactaatatgtgtctattattaatcaattcaacaaacatttataaacacctaggtgccctatcactggtaggtatagagaggtgaaaatgaaatattccctttttctttatacataatagtgaaggacgtggatcttaaatatagaaaagtcttgatttactaaaatatttagggaaggggatgttaattgaggctttttaaaattaagtagcacatctatcttttatttcagtctttgtggttgaaacgtttcatgtaactgtagtccattttactactttaataagtacagttaagtgaacataattgcattttactttattatttggaacattttttcagagtctcaagttcatcattctgaaatctgttcttattgkacgggaaaagtaggagattgggatgaatctctattgacctcagactacttcttgggagatgaatttatttttccttcagtaaattcaacataaaggcttgcttagtcaccatgtctgtttttctcataaaaatgagtgtagaacatgaaataaaatgtttcattagttggacttcagttaattaaggt

SEQ ID NO: 896206 - DNA, 590 bp, Homo sapiens
ggtctaatatccaaaatctacaaggaactcaaacaacaaggaaaaaacaaacaactccattaaaaaatgggcagtgggcataaacagacatttctcaaaagaaaacatgcaagtggccaacaaacataagaaaaaatgctcaccatcactaatcatcagagaaatgccaatcaaaaacacagtgaaataccatctaacactagtcagaatggctattattattattattattattattacttggacacggggtctctgtctcccagcttagagggaagtggcgtgatcctggcccactacagcctcgaayttttaagctcaagtgatcctccctcctcagcctactgagtagctaagaccacaggtgcacaccaccatgcccagctaatttttaaaatttttttgtagagacaggatgtcactatgtcacccaggctggtctcgaactcctggcctcaagtgctgggagtataggcatgggctaccaggccaatctggctattactaaaaagtaaaaaaacaataggcattgatgtggatgcagagaaaagggtatattggtgagagtgtaaatttgttcagcccctgtg

SEQ ID NO: 896207 - DNA, 581 bp, Homo sapiens
aaaatcttagtctccatatgcagctatttttataccaatttttgtttccatgtacttgtgtagtagagatatttttacaaatgcaggactttacacatgaagggacttgaaaaagtttatggaaagtggaattaaatcataaaaattaaaagttgtatactttatttctcaacataagytctatcaaggtcaagacgcttttgtaagtgatgataccagccatttagtctttctctaaagaactgaaggttctgggaatttgaccatgtcaatgcagtcttttttacattattagctgaagaaaaatgggtggcctttacagatttttaaagattaggaaacaaaaagaagtcaaaaggagccaaatcaggactgttaggtggatgcctaatgctttcccattgaaactctcacaaaattgcccttgtttgatgagaggcatgagcaggagcattgctctggtggagaaaaacgcttgttaaagatttcctggacatttttctgctaaatcttcctctaaacactctcataataagcagctgttatcattctttggccctccagaaagtcaacaagtgaaa

SEQ ID NO: 896208 - DNA, 581 bp, Homo sapiens
aaaatcttagtctccatatgcagctatttttataccaatttttgtttccatgtacttgtgtagtagagatatttttacaaatgcaggactttacacatgaagggacttgaaaaagtttatggaaagtggaattaaatcataaaaattaaaagttgtatactttatttctcaacataagttctatcaaggtcaagacgcttttgtaagtgatgataccagccatttagtctttctctaaagaactgaaggttctgggaatttgaccatgtcaatgcagtcttttttacattattagctgaagaaaaatgggtggcctttacagatttttaaagattaggaaacaaaaagaagtcaaaaggagccaaatcaggactgtwaggtggatgcctaatgctttcccattgaaactctcacaaaattgcccttgtttgatgagaggcatgagcaggagcattgctctggtggagaaaaacgcttgttaaagatttcctggacatttttctgctaaatcttcctctaaacactctcataataagcagctgttatcattctttggccctccagaaagtcaacaagtgaaa

SEQ ID NO: 896209 - DNA, 592 bp, Homo sapiens
tcccttgaccctcttttttagagttttattaaggacttttggtcctacaccccaaaagactacggttaataacagctctgctaaaaaacaaaaacaaaaacaaacaaacaaaaaaaacctgggagttttatactgtttcttttggtttcccctataaaccactaaacctctgtaaatatctcccccccaccctggatataaacagtcttcacatttttcasatttgattttgccatctacttcctgttgagactgactaaaataaatatgttcagtttttattctaaaatgcatttgtagacttcagctttccatctagatgaagaaacaggtactgaatgtcctctcttgcctgaaacaataaaaaatagtggatataagttaataatggacaatgaatctggacaaatagaaaacaaaaaaagataagctctatgattactatatgtctttgaatgtcacgagaaaaattttaagccaagatacaataaggagcacccatacggagatagaggtgacagtacagagataccaaggaagttactgttcacaaagagagctgcatacagagagaattccagacatctacaga

SEQ ID NO: 896210 - DNA, 538 bp, Homo sapiens
aacaagagtttctctaattttcttcctcacaacctcaatttctctcttaatttaaacgcagtctttcttctttttaccacagtggaaaaaatgtattttttcctttctatcactattaaatataccatcactatcactctgccatttctttgttgcttctgtctcctctatacttyttgcatggaatccttctctatcttgactgtaagtttatttgctctctcgcctctagttccccctcttctatgtaaaaacatgcttaaatgtcttcctttttaaaagccatttaaaaactgataatattcctttgaaaattttttgactcttgttaagactggattgttggttggaaagagactgaacctttacattaagatatctgtggttctagctgtgcagagcgggtaagagcaggaacagggaaaatgagacctaaattgtcaaatgccataaaacaaaataaaatttagataaacagagggaagcagagaggtgttctagattgataagaaagaatgggcaaaggaagaataatcct

SEQ ID NO: 896211 - DNA, 538 bp, Homo sapiens
aacaagagtttctctaattttcttcctcacaacctcaatttctctcttaatttaaacgcagtctttcttctttttaccacagtggaaaaaatgtattttttcctttctatcactattaaatataccatcactatcactctgccatttctttgttgcttctgtctcctctatactttttgcatggaatccttctctatcttgactgtaagtttatttgctctctcgcctctagttccccctcttctatgtaaaaacatgyttaaatgtcttcctttttaaaagccatttaaaaactgataatattcctttgaaaattttttgactcttgttaagactggattgttggttggaaagagactgaacctttacattaagatatctgtggttctagctgtgcagagcgggtaagagcaggaacagggaaaatgagacctaaattgtcaaatgccataaaacaaaataaaatttagataaacagagggaagcagagaggtgttctagattgataagaaagaatgggcaaaggaagaataatcct

SEQ ID NO: 896212 - DNA, 538 bp, Homo sapiens
aacaagagtttctctaattttcttcctcacaacctcaatttctctcttaatttaaacgcagtctttcttctttttaccacagtggaaaaaatgtattttttcctttctatcactattaaatataccatcactatcactctgccatttctttgttgcttctgtctcctctatactttttgcatggaatccttctctatcttgactgtaagtttatttgctctctcgcctctagttccccctcttctatgtaaaaacatgcttaaatgtcttcctttttaaaagccatttaaaaactgwtaatattcctttgaaaattttttgactcttgttaagactggattgttggttggaaagagactgaacctttacattaagatatctgtggttctagctgtgcagagcgggtaagagcaggaacagggaaaatgagacctaaattgtcaaatgccataaaacaaaataaaatttagataaacagagggaagcagagaggtgttctagattgataagaaagaatgggcaaaggaagaataatcct

SEQ ID NO: 896213 - DNA, 583 bp, Homo sapiens
atcccaattttagtttgagctcttgggggtgcgagagaaaagtttcacttgactattttactgcctttcttttggggttaatagcaatgacttttgtaactctagtaactggaacacgggtggatacagcagtatcctctgctgtttgccttattagtcacctctagtcttttttttttttttgcctggttattctgtctgccatttttctccctctattctcattccacttgtgaatggaaatcggaggtcctctctattagctaccctctcggggtggggagggtaggtctcactgtctcctcatagtcatattcctgatttttaggatatacaagaacaaagtgggctctgccagctatcagccttagagctatgagctgtggtgcaaagattagtctgkcattgccagaaggtgttttgtagtttgcagtgggcaaatcaagcatccctaataattttagaaccattattaatgtctgagaattactacataataccttagaatttgaactgattgttgattccaggaactaaaaacctggacattttgaaaatggcaaatgttggtgatgtttttttt

SEQ ID NO: 896214 - DNA, 551 bp, Homo sapiens
agatgctcagccagcccaaccaccccagcggcgaagtcaaggctgaaaataacattgagatggtgggcgagtcccaggcggccaaggtcattgtctctgtcgaagatgctgtgcctaccatattctgtggcaagatcaaaggcctctcaggggtgtccaccaaaaacttctccttcaaaagagaagactccgtgcttcagggctatgacatcaacagccaaggggaagagtccatgggaaatgcagagccccttargaaacccatcaaaaaccggagcataaagttaaagaaagtgaactcccaggaaatacacatgctcccaatcaaaaaacaacggctggccaccttttttccaagaaagtaaataacggctttttaaaatttgtatgattataatatggggaaaggtgcattggttttataaaaaggcatttaaaacaaattatctttgttaattattttggggagtagttgggaaatggaaaggtgaattggctctagaggccctgtatgctagtatcattttcttttttaatttttgacttttcac

SEQ ID NO: 896215 - DNA, 551 bp, Homo sapiens
cctcgtccctacaaagaaatatacacacacacacacacacacacacacacacacacacacacacacaaaattagccaggcatggtggcacctatagtcccagctactcaggagactgaggtaggaggatcacttgagctgggaagtccaggctggagtaagatggcaccactgcactccagcytgggcaacagagcaagatggccctgccaaaaaaaaaaaaaaatgaaaaacacctgtaggttcactctgctaaaaaagatgataaaggccactaggaaacagtcctccccctgcttaataatgttttaaatctaaagtttggtaagccaggcaattaggatgtaataaacacttattgcatcatagctccatgtgatcagtccagaatggtattgggaaggtggtttttcccaatttatggtctcttcaagtaaggaacttgaagattatttttttcaatgcagaaattgttattaggactcatttcaaatcacatttagaaacaccgcaatgaacaggggctgaattctttgacagcagggactgaat

SEQ ID NO: 896216 - DNA, 614 bp, Homo sapiens
attttcttcctatcatatttccagcaccctccgacaggcagcattttacatttcccacacgagagggcttttttttttcctctgcattggacttcagaatacagaaagttgcagagtttgtttattttttaatcttctttattagttgcataaaactgtcaacagccatgctagtcttgaaagtatcaggctgatttaagagaaactttcctcaactgggtggagagtggggcgaagagataagcaaatggaagaatatagggaagggggcagtacttttttccctaaaatatttcaatctaattttttaaaagcatagttcatccttctaacacagtattggctctaataaggatactgcagactcaaagggtcagaatataagctttaaatattgggtatgttatttacagacttgrgcactgaccacatatgcatgcatgaatctcgaagaagcatttttggcttttctcatgaaaaatctactgggaggccatacatctgaaagcgctgtcttccctccctataggatgggagccccaatcaatcttttgtgttatgaccagatgtaagtcttaaaagggcagttattgcaggttttatggagctgaaag

SEQ ID NO: 896217 - DNA, 608 bp, Homo sapiens
gatatatgtgaagtccagaacttctttcatttcctgtagttcatactgtcgacccatactagaacagtaatggaagaggaatgaaggagactacgggaaattagcatagatgtacttcttctgggactttctggagaaagtgtccccacttttgttgcctagtttacttatgatagagaagcccaagacaggttggagagacaggcgataaggtaatcagagtaatacatgggataatatgtagcctcttacaatctatgtcaaattacaccatgtaagtagccacctaktccacgtcctttctgtgagctcctagaaagcagagaccaacatgtgacctaattaattagctatttaaacatatagctttttattcatataatgaccacttcatttaacaaacattggctgacctccttgccctgtggaccaggctgtattgggtgctggatgatttacagcaataaatcagaaacaggtggaccttctggagggagaaacaattattgaagcagacactcactagacctgagggcactgcactcagctgagaagcactagaagcaaaggtttgtagaggaggtgagttccacatggggtgacattta

SEQ ID NO: 896218 - DNA, 588 bp, Homo sapiens
atgctagatgacgagttaatgggtgcagcacaccagcatggcgcatgtatacatatgtaactaatctgcacattgtgcacatgtaccctaaaacttaaagtataataataaaatataaaaaaaagaaatgaaaaattttagagcccactctgttacagtaggtagctagccaggcatgagtggggcaagagaggactcccccaaccccaccgagaatgtgacgaccatcaggttatggtcaggcaattgtcacactgtctctctaaaataataattggtcgcatccagcactagggaaggtttccaaatagaaacacctgaaactggtgatcagcagcttcycaataagatctcagaagttgggcaagtgggctcaagcatgcacattaagaggccaactggcagagtttagcttgtatatgaccttctgggggcattccactggaaaagggaagaatccctcaggtgagcacgcctaaaactctagtaaacatactagagtaggtgtgcatactctcctcccaagtgctagcaggccattgaacatgcaggcagctcacttcaagggaagaatgaagggaataagga

SEQ ID NO: 896219 - DNA, 676 bp, Homo sapiens
tttggctcactgagaaccctgggtttacctctacaccttcactcttaagtgtaaatcaaggattattgtgctatgtgatgtctctcttccattatgctttgaatgccttgaggacagaaactcttctttctctcctctttagtacttcaaaatatcttgagagaagttgcacagatctttacctccaagtatttcacttaattcaatttattcctgacaatagccctatgagatattgctttaatagccttctattcactccgatggtgagggaggggttcctaaccttgggttgtggggatggctgaactcacaacacctgatactagtcacatgagagtgacagcagcttcttacatatactcatagctcaggggaggaggacaccgtggcatgcagggccacatgaagattgtactccagaacacagtgaacaactaggggctataggaagctttgyagtgtcaagtataggatggggtgccccctggtttccatgggaggatgcaattggcttgtttggacaattccattaactgtcaggaaactgtaacccactactcaaagatatgtagaaaccgtgcctgattcctgtgataaggagagttgtttgtctccggactgtatccataggagcagagtagggagggaaacttgtaattagtgcacacaaagc

SEQ ID NO: 896220 - DNA, 570 bp, Homo sapiens
caaccggtagaggaccctctcccaattgccactttccacacttttccatttccccatgcccccaaaagctaacacttgggagtgtcaattttctagaagtttctacagaggagtttaatcatttgaacagcttaataaggattatacaaataaaaatcccccaaaaaattaaacaaggaaaaagcactgtttccaaatgctctcagtactctagaaaggggtactataggagtctaataaggttgaaaagcctctagtcacaggccagaacagcattagacgggtgggtcagacaaggggtacatcgatttgagaactcaaatgaatttctcccccgtgccagagcactattgcactcaccaacctagccaaaggcttgcacatcaatgagatgargatgaattattgaaaagcttctgtataaaatgctgcactctgccatttcctacaaatcaaattatcgagggagatatttgattgtaaacatatttagaaaatgatttcattgtcattcggttggttttgcttgctcccccacccttaaatttcatttgcattaaagtgctacaa

SEQ ID NO: 896221 - DNA, 634 bp, Homo sapiens
ttagatctctagatttatatatcctacataacttcaagtttgtaccctttgaactacatcttcccatttcctcacccttccagcccctggtaaccacagtcctagtctctgtttcaatgtatttgactttttaaaaatattttacatacaagtgagatcatgtagtatttttatttgtgtgtctggcttattttacttagtttaatgtctttcagtttcatccatattgttgcaaatgatagcctctccttccttttgttttttttttttaatttcagcttttattttagatacaagtgcgtacatgtgtaggattgttacatgggtatatcagacccaggtagtgagcrtagtacccaatagctaatttttcaacccattctcccttccctccctgccccctgtagtagtctgaagtgtctgttgttcccatgtttatgtccatgtgagctcaatgtttagctcccacttacaggtaagaacatgtggtatttggttttctgttcctgccttaattcacttaggattatggcctccagctccacctatgttgctacaaagaacatgatttcattctttttatggctgcatattattccatagtgaatatgtaccacattctctttatccagtc

SEQ ID NO: 896222 - DNA, 634 bp, Homo sapiens
ttagatctctagatttatatatcctacataacttcaagtttgtaccctttgaactacatcttcccatttcctcacccttccagcccctggtaaccacagtcctagtctctgtttcaatgtatttgactttttaaaaatattttacatacaagtgagatcatgtagtatttttatttgtgtgtctggcttattttacttagtttaatgtctttcagtttcatccatattgttgcaaatgatagcctctccttccttttgttttttttttttaatttcagcttttattttagatacaagtgcgtacatgtgtaggattgttacatgggtatatcagacccaggtagtgagcgtagtacccaatagctaatttttcaacccattctcccttccctccctgccccctgtagtagtctgaagtgtctgttgttcccatgtttatgtccatgtgagctcaatgtttagctcccacttayaggtaagaacatgtggtatttggttttctgttcctgccttaattcacttaggattatggcctccagctccacctatgttgctacaaagaacatgatttcattctttttatggctgcatattattccatagtgaatatgtaccacattctctttatccagtc

SEQ ID NO: 896223 - DNA, 604 bp, Homo sapiens
cccatgtttgaacgcactagttcaaagtccaccttgtcagctaacaattggtgattagaggagacttaatcccagtgtaactcccagaggtatgctgacaaaaaaacactggtgattctgcacttccttcacataaaaatctattctaaagaggttattataaaagtcttttttcatcccctgtatctttgaagaagttaggaatgataactattacctttttgattatgaatttacaaataaatactaagtggaaagtgttcattttcctggcttaattatgtccagacaaggcataattttttacactggtctgcacaaagcctaggtcttttttctaagatgttggaaaatcaagtgaaaaascattttaatatccctgttctaattttctctaactgttctttctttctgaaaacattgaaagctaataagacataaagagttgaccttagtttcagaaaaagtaaattcgcatgcaatttattaggcatctacaatctgttttaatgataccaacattggccaatgccacctcttaacaatgaaattatccaaaatttctgtgttctctatgtcaaaaagataaacatctgtttatggc

SEQ ID NO: 896224 - DNA, 604 bp, Homo sapiens
cccatgtttgaacgcactagttcaaagtccaccttgtcagctaacaattggtgattagaggagacttaatcccagtgtaactcccagaggtatgctgacaaaaaaacactggtgattctgcacttccttcacataaaaatctattctaaagaggttattataaaagtcttttttcatcccctgtatctttgaagaagttaggaatgataactattacctttttgattatgaatttacaaataaatactaagtggaaagtgttcattttcctggcttaattatgtccagacaaggcataattttttacactggtctgcacaaagcctaggtcttttttctaagatgttggaaaatcaagtgaaaaagcattttaatatccctgttstaattttctctaactgttctttctttctgaaaacattgaaagctaataagacataaagagttgaccttagtttcagaaaaagtaaattcgcatgcaatttattaggcatctacaatctgttttaatgataccaacattggccaatgccacctcttaacaatgaaattatccaaaatttctgtgttctctatgtcaaaaagataaacatctgtttatggc

SEQ ID NO: 896225 - DNA, 751 bp, Homo sapiens
tattgaattcaattcaataaaaatatattgctggcagcagtagctcatgcctgtaatcccagcactttgggaggccgaggcaggtggatcacctgaggtcaggagtttgagaccagcctggccaacatggtgaaatcccatctctactaaaaatataaaaattagccaggtgtggtggcgtgcacctgtaatcccagctactcaggaacctgaggtaggagaatcgcttgaacccaggaggtggaggttgcagtgagctgagatcgcaccactgcactccagcctgggcaacagagcaagactccatgtcagatacacacagacacacacacacgtgtatatgtgtttgtgtatatatrtgtgtgtgtgtgtatatatatgtatatgtatatatatatatatttagcagctactatgtactggcattatttgtggtcttagggaacccaggaagctgacagtctcttttaggtggaagagaaacaagaaaacgggtaattaaagtatatggtcagtacagtaattattgttcaggggagagatggggataattttaagagtagccgatagttcaaataggctttgaataataaatatttgtgttttatagcaactaggtgtgataggggcataacagacattctaagcaaaaggaatacgtgaaaaagttttaaaagacaagatacaagagacacatgcacgttaccgtttttgtaaaagtacatgtttatcataatatagtcaaataata

SEQ ID NO: 896226 - DNA, 578 bp, Homo sapiens
acagtacgaatgtggacccagaaggcactgggtgggccagtctggaaagagagagcgtattcacctatggaagcatgcaattgcatttctgacataatcagctgcctgaattccatgcccaaacttagctaatacattgttgtctgtyagtaattaagagttcattaaaagtgtttcctggttctttctttggcattacctataaatcaaattacagaaaagtagatttgattttgaaatcattttgggattatttccttttttgtatattttgttgttacacagtatttacagacttagaaaaggaaacatgagaaatacaaccaactgtgacaaacaaacaagaaaaacaaaacaaaaagtagaagcagaaccatgaattccaaagaatactacatataaagcatgaaaagacaggttccactggtttaaaattccaacataaggaaagacagaattactaagtagatttaaaaaacatgaaggtgtgattttatactatacaaaggatttcttagctttgtttaaggttaaatgatttcatttagttagtatcccagtactttaagtgtgactta

SEQ ID NO: 896227 - DNA, 638 bp, Homo sapiens
ttgtttaagcctttttcttctacttttatttctagtctttccgtttcctggaaaatgcccgtttttctaagattgagaaaaaaaattaaaatactggtctctcgcatacctactttccaactaggaagttggttcttacactrtttctttctttttatagtacttctttccattttaaccatatagggtgactatagatgtgtgtgtgtgtgtgtgtctgtgtgtgtgtgtgtgtgtgtgtgtgtgtgtgtgtgtaccacttaggttttaagtatctggagggcagaaatgtatcatttaggcatttggttcatgttacagtacattgtgtgaatacttgacaagagttttacctggctaggtgattgagcttttttcttttaggtaagcaattataaaaggacagttattacttatcattgtttcattacctaataagtgcctatccaaagaatataggcatcctatctgaaggtgggtctcaatgtgttcgaatgggtgcatgtttaagtgggctggagaactcacattgatcataggctatggctgacttgacaaaaaggagtatagaccaaaggcatgtgcccaaaataaaacttcttgtgaaattattctttaaaaagcattagctggaaatt

SEQ ID NO: 896228 - DNA, 626 bp, Homo sapiens
ttgagcagtgacatttcttttatttatttatttatttatttatttatttatttttggataaaaatgtcaccaaaatatatcatgcacacctttctcctaggaggtggtatagtatagtaaaatgagtgttggctttaggtcatttgaactaagtttaaattttgcctgtaccgtttgctggctttatagcctgagtcaactgacttagcttctgtttgtctcaatttctatatttgcaaaatgaggagactattayacaatgttgcgagaatacaggtagtgttatatatagagacaagctggtagcaagtgcttgttccttaaatgaaagctagcaggctcctgtaagttgcagacccatcttttcagggtaaaccaggaccaagtaataaacacgaatggctatgagggatgacagcatgtaggcctgcttgatttttgagtccctgtgtctgttttgtagagttgcgctattcctttgcaccctgacaactgtcatttctcattgctactgggaaactttcatccccttatccctcctcataatttgttgagtcttacgatatataagcttgttaagtagacatgcaaaaccaagagtatagagattcagagggaaagtgtaa

SEQ ID NO: 896229 - DNA, 649 bp, Homo sapiens
gtagttgatctgtaggacaagccagcaaacaaacaaacaaataaatgcctcactcaggaagctggatggagctcctttagaggaaccttagggaggcgggggaaggggcaggcatgtgaacttggccagcagattctgctaagctgcctgttgctgtccactttccagatgatcccagcctccaaataccccattgctcacccactggagcaatgcatgttctcattgatttgtaggagttaaaacttaaaataattgaacttacagagatagagagtagaaggatggttatcagaggctgggaagggcagtaccrggtggggggatggttaatgggtagaaaaaattgaaataatgaataagatcttacatttgctagcacaacaggcggtctatggtcaaaaataatttaactgtacattttaaaataactaaaagggtataattggattgtttctaacagagaagataattgcttgaggggatggacaccccatctatcgagatatgattattacgcattgcatgcttatgtcaaaatacctcgtgtaacccataaatatatatacacctactatgtacccacaaaaaatttttaaaaaaagaaacagagggcgacccacagatgtcattttgaattttctgacag

SEQ ID NO: 896230 - DNA, 649 bp, Homo sapiens
gtagttgatctgtaggacaagccagcaaacaaacaaacaaataaatgcctcactcaggaagctggatggagctcctttagaggaaccttagggaggcgggggaaggggcaggcatgtgaacttggccagcagattctgctaagctgcctgttgctgtccactttccagatgatcccagcctccaaataccccattgctcacccactggagcaatgcatgttctcattgatttgtaggagttaaaacttaaaataattgaacttacagagatagagagtagaaggatggttatcagaggctgggaagggcagtaccgggtggggggatggttaatgggtagaaaaaattgaaataatgaataagatcttacatttgctagcacaacaggcggtctatggtcaaaaataatttaactgtacattttaaaataactaaaagggtataattggattgtttctaacagagaagataattgcttgaggggatggacaccccatctatcragatatgattattacgcattgcatgcttatgtcaaaatacctcgtgtaacccataaatatatatacacctactatgtacccacaaaaaatttttaaaaaaagaaacagagggcgacccacagatgtcattttgaattttctgacag

SEQ ID NO: 896231 - DNA, 649 bp, Homo sapiens
gtagttgatctgtaggacaagccagcaaacaaacaaacaaataaatgcctcactcaggaagctggatggagctcctttagaggaaccttagggaggcgggggaaggggcaggcatgtgaacttggccagcagattctgctaagctgcctgttgctgtccactttccagatgatcccagcctccaaataccccattgctcacccactggagcaatgcatgttctcattgatttgtaggagttaaaacttaaaataattgaacttacagagatagagagtagaaggatggttatcagaggctgggaagggcagtaccgggtggggggatggttaatgggtagaaaaaattgaaataatgaataagatcttacatttgctagcacaacaggcggtctatggtcaaaaataatttaactgtacattttaaaataactaaaagggtataattggattgtttctaacagagaagataattgcttgaggggatggacaccccatctatcgagatrtgattattacgcattgcatgcttatgtcaaaatacctcgtgtaacccataaatatatatacacctactatgtacccacaaaaaatttttaaaaaaagaaacagagggcgacccacagatgtcattttgaattttctgacag

SEQ ID NO: 896232 - DNA, 532 bp, Homo sapiens
gataacggccagcgacaggagtcagtacctgtgccaggtgtcaagccttccccttgagctacacaaactctcaggtataccatgctgccctgcctggacatgtccctggcagaggggtgggccttttcatcagaggacgggctacgtttttccttgctacactcaagaacggtaggagcccttactcacttcttgtcaaaagcaggaggcaactgtcttcagtgattaacaatgtaagccacttactagctttgagactttgggcaaggtgcttagcatcttggtaccctgattttctcttctgttaaatggagacaatgatgtccctttcttrtaggtcagaatggggaataactgagataatacttgtaaagcccctataacagtgcctggacataataagcactggataaacacaatctatccttactgttaagacattaaagttcttcaatagttttccattggtcttaggataaaagcaaccatctatactgtggcctgaagatcacacatggtcttgccctggttg

SEQ ID NO: 896233 - DNA, 607 bp, Homo sapiens
attttattccttaactttcctaataaacttgcgtggacttgcctagaattctttcttccacaagaaccaagaatcctctcttggggtctggatccggacccctttccagtgacaaaaccatgtatgagaagttaaactaagaggaatacagcctggggtgagtcatgggtgagtcaaggcggtcatcagctgggacacagacacaagtcctaaagtcctccaaagttaggaaggtgtgtgcttctatgtggagtttactggacaaatcggtatatgccaggtaaggatgctccaaccctcttccccctcagaagaggagcctctggaaagcasccaaaagaaaaaagaacaaatagtccaactgtaatgcgataagatactttaatatacattgtctaatttactctctcccgatttttttgaggcagatcattaatcatattttccatcttgagatgttaagtaaactgttcaagttcacatagctgagagcagccaaaattcaaagccaagtctgtctgatgctcaactctcagttctttccactctatcatgccacagaaaacccatccatgtgcaaccatttctttaacagtggttggacaca

SEQ ID NO: 896234 - DNA, 614 bp, Homo sapiens
tcctgggtgtgtctttgagggtggccaaaggaaattaacatttgagtcagcggcctgggatcggcagacccaccctcaatctgggtaggcaccatctaatcagccgccagggcggctagactaaagcaggcagaacatggaaggacttgacttgctgagtcttccggccttcatctttctcccatgctgggtgcttcctgccctcgaacatcagactccaagttcttcagctttggactcttcgacttacaccagtggtttgccaggggctcwcaggcctttgaccacagactgaaggctgcacaaaagaaggcttccctacttttaaggttttgggactctgactggcatccttgcttctcaggttgcagacaacctattttaagacttcaccttgtgatcctgtgagtcaatactccttaataaactcccttcagatatacatctatccataaaattctgtccctgtagagaaccctgactaatacagatggtgatggatatataaattgattgtgattatatatatataccaaattggacacctaaatatgtccaatttaatacatatcaattcaatctcaagaaaactgttaaattaaaaaatatttgtt

SEQ ID NO: 896235 - DNA, 627 bp, Homo sapiens
ggggactccctcagctatcatcaaggacgccctttctccacagaggatagagacaatgatgttgcagtgactaactgtgccatgtcgtacaagggagcatggtggtataagaactgccaccggaccaacctcaatgggaagtacggggagtccaggcacagtcaggtaagcgatgctccacctctgctatgaatgagccagagctgtggaatccgtgctcccttagctttatrttttaaaagcacatgtgagtccttcatttccctttaaaaagaaatattttgagtcttgagaaaaataatgcagacaatgggataagatcaggacagagtagaagccagaggaaggaaaggaaaggacccaggagccagaacttacccagagaagcccttggatccagaagatcccatgaagagagcttatcagtcctggggacagcttcacagactcaactttaccctaaaaatggtcccaggaaggtagacatcgaaaataccagtgtgaactggacaatctttccctatcagagaccacaagtttataggctaagctgggtgacagggagaccaccatgaccaactagactttctaagtgttaacactgaaacagcccacatcagggaagcc

SEQ ID NO: 896236 - DNA, 629 bp, Homo sapiens
ccattgtaaattattgaacatttcatttaagcttcataaataagaaactgggatgaaaatgttacatgttagatctgtttggcaacgtataatttctgtcttactccctccatctgtcacccttcatctatgttggagaatttctacttcattataggcaattgaaggtcttaatcagttgcctgataaaagtagtttatgtcccaaaggtaatctcatttctgcaaccaaggatgtacctggaactcactgaacatattgatggagataaatgtgtgcttcaaatggatcagggggtattgcaatcacccactcaatctagagataggtacttggcccagccagggasaaggtcctcactgccacctggactccctgaatcactggtttccaacagagccaacaggctaagccccagcaaaccaataacaagaagtcaacaggtgcacccaggaccggcctgtacttgcctggggcggtttttgtagttgatgagaccactcaccaaaaaaaaaaaaaaaaaaaaaaaaaaaaaaagtactcaaaatccaggaatagttctctgtgcaaagtaataaaatactagctactaccgctaagatccaggcactggactttaaacactttga

SEQ ID NO: 896237 - DNA, 629 bp, Homo sapiens
ccattgtaaattattgaacatttcatttaagcttcataaataagaaactgggatgaaaatgttacatgttagatctgtttggcaacgtataatttctgtcttactccctccatctgtcacccttcatctatgttggagaatttctacttcattataggcaattgaaggtcttaatcagttgcctgataaaagtagtttatgtcccaaaggtaatctcatttctgcaaccaaggatgtacctggaactcactgaacatattgatggagataaatgtgtgcttcaaatggatcagggggtattgcaatcacccactcaatctagagataggtacttggcccagccagggagaaggtcctcactgccacctggactccctgaatcactggtttccaacagagccaacaggytaagccccagcaaaccaataacaagaagtcaacaggtgcacccaggaccggcctgtacttgcctggggcggtttttgtagttgatgagaccactcaccaaaaaaaaaaaaaaaaaaaaaaaaaaaaaaagtactcaaaatccaggaatagttctctgtgcaaagtaataaaatactagctactaccgctaagatccaggcactggactttaaacactttga

SEQ ID NO: 896238 - DNA, 629 bp, Homo sapiens
ccattgtaaattattgaacatttcatttaagcttcataaataagaaactgggatgaaaatgttacatgttagatctgtttggcaacgtataatttctgtcttactccctccatctgtcacccttcatctatgttggagaatttctacttcattataggcaattgaaggtcttaatcagttgcctgataaaagtagtttatgtcccaaaggtaatctcatttctgcaaccaaggatgtacctggaactcactgaacatattgatggagataaatgtgtgcttcaaatggatcagggggtattgcaatcacccactcaatctagagataggtacttggcccagccagggagaaggtcctcactgccacctggactccctgaatcactggtttccaacagagccaacaggctaagccycagcaaaccaataacaagaagtcaacaggtgcacccaggaccggcctgtacttgcctggggcggtttttgtagttgatgagaccactcaccaaaaaaaaaaaaaaaaaaaaaaaaaaaaaaagtactcaaaatccaggaatagttctctgtgcaaagtaataaaatactagctactaccgctaagatccaggcactggactttaaacactttga

SEQ ID NO: 896239 - DNA, 661 bp, Homo sapiens
atggtattttcagtgccttcttcctttcagtgaccatggctcaacatccaccagcaggtgcagtgatgaaaattctttgcttcccccattgttagccatgctcctgaaccttctcctaggcctatgtgggcatttctttacgaaatccaggtttagcaagagccctgctcaatgagtgtatcccccaccttcaatatccgttcaccctctgtatctgctcaggttcctcatcatccagggtaaggctccagtgccatccatgctgtccacactccagttccatccatcccgtccacaycccagttccatccatcccatccacaccccagtgcaatccatcctgtccacactccagttccatccattcgtccacattccagttccatccatcccatctgcactccagttccatccattccgtccacactccagtgcaatccatcccttccacaatccagttctgtccattccgtccacaccccagtgcaatccatcccgcccacactccagttccatcccttcgtccacattccagttccatccttctcgtccacactccagttccatccatctcgtccacactccagttccatccatcccatccacaccccagtgcaatccatcccgtccacaccccagttccatccatcccatacacacc

SEQ ID NO: 896240 - DNA, 661 bp, Homo sapiens
atggtattttcagtgccttcttcctttcagtgaccatggctcaacatccaccagcaggtgcagtgatgaaaattctttgcttcccccattgttagccatgctcctgaaccttctcctaggcctatgtgggcatttctttacgaaatccaggtttagcaagagccctgctcaatgagtgtatcccccaccttcaatatccgttcaccctctgtatctgctcaggttcctcatcatccagggtaaggctccagtgccatccatgctgtccacactccagttccatccatcccgtccacacyccagttccatccatcccatccacaccccagtgcaatccatcctgtccacactccagttccatccattcgtccacattccagttccatccatcccatctgcactccagttccatccattccgtccacactccagtgcaatccatcccttccacaatccagttctgtccattccgtccacaccccagtgcaatccatcccgcccacactccagttccatcccttcgtccacattccagttccatccttctcgtccacactccagttccatccatctcgtccacactccagttccatccatcccatccacaccccagtgcaatccatcccgtccacaccccagttccatccatcccatacacacc

SEQ ID NO: 896241 - DNA, 661 bp, Homo sapiens
atggtattttcagtgccttcttcctttcagtgaccatggctcaacatccaccagcaggtgcagtgatgaaaattctttgcttcccccattgttagccatgctcctgaaccttctcctaggcctatgtgggcatttctttacgaaatccaggtttagcaagagccctgctcaatgagtgtatcccccaccttcaatatccgttcaccctctgtatctgctcaggttcctcatcatccagggtaaggctccagtgccatccatgctgtccacactccagttccatccatcccgtccacaccccagttccatccatcccatccacaccccagtgcaatccatcctgtccacactccagttccatccattcgtccacattccagttccatccatcccatctgcactccagttccatccattcygtccacactccagtgcaatccatcccttccacaatccagttctgtccattccgtccacaccccagtgcaatccatcccgcccacactccagttccatcccttcgtccacattccagttccatccttctcgtccacactccagttccatccatctcgtccacactccagttccatccatcccatccacaccccagtgcaatccatcccgtccacaccccagttccatccatcccatacacacc

SEQ ID NO: 896242 - DNA, 661 bp, Homo sapiens
atggtattttcagtgccttcttcctttcagtgaccatggctcaacatccaccagcaggtgcagtgatgaaaattctttgcttcccccattgttagccatgctcctgaaccttctcctaggcctatgtgggcatttctttacgaaatccaggtttagcaagagccctgctcaatgagtgtatcccccaccttcaatatccgttcaccctctgtatctgctcaggttcctcatcatccagggtaaggctccagtgccatccatgctgtccacactccagttccatccatcccgtccacaccccagttccatccatcccatccacaccccagtgcaatccatcctgtccacactccagttccatccattcgtccacattccagttccatccatcccatctgcactccagttccatccattccgtccacactccagtgcaatccatcccttccacamtccagttctgtccattccgtccacaccccagtgcaatccatcccgcccacactccagttccatcccttcgtccacattccagttccatccttctcgtccacactccagttccatccatctcgtccacactccagttccatccatcccatccacaccccagtgcaatccatcccgtccacaccccagttccatccatcccatacacacc

SEQ ID NO: 896243 - DNA, 628 bp, Homo sapiens
aaaaactaccctaattaagtcttcccttctaaaagtcaggaaaactagcattacttgaaaatgagtaccaaaaaaactaaggtcaaatcccatacaaagtcattatgaagaaaaaaagagaataaaacataatttctttagaaaataaattatgacagaaagccatgscttcaaaacagatgaaaactaaaatattttaaaataagttaataaacatctaaaatgacattagatatgaaaaaatgacgtgtcagatttagaaatatacagaaaggagatgacaaactcagaaaagaagtaaaaattttaaaaacatttcagaaatgaagagagaaagaaacacgagcaaataaacagaactgataatgcattaaaagaaaagatgaaaaaatatgaggctataaaagagacgtgtggtacaggataacggtcacccaaagatgtccccatcctaatctccagaacctgtgcctgtgtcacctgacatggcaaagtgacagcaaatgtgactaccttatggatctcaagagagaagcctgatcctggatcatctggctgagtccagcctaattgcatgggtccttaacagtggagagtcgactgcagtggtatgaaggaaatgcagcta

SEQ ID NO: 896244 - DNA, 658 bp, Homo sapiens
ttaatctttggagttgctctctttaggatggtgcttttttcttttatatcctttgatgcccttgagggtttaactgtggtataagttgggtttagtggattggctttgtttctgtatgctttcagcaggccaaggctcagctcagcactcttgtgctgcatactctcactctgggggctaggaccaggcctgcagctttgttccctgactcttgagtttaagcacctgctgcactggagcgatggaagtgttctcagttcatgggcaataatcctctgatttgtgtggccatcaaaagtgctatggtggggcagtggtgggcccccatgcatgcagtagtggggratctgtctgcaaaggtgggtaggcagagtctgcctgtgaaagagctataatagtgggcactggtgaatgttttggctagggatctgaggccatgctgcaagcaggtatgtccagagagaaaccctgggaaaagctggcaaatgagggagtgttcagatcagactggcctcatcccatgggcaagatggccctgttctgtccagttccagcagctaacaaaggctcaatcttcctaggggatgggaacccatgacagtgctcaactacagcctttctggtaccaaacactctggtctttctctaggagttctgt

SEQ ID NO: 896245 - DNA, 612 bp, Homo sapiens
attcataacagctacaaactggaaacaatttagctctccatcaatagaaaagggatatgaatttaaaaattgagttatatcggccgggcacggtggctcacgcctgtaatcccagcactttgggaggccgaggcaggtggatcacaaggtcaggaggtcaagaccagcctggccaatatgatgaaactccacctctactaaaaataaaaaaaaaataaaattaaaaaaattagctgggcatggtggtgcacacctgtagtcccagctacttgagaggctgaggccggagaactgcttgaacctgggagagagaggttgtgatgagccaagatcgtgccactgcactccagcctgggcaacagagggagactctgtctcaaaaaaaaaaaaaattgaatatatccatacaatatactactacckgttagcaaaagtgtccagcataaataaatcttaaaggtattatactgaatgaaagaagctagaaactgaggcctgcatattgtatgattctaatttacatgatattctagaaaaggcagaactatagggataaaaaacaaatcagtagtttacagagcctggagtttagtagaatatgtttactacaaa

SEQ ID NO: 896246 - DNA, 645 bp, Homo sapiens
aagaaaagaagcatgcacctaacgggcttctcgaattacaggcttgtccaaacactgccttcctcaagagacgctggtcagggacaaagcctgccctgctgtcaacagcaaggcccggctgagaagtgggcttgcttctcttgctggtcctggccctgagccagataggacgccatttgactttgattcagtctgacccaagagaaaatataccatcagcaagtggaggatctttcctccttaacagactttagtcatattgcttcttcttccttgctgaaaaaaagcccaggtagmtttttctctcccgttaaattggaaccctgaagttaggaggcacagtatctcagatactgtcagataacaagagccaccttttcagtctctgtaacttcatctatctcgagggttgggaggcagacagctatgaaagaagacccaaaagcagcagaatctgggcatcccaagtgtacccgaagcacgccagtctaggtggcccctctgtcacctggtttaagaacagacatcttagaaggaaggagctctgaccagctagtggcatgtctcctttcaagctgtgctttgtgtctcttcaacagaaaggcagacatcagagaactgcctctcttcctcgccctcccccag

SEQ ID NO: 896247 - DNA, 575 bp, Homo sapiens
gctgcttagctacagtctcaagtggactcctcagcaacagggcatcccgcagctcacgctgcggtcatctggccccttctgttccaaggtcataatttttggtatgaaggacaaagccgtggggagctggcacctttggctactctttcttttgctgtctatgtaagtaataaactgcctgaatccaaaagtggcttgtgatacctttaccagccgaattagtaaggtcttggccttgccttgtctcgtatgcttgaaaagagggtgtgcccaactctcacctcaactgcgccaaagctttaggccaaaaggatagagctggttcccagggcctgtcaaaagagaagggagcaggaccgagggcaaccagcaaagctttagacccatgcagaccagtgccacctggctcagccatcctagcacagctggaattctttccrtctttgttgcatcagccacacacgaggacactaatactgacattataaggttgttgttaagattggagataatgtatgttatacttccatagccgtccccgacacaactactaaaacagaaaataacagccacta

SEQ ID NO: 896248 - DNA, 368 bp, Homo sapiens
gtttctagacagcctgcgttcaagtcattgtggcccaagactgaactgcagaatggaaaggagtgaggcgctgcagcagaaggagctcgctgtcaaagctccaaagagccggagaccatttgcagggtggggtctgagggaggttggcaaggaaaggggagcatcatgtggattcctttccatagtygtcatgagctaacacacttcgccccaacagctggcttagattctaattgtgcccaggactggccatgcaacccttgagtaaatgctggccacctctctatgacaccaaaaggccagaaattacctggcatgataaagaagaaggagtcaagtgtataggagaccggagggttagactggat

SEQ ID NO: 896249 - DNA, 478 bp, Homo sapiens
ctgagtgtatggacatcattcgcaatcatttttgtggcttcgtcaaaatcaagtgcaaaagaaagcacattgggtgtgatgtcacgcagaatgtcccttaatgcctccaattggtcagtgctggttgcagtcagcctgctggctgtgagttctgctgaccttgtgtatgtgttctccacgatgctggaggcgatcccagccgtggcagatgctattcccagccctaccccagctgcagtaatgctcaggctcagccctgctgtaaatggtgccaacayaacgccaatgacagacaggatgccagtggagccagacaccacattggcgatgacgcagcctctgtggaccttttcaatctcatttgcaatgacacgaagcctttctatggactcctgaatcttccatctgatttgaggaaactttcaaaaaccactccctaaactgctgttctttttgctgcatgtctttgtcctcaata

SEQ ID NO: 896250 - DNA, 641 bp, Homo sapiens
cttaggtggttttctctcttattcttctttttctctcacacattgtttctagtattttaattccatctttttatggaacctccattagtgcttttgttactattgtttcatacagtcaatgcttgtttagatttgactatgtatttttcaactttttaattctccactgcttttctaaaaacatttttgaggtataatatagatataatycctccatttaaagtatacaattcaatggtttttagtatattgacagttgtacaactattagcacaatcaaccttagtacatttttatgaacctcaaaagaaacctcatacccattagcagtcactctccaatttccctccaacccaaccagccctaggcaaccactaatctgctttctgtctctatagatttgcctattctagatatttcggagcaatggaatcatacactatatggtcttttgtgactggcttctttcacacagcatattttcttttttttattatactttaagttctagggtacatgtgcacaacgtgcaggtttgttacatatgtatacatgtgccatgttggtttgctgcacccgttaactcatcatttacattaggtatatctcctaatgctatcccttccccctccctcaacccc

SEQ ID NO: 896251 - DNA, 562 bp, Homo sapiens
gtctttgttcagtccatagtcaacttgcattatttcttaatttgtatctttagattctgggatatattgagtttagaaagtttctttttactctgtcaacatctttcttttaaaacaatttctgatttgtacccaaatattttagttgcttcaagctttacttttataaggtacacaaatgttatttgtgaatatacagtatcttttttgaaggagaatacgtaatgttggttgccttttataattaagctactgtggatgaaccttttatgacaaataagagacaattttgttatgactcttatgttacactgtgatgcagttctctctacttttccatgcccccaatgagggggttttcattctacttcagcttcctyatatccagtgacatgtgtataatggatcatgttcagcttagcagtgattctgacagtgctcagcacaaagtagatgctcagtacttctttgctggatctatgttagctattgaatttctttttgcatctcataaagatatgtgtgttgagatatgattacttaaggaatattcaggacaatg

SEQ ID NO: 896252 - DNA, 570 bp, Homo sapiens
ctagaaaaaaaaataaactcaaaatggattaaagactcaaatgtaaggctcgaaactatagaactactaaaagaacaagcacaggagaaatgcttcatgatattgttcagggcaaggattttttgggtaagaccccaaattatagactacaaaagcaaaaacagacaagtgggatttcatcaaactaaaatgcttctgcatagcaaaggaaataatagagtgaagagacaacatatagaatgggagagaayatttataaacaatgcgtctgacaaggggtcgatatcaggaatatatataacaaaatcgaacaactcgatagcagaaaaaaaaaacaccctaaataatctgatttaaaaataggcaaaagacctgaatagatatttctcaaaagaagatatacaaatgacacataaccagcaggtatatgacaaaattttcaacatcactcaacatcagggaaatgcaaatcaaaaccacaatgagatgtcatctcacaccagttagaatggctatcgtcaaaaagacaaaacaactaacaaatgctggcaatgatacggttaaaagaga

SEQ ID NO: 896253 - DNA, 629 bp, Homo sapiens
tgtccatgccttcttataatctttaactaaaaacatcttttactgttttttttactcacctcgtatgcaaatccatgttcagtagtctcaattacatgtcatagctcttagcaatttttcacttcaatgtaaaacctgatacgttgttttaattatgtactagatacagataaagtatgactcctttcagcatagttagggtcatggttacttccatatgttcctaggccttgccaattgtgaagcaggtaagttgacagtttttaaaggccaaagaagcagttacaaccttaaaacatttagcaaacctagtatctgacctgtataatttagaccacatatttacacctttgaagacrtttgtattttaccaataattcctaacactgtttttatttttaaagattaaagttccgtgaactgaaaggtaccacagcttttacttttctcttaaaaatatttgatttaagtgcttatttttcttaggaaaattaattagagctctttttaaatagacactacacacataacacatatgtaaccacacagacaaacagaagaagatccagtagttataagatttttcatttgctaatttcccaattggattattggcctgctggtgagac

SEQ ID NO: 896254 - DNA, 616 bp, Homo sapiens
accttacaagccagaagagagtgggggccaatattcaacattcttagagaaaataattttcaacccagaatttcatatccacccaaactaagcttcataagtgaaggagaaataaaattcttcacagacaagcaaacaccttacaagtctgccttacaagagctcctgaaagaagcactaaacatggaaaggaacaactggcaacagccagtgcaaaaacatacccaattgtaaaggccatcgacactatggaaaaactggattaactaataggcaaaataaccagctagcatcataatgacttgatcaaattcacacataacaatattaactttaaatgtaaatgggctaaataccctaattaaaagtcatagactggcaaattggataaagagtcaagacccatcagtgtgctgtattcaggagacccatckcatgtgcagagacacacacaggctcaaaataaagggatgtaggattatttaccaagtaaatggaaatcaaaaaaaatcaggggttgcagacctagtctctgataaaatagactttaactttaaaccaacaaagatcaaaagagacaaagaagggcattacataatggttaagggattaatgc

SEQ ID NO: 896255 - DNA, 651 bp, Homo sapiens
agccatttatcccagcaccatttattgaatagggagtcttctttctattgctcatttttttcagctttgtcaaagatcagatggttgtagatgtgcagtcttacttctgggctctctatcctgatccattggtctatgtttgttcttgtaccagtaccataccattttggttacagtggccccctactatagtttcaagtcaggtagtgtgatgcccccagctttgttctttttgcttaggatcgccttgggtattcaggctcgtttttggttccatgtgaattttaaaatagctttttctagctctgtgaagaatgtgattggtattttgataataatagcattcaatctgtaaattgctttgggcagtttagtcattttaatgacatcrattctttctatccatggtcatggtacacttttccaattatttgtgtcttctctgatttctttgggcagtgttttgtaattctcactatagaaatgattaaaggaccattactactgaccccacagaagaaaaaacaaccatgagaaactactatgaacagctctatgcacacaaactagaaaacctagaagagatgaacaaattcctcaacatttacaccctcccaagactgagccaggaagaaactgattcctgggaca

SEQ ID NO: 896256 - DNA, 423 bp, Homo sapiens
ctaaagagcttctgtgcagcaaaagaaactatcatcagcgtgaacaggcaacctacagaatgggagaaaatttttgcaatctacccatttgacaaaggtcaaatatccagaacctacaagtaacttgaacaaatttacaagaaaaaaacaaacaaccccatyaaaaagtgaacaaagaatatgaacagacacttctcaaaagaagacatttatgcagccaacaaacctacaaaaaaaaagctgaacatcactgattgttggagaaatgcaaatcaaaaccacagtgagataccatctcatgccagttagaatggcgatcgttaaaaagccatgaaacaatagatgctggcgaggctgtgaagaaataaaaatgcttttacgctgttggtggaaatgtaaattagtttaaacattgtggaaaac

SEQ ID NO: 896257 - DNA, 423 bp, Homo sapiens
ctaaagagcttctgtgcagcaaaagaaactatcatcagcgtgaacaggcaacctacagaatgggagaaaatttttgcaatctacccatttgacaaaggtcaaatatccagaacctacaagtaacttgaacaaatttacaagaaaaaaacaaacaaccccattaaaaagtgaacaaagaatatgaacagacacttctcaaaagaagacatttatgcagccaacaaacctacaaaaaaaaagctgaacatcactgattgttggagaaatgcaaatcaaaaccacartgagataccatctcatgccagttagaatggcgatcgttaaaaagccatgaaacaatagatgctggcgaggctgtgaagaaataaaaatgcttttacgctgttggtggaaatgtaaattagtttaaacattgtggaaaac

SEQ ID NO: 896258 - DNA, 625 bp, Homo sapiens
ttgcagagacgtggatggagctggaggccattatactcagcaaactaacacagggacataaaaccaaacattgcatgttctcacttataagtgggagctaaataatgaaaacacatggaaacagagaggggaacaatggacactgggctctacttaagggtggaagctgtgaagaggaagggaactaggaaaaataactaatgggtactatgcttaatacctgggtgatgaaataatctgtacaacaaactccataccataagtttacttgtataacaagcctgcacatgtacctctgttacagaaaaggggtccggattcagaacccaagagagggttcttgaatttcacataagaaagaattcagagtgagtgtatacagtaaagtgaaatcaagtttgttmagaaagtaaaggcataaaagaatggctactccacagaaaaagaagcactgagggctgctagttgcccatttttatggttatttcttgatgatatgctaaacaaaggatggattattcatgcttcccctttttagaccatgtagggtaacttcctgacattgccatagcatttgtaaactgtcatggcgctgatggaagtgtagcagcgaagaagaccagag

SEQ ID NO: 896259 - DNA, 625 bp, Homo sapiens
ttgcagagacgtggatggagctggaggccattatactcagcaaactaacacagggacataaaaccaaacattgcatgttctcacttataagtgggagctaaataatgaaaacacatggaaacagagaggggaacaatggacactgggctctacttaagggtggaagctgtgaagaggaagggaactaggaaaaataactaatgggtactatgcttaatacctgggtgatgaaataatctgtacaacaaactccataccataagtttacttgtataacaagcctgcacatgtacctctgttacagaaaaggggtccggattcagaacccaagagagggttcttgaatttcacataagaaagaattcagagtgagtgtatacagtaaagtgaaatcaagtttgttaagaaagtaaaggmataaaagaatggctactccacagaaaaagaagcactgagggctgctagttgcccatttttatggttatttcttgatgatatgctaaacaaaggatggattattcatgcttcccctttttagaccatgtagggtaacttcctgacattgccatagcatttgtaaactgtcatggcgctgatggaagtgtagcagcgaagaagaccagag

SEQ ID NO: 896260 - DNA, 630 bp, Homo sapiens
ttgttttttctgagcagcagttagacattactggttggtttacaggaaaagtcagggttagcttaaattgtagaaacaaacttaaaaacgacagatgagactagaatttaataacaagtgtaccatagttcttgaaacataatttttcttttttcagtttcccatttttactaaagayaaatcatggcaagactgatttgctttattgtacctggccagattatttgtataaggtgcagcaagaacaattatgttttacgtaagcttttttaaattggctttgatagaactttgttctgtagaaggaatcttagataagacttttgtagaaccaagctctgccatgggtttgtacccttaaatacctatgagttgagtaaatttctctcctcttggggtttcaagataacttggcactcctgggcctgtgagaaagtgacattctttacttaccacaggtcagaaaccctgtacagtgactgtgtaggcaaggtatgagctgagtttcccaaggggatttattggctttacaagtcaaaaacgatttcttaaaggaaagcatgccattccagtcaaataaccagtttttccaattgtgtcctgttacagaagaaaacagattcttttcgc

SEQ ID NO: 896261 - DNA, 578 bp, Homo sapiens
ctgacaggtgtgaagatcttggtaagtctgtaatcaagcacaattaaccaatagtttcccctgatgggttgtagtatctcctccccagttattccatgaatttttttgaatgaatagctgacctagagactaggataaactcccaagagcagtggccatcaattactgagctccatacccagaagtaactagataataatttaatgttctacctccaattaaagtagtatgtatcttcttaaatatttmcagcagatttttaatttatccatacttattatacatcttgcactgtgctaggcactatacaatacatagactctcggtattacttatcatagtgactaacacttatggtcaaaaaatttatctaatctttagatatttaacctgtatttttctgtttctggtattaaaaacactaagccattctcatttatatggtacaatggttgaacgaattaaataccttccacagtgtgaacatttaactcccttggttaaccttctaatttgaaaaagaagattgagggtcatagctgaactagcttttgaatttaccactaatttacacagtc

SEQ ID NO: 896262 - DNA, 579 bp, Homo sapiens
aactggtccttattatcttatgggcccaccttctctgcaacagtccctgagcctagagggagggtgcttgtatagttttagaagcagagctttctcagtgaaaaggattccagcccagtgggacgccagatgaaggagattcatatctctggtcttcaaaatgccatgatttttgtttccttggaagtraaacaaggagagataaataacaaatgtttgacaattatttggcaattataagaggaatttttgtgtcagaacagaaaaagaaacctattccatcagggcatcaactaaaaatatgaagaaaaatatgatctggtactctctggaggattattgtagccaagaaataatgattcaatctgcactcaaacaaaaaagttagggctgaaatctagtattaaatgccacattttccttagaaacaatctctctagctgctttttttccattaaagagaaattatggcaggtctgattatttgcataaaatgcagcaagaattgattggccacacagactccttttaagttggcaaaaaataaactattttagattaagtcttgttaaagcaact

SEQ ID NO: 896263 - DNA, 579 bp, Homo sapiens
aactggtccttattatcttatgggcccaccttctctgcaacagtccctgagcctagagggagggtgcttgtatagttttagaagcagagctttctcagtgaaaaggattccagcccagtgggacgccagatgaaggagattcatatctctggtcttcaaaatgccatgatttttgtttccttggaagtaaaacaaggagagataaataacaaatgtttgacaattatttggcaattataagaggaatttttgtgtcagaacagaaaaagaaacctattccatcagrgcatcaactaaaaatatgaagaaaaatatgatctggtactctctggaggattattgtagccaagaaataatgattcaatctgcactcaaacaaaaaagttagggctgaaatctagtattaaatgccacattttccttagaaacaatctctctagctgctttttttccattaaagagaaattatggcaggtctgattatttgcataaaatgcagcaagaattgattggccacacagactccttttaagttggcaaaaaataaactattttagattaagtcttgttaaagcaact

SEQ ID NO: 896264 - DNA, 579 bp, Homo sapiens
aactggtccttattatcttatgggcccaccttctctgcaacagtccctgagcctagagggagggtgcttgtatagttttagaagcagagctttctcagtgaaaaggattccagcccagtgggacgccagatgaaggagattcatatctctggtcttcaaaatgccatgatttttgtttccttggaagtaaaacaaggagagataaataacaaatgtttgacaattatttggcaattataagaggaatttttgtgtcagaacagaaaaagaaacctattccatcagggcatcaactaaaaatatgaagaaaaatatgatctggtactctctggaggattattgtagccaagaaataatgattcaatctgcactcaaacaaaaaagttagggctgaaatctagtattaaatgccacattttccttwgaaacaatctctctagctgctttttttccattaaagagaaattatggcaggtctgattatttgcataaaatgcagcaagaattgattggccacacagactccttttaagttggcaaaaaataaactattttagattaagtcttgttaaagcaact

SEQ ID NO: 896265 - DNA, 604 bp, Homo sapiens
tagaatcataagtctcctaaggcattggaatacatgtttagaggaaatgatgccttgttttcaaagtggcagctccaagaattttctactctattttaggtgatagaactttgtagtcacttgatatgtacaattctatgtagaaaccagtgctttatttatagttgcagctgatccctccttcctagctgtgagaagcatgtgtagtttgataagggaggttagtattttttatttcaatactttttgggaaacaggtggtatttggttggatagaaaagttatttagtggtaatttctgagattttrgtgcacccatcatgggagcactgtacagtatacccagtgtgtagtcttttatgccttctttatttcccgactccttgtctctcagcttgctggttgggtaggaaagtgaggcgtcagggatgagaaaaaaaaagggagtcaggaaagtttttatttaattaatactattgtcagttgtcttcatgtgttctgggcctgcctgttacttttcaaatttatttttaattattcattatagtagtttttggggaacaggttttttgctacatggataagatctttatttgtaagttct

SEQ ID NO: 896266 - DNA, 561 bp, Homo sapiens
gcagatcgcttgagctcaggaggtcaagaccagcctgggcaacattgcaaaaccctgtctttacaaaaaatacaaaaaaatagcggagcatggtggcacacatatgtattactagctactgggaggctgaggtgggaggatcacctgagcccaagaggtcaaggctgcaatgagtgaagattgcactactgcattccatcctgggcaacagagtgagattctgtctcaaaaaacacaasagagttcccacagacactgtgccaccacacaggcacagcctcctcagctgtcaacaacctgcaccagagtgctacatttgttacaatcaatgaatctatactgacatataattacaaccccaaatccataatttgcattgaggtacactttacaggtttttagaaataaaaatggcatatatcatatattttagtatcacacagaatagtttcattccccctaaaattcctctatgttctacctatttatctcttcctctcctctttttcctagcaaccactgatcctttcattgtttccataattttgccttttctagaat

SEQ ID NO: 896267 - DNA, 514 bp, Homo sapiens
aatatagtaagatcctgtctcattaaaagaaaagaaaaaaaaaaaaaaagaagtttccttactaaggctgcaagaaaaatcagtgaagaagctattaattgacaagtgagcacttcatataaatttgggccaaacaggctggaattgaagtttgggaagtgtttgctcatttatctcctgaggttggttcaggaaatcggcaactactacctccatatcatttgctctccttccttttagaactccatggcaatgttttgaggattaaagaggagagtgatgactatccaaacgtcagagaacgcaacyatgagactagagacactggaaaactaaaaaagtaacgggcctttgctgactcagggagatgatttcccaagagggaagaaaactggaacctgagaaataagtgatttagtaatgtggctgctaaaatacggaaaaactagaatgaatggcttacacatttttgaaatgaagttagaagagggttatactgtgaagaagaatgaaa

SEQ ID NO: 896268 - DNA, 645 bp, Homo sapiens
ggtgagaaatataaatgctattatcaaattcaaaataaaatataaagtcaaatgaaaaatttagataaaaatatattgcaatactagtttcatatgaaatgtcacctgtgaactgaactacattttgatactatacattaaaaatagccaccttccataatctgtgacattttgtattatcctagagtgcacgattttctaatagcattagatcagggaaagaaagcctaagcttgtatagtcacatagaagaccaagagaggccaggtgtrgtggctcaaacctgtaatcccagcactttgggaggccaaggccaaaggattggttgaggccaggaattggagaccagcctggtcaacatagtgagacccaatctataccaacaatttttaaaattaactgcgtacagtggtgcacgtctgtagtcccagctacttgggaggctaaggggagagaatcgcttgagcccagctggtcaaaactacagtgagccatgattgtgccactatactccagccttgtgacagtgcaagaccctgtctcagttaaaaaaacaaaaacaaaaaaagaaaactaagagaaagctaagaaagtgttaagttcagacttcagctgaccaaaattccttctgcctgcccagcgagt

SEQ ID NO: 896269 - DNA, 645 bp, Homo sapiens
ggtgagaaatataaatgctattatcaaattcaaaataaaatataaagtcaaatgaaaaatttagataaaaatatattgcaatactagtttcatatgaaatgtcacctgtgaactgaactacattttgatactatacattaaaaatagccaccttccataatctgtgacattttgtattatcctagagtgcacgattttctaatagcattagatcagggaaagaaagcctaagcttgtatagtcacatagaagaccaagagaggccaggtgtggtggctcaaacctgtaatcccagcactttgggaggccaaggccaaaggattggttgaggccaggaattggagaccagcctggtcaacatagtgagacccaatctataccaacaatttttaaarttaactgcgtacagtggtgcacgtctgtagtcccagctacttgggaggctaaggggagagaatcgcttgagcccagctggtcaaaactacagtgagccatgattgtgccactatactccagccttgtgacagtgcaagaccctgtctcagttaaaaaaacaaaaacaaaaaaagaaaactaagagaaagctaagaaagtgttaagttcagacttcagctgaccaaaattccttctgcctgcccagcgagt

SEQ ID NO: 896270 - DNA, 686 bp, Homo sapiens
taaaagaaagccaagacactaaacacctttgagcatttttctccatctcctaaatgctctgtaatttgtatgtaaagaatgtaagacctgtctgcctattttgcatggcattgctatttaatttttttatttttgtttgccgcaattgttatgggtaaatggtgagtgtgaggtaataagggcatgctatttgtgagaatggcaaaaatgtattgtttcatactacgaatgcatcttcagaataagtgggtggtctttcattgccacttaatgtgatttttaagggaaggcattcacagatacaaagacattcttcaaaatgtgatcactataagaccaagagcctcacaaataagcagagtaaaagactaagaatctcatacagtattgctaacaatgcgtagaggggaaataaaggaaggcctatttgccctggagagatgaggaagcaatccgaaattccttgattgcggtgtgaagactgttaacactttatacaacgtggawgagaaagaaggtaaagctaaggaatcctaaacaaggggtgaccttagagacgtgaggagaagcatgatgtgatgggaaggtagaaaccacaccccatgctacggagtattcaatcatctccattagcagtaattaatattcacacaacaggaaagaggaagacttttctttcttctatt

SEQ ID NO: 896271 - DNA, 679 bp, Homo sapiens
ccaggatagtccaggggagtaggttagtttttgagattattaaagggagaaaaatatttggatgattatctattgagtagagagaattaatcatcactctttttttctggtgatttgttaagttatttatacaaggctgaataacttttagttatttttgcagaccatcacacatctcaacattcttytcaggttgcaaaggtctagtgtgtgaggcaactgtttaaaagactactcataattaagtgacgatccataagtaaagcacatggagtagtaatatggcatagtggcacttcatattgatactgatgtagtttggatgtgtgtccccggccaaatttcatgttgaaatgtaatctccaaagttaaaggtggggcctggtaggaagtgattggatcatgggggtggatgtcccatgaatggtttagcaccattccttggtgctgtccttgtgatagcaagtgagttcttgggagatctggtcatttaaaagtgtgtggaaccttccccttctctctcctgctcctacattcaccatgtgacatacctgctccccctttgccatccatcatgattgaaagcttcctgagacctccccagaagtagatgccaccacactttctgtataccctatagaaccgtgaaccaatcaaacctttttcgtttataaattac

SEQ ID NO: 896272 - DNA, 662 bp, Homo sapiens
catgttctcacttataagtgggaactaaatggtgagaacacatgggcacataaaggagaacaacacacactggaagcttttggaagttggagggtgagaggagggagataatcagaaagaataactaatgggtactaggcttaatacctaggtaatgaaataatctgtataacaaacccccatgacacaagtttacctgtataacaaacctgcacttgtatccctgaacttaaaataaaagttaaaaaaaagaattataaataccacatattctcactcatatgtggaagctaaaaagtattgagctcatartagagaggagaattgttcttagagcctagaaataatcgagaaaggaaaggatagggagaggttgattaacatatacaaagttactgctaaatgggaagaataagttgtaatgttctgtagcactgtgaggtaaatatagttaaccaaaatttagtgtatgttttcataaagctagaagagggtattttcaatgttcacaacagaaagaaatgataaatattcaaggtgatggatatgctaattatcctgatttgatccttacacattatatattacacatgtatcaaaatctcactctgtatcccataaataggcactgttgttagatgtcaactaaaaataaaaagaaa

SEQ ID NO: 896273 - DNA, 552 bp, Homo sapiens
aggaagtttcaatgcctctttccattttgttattcctaaagtaatatgggaattttatgcttactcatggaaaagaaaattatctgaattttttacccactctttcctttaaaagtagttgcctaccatgatgtatatttttaaagtacaggggaggcacaaagaagaaaatgaaagtgaagatataagtctaagaatttagaagacatttctcytggtttccttagaccatgtgaaatagaatctgtgaatcagaaaatctatgacagatgagaatgtcagccttttgtaaacttgatcttttaatacttaatttttcctttatttgctctcttatatgttttcttcttattttttttatttgaggcagagtctcactctgtcacccagcctggaatgcagtggcatgatcttggctcactgcaacctctgcctcccaggctcaagtgatcctcccacctcagcctcccaagtagctgggactacacgcctggctaatttttgtatttcttttaaagaaggggtttcatcatgtagcctatgctggtcttg

SEQ ID NO: 896274 - DNA, 701 bp, Homo sapiens; identical to SEQ ID NO: 861813

SEQ ID NO: 896275 - DNA, 648 bp, Homo sapiens
atctcacaccagttagaatggcaatcattaaaaagtcaggaaacaacaggtgctggagagaatgtggagaagtaggaacacttttacactgttggtgggactgtaaacttgttcaaccattgtggaagtcagtgtggcgattcctcagggatctagaactagaaattccatttgacccagccatcccattactgggtatatacccaaaggactataaatcatgctgctatgaagacacatgcacacgtatgtttattgcagcactattcacaatagaaaagacttggaaccaacccaaatgtccaataatgatagactggattaagaaaatgtggcacatatacaccatggaatactatgctgccataaaaaatgatgagttcatgtcctttgtaggkacatggatgaaattggaaatcatcattctcagtaaactatcacaaggacaaaaaaccaaacaccacatattctcactcataggtgggaattgaacaaagagaacacatggacacaggaagggaaacatcatactctggggactgttgtggggtggggagaggggggaggaatagcatgaggagatatacctaatgctaaatgacgagttgatgggtgcagcacaacagcatggcacatgtatacatgtgt

SEQ ID NO: 896276 - DNA, 660 bp, Homo sapiens; identical to SEQ ID NO: 861812

SEQ ID NO: 896277 - DNA, 536 bp, Homo sapiens
tgagctagcatattctacaagtattatttcttatttaaggagcgtttaaagatagaagataattaacaatcaaatcaaagtcaacatttttgagacactatcaaaataagatttataatttcagattttaaggcctgacgcggtggctcacgcctgtaatcccagcactttgggaggccgaggtgggcagatcacgaggtcaggagatcgagaccatcttggctaacatggtgaaaccctgtctctgctaaaaataacaaaaaattagccgggcatggtggcgggggcctgtagtcccagctacttgggaggctgaggcaggagaatggcgtgaacccaggaggcggagtttgcagtgagctgagattgcaccactgcactccagcctgggcracagagcgagactctgtctcaaaaaaaagaaaagattttaaatgaaagaatggcaacaatggatagaatagaggcacttatgatggttaaataaataaaaacaaattgtttagacctttagaactatttaattatattctgaa

SEQ ID NO: 896278 - DNA, 609 bp, Homo sapiens
tctcttggaggacaatttgacagcatattggaaaatattaatacacatactctctgacctagtaactctcactctaggaatttgctctacaggaatattcactgataaacacaatgattcaggtactaagatattaacaacagcattgtccatactggtaaaaagttagaaaaattaaattataataataatgctaacaataactaattgttattgttaagctataaacttgttaaaatgaaaaataaattaaagccacatataccaaaaaacattttgcagayagtagaataatgaaataattttttaaaaattgaggtaaatttatatgtattgacatgcaaagatctccaagacaaattgttaagtaaaaaaagcaaaccacggcataatacataaatacggtatgatcgaatttatgtttcaaagacattagacatgattataagtaattgtgtgcattttcaaatgcatgtaaaaaccggccgggtgcagtggctcatgcctgtaatctcagcactttggaaggtctaggtggccggatcacaaggtcaggaggagtttgagaccagccaggccaacacagtgaaactccgtctctactaaaaa

SEQ ID NO: 896279 - DNA, 609 bp, Homo sapiens
tctcttggaggacaatttgacagcatattggaaaatattaatacacatactctctgacctagtaactctcactctaggaatttgctctacaggaatattcactgataaacacaatgattcaggtactaagatattaacaacagcattgtccatactggtaaaaagttagaaaaattaaattataataataatgctaacaataactaattgttattgttaagctataaacttgttaaaatgaaaaataaattaaagccacatataccaaaaaacattttgcagatagyagaataatgaaataattttttaaaaattgaggtaaatttatatgtattgacatgcaaagatctccaagacaaattgttaagtaaaaaaagcaaaccacggcataatacataaatacggtatgatcgaatttatgtttcaaagacattagacatgattataagtaattgtgtgcattttcaaatgcatgtaaaaaccggccgggtgcagtggctcatgcctgtaatctcagcactttggaaggtctaggtggccggatcacaaggtcaggaggagtttgagaccagccaggccaacacagtgaaactccgtctctactaaaaa

SEQ ID NO: 896280 - DNA, 609 bp, Homo sapiens
tctcttggaggacaatttgacagcatattggaaaatattaatacacatactctctgacctagtaactctcactctaggaatttgctctacaggaatattcactgataaacacaatgattcaggtactaagatattaacaacagcattgtccatactggtaaaaagttagaaaaattaaattataataataatgctaacaataactaattgttattgttaagctataaacttgttaaaatgaaaaataaattaaagccacatataccaaaaaacattttgcagatagtagaataatgaaataattttttaaaaattgaggtaaatttatatgtattgacatgsaaagatctccaagacaaattgttaagtaaaaaaagcaaaccacggcataatacataaatacggtatgatcgaatttatgtttcaaagacattagacatgattataagtaattgtgtgcattttcaaatgcatgtaaaaaccggccgggtgcagtggctcatgcctgtaatctcagcactttggaaggtctaggtggccggatcacaaggtcaggaggagtttgagaccagccaggccaacacagtgaaactccgtctctactaaaaa

SEQ ID NO: 896281 - DNA, 585 bp, Homo sapiens
ccacagtgagggcctcgttttatatctgatattagaattttaaaaacgtgagtttttcctatttttttccctcttggtcattattgatggaattgtctattttattgtattttatttttgagacaaaagtcttgctctgtcacccaggctgccgtgcagtggtgtcgatagcggctgctgccaccatgccagctatagcagggggcacggctggggctgcacacyccatggagccagtggaggccctgccccttctgagttgggacgggagctccccaggtgcttctgcagccaccctcccaggtgcaggacctggatgtctctgcagcctacaccctcgagggcccaggagaggccctcaccccatccctgctggctccagaatgtctgctctcactgtctggcctctctctgctccagtacccgctctgatcttggaatggggttggggccaagccttgggactatgaatggcagtgggaggcagacagattagtgggtagaagcaggtgggtccccagtaaggccccaccctcaggctgaggagagcccgaaggctggaggccaggctgtcagtcccacaga

SEQ ID NO: 896282 - DNA, 585 bp, Homo sapiens
ccacagtgagggcctcgttttatatctgatattagaattttaaaaacgtgagtttttcctatttttttccctcttggtcattattgatggaattgtctattttattgtattttatttttgagacaaaagtcttgctctgtcacccaggctgccgtgcagtggtgtcgatagcggctgctgccaccatgccagctatagcagggggcacggctggggctgcacactccatggagccagtggaggccctgccccttctgagttgggacgggagctccccaggtgcytctgcagccaccctcccaggtgcaggacctggatgtctctgcagcctacaccctcgagggcccaggagaggccctcaccccatccctgctggctccagaatgtctgctctcactgtctggcctctctctgctccagtacccgctctgatcttggaatggggttggggccaagccttgggactatgaatggcagtgggaggcagacagattagtgggtagaagcaggtgggtccccagtaaggccccaccctcaggctgaggagagcccgaaggctggaggccaggctgtcagtcccacaga

SEQ ID NO: 896283 - DNA, 625 bp, Homo sapiens
tatttagaatctctaaggaacttaattcaacaagcaaaaaaaaaaaaaactcattaaaaataggtgaagagcatgaacagatgcttctccaaagaaaacatacatgctgcaaacaaatacatttaaaaaatgctcaacattactaatcattagagaaatgcaaatcaaaaccaaaatgagatactgtttcacaccagtcagaatggctattattaaaaagtcaaaaataacagatgctggtgaggttgcagagaaaaaggaatgcttatacactgttggtgggagtgcaaattcattcaaccattgtggaaagcagtgtggtagatcctcaaagagctaaaacagaactgtcatttgatccagcaatctcattattgggaatatacctgcattagtctgttctttcacygctatagagaactacctgagactgggtaatttatgaagaaaagagatttaattgactcacacttctgcagattgtacgggaagcatggctagaggactcaggaaacttacaatcatggaagaagggcgaaggggaagcaagcaacttcttcacatggtgacaagagagagaaagcgaagggtgaagctttacacacattcaaacaaccagatctca

SEQ ID NO: 896284 - DNA, 614 bp, Homo sapiens
aacaaacaaacaaaacccaaataacctctgatagcaatagtgtgtgggggaagaagtaaaactgtagagttttttttttttttttttaagacagagttttgcttttgttgcccaggctggagtgcaatggcgcaacctcggctcgccgcaacctccgcccgccgcaacctccgcctcccgggttcaagcaattctcctacctcagccttccgagtagctgggattacaggcgtgcgccaccacgcctggctaatttattttttgtatttttagtagagatggggtttctccatgttggtcaggctggtcttgaactcctgacctcaggtgatccgcctgccttggcctcccaaagtgctgggattacaggcgtgagccaccttgcccagcccagctgtagagttttttaacttgattgaaatggttatyggcttataatgaatggttataaaaataataatttcaatgcaagtctcatggtaagcacaattaaaacttatagtagataaataaaagataaatagaaaaatattaaccatatcaccataaaaaatcatagacttcagagaaagacagcaagagaatagggaggaatgagaaaactacaaaatagc

SEQ ID NO: 896285 - DNA, 618 bp, Homo sapiens
atttcaccatttttttcttataacaaaattattttaaattatttttcatgcagttcatatgtcttcatctctttgcaggtcagctactgagatattattttgtctttactgtgttatgtctccttggtttctatttatttatttattgaaattgtgttttatttcagtagtttttagggarcaagtagtttctggttacatggttcaattctttagtggtgatttctgtgattttggtgcactcattacccgagcagtgtacactgtacccaatgtgtagtcttttatccctcaccctaaccccacccttcaccctgagtcctcagagtccattatatcatttctatgcctttgcatctttatagcttaattcccacttctaagggagaacatacgatatttggggttttcctttcctgagttacttcacttagaataatggtctccaactccatcgaggttgcaggaaatgccattattttattcctttttatgattgagtagtattccatggtgtatatataccacattttcttcatctactcgttggttaatgggcatttaggttggttacacatttttgcaattgtgaattgtgctactgtaaacatgcatgtg

SEQ ID NO: 896286 - DNA, 618 bp, Homo sapiens
atttcaccatttttttcttataacaaaattattttaaattatttttcatgcagttcatatgtcttcatctctttgcaggtcagctactgagatattattttgtctttactgtgttatgtctccttggtttctatttatttatttattgaaattgtgttttatttcagtagtttttagggagcaagtrgtttctggttacatggttcaattctttagtggtgatttctgtgattttggtgcactcattacccgagcagtgtacactgtacccaatgtgtagtcttttatccctcaccctaaccccacccttcaccctgagtcctcagagtccattatatcatttctatgcctttgcatctttatagcttaattcccacttctaagggagaacatacgatatttggggttttcctttcctgagttacttcacttagaataatggtctccaactccatcgaggttgcaggaaatgccattattttattcctttttatgattgagtagtattccatggtgtatatataccacattttcttcatctactcgttggttaatgggcatttaggttggttacacatttttgcaattgtgaattgtgctactgtaaacatgcatgtg

SEQ ID NO: 896287 - DNA, 596 bp, Homo sapiens
gggaagggtttccagatattcgaaaggacttgggtattgtgatttaatcagtatctactttagggggcacctcaagcccagtagaactgttgtcctttcagattcatagaggtactgccttgatggtcttcaacaagatmtgggagaattctcagatttaccaggcagagacttttgttccttttccttttgttctcccaaaaatgtagagtctctctcttttctgagccacctaaagctggaggtgaaatgacacaagcaccattgttaccaccaccactatgtgctgggtcacatttgaagccagcccagcactggtcctagcccaaggcaagctgtaaaaattcactggcttaagagcccactttgtgctctgcccccttgtggtcatgctggtacctaagttgctatgcaaagttccctttactttttcctctgcttttttcaagcagaaggaggtttgtcctatggccattacagctggtaatgtgctgagtcttacctgaagccagaaagtctaagggctaacccaaggccgtcaatgtactacctgggtattgcttctggttatttagggaccaaaggctcttcagtta

SEQ ID NO: 896288 - DNA, 596 bp, Homo sapiens
gggaagggtttccagatattcgaaaggacttgggtattgtgatttaatcagtatctactttagggggcacctcaagcccagtagaactgttgtcctttcagattcatagaggtactgccttgatggtcttcaacaagatctgggagaattctcagatttaccaggcagagacttytgttccttttccttttgttctcccaaaaatgtagagtctctctcttttctgagccacctaaagctggaggtgaaatgacacaagcaccattgttaccaccaccactatgtgctgggtcacatttgaagccagcccagcactggtcctagcccaaggcaagctgtaaaaattcactggcttaagagcccactttgtgctctgcccccttgtggtcatgctggtacctaagttgctatgcaaagttccctttactttttcctctgcttttttcaagcagaaggaggtttgtcctatggccattacagctggtaatgtgctgagtcttacctgaagccagaaagtctaagggctaacccaaggccgtcaatgtactacctgggtattgcttctggttatttagggaccaaaggctcttcagtta

SEQ ID NO: 896289 - DNA, 627 bp, Homo sapiens
ttattatgtgtggtttttacattcagctggaaatattttctaattttccttgtggtttctttgttcacccattccttgttcaaacgtgtattctttaatttctaaatatttgtgaatttttcacttttctttcttttcttgatgyctactttcattctgatgtggtcagagaagaaattttttgtatttacatacttttaaaatttatttagaccttctttattggcctaatacatcgttttccctggagaatattccatgtgcacttcagaagaatgtgtaatctcctgttgttggatggagacttctatgtatgtccatttggtcttgtcagattatagtgctgttcaagttctttatttctttacatttcttctgtataattgttctattattgaaagctgatattgaagtctccaactattattcttgaactgtctatccctccctgcaattttatcggttttttcttcatatgatttgttgctgtgttgttagctatgtatgctttttgatggtttagtcctttatcaatatttactatctttctttgcctcttaaatccatttttacttttaaggtctattttgtctgatattaatataactacaccagctctctttctgc

SEQ ID NO: 896290 - DNA, 633 bp, Homo sapiens
gggtgtgatacaggcactcccatggcattcaccactgggactatgttggttcacaactaaagccagcacactatttgttttcacccaaggatggtgataactagtgcctgtctactgctaatgtttattcaaggcccaagggctctctagccagcaggtggtgactattgccaggcatatgtctttcccttcaaggcagtagagtcccttctatcccagkgtgtgtctagagatggcacgtgggagctggggcatggaatcaggaactttaggaatatactgtgtactttgttttactgtggcttaactggtacccaatttgaaagacaattttttttttttactcttccctatcctttcctcaagtaggagtctcaccccatgatcgctactgtcccagtgccatggatactactacctggcagccactggtgtttattcaaggcccaagggctttttagtcagcaggtagtgactcctgccaggcctagatctctcctttgagggcagcaagttcccttctggcccacatttggtctataaatgccatcaaggagctaaggcctggaattggggatcttaagagtttgcttgttgattttactgtactgagctggtacccaagtgaaaagc

SEQ ID NO: 896291 - DNA, 633 bp, Homo sapiens
gggtgtgatacaggcactcccatggcattcaccactgggactatgttggttcacaactaaagccagcacactatttgttttcacccaaggatggtgataactagtgcctgtctactgctaatgtttattcaaggcccaagggctctctagccagcaggtggtgactattgccaggcatatgtctttcccttcaaggcagtagagtcccttctatcccagggtgtgtctagagatggcacgtgggagctggggcatggaatcaggaactttaggratatactgtgtactttgttttactgtggcttaactggtacccaatttgaaagacaattttttttttttactcttccctatcctttcctcaagtaggagtctcaccccatgatcgctactgtcccagtgccatggatactactacctggcagccactggtgtttattcaaggcccaagggctttttagtcagcaggtagtgactcctgccaggcctagatctctcctttgagggcagcaagttcccttctggcccacatttggtctataaatgccatcaaggagctaaggcctggaattggggatcttaagagtttgcttgttgattttactgtactgagctggtacccaagtgaaaagc

SEQ ID NO: 896292 - DNA, 663 bp, Homo sapiens
tagtgaaatcaggcttttaaaggaatatcagcacttacatgtttattgtagcactatttacaaatatggaaacaatctaaataatcacctacaattgaataaagaaactgtagtttacacatataaaaatattgttaagaattaaaaatgaaatatatcctgttgtatgtgacaaaagcatgaataaacctagagtgcattatgttaagtgaaattagccagtcacagcaagataygctacatgattccacttatataaggtgtctaaaataaactcatagaaacggggagtagattgctggttgccaggaagtgggagtggggacaatggagaattgctattaattgggtataaaatctcagttatatatgaataataagttacggagatctgctatacaacatcgtgcctaaagttgacaaaaggctatactgtgcacttaaaaatttcttaaaagggtagatctcatattaagtgttcttgccattatacaaaacaatcaactgacaacatatgaaaaattatatcagcagcctgcaaatgaaaacattcttattgaaagcagtagcagagaggctacagctatttgtgtcttaacaaagaacaattattgccttgcaaaagaggaagtaatctccaaaaataaatgtggaaaatagcta

SEQ ID NO: 896293 - DNA, 663 bp, Homo sapiens
tagtgaaatcaggcttttaaaggaatatcagcacttacatgtttattgtagcactatttacaaatatggaaacaatctaaataatcacctacaattgaataaagaaactgtagtttacacatataaaaatattgttaagaattaaaaatgaaatatatcctgttgtatgtgacaaaagcatgaataaacctagagtgcattatgttaagtgaaattagccagtcacagcaagatatgctacatgattccacttatataaggtgtctaaaataaactcatagaaacggggagtagattgctggttgccaggaagtgggagtggggacaatggagaattgctattaattgggtataaaatctcagttatatawgaataataagttacggagatctgctatacaacatcgtgcctaaagttgacaaaaggctatactgtgcacttaaaaatttcttaaaagggtagatctcatattaagtgttcttgccattatacaaaacaatcaactgacaacatatgaaaaattatatcagcagcctgcaaatgaaaacattcttattgaaagcagtagcagagaggctacagctatttgtgtcttaacaaagaacaattattgccttgcaaaagaggaagtaatctccaaaaataaatgtggaaaatagcta

SEQ ID NO: 896294 - DNA, 663 bp, Homo sapiens
tagtgaaatcaggcttttaaaggaatatcagcacttacatgtttattgtagcactatttacaaatatggaaacaatctaaataatcacctacaattgaataaagaaactgtagtttacacatataaaaatattgttaagaattaaaaatgaaatatatcctgttgtatgtgacaaaagcatgaataaacctagagtgcattatgttaagtgaaattagccagtcacagcaagatatgctacatgattccacttatataaggtgtctaaaataaactcatagaaacggggagtagattgctggttgccaggaagtgggagtggggacaatggagaattgctattaattgggtataaaatctcagttatatatgaataataagttacggagatctgctatacaacatcgtgcctaaagttgacaaaaggctatactgtgcacttaaaaatttcttaaaagggtagatctcatattaagtgttcttgccattatacaaaacaatcaactgacaacatatgaaaaattrtatcagcagcctgcaaatgaaaacattcttattgaaagcagtagcagagaggctacagctatttgtgtcttaacaaagaacaattattgccttgcaaaagaggaagtaatctccaaaaataaatgtggaaaatagcta

SEQ ID NO: 896295 - DNA, 655 bp, Homo sapiens
agccaggacggccattattaaaaccaccattgacaagtaaattttggttacttctgtagcatacaacaatttaacataaagtttataattaataacatacagaagttatttcagaattatgagtttcccataattttggagcacatatcaataacatttctataaatacagcccaaagaaagtcaaacascattttatatttgacgatgcttcttgtatgatttttataccaaataagaccaatatgtctcttttggacttcagaggactcatatcaaaaaattaatgaggaatcaagttagaatttgactttggaaagttcgtcaaagataaaaagtttaaaatgcttgatatcacgaaatagggtcatgggtcattgtaaaataagtcattcatttaaccaaagcagtaactcaaagatttcaaaaaagaaaaaaaaaaaaaggtgaaaatctttattctttgagagaggaggcttaatatcccaaacaataagccctaattaaaaacaggatgggcaaatgaaatttgtttttttgaaattttataataaaagtttaatcatcttgagtataaaatataatttctataaaccttgtaacctttatcattttgcatgaaggagtgagttaatgctccaagaaagccttgttaa

SEQ ID NO: 896296 - DNA, 648 bp, Homo sapiens
ttatttaaaacctttttatattttttaatgcttccttgcttaattatttataccgtgaattactagtaattgacactgttaactagtcctgtttttttaaataagagcatttatgacacaaaaaattaaacagtgcagactgatatataaatcaaaacaaatgctctgtacatgttttctgttacagtagtaacacatatgtgtaaacttaattatcgtatttttgtcttgtgctatggttgtgtcctggttcattctctaaaatgctgatcaccttagaccaggaaaaaaaataaacttacaggatctgtttcaattcatggctaaatattttcaaaagagtgactgtaaaaatatgttccaatggcaaattgattcattgtsatgggatcacttattctaaagacttcttgtctttactttgttcccatgcctaccttttagccataatacaacagaatcaaatattggccattgggaaaaaatattcaaagaaagaaagaatgtgaacagaacttacaaccatgatgattcaatgttttaccacaatgctttctaaaaataagagtgtaaaaggatattcaaagtcaatttcctcagcgaggctttgcagaaaatgaggaaactaaagaaacaaaaatggcagga

SEQ ID NO: 896297 - DNA, 542 bp, Homo sapiens
atgctaactattgccttctggatagaatcacaactctttaccacaatcaacacagcttcaaccctgcttctatatccagcctcatctattatttccgctcctcctccttattttccttcyggccatgctgatggattgtcagcttcccagatgtgcaagaatctctcctcccttcccgacattctcatgctctccctctgcctctcaagaacttcctgtcccatctctcatgacgaatctcttcttcattctttaagatgcagctcctttgctccttccttaaagatgtctgtctggctctattttgggtgacatgctccttctgcatctcccagagccagcctgtgtgtgtcagctacagcatttatttgcatctctgtgtcatatatcaccaaatctgcctaagcttgcgtgagtcactgcatgacaacttcagcctccaccagcattgtccccacttaccatgaggcttagatatttgtccagtatgctcggggttgtggagtggtagcagtaaccaactggtgagcatcatttcttac

SEQ ID NO: 896298 - DNA, 539 bp, Homo sapiens
gctaactattgccttctggatagaatcacaactctttaccacaatcaacacagcttcaaccctgcttctatatccagcctcatctattatttccgctcctcctccttattttccttccggccatgctgatggattgtcagcttccyagatgtgcaagaatctctcctcccttcccgacattctcatgctctccctctgcctctcaagaacttcctgtcccatctctcatgacgaatctcttcttcattctttaagatgcagctcctttgctccttccttaaagatgtctgtctggctctattttgggtgacatgctccttctgcatctcccagagccagcctgtgtgtgtcagctacagcatttatttgcatctctgtgtcatatatcaccaaatctgcctaagcttgcgtgagtcactgcatgacaacttcagcctccaccagcattgtccccacttaccatgaggcttagatatttgtccagtatgctcggggttgtggagtggtagcagtaaccaactggtgagcatcatttctta

SEQ ID NO: 896299 - DNA, 542 bp, Homo sapiens
atgctaactattgccttctggatagaatcacaactctttaccacaatcaacacagcttcaaccctgcttctatatccagcctcatctattatttccgctcctcctccttattttccttccggccatgctgatggattgtcagcttcccrgatgtgcaagaatctctcctcccttcccgacattctcatgctctccctctgcctctcaagaacttcctgtcccatctctcatgacgaatctcttcttcattctttaagatgcagctcctttgctccttccttaaagatgtctgtctggctctattttgggtgacatgctccttctgcatctcccagagccagcctgtgtgtgtcagctacagcatttatttgcatctctgtgtcatatatcaccaaatctgcctaagcttgcgtgagtcactgcatgacaacttcagcctccaccagcattgtccccacttaccatgaggcttagatatttgtccagtatgctcggggttgtggagtggtagcagtaaccaactggtgagcatcatttcttac

SEQ ID NO: 896300 - DNA, 542 bp, Homo sapiens
atgctaactattgccttctggatagaatcacaactctttaccacaatcaacacagcttcaaccctgcttctatatccagcctcatctattatttccgctcctcctccttattttccttccggccatgctgatggattgtcagcttcccagatgtgcaagaatctctcctccyttcccgacattctcatgctctccctctgcctctcaagaacttcctgtcccatctctcatgacgaatctcttcttcattctttaagatgcagctcctttgctccttccttaaagatgtctgtctggctctattttgggtgacatgctccttctgcatctcccagagccagcctgtgtgtgtcagctacagcatttatttgcatctctgtgtcatatatcaccaaatctgcctaagcttgcgtgagtcactgcatgacaacttcagcctccaccagcattgtccccacttaccatgaggcttagatatttgtccagtatgctcggggttgtggagtggtagcagtaaccaactggtgagcatcatttcttac

SEQ ID NO: 896301 - DNA, 535 bp, Homo sapiens
ttagaatgctaactattgccttctggatagaatcacaactctttaccacaatcaacacagcttcaaccctgcttctatatccagcctcatctattatttccgctcctcctccttattttccttccggccatgctgatggattgtcagcttcccagatgtgcaagaatctctcctcccttcccgacattctcatgytctccctctgcctctcaagaacttcctgtcccatctctcatgacgaatctcttcttcattctttaagatgcagctcctttgctccttccttaaagatgtctgtctggctctattttgggtgacatgctccttctgcatctcccagagccagcctgtgtgtgtcagctacagcatttatttgcatctctgtgtcatatatcaccaaatctgcctaagcttgcgtgagtcactgcatgacaacttcagcctccaccagcattgtccccacttaccatgaggcttagatatttgtccagtatgctcggggttgtggagtggtagcagtaaccaactggtgagc

SEQ ID NO: 896302 - DNA, 617 bp, Homo sapiens
cctcctgcaccacttaaagtcggagcgccagttaagcaccatcagttctggaaattgaaactgaaatggagctattactgaggagagttgatgtcccagttcttgtctaacttggaagaaagatttttcaccaagaggcagyaaaaacatggcagataacttcattgaaaacaaatacagtgtaaagagcttattgtagaataatagggaggagtgggctgattgtgcaggaaaacagcctgagagtcctgtgcagggaattttattttggacttcttcacatttctgcctctgtctcaagtctccacctgttttctttgtctggttttcctgctactgccttaggtccctgagttgccccacttaggcttatgggacctcctcactgttggttgaggcacatgtgtgctgatcaatccgaatccactctggtaccaggctccttccccccatcccaggcaggctgacagcggtcatgtttctgcctacagcgcctgcctatctcttttgaatgtccttctctacactactctgtacttatggtgccaggtttctcttaagaatgtcccctttgtccttcttatcagcatgtagccagcaatattgtgacattttta

SEQ ID NO: 896303 - DNA, 666 bp, Homo sapiens
ctgatcgattttataaatcagttattggaaaatgattcagacaactcagcccaattccctattatttggtctaggccatcagccctcaggcttcttgccactgcagctgtgggctcccactctccacctgctctcctgctcaggttggggcagccaaagaccttctcttcctggggagagaggttagggagggaccatttttggattatttggagggtgcggtyaagttgtaaacagtgtaagttttagaatttgtgttattgtgatggcaatgaccaactgcaaaatatatcccatttgccttgtaataacaagagcatgtactttacgcaattaaagtttttggaccctacttatttactttactttattaagaatagtaacatttgagcagagaagagttctaattttgcatcagagtcaaaagtgaaaatgaaaggaactgacccatgaaggaacaggtgtgagctatttacttcattcctgcccatcctggttgatgttgagctcttgccctgcatcccactttcaaatgtggtggatgcctcacctaggaaaggccctcaccacgctggcttgctctgctcactaactgtacttacttctcttaatcccctatgaacactcttttctaggttgggtgtcttttccgtaataaaaaggtat

SEQ ID NO: 896304 - DNA, 666 bp, Homo sapiens
ctgatcgattttataaatcagttattggaaaatgattcagacaactcagcccaattccctattatttggtctaggccatcagccctcaggcttcttgccactgcagctgtgggctcccactctccacctgctctcctgctcaggttggggcagccaaagaccttctcttcctggggagagaggttagggagggaccatttttggattatttggagggtgcggtcmagttgtaaacagtgtaagttttagaatttgtgttattgtgatggcaatgaccaactgcaaaatatatcccatttgccttgtaataacaagagcatgtactttacgcaattaaagtttttggaccctacttatttactttactttattaagaatagtaacatttgagcagagaagagttctaattttgcatcagagtcaaaagtgaaaatgaaaggaactgacccatgaaggaacaggtgtgagctatttacttcattcctgcccatcctggttgatgttgagctcttgccctgcatcccactttcaaatgtggtggatgcctcacctaggaaaggccctcaccacgctggcttgctctgctcactaactgtacttacttctcttaatcccctatgaacactcttttctaggttgggtgtcttttccgtaataaaaaggtat

SEQ ID NO: 896305 - DNA, 633 bp, Homo sapiens
ggcttcttgccactgcagctgtgggctcccactctccacctgctctcctgctcaggttggggcagccaaagaccttctcttcctggggagagaggttagggagggaccatttttggattatttggagggtgcggtcaagttgtaaacagtgtaagttttagaatttgtgttattgtgatggcaatgaccaactgcaaaatatwtcccatttgccttgtaataacaagagcatgtactttacgcaattaaagtttttggaccctacttatttactttactttattaagaatagtaacatttgagcagagaagagttctaattttgcatcagagtcaaaagtgaaaatgaaaggaactgacccatgaaggaacaggtgtgagctatttacttcattcctgcccatcctggttgatgttgagctcttgccctgcatcccactttcaaatgtggtggatgcctcacctaggaaaggccctcaccacgctggcttgctctgctcactaactgtacttacttctcttaatcccctatgaacactcttttctaggttgggtgtcttttccgtaataaaaaggtattgttgcaccacttattcagggctttttggatgccatgctaagcatttcatagtca

SEQ ID NO: 896306 - DNA, 633 bp, Homo sapiens
ggcttcttgccactgcagctgtgggctcccactctccacctgctctcctgctcaggttggggcagccaaagaccttctcttcctggggagagaggttagggagggaccatttttggattatttggagggtgcggtcaagttgtaaacagtgtaagttttagaatttgtgttattgtgatggcaatgaccaactgcaaaatatatcccatttgccttgtaataacaagagcatgtactttacgcaattraagtttttggaccctacttatttactttactttattaagaatagtaacatttgagcagagaagagttctaattttgcatcagagtcaaaagtgaaaatgaaaggaactgacccatgaaggaacaggtgtgagctatttacttcattcctgcccatcctggttgatgttgagctcttgccctgcatcccactttcaaatgtggtggatgcctcacctaggaaaggccctcaccacgctggcttgctctgctcactaactgtacttacttctcttaatcccctatgaacactcttttctaggttgggtgtcttttccgtaataaaaaggtattgttgcaccacttattcagggctttttggatgccatgctaagcatttcatagtca

SEQ ID NO: 896307 - DNA, 617 bp, Homo sapiens
cctcctgcaccacttaaagtcggagcgccagttaagcaccatcagttctggaaattgaaactgaaatggagctattactgaggagagttgatgtcccagttcttgtctaacttggaagaaagatttttcaccaagaggcagtaaaaacatggcagataacttcattgaaaacaaatacagtgtaaagagcttattgtagaataatagggaggagtgggctgattgtgcaggaaaacagcctgagagtcctgtgcagggaattttattttggacttcttcacatttctgcctctgtctcaagtctccacctgttttctttgtctggttttcctgctactgccttaggtccctgagttgccccacttaggcttatgggacctcctcactgttggttgaggcacatgtgtgstgatcaatccgaatccactctggtaccaggctccttccccccatcccaggcaggctgacagcggtcatgtttctgcctacagcgcctgcctatctcttttgaatgtccttctctacactactctgtacttatggtgccaggtttctcttaagaatgtcccctttgtccttcttatcagcatgtagccagcaatattgtgacattttta

SEQ ID NO: 896308 - DNA, 617 bp, Homo sapiens
cctcctgcaccacttaaagtcggagcgccagttaagcaccatcagttctggaaattgaaactgaaatggagctattactgaggagagttgatgtcccagttcttgtctaacttggaagaaagatttttcaccaagaggcagtaaaaacatggcagataacttcattgaaaacaaatacagtgtaaagagcttattgtagaataatagggaggagtgggctgattgtgcaggaaaacagcctgagagtcctgtgcagggaattttattttggacttcttcacatttctgcctctgtctcaagtctccacctgttttctttgtctggttttcctgctactgccttaggtccctgagttgccccacttaggcttatgggacctcctcactgttggttgaggcacatgtgtgctgatcaatccgaatccactctggtaccaggctccttccccccatcccaggcaggctgacagcggtcatgtttctgcctacagcgcctgcctatctcttttgaatgtccttctctacmctactctgtacttatggtgccaggtttctcttaagaatgtcccctttgtccttcttatcagcatgtagccagcaatattgtgacattttta

SEQ ID NO: 896309 - DNA, 617 bp, Homo sapiens
cattcagctttgttctgttgctggtgaggagctgtgttcctttggaggagaagagatgctctgatttttagaattttcagcttttctgctctggtttctccccatctttgtggtttttacctacctttggtctttgatgatggtgatgtacagatggggttttggtgtggatgtgaaggggtccagcccctccacacctgtgggtgtttctcatcaggtgggatgagagactgagaaaataaataagagacacagacaaagtatagagaaagaacagtgggcccaggggaccagcactcagcatacagaggacccgcgctggccctggtctctgagttccctcagtatttattgatcactatctctaccatctcggagaggaggatgtggccggasaatagggtaatagtggggagagggtcagcaggaaaacatgtgaacaaagatctctgtgtcataaataagtttaaggaaaggtgctgtgctttgatgtgcacgtacacaaacatctcagttcattaaagagcagtattgccgccagcatgtctcacctccagccctaaggtggttttctcctatctcagtaaacagaacatacaatcaggttttacaccaag

SEQ ID NO: 896310 - DNA, 617 bp, Homo sapiens
cattcagctttgttctgttgctggtgaggagctgtgttcctttggaggagaagagatgctctgatttttagaattttcagcttttctgctctggtttctccccatctttgtggtttttacctacctttggtctttgatgatggtgatgtacagatggggttttggtgtggatgtgaaggggtccagcccctccacacctgtgggtgtttctcatcaggtgggatgagagactgagaaaataaataagagacacagacaaagtatagagaaagaacagtgggcccaggggaccagcactcagcatacagaggacccgcgctggccctggtctctgagttccctcagtatttattgatcactatctctaccatctcggagaggaggatgtggccggagaatagggtaatagtggggagagggtcagcaggaaaacatgtgaacaaagatckctgtgtcataaataagtttaaggaaaggtgctgtgctttgatgtgcacgtacacaaacatctcagttcattaaagagcagtattgccgccagcatgtctcacctccagccctaaggtggttttctcctatctcagtaaacagaacatacaatcaggttttacaccaag

SEQ ID NO: 896311 - DNA, 662 bp, Homo sapiens
ttgtgcaggaaaacagcctgagagtcctgtgcagggaattttattttggacttcttcacatttctgcctctgtctcaagtctccacctgttttctttgtctggttttcctgctactgccttaggtccctgagttgccccacttaggcttatgggacctcctcactgttggttgaggcacatgtgtgctgatcaatccgaatccactctggtaccaggctccttccccccatcccaggcaggctgacagcggtcatgtttctgcctacagcgcctgcctatctcttttgaatgtccttctctacactactctgtacttatggtgccaggtttctcttaagaatgtcccctttgtccttcttatcagcatgtagccagcaatattgtgacatttttactgcagagtgaatgatgactggggcatcttaaatggagttctggggtgtttctttctgcataggtmcctctgcagtagtagtttccaaaatacttttggtaatttttaaccttaaagttaaccttaaagttaagctaagtaaaagatttgcattaaatatctagaccatttataaataagatacaatactaaaacattactgaagataaataattctagtttacatacttttggctacttatttttacagagaaactaaagatattt

SEQ ID NO: 896312 - DNA, 640 bp, Homo sapiens
aaaacttaaactataataataataaaataaaataaatttaccaaaataataataccaataccaatgtgctctagttttgtcagatcatgaatgcatcatgcatcccaataaaagattattgaacataaaaaaatctgtttaccttataacaggacataattggaaatttttgttatattatcaaggtttttactggaatatcatatttaggaaatgtacctaagatcacttatgaccagcaattttaaggaagtaaggttgacttttatgcagacagtgcttacaaagcactctgagaaacgagaaaattcttcttcaaaaattataaaaagtcacaatttcttactatgagattgctatccactatttatatgtgtgtgtgtgtgtgtgtgtgtgtcttccaagtcagttgtcctagcttgctccagcrtgcctggacagaactagacaagccccagcccatagtgcatgccattccttatttggagatgcttccttaactatccctgggcaacttcctgttctttctttgttctattccccttacctaattaataaagttttaaactaatagccaactgggtaaagtgtaaaatgtgaggtcttattccagccaatggaaactggacacagcagtagg

SEQ ID NO: 896313 - DNA, 645 bp, Homo sapiens
aggtcatttcctggtaggcccaggaatttagggatattttgggggcctcaagaagagaggaattcacacaaagctataaggactgcagctgaaatttgatagtatgttcttagcttggcttttagctgaataaggcctttaaaagtcaaatctgagattctatatgaaaacttccagcaaagaaacttgaaagcacctatgtggtcatcgcctgttcttgctgcarttacataaataatcaagcaaaatctaataaaacaagacttatttttaaaacaagaatagtcttactttgattatgataaaaaatgatggttactaccaagagaaattttatatttcaaaggaaaactataacatggccggcatggtgcacatgcctataattccagcactttgggaggccaggagttcaagaccagcctgggcaacatggtaaaaccctgtttctaccaaaaatacaaaaattagttgggtatcatggcatgtgcctgtagtcccagctaatcaggaagctgaggagggaagatcgtttgcacccaggaggtagaggttgcagtgagctgagattgcacctttgcactccagcctgggtgacagagccagaccctgtctcaaaaaaaatgtttttaaaggaaaactaca

SEQ ID NO: 896314 - DNA, 645 bp, Homo sapiens
aggtcatttcctggtaggcccaggaatttagggatattttgggggcctcaagaagagaggaattcacacaaagctataaggactgcagctgaaatttgatagtatgttcttagcttggcttttagctgaataaggcctttaaaagtcaaatctgagattctatatgaaaacttccagcaaagaaacttgaaagcacctatgtggtcatcgcctgttcttgctgcagttacataaataatcaagcaaaatctaataaaacaagacttatttttaaaacaagaatagtcttactttgattatgataaaaaatgatggttactaccaagagaaattttatatttcaaaggaaaactataacatggccggcatggtgcacatgcctataattccagcactttgggaggccaggagttcaagaccagcctgggcaacatggtaaaaccctgtttctaccaaaaatacaaaaattagttgggtatsatggcatgtgcctgtagtcccagctaatcaggaagctgaggagggaagatcgtttgcacccaggaggtagaggttgcagtgagctgagattgcacctttgcactccagcctgggtgacagagccagaccctgtctcaaaaaaaatgtttttaaaggaaaactaca

SEQ ID NO: 896315 - DNA, 596 bp, Homo sapiens
aaactctattcaaattaaataaaattactcaggatgtggagtatctcaggacagaatacatcatgtgaaaaagaatttaactatgctacaaattactatcttttggatgtggcttgtccccgcaaaaactcatattgaaatttgacccccactgtgtcagtgtggggcgatggggcctagtggaagatgtttgggtcatggtgatggatctctcatgaatagattaatgtactccgatgggggtgaatgagttctgctctcacaggaatggattaattcctgcaggagtaggtagttaaaaagagtctggcttccttggcttccctcttgctttcacttttgctatgtgatctctggtgcaccccttgctccccttccactttccaccatgaggtgaaaaagactgaagccccccagatgcaagtgcccaatctcagacattccagccacaaatattgtgagccaaatgaaccttttttacttataarttacccagcctcaggtattctgttacagaagcacgaaatggactaagacacaaatgtaggtaaaaactcactgaaggtgtagggaaaatgatgttgacctaagtcact

SEQ ID NO: 896316 - DNA, 640 bp, Homo sapiens
atgggggtgaatgagttctgctctcacaggaatggattaattcctgcaggagtaggtagttaaaaagagtctggcttccttggcttccctcttgctttcacttttgctatgtgatctctggtgcaccccttgctccccttccactttccaccatgaggtgaaaaagactgaagccccccagatgcaagtgcccaatctcagacattccagccacaaatattgtgagccaaatgaaccttttttacttataagttacccagcctcaggtattctgttacagaagcacgaaatggactaagacacaaatgtaggtaaaaactcactgaaggtgtagggaaaatgatgttgacctaastcactttgaaaatgaatagaatctgtaggctgaaggcaaatgaactatacttcatcattggattccattttataaagttctttccaacagaagcaattgttaacagttgtaaaaccacagtatctgtatctggaataaaacaatgacttacataagttgcagatggtaggaaccagatctctcactggtgaagtgggaggttacaaattagcaaggtgagaaggctagaatgattcatgtgatagtagatcagaggtggagacatcaacgttataggaaaagaaa

SEQ ID NO: 896317 - DNA, 630 bp, Homo sapiens
cacagtgcaatcctgcataactacagaacaaactatgtgtgtgagctctgatggcaaggcaagctggctgggtttagatcctggctcctcgactctggggcagcatggtcttgacctgcctgtgctttagtttcctcctctgtaaaataagcataataacagtgtcttctgggtttggagctgtctccaggtttagcctccctgtgttttttctgtccccttcacactctggccaccagccagtcctgcttataataatctcctcccattccataccaaggctctggtaaattaatgtctgtgcagggtgtgaatgactgacagcaactaactcaatttcctagcagcctaatccagaaggatgccttcctaaaaataatattctaattttggataaattttaatttattaaaattataattttaattgttattaattcctggggacaggctggtgaaaaaatttcctggggacagtctgatgtcaaaaatccayttcctttacaggattacaagaaaataagaactatcaatatctctaaaagaccatgttcacttgcagtgtttatgaggttaaatggttgatgcaggataaaaggctttcatttggctccttgactttctgggtttt

SEQ ID NO: 896318 - DNA, 563 bp, Homo sapiens
aaatgtggcctcatgggataagaaagacttgaccatcccccagcctgacacccataaagagtctgtgctgaggtggattagtaaaagaggagatcctcttgcagttgagatagaggaaggccaccatttcctgcctgcccctgggaacttgatgtctcggtataaaacccgattgtacacctgttcaattctgagataggaggaaaaccaccctatggtgggaggtgagacatgttggcagcaatgctgtctagttattctttactccactgaaatgtttgggtggacagtaacataaatctggcctatrtgcacatccaggcatagtacctacccttgaacttaattatgacatagattcttttgctcacatgtttttttgctgacctcctccttattatcaccctgctctcctactgcattcctcttgctgagataatgaaaataataataaaaactgagggaactcagagaccggtgctggtgcatgtccttggtatgctgagagccagtcccctgggcccacttttctttctctatagtttgtctctgagtcttatttt

SEQ ID NO: 896319 - DNA, 563 bp, Homo sapiens
aaatgtggcctcatgggataagaaagacttgaccatcccccagcctgacacccataaagagtctgtgctgaggtggattagtaaaagaggagatcctcttgcagttgagatagaggaaggccaccatttcctgcctgcccctgggaacttgatgtctcggtataaaacccgattgtacacctgttcaattctgagataggaggaaaaccaccctatggtgggaggtgagacatgttggcagcaatgctgtctagttattctttactccactgaaatgtttgggtggacagtaacataaatctggcctatgtgcacatccagrcatagtacctacccttgaacttaattatgacatagattcttttgctcacatgtttttttgctgacctcctccttattatcaccctgctctcctactgcattcctcttgctgagataatgaaaataataataaaaactgagggaactcagagaccggtgctggtgcatgtccttggtatgctgagagccagtcccctgggcccacttttctttctctatagtttgtctctgagtcttatttt

SEQ ID NO: 896320 - DNA, 674 bp, Homo sapiens
catttgttcgccagatgactacacagcacgggctcatgctgcatgtccagtgttgcgcctcgaggacactgcggtgcaccagacaggcaggaaccctgctctcatggaggtgatatgctagtggtggggacaatgggtaaaagactggtgaggccatttctaatrggaatccgcactatgaagggaatcaagcaagctttgggggtggagaatgccatggacaggtatcctttagatgggaaaggcaggaaggatggcaataaggagacagccaggtaagagggctacgggcactgacttctaggcagagggaacaacatgtgcaaaggctctcaggttaaagcaagtttggcttgttcacagacaagagtgaaagctagtggggcaggaggtgtgtgacgggtgagggaggtgggcactagatcatgaagggctttgcagaccaagaaagaaggttgggtttaattttagatgagataggaagccactggagagttggactcaggagaggacgatggtccaatttctattttgccaaggtcactagggtgctgggaggagaatgcattgaagggtctgggttggccatggagaaacagggaggaggcaggtgcagtcattaaaggtgcaaaaaagtggaggaagagaagtctatgcttcaggatgttgtggag

SEQ ID NO: 896321 - DNA, 615 bp, Homo sapiens
ctgtagtatgggtgcaattaatctcttcttgtgaggaatttgtgagtgttcaatgagatcatgtgagaaatgtgccatgtattacagttggtgtttaataaatgttaccttccctcagcttctcagtggtcctctggtgattcagttagtttttgctgtttaacaaaccacatgagactcctccatggcttaaaccaagaacaacttctttcacttgggaatctgtggtctggcaagttgagctgggctcagctgggaggttcttctgctggtcctggctgggttcacacaagaggtggccatcagctgctggtcagcrtgtgtggttccacccttggggttggctggctgttggctgtggttgcagaagtgaataagccgcatgtctcccattatccagtaggctagcatgggcttgcactctttgtgatggaagggttccgggcccggcaaaagagggcaagttccttggcaaagctcctcttgagcttcttcctctgtcacattggctgaagtctcatggattgtcatagcctgaataatgcactcccatcccctactctgtagatgtccatgtcctaatccttggaacctgtaaatatgtcaccttttatg

SEQ ID NO: 896322 - DNA, 615 bp, Homo sapiens
ctgtagtatgggtgcaattaatctcttcttgtgaggaatttgtgagtgttcaatgagatcatgtgagaaatgtgccatgtattacagttggtgtttaataaatgttaccttccctcagcttctcagtggtcctctggtgattcagttagtttttgctgtttaacaaaccacatgagactcctccatggcttaaaccaagaacaacttctttcacttgggaatctgtggtctggcaagttgagctgggctcagctgggaggttcttctgctggtcctggctgggttcacacaagaggtggccatcagctgctggtcagcgtgtgtggttccacccttggrgttggctggctgttggctgtggttgcagaagtgaataagccgcatgtctcccattatccagtaggctagcatgggcttgcactctttgtgatggaagggttccgggcccggcaaaagagggcaagttccttggcaaagctcctcttgagcttcttcctctgtcacattggctgaagtctcatggattgtcatagcctgaataatgcactcccatcccctactctgtagatgtccatgtcctaatccttggaacctgtaaatatgtcaccttttatg

SEQ ID NO: 896323 - DNA, 615 bp, Homo sapiens
ctgtagtatgggtgcaattaatctcttcttgtgaggaatttgtgagtgttcaatgagatcatgtgagaaatgtgccatgtattacagttggtgtttaataaatgttaccttccctcagcttctcagtggtcctctggtgattcagttagtttttgctgtttaacaaaccacatgagactcctccatggcttaaaccaagaacaacttctttcacttgggaatctgtggtctggcaagttgagctgggctcagctgggaggttcttctgctggtcctggctgggttcacacaagaggtggccatcagctgctggtcagcgtgtgtggttccacccttggggttggctggctgttggctgtggttgcagaagtgaataagccgcatgtctcccattatccagtaggctagcatgggcttgcactctttgtgatggaagggttccrggcccggcaaaagagggcaagttccttggcaaagctcctcttgagcttcttcctctgtcacattggctgaagtctcatggattgtcatagcctgaataatgcactcccatcccctactctgtagatgtccatgtcctaatccttggaacctgtaaatatgtcaccttttatg

SEQ ID NO: 896324 - DNA, 618 bp, Homo sapiens
gggaggatcacttgaggccgggagttcaagactagcctagacaacatatcaagaccccatctccacaaaaagtttttttaaaataagctgggcatggccaggcgtggtggctcatgcctgtaatgccagcatttgggaggctgaggtgggtggatcacaaggtcaggargagttcaagaccagcctggccaacatggtgaaactccatctctactaaaaaaatacaaaaattagccaggtatggtggcatgcacctgtaatcccagctactcgggaggctgaggcaggagaattgcttgaacccaggaggtggaggttgcagtgagccgagatcgtgccactgcactccagcctggacaacagagtgagactctgtctctaaataaataaataaaagctgggcatggtggacgacagagcgagactctgtaaatagataaataaataaataaaaataagctgagcatggtggtccatgcctgtagtcctagctactcaggaggctgaagcaggaggaccacttgagcccaggagtttcaggttgcagtgagctatgattgtaccactgcactccagcctaggcaacagagtgagaccctgtctcaaaagcaagtgctt

SEQ ID NO: 896325 - DNA, 645 bp, Homo sapiens
ctgaggacacatgttgaatccatttctcattattgaaaaggtttcccagatgatggtgccaggtctgtgtctcagcgtgggaggggagtatagtatagaatttgaacctaactgcccagggatctgaggaacctctcagggcgtagtcgcatccaaagctggtattgctcaccgcgcaacagccagttagtcaagagacaaggtgttggggcaaggaaagagastttatttttttaggagactctatttacttattattttggaaagccagcaagccgagaagatggactaatgtcctaaagaaccatcttaaaaggcatacatctcaagcttctttttatgttggggaagggggaacaaggggacgttaaagtcaggaggtgactcgtgaccacagacacacgagcatcagctggagtccaaggaggttgcaaaagttatttgtctttggtcaggtcacagtgctcctgtaaatcttggcataacattgttgcttgtgcatacaccctccttatctcctttaagcttagttttcaaaagggactattttcatccttgctttgaactataaactaaattcctgccatagttagcttggcctacatgcagggatgagcaaaggcagtcagcttgtgaggttagaaa

SEQ ID NO: 896326 - DNA, 510 bp, Homo sapiens
ccttcggtttgaggaaatcctttactattgacctggtcaaccttctctgttacccggaagctgtcttcccttctcccccttttgacctttttaaacttttctcttggtttccccgctgacagaaagataacaaccctctcaatatcgtgccctcttagagactcatgtctctcggcttccttgcacagccaagacctgaaattgaaattatccttactatctcaattcttkgtcacattctctttccccatccccactcttcaagctacctctgtcaggctgctaccaccaaaacttttctggcagatgtcaccaagaacctcctaactggcaaagtcaggaagcactttacagttctcactttatttgacctctgaggcattcgacatttgatcatgtttccttcctgacattctctctacccttgacttctataccactctcacttgtttcttttcctatttgtgtaactgttcctctccagtctcagtagatttttcttccttagcc

SEQ ID NO: 896327 - DNA, 491 bp, Homo sapiens
tggtaattgctgcctgggatggaactcacccttccaggcattgggctctcctctggcccagggcaggtccagaaataatgtccaagattcaagtcctggaatccgggatcaaaagtgcctgcttgatgcttaccactctttggtcaagctggtacctaaggtgcaagacaaagtcccctttacttttctatctgcttttcttaaccagaaggactctcatccartagacaacacagctgggaaggtgctgagtctcaaattaagccaagaagtcagagtctcatccaaatttctggatatacttcctggggataactgctggttattcaggatgcaatggctctatggtttgtaggtgatgaatgctgtcaggacagggttcttctcctcaaggcagcaggttcccttttggcctatggtgtgtttagaaatttcattcaggagctagggcctggaaaaggggcctcatgaagctgacaggtgccctatct

SEQ ID NO: 896328 - DNA, 491 bp, Homo sapiens
tggtaattgctgcctgggatggaactcacccttccaggcattgggctctcctctggcccagggcaggtccagaaataatgtccaagattcaagtcctggaatccgggatcaaaagtgcctgcttgatgcttaccactctttggtcaagctggtacctaaggtgcaagacaaagtcccctttacttttctatctgcttttcttaaccagaaggactctcatccaatagacaacacagctgggaaggtgctgagtctcaaattaagccaagaagtcagagtctcatccaaatttctggatatacttcctggggatarctgctggttattcaggatgcaatggctctatggtttgtaggtgatgaatgctgtcaggacagggttcttctcctcaaggcagcaggttcccttttggcctatggtgtgtttagaaatttcattcaggagctagggcctggaaaaggggcctcatgaagctgacaggtgccctatct

SEQ ID NO: 896329 - DNA, 491 bp, Homo sapiens
tggtaattgctgcctgggatggaactcacccttccaggcattgggctctcctctggcccagggcaggtccagaaataatgtccaagattcaagtcctggaatccgggatcaaaagtgcctgcttgatgcttaccactctttggtcaagctggtacctaaggtgcaagacaaagtcccctttacttttctatctgcttttcttaaccagaaggactctcatccaatagacaacacagctgggaaggtgctgagtctcaaattaagccaagaagtcagagtctcatccaaatttctggatatacttcctggggataactgctggttattcargatgcaatggctctatggtttgtaggtgatgaatgctgtcaggacagggttcttctcctcaaggcagcaggttcccttttggcctatggtgtgtttagaaatttcattcaggagctagggcctggaaaaggggcctcatgaagctgacaggtgccctatct

SEQ ID NO: 896330 - DNA, 614 bp, Homo sapiens
aacttcaaaaaagcaggagtattatatttatattagacaaaatagataacaaaacgaaaagtataagaagagataaagaaagtcactttattatgataaaggggtaaattcatcaacaggatatatcacatttaaatacgtatgcacccaacactggaacacccagatatataaaacaattattattagagctaaagagagagatagrccccaatataacaatagctgagatttcaacatcccatatttagcgttggacagatcttcccagtcagaaaatcaacaaagaaacatcagaatcaatctgtactatacggcaaacggatttaatagatatttacaaaatatttcatccaacagctgcaggatacacatttttttcctcagcaaattgatcattcccaaggatagagcatatgtgaggtcataaaacaagtcttaaatcattcaaaaattatataatatcaagcatcttctctgatcacaatggaataaaactacaaatcaataacaggaggaatatttgaaactatatagatacatgaaattttaaaaatacatttctgaatgacaagtgggtcaataaagaaattgaaaaatttcttaaaactaat

SEQ ID NO: 896331 - DNA, 595 bp, Homo sapiens
ttgtagtagtttcatagtctgaggtcttagatttaagtgtttagtctgtttttattagatttttatatatggcgagagagtggttgagtttgattcttctgtgtatagatatcttgttttcccagccccatttactgaagacactgtattttccttagtataggtttttggcacctttgttgaaaatgagttcactgtaggtgtgtggatttctttctgggttctgtattctgttccattggtctatatttctgtttttatgccactaccrtgctgttttggttactattttttttttcatataatttgaagtcagataatgtgattcctccaatgttcttcttttttgcttaggatagcattggatagtctgggtcttttgtggttccatggttcaaatttggtatgccatatgtgtctaagaatgtattcatgttctctagattttccaacttattggcatatagcagctcatattatccactaatggtccattaaatttcagctgtatcagttgtaatgtctcttttttcatctctgattttattaatttgtgtcttctctctgtgtcttccttaatctggctaaagtgttg

SEQ ID NO: 896332 - DNA, 685 bp, Homo sapiens
attctacaattgccatttggttcttctatatatgttctatttgtttgctgagtcattctacttctttgatgaggctttctagctttcatttgtgttaaatgtatttgtaattgctcaattttagtataatgctttaaaatctttctcagataattctaacctctctgtcatcttggcattgacatctactgtcttttttcattcagtttgagatcttcctggttcttagtgtaattagtgatttttttttctattgacttctcgacatttttattattatgttatgagactctgggtattatttacaccttcaatttttggctttttatttcctccgacattattgtggtagaagaagagagaatgccgtctcattactgccagatggagtagaagtcagggttctgcacttgacttccattracacctgagtatttggggagtttcactcattcctgctgggtaagagtgaactttcagctccccatgtggtctttattgaccatgatgggtgttacctcattaactctaggtgatagtaaactcctgactctccactaggccttctctgacaaaaccccagtagagaggggatgcagcacctaattaatggtgggtggggagtaagcccagactcctcttgtaatatccactgacattatggaggtggagtttgttaccaggg

SEQ ID NO: 896333 - DNA, 614 bp, Homo sapiens
catgaaatacttgccaaggcctaggtctagaattttttttttatagttttaggttttattttattttacatttatttatttatttttttattgagacagactttcactcttgtcgcccaagctggagtgcaatgccatgattacagctcactgcaacctccagttcctgggttcaagtgattcttctactgcagcctcccaagtagctgggattacaggcacccaccaccacggccagctaatttttgtattcttttagtagagacagggttttaccatgttgascaggctggtctcaaactcctgacctcaggtgagccacctgcctcagcctcccaatgtgctgggattacaagcatgagttaccgcgcctgggccagttttaggttttaaatttaaatctttactccatcttgagttgattgttgtagatggtgtaaagaaggtatctagtttcattcttctgcatatgactaacctgtcaccccactaccatttattgaatagagagacttttttccattgcttgtttttgccaactttgtcaaagatcaggtggttgtctgtgtacggctttatttctgggagctccattggtcaatgtgtatcttttt

SEQ ID NO: 896334 - DNA, 611 bp, Homo sapiens
tatctctatatcttgttctaactcctccttaagatcattaactcttaggtttgccattttgaggctattttccagaacttgtagacatgctacatttttaaaattttttgtctcttttgactgtgtattttaaaatagactgtcttcaaacttagtaattttttcttctgcgagatcaattctttattaaaaatttttaatttaattcataaaactctttaaaatttttgtgggtacatagtaggtgtatatatttaagagacatgcattcttaagcatgtcagttgctttttgacaaatgcatgtcagtgcattttacaagtctagaattttggcttgratcttgttagttattttaatttatttgttaaatttatctaatagaagtctgaactccttttctatgttattttcaatttatttgacttgcctcaaaacagttatttatatttttctgtctaaatggtcacacatctctgtttcttcaggattgtcccctggtgccttatttagctcatttgaaaaaatcatgttttctagatgctcttgatgttaatgaatgtttgtcactgcctggacattgaaaagttatgtatttattttagtctttg

SEQ ID NO: 896335 - DNA, 602 bp, Homo sapiens
acaatcacaaggtgaagtcccacaataggtcatctgccagctgaagagcaagagagacagtctgagtcccaaaacctcaaaagtagggaagccaacaatgcagccttcagtctgtggactaaggcctgagagcccctgtcaaaccactggtgtaggtccaagagtccaaaagctgaagaacttggattctgatgtttgaggcaggaagcatccagcacgggagaaagatggaggccagaagattcagcaagtctgctctttccattcctgcttttatgctggcagcttattagatggtgcccacccagattgagagtgggtctgtctctctcagtccactaactcaaatgttaatctttttttggcaacactctcacagwcacacccagaagcaatactttgcatccttcaatccaatcaagttaacactcaatattaaccatcacacatagctatcaccgtagtgcttaaaatttctatatttacatatgaattattgatgataaaacttttgaagctatcatcagataacaaatgtttagttgaaatatttttgtcctgtaaaaccttactactcaaactgctcccaaattagcaggcat

SEQ ID NO: 896336 - DNA, 606 bp, Homo sapiens
ctagctttttgatgtgggtatttagtgccacatatttctatttcaattccattttagctgccccccaaaaattctgaaaacattatctcttggttttcattagtttcaaaaacacttattgatttctgccttaatttcattatttacctaggagtcattcaggagtaggttgttcaatttccwtgtagttgtgtgactttgagtgaatttcttaatcttgagttctaatttgattgcgttgtggtctgagagactgttcttttgcacttgcttaggagtgtttttacttctaactatctgatcaattttagagtaagtgccatgtggcactgagatgaatgtatatgcccttttttggagtagaaagtactataggtatctatcacgttcacttgatccagagctgagttcagttcctaaatatctttgttaattttctgtctcgatgaccagtctaatattgtctgtgggctgtaaaagtctcccactattattgtgtgtgagtctagtctaagtctctttgtagttctctaaaaacttcctttatgaatccaggttctcctgtattgggtgcatatatatttaagatagttagcacttcttgtt

SEQ ID NO: 896337 - DNA, 684 bp, Homo sapiens
aaccatcattctatcctctgtctctcaatttgactatactaggtagctcatatcagtggaatcatgcggtatttgtccattggtgactgggttatttcacttggcatggtatcctcgaagttcattcatgttgcatcatgtgtcaaaatttcgttttggctgaataatatttcattgtggatgtataccacattttgtttatccacttatccatcaatggacacgagttgatttcaccttttggctattgtgaaaaatgctgctatgaacaaggatatacaaatgtacgttcaagtttctactttcaattttttggttatatacccagaaagagatttgctgggtcatatgatgattctatttttaatactttgaagaactcctatrctatttgccacagtggctgcaccattttactttcccaaaaaatagtgcataagggtgtcaattactctacacacttgctaacaactgttattttctgctgttttttagacatagtagccaccctaatgtgtgtgaggtggttctcattgtggtttggatttgcaattcccgaacgattggtgatgatcagcttcttttcctgtatttataagtcgttttgtatatcttctttcgagaaatgtttacccatttcctgtgcctattttttttttaaatcaggttgtttgtttttgaaat

SEQ ID NO: 896338 - DNA, 692 bp, Homo sapiens
ttagctattgttctagaaataatcttaacgtttctgaatattaagcttattcttgagacaccctagcttattttatttgtaatgtatttctaggaattagaaataatgttattcattcaatgctctaagattatgctaatttttaaaagaggaagaatcttcacaataaaatatcttaattagaagcagcataattcttattctttattctacaaattacagatattttgtttatgtggtttagtcttgatatctgaaggagaaaaaaaataaagtaaatcaaaaggaaagtacacagaacacaagacagggagatatctgagatattaacatatgcaggaaattgtcrgcagggtgcggtggctcactccttaatcccagcattttaagaggtcaaggcgggtggattgcctgagctcaggagtttgagaccagcctgggcaacacggtgaaaccccatctatagtaaaatacaaaaaattagccaggcatggtggtgtgtgcctgtagtcccagctacttgggaggctgaggcaggagaattacttgaacccagaaggtggaggttgcagtgacccaagatcacaccactgcactccagcctgggtgacagagtgacactccatctcccctcaaaaaggaaagaaaattgtcaagggcacacagtaaatgagcaatttgtaaactctcaa

SEQ ID NO: 896339 - DNA, 603 bp, Homo sapiens
agttcaaatttccacaggacccaaaatctcaaaaggcatgcaggtttatttgtctatagtaccagatatatagtgtttgggcagggcagggtaggagcctaaatgctgtgcagtcaaatataaaacatggagtcagactcttcctaaccatcagacaaaacaggtcttcaataaatgttagtgctgtcctcattctccccataaaagtcatraaagtcttctttttcgtaatgactactcttagctaaaattattagagggaaaaaatatgatcaggatgatgtcttaactttttaacacacaatacaaggtcatgatgattttaattctctgcatctcacctttatttctctctactgccactttcttctttacactctacattctagtcatagtcaacaatttgcaggctcctgaatgtgcaagctttccttgagcctctaaatgggttgtttcctagcatgtgaatactggcctaccttcctttgcttcatcaactcttagttatccttcaaaatttatttcaagagcaatctcacttattcttgaagaggcctcccctgaacctgttctcatttctaattctatcctctctctcacaca

SEQ ID NO: 896340 - DNA, 606 bp, Homo sapiens
tggctctataagccaggtcaagctcattcattctgaggctacattaatagaggcagtggtcaggaggtgggaggtgaaagacaatttagaaacagtactggtcatatcacctctggggcactgctggactccatgctcccagaaggttgtgaacaaactcagggtatggggctggagctccctgaacagcatcactgggttggmgacgtccctgaggagtggttgtaaggcgtgagctgctcaccatggagaagagtgacctcagaagatcaacacccttcgtcccctctctccaggcaggcagagcaagcagagtctgtgggtccagggtgcagagctgggatccatggggaagacgcaggcagttggattttagcaccacgtgagcaaaaatctaagagttaaataagataaaaaccagggaagtgcttaaaaacaatgaagtcctgccagggatgcttgttaacggactctgccattgtcaagttgccagcagataactttgacgcataagccacaaataatagagaccaaagagacgttttcagagcagaatgttgtaagcaattgagatattcaaccatctgagccagaaacatttcccca

SEQ ID NO: 896341 - DNA, 511 bp, Homo sapiens
tgtaaaacactgagcagggtccctggtacgtgctagttatcacttactctttttaaattcctgtcacaatgtggagcctgcctaaagtctggggaattttaggtaagtggattcaatcccagccccagaaaagctccctcctccaatctgggaaacaggtgctaataactggtttgactagtgtgcaaaatcagccaggggcctcagcacttgctgctctgccccagcggacaatgggcacccacgcktttgcactgcaaccctgagagtgaggggagggtgtggaggattgaaatggctcctgttgggggagggacatggggcagcactggcttctggctggggcccagggcgctacccaacttccactaacccggggttttctgagggcaggtctgggaaggtgggtgcttggtgttaccaagtggggaagggtgaccaggcatccattatttggtgatagggactgagggctgatgtgtgcatggtgacctccaggaggcactagggg

SEQ ID NO: 896342 - DNA, 640 bp, Homo sapiens
cactaatagtttgtctcttaacaatcagttctgctagagatataggcacatatacctttgttttagcttcaaaacattgaaagatggctttgccaaatgttttaaccatatgaaacttgggagtctattttccctgtctgctacrtattgtcattgacattaagccagtgacgcatgctttagacttttgttatagtaattacttttttatggtactaatttctacataagggaaagtagtgtgtgttaacaaatagactaaaaaatttaaaaaaaaaaacacctaacatattaaaagttaatttcccatgtgatgtggtttggcttcatgtccgcagccaaatctcatcctgaattgttataatccccacttgtcaaggtcagtaccaggtggaggtaattggatcatgggggcagtttcccccatgctattctcatgttaatgagtgagttctcacgggatctgatggttttataagcatctgacatttctcctgcttgcactcactctgtcctgctgccctgtgaagaaagtgcctgcttctcctttaccttccactatgattgtaagtttcctgaggcctcccaagcaatgaagaactgtgagtcaattaaatttctttcctttataaattaccca

SEQ ID NO: 896343 - DNA, 640 bp, Homo sapiens
cactaatagtttgtctcttaacaatcagttctgctagagatataggcacatatacctttgttttagcttcaaaacattgaaagatggctttgccaaatgttttaaccatatgaaacttgggagtctattttccctgtctgctacgtattgtcattgacattaagccagtgaygcatgctttagacttttgttatagtaattacttttttatggtactaatttctacataagggaaagtagtgtgtgttaacaaatagactaaaaaatttaaaaaaaaaaacacctaacatattaaaagttaatttcccatgtgatgtggtttggcttcatgtccgcagccaaatctcatcctgaattgttataatccccacttgtcaaggtcagtaccaggtggaggtaattggatcatgggggcagtttcccccatgctattctcatgttaatgagtgagttctcacgggatctgatggttttataagcatctgacatttctcctgcttgcactcactctgtcctgctgccctgtgaagaaagtgcctgcttctcctttaccttccactatgattgtaagtttcctgaggcctcccaagcaatgaagaactgtgagtcaattaaatttctttcctttataaattaccca

SEQ ID NO: 896344 - DNA, 640 bp, Homo sapiens
cactaatagtttgtctcttaacaatcagttctgctagagatataggcacatatacctttgttttagcttcaaaacattgaaagatggctttgccaaatgttttaaccatatgaaacttgggagtctattttccctgtctgctacgtattgtcattgacattaagccagtgacgcatgctttagacttttgttatagtaattacttttttatggtactaatttctacataagggaaagtagtgtgtgttaacaaatagactaaaaaatttaaaaaaaaaaacacctaacatattaaaagttaatttcccatgtgatgtggtttggcttcatgtccgcagccaaatctcatcctgaattgttataatccccacttgtcaaggtcagtaccaggtggaggtaattggatcatgggggcagtttcccccatgctattctcatgttaatgagtgagttctcamgggatctgatggttttataagcatctgacatttctcctgcttgcactcactctgtcctgctgccctgtgaagaaagtgcctgcttctcctttaccttccactatgattgtaagtttcctgaggcctcccaagcaatgaagaactgtgagtcaattaaatttctttcctttataaattaccca

SEQ ID NO: 896345 - DNA, 594 bp, Homo sapiens
ggtctcaaactcttgggctgaactgatcctcctgcctcagcctctccggtagctggaactacaggcatgagccaccatgcccagctaattaaaacaaacaactttttttttttttttttttagagatgaggtcttgctgtgttgccaatctggtctcaaactcttgggctgaactgatcctcctgcctcagcctcctgagtagtacatttgattttatcatccaactttttgttagtgagagtctgtactgaggaaatcacactcaatgtcttttcctttggcttaaagccactgaagcagtttcytaaggcatgtgcctcaggacactagatctgtgagatgttctatggtcaaataagtctgagaaatatgtagacattactcatctcttggagattcacaatgcagtctgattttaaggtttctgtgaagtctttcaataaagaaacatttgatttttagtcattatttctcaagcatatttggccaaaaaaccattggtgtatgtgtatgtaaaacttattaagatttcatggaatgcactttgagaaattttgaattaaggttgtagttttagccaatatctcttgtat

SEQ ID NO: 896346 - DNA, 590 bp, Homo sapiens
gcaactgtcatcctataaattccctaatgtagtctcattaagccctgctgcccatgtgccggccatccagctcgggctactcattctcatccggctgccttgttcgtgcgagctggaaaatactaacggcaactccaccctgcttaacaagtcagcttagcattcaaaagttgatttttctgaagggtactggcaagctagctcatctgaaacccacaggtaaagcagtcaagcaagcaggcagaacatgcatgttcattccccaggacaggcaccaccagtttgctctggttttttctcacagctagacagacaaaagtagctcctgcatggcactccagccttcccactctcaactcttcctcttccaatggcctcaataccttcctggtacaatggcagacactttcctagtcaatttgaggttttctaaaataataaattggatcttgcttgtagcaaggctcaatgckgaaattcatggttttacatggaagggaattcttttgaatactacagtgcagtggttctcacgtggagaggaattttactcccctaagggacattgggagtgtctacagatattttta

SEQ ID NO: 896347 - DNA, 607 bp, Homo sapiens
ctcactcactgtcactaggacagtaccaaggggagatgatgctgaaacattcatgagaaatccatccccatgatccagtcactacccaccaggccccacctcctacattggggattacaattgacatgagatttggtggggatacagatccaaaccatgtcactgtgattggtagatatttctgttatggctattttaatcttcagacttctccatctctctatttcttgctcttgcaatttgttattaaaaatttttttttgtcctatagattctgtccaatcccccagtgtggatttggctgattgcatcccctgcatatcatttaatgtgytcttccactccttgtatttcctataatttggtatttagatctggaggctcaataattactccttaactgcctctttttgagttagaaaaaggcatctacttcaaaactgacatgcagactagatactaatgttgtacagcagaaaatgacccccttatacacagtgtaaacataagtttctgttgtacttgtagagtctatcttggtctaaaccagtttattgaagcacagataattattacaactaacccaggctatatattaaacatttaa

SEQ ID NO: 896348 - DNA, 638 bp, Homo sapiens
taccttaaatccatagtgtagttttaaaaggcaaacatggctggaatgcatgatccagaggggagctgggtgtgttacacaacaatagctccattgttcttagcacttgttagacccttgcaggggctctgcattttgcctgaggctctactgctcaaatgaaagggagagcttgaatatttagcagatattaagaaaacggattaaaatactggaagtaaaagtaaacaaatttggatgtctcagggtatacaagagaaagttattctatataaaaatagtaggatactatctataaagtgaaaaatagttgttttacatttgaattaaagcacaaagaggagtcaaaatgcatcagatgatgatttagctttgctataagaaggaacttcctgacacctattattatatgtaagaccaagtggagatagaaaactttgcattttattttgttttgaatgttcataattccaaawtgatttggggttcatcttacctttgtacatccctcagtggattataaagatagctaaatgagttatttacccagagggatatggtaatattgaattaggcatcttacaaaataaatttgtgatgaaaatactaatatgtacacttttaaaaattataaggaa

SEQ ID NO: 896349 - DNA, 658 bp, Homo sapiens
tgggaggtaggaaaagatggcattttaatagcctctaccacactgattcagcacagtaggaaccttgtgcttcagactcaaactgtttccttcctgttcagcattgcacttggcccacttttcctgaagccatgcattgatgtctgtggacagaactggaggtaacatataaatggcctttcttagaatatgggaggatggagaggtctaaggaagctatcattaacactatctttgatttgtaaaataattttcatcttgaaataatttgtcttattaaaaggttgaaaattaatacaaaraattcctgtacatccttcacccagattcttcgaatgttagtatcttacaaaactacacaacaatgatcaagataaggaaattgacattgtaatactatgacccaggatctaatcctcaatcatgtattacatttagttatgcctctttagtctcctttaatttggagcaatacctcagtcttttttcatcttttatgaccctaataattttgtacagtattgaccagttattttgtacagtgtccttcaatttgatgtttcctcgttattaatttcaggttgtgcatttttagcaaaaacacgccacataaatggtgtgtctttctcagtgcattacatcaggagacatgtgatgt

SEQ ID NO: 896350 - DNA, 641 bp, Homo sapiens
ctggcagacatacttctctgtacccactgctcagtcctcatcattgcagacttttcttctctcatcagttagtcccaaattatatccttggtcataagggaaccaggaggaaaaagtatatgggtgcaacttgttaatgaagaaccaaattatgtaaaatattttaaaggggtttattctgagtcaaaatgagtgatgactgcccagggagaaacacaaagccaagaagccttgagtaagtggtcccaaggcagtcagattacattttggttttatatatttcagggaggcaggagttamaggaaagacatacatcaatacgtggaagagatacattagttccatctgaaaaggcaagatatcttgaagtgggaaggggggtgcttataggttacaggtgaatttagagatgctttaatttataattggtcaaaggagtaaggttccatctacaacttgaagtcaataaaaaggaatgtgttaagttaagattaggaagctctgtagccagattgatagtctgtaggcatgacttaacccttgtcttctatgaccttagtcttgtgtatactttggtatcttattgccagcttgttttgttagccttatgatctctgttttaacagtaatgctggtcagtt

SEQ ID NO: 896351 - DNA, 641 bp, Homo sapiens
ctggcagacatacttctctgtacccactgctcagtcctcatcattgcagacttttcttctctcatcagttagtcccaaattatatccttggtcataagggaaccaggaggaaaaagtatatgggtgcaacttgttaatgaagaaccaaattatgtaaaatattttaaaggggtttattctgagtcaaaatgagtgatgactgcccagggagaaacacaaagccaagaagccttgagtaagtggtcccaaggcagtcagattacattttggttttatatatttcagggaggcaggagttaaaggaaagacatacatcaatacrtggaagagatacattagttccatctgaaaaggcaagatatcttgaagtgggaaggggggtgcttataggttacaggtgaatttagagatgctttaatttataattggtcaaaggagtaaggttccatctacaacttgaagtcaataaaaaggaatgtgttaagttaagattaggaagctctgtagccagattgatagtctgtaggcatgacttaacccttgtcttctatgaccttagtcttgtgtatactttggtatcttattgccagcttgttttgttagccttatgatctctgttttaacagtaatgctggtcagtt

SEQ ID NO: 896352 - DNA, 680 bp, Homo sapiens
gcattagatcatacctattttgtccaatcatatttctacacagctctccatactttgttgaactaagcataaaaatgaaccatttcccctttatctttcagtcttcagtctgaaggctcctgagtatacatgttaaataagtttacctgycttttctccaattaatctgccttttgtgagttgatttttttagtgaatctctggcccctacagtacctatgcgtacacctggtgcagaggaccccatgattttagtgctgtccttggtgactgattgctgtctgtccatagttcaacatgtttcagattctgcctttgttgcttttgtgtgcacgtagtcttcttaacatgaatataggcttttggtgcttcctttgtattttagcacagttataggaacttggggtgaaaggaggaggagagacaatgcttattgaaattatataaaaatcaagaaaggcattggggacagagcttcagtcccgtctattgcctttccaatctaagactaaatttagtgttctgattttactgactttataaacttctaaatgaacgtttgtgcaaaacctgtatggtacagaaacaggctacaacaaaaacatgagttgtaatctattatgaaagctcatacatttttcctgaggatgctaggaagctcaagtgtccaccatcaggga

SEQ ID NO: 896353 - DNA, 680 bp, Homo sapiens
gcattagatcatacctattttgtccaatcatatttctacacagctctccatactttgttgaactaagcataaaaatgaaccatttcccctttatctttcagtcttcagtctgaaggctcctgagtatacatgttaaataagtttacctgccttttctccaattaatctgccttttgtgagttgatttttttagtgaatctctggcccctacagtacctatgcgtacacctggtgcagaggaccccatgattttagtgctgtccttggtgactgattgctgtctgtccatagttcaacatgtttcagattctgcctttgttgcttttgtgtgcacgtagtcttcttaacatgaatataggcttttggtgcttcctttgtattttagcacagttataggaacttggggtgaaaggaggaggagagacaatgcttattgaaattatataaaaatcaagaaaggcattggggacagagcttcagtcccgtctattgcctttccaatctaagactaaatttagtgttctgattttaytgactttataaacttctaaatgaacgtttgtgcaaaacctgtatggtacagaaacaggctacaacaaaaacatgagttgtaatctattatgaaagctcatacatttttcctgaggatgctaggaagctcaagtgtccaccatcaggga

SEQ ID NO: 896354 - DNA, 614 bp, Homo sapiens
agtctccatgatgtacccttgtgtctccagccctctagggaaagggatgtcaggatgtttttactcacttatctggttaatctagtcactcgacagaggtattagagaaaagtcaacagtaggtgttcaaagtctgatgatacttttagcattcttcaratacagtcaggcagaggttggttctcacatgttgatccagtttccagttagtcaggatcttgcgataagacaagaccattgcttcttaaataacagaggtgttctttttatatatatacccccccaataagctggacatgaaacatatgtgcctataaatatcatatttgccagcctagagttttcttttgtctccctcacactgcagatggacacacagattgggacaaatctggatgcatacatcttccaaccaaagtaatcaaactacataatacatgcactaggtatggtttttattaagccaggattagctgaacttctcacatatgagaggcactaaaggaagtgacgtgagaagggcaaggcaaggcacagttcctgtgcttcagggttgcaacgacgaatgccttgccattttccagtcattgcatcacagtatcctctgccatcta

SEQ ID NO: 896355 - DNA, 614 bp, Homo sapiens
agtctccatgatgtacccttgtgtctccagccctctagggaaagggatgtcaggatgtttttactcacttatctggttaatctagtcactcgacagaggtattagagaaaagtcaacagtaggtgttcaaagtctgatgatacttttagcattcttcagatacagtcaggcagaggttggttctcacatgttgatccagtttccagttagtcaggatcttgcgataagacaagaccattgcttcttaaataacagaggtgttctttttatatatatacccccccaataagctggacatgaaacatatgtgcctataaatatmatatttgccagcctagagttttcttttgtctccctcacactgcagatggacacacagattgggacaaatctggatgcatacatcttccaaccaaagtaatcaaactacataatacatgcactaggtatggtttttattaagccaggattagctgaacttctcacatatgagaggcactaaaggaagtgacgtgagaagggcaaggcaaggcacagttcctgtgcttcagggttgcaacgacgaatgccttgccattttccagtcattgcatcacagtatcctctgccatcta

SEQ ID NO: 896356 - DNA, 600 bp, Homo sapiens
caaatggcattgttttcttcatttttgggttgttcactgctattaatagaaattaaggtttatatactgatcttgtatcctcaacactgctgtactcatttattagctctaatagttttctgtgcattccttaggactttcgctatataagagcatatcatctgcaaatagactagttgtacttctttctttctaatgtggatggattttatttctttttcttatctttctggctagaatgtayagtaaaatgttgagtagaagtgtcaggagcagacattgttgccctgtttctaatcttaggggaaagtatccagtcttttaccattaagtagggtgttagctgttagtttttcaagctgctctttattaggttgaggaagttcccttctattcctaggagtctttttatatattccccagtatttctattcaactcactgctgagaaagaaggggtatcacagtgactacagcagacctgcagtccctccccttgggaggactttgaggtattactgcatagagtgaggcaaggatatttcatgtttattttctaactttctgtagtttatcaccaggttctgacagcagtacagaa

SEQ ID NO: 896357 - DNA, 588 bp, Homo sapiens
gctcataaaagttgtgtttattttttctctctcagataggtagccataaacattgggatacaagaatcactggatttttgtcttccttttacagtgctgtctcctagtggacttctgttttctgccttcccattatattcagttttaggggkttgtatagaaaaatcctcttaaaaggaaatggttgatgatgtcttttaaacagtttaaactatgtaaaaagaaaaagcctttcagtgaagcaaggtagcaatagctgattcaaaaactaataagggttttaataagaattgcatcttttttttttttttgagatggagtctcactctgttgcccaggctgtagtgcagtggcacaatctcagctcactgcagcctccacctcctgggttcaaatgattctcctgcctcagcctcctgagtagctgggattacaggcacccaccaccatgcctggctaatttttgtatttttagtagagatggggtttcaccatgttggccaaggctggtcttgaactccttacctcaagtgatctgcttgcctcagccttcttaagtgctgggattacaggtgtgagccaccacac

SEQ ID NO: 896358 - DNA, 633 bp, Homo sapiens
actctgctcttccaactcccaggctaagggttttcatattacactggatcagatcatggagagccatatatatctaaacaatgataaagtactaaaggattttgagataggaaggagaaactggatttgaattctaacttcttaacctgctagttgtttaatttggggtggcgggggggatggggattttacctaacttctttaaactcagtatcttcatctgtaaaataggtatgataaaatgcctaacttgtaagattgccaygacaagtcagtaagatgctttgcacatagtagatgctaaataaatagtaaaatcaattttttttcttctccttctcttttcctgtctttattttttttggggggcggggtaagctttccattctttccattcctcctctttctctttttcttcctctatcaaatggaaaggtgaggaaaggcagacattggcccattccacccccacctgcagtgtgctcctcctgtccaggatctgcatttcttggcctgaaggtttctaagcctttgggaggatgctttacctaggtttgtgtcaggacagaagtcccagaatgtctattcaccccctagaagagccctcaaacaatgacggaagaaatttggtgt

SEQ ID NO: 896359 - DNA, 633 bp, Homo sapiens
actctgctcttccaactcccaggctaagggttttcatattacactggatcagatcatggagagccatatatatctaaacaatgataaagtactaaaggattttgagataggaaggagaaactggatttgaattctaacttcttaacctgctagttgtttaatttggggtggcgggggggatggggattttacctaacttctttaaactcagtatcttcatctgtaaaataggtatgataaaatgcctaacttgtaagattgccacgacaagtcagtaagatgctttgcacatagtagatgctaaataaatagtaaaatcaattttttttcttctccttctcttttcctgtctttattttttttkgggggcggggtaagctttccattctttccattcctcctctttctctttttcttcctctatcaaatggaaaggtgaggaaaggcagacattggcccattccacccccacctgcagtgtgctcctcctgtccaggatctgcatttcttggcctgaaggtttctaagcctttgggaggatgctttacctaggtttgtgtcaggacagaagtcccagaatgtctattcaccccctagaagagccctcaaacaatgacggaagaaatttggtgt

SEQ ID NO: 896360 - DNA, 633 bp, Homo sapiens
actctgctcttccaactcccaggctaagggttttcatattacactggatcagatcatggagagccatatatatctaaacaatgataaagtactaaaggattttgagataggaaggagaaactggatttgaattctaacttcttaacctgctagttgtttaatttggggtggcgggggggatggggattttacctaacttctttaaactcagtatcttcatctgtaaaataggtatgataaaatgcctaacttgtaagattgccacgacaagtcagtaagatgctttgcacatagtagatgctaaataaatagtaaaatcaattttttttcttctccttctcttttcctgtctttattttttttggggggsggggtaagctttccattctttccattcctcctctttctctttttcttcctctatcaaatggaaaggtgaggaaaggcagacattggcccattccacccccacctgcagtgtgctcctcctgtccaggatctgcatttcttggcctgaaggtttctaagcctttgggaggatgctttacctaggtttgtgtcaggacagaagtcccagaatgtctattcaccccctagaagagccctcaaacaatgacggaagaaatttggtgt

SEQ ID NO: 896361 - DNA, 633 bp, Homo sapiens
actctgctcttccaactcccaggctaagggttttcatattacactggatcagatcatggagagccatatatatctaaacaatgataaagtactaaaggattttgagataggaaggagaaactggatttgaattctaacttcttaacctgctagttgtttaatttggggtggcgggggggatggggattttacctaacttctttaaactcagtatcttcatctgtaaaataggtatgataaaatgcctaacttgtaagattgccacgacaagtcagtaagatgctttgcacatagtagatgctaaataaatagtaaaatcaattttttttcttctccttctcttttcctgtctttattttttttggggggcggggtaagctttccattctttccattcctcctctttctctttttcttcctctatcaaatggaaaggtgaggaaaggcagrcattggcccattccacccccacctgcagtgtgctcctcctgtccaggatctgcatttcttggcctgaaggtttctaagcctttgggaggatgctttacctaggtttgtgtcaggacagaagtcccagaatgtctattcaccccctagaagagccctcaaacaatgacggaagaaatttggtgt

SEQ ID NO: 896362 - DNA, 654 bp, Homo sapiens
gcttactgtccttgaactttattgaaaataaacttggtttgaataattatttaatgaatataaagacagaccatctgattctgtccttgaaccaagtcaccacattatgcttagaaagaaccattatccaattattgaaaccttgataatctcataaaaccttactgatgtgtagaaggcagcarcagagagcatctattcaggacatcgtacaactgatgcaggatttttcttggtcattttgtgccagctggggacctccactgctggcaacgtcctcacccgggcctcactcagccctgggcctcccacatgccacctgagccatgcctggcttgtgtgccaggcaggaccccatgctatgggatccatgctcagcctgcagctgggccaggtgtgccccagcctacctgtgttacagctagtactcctgtttggtggttcccgagtttttgtcccatgtccaagaagaatgagggtacactgataattgaagggtgaggaggatggagaataattttattgaacaatggaatagctctcggtggagaggggatgcaaggatggtcccctacctgaagtcaggtggtctctccaccagtgtggctgggtctggggattttgtgggctcagaatcggggagtgcatgctgac

SEQ ID NO: 896363 - DNA, 639 bp, Homo sapiens
tactcactatcacgagaatagtatgggggaaattgaccccatgatttgattacctcccactggggccctcccatgacatacagagattatgggaactataattcaagatgagatttgggtgagtacacatccaaaccatattattccattcctggtccctcccagatctcatgtcctcacatttcaaaacacygtcatatctttccaacagtccctcaaagccttaactcattccagcattaactcaaaaggtcaagtccaaagtctcatctgagacaaggcaaatcccttccatctaggagcctgtaaaatcaaatgcaagttagttacttggttttggtacaggcattgggtaaatacacacattggggtacagggcattgcataaatacacacattcaaaaaaattggccaaaacaaaggggctacagcccctgtgcaaatccaaaatccaaaagggcagtcattaaaccttaaagttccaaaatgatctcctttgactctatgtctcacatccaggggacacttatgcaaggtgggctcccacagccttgggcagctttgcccctgtggcttttcagggtacagcccatttccaggctgctttcctgggctggcattgagtttctgtggcttttc

SEQ ID NO: 896364 - DNA, 738 bp, Homo sapiens
attctacaatgtagtagtattctaacactcatgcacatcaaggtacttgtgggagagaatatcctgtaagaaaaacatatacaacctatagatttctgattcatagcacatgaggagttcattaaaaacacacagaaaataacaagacaaaaaactttggacacccccctcccgaagctcattcatgggtcccatcctttaatctcaccaatttacataaatatgaaacacctgaccaagttttcaagtaatttgtcactcatcttacctcctaaggaagactatgttttcatttaacaacaaataggccaggtgcagtagcttataccagtaatccctttagaasgccaaggtaggaggatcgcttgaggccaggagtttgagaccagcctaacatacaaggacctttgattctgcaaaagataaaaagcattagctgggcatggtggtgctcacctatagtcctagctatccaggatgctgaggcaaaaggatcatttgagcaaaggagttcaaggttacaatgagctgtgatcgcatcactgcattccagtatgggtgacagttcttgctcacaagaacctgtctttataaaacaaatgaacaacttaacaacaaatacttgttaacagatatttaatttactatgtgccagatatgtactccaggcacctgaacaacatgaaaatagaatgttttgttttcctctagccatgtctatttgctggtgtagtcaga

SEQ ID NO: 896365 - DNA, 615 bp, Homo sapiens
tgtcaaataacaataatccacaatatctttgtattacttgggagttttcgagcactttctcatacattattttatttagcctcacagcaaatccataaggcaggtattgaggattacaaatcaggaaaccaagtgtctgagaagcgaaataattttcctcaaatcaacaaatgagagaggcaaggtagaaatcagacttctgattctcagtgtactgtgtttccrctgtacctcagctacttaagctaagtggcagagtgtgacaacaaactgcacacccaataaacagagtttgggataaagggcaagggcataagcatgagtgagaaatgagggaaccagaacttccatgatgagtgagattttaatcatcaaaatgtagtacatgctttgaactctctttaggcaaattcttataaaatagcatagtaggcagccagaaagttgattccacagctttaaaaaaaaaaaaaaaaaaaaaaccctttcatcagcaaatgtttgtcatgatgtctttcatttgaaaatgtgctttgcacatgtgaatgcttaatacatgctagttgataatgacaatgaggactgatggactgaaatcacctttggcactaaact

SEQ ID NO: 896366 - DNA, 680 bp, Homo sapiens
gtgtagctaagctaagaaaacatgttgtatatacttctggaaagagcagagcagtcacacacattccatgtactccctcttttcctttctgcagttttcttcctcttctcactgccacattaccctcgtctttgaatttcttttgytgtaatgccacacagagaacctgagcctcctgatctgcagcccaggactcttgccaatgtatctgagttgttgtttgatagtatggaaggaaaacggagcctgaagtgtgacacaggtactgtgttaatatttcatgtatgttgtctcctttaattttgccactaatctctgatgtaggtatcattttacaaaagaagaaaaaagactcaggggataagcaacttgcccaagattacactgaaagtaagtagctaaacaggaactggaaccaaggtccatgttttttccattacatcatgttgtcccctgaaattcccctctgaagaattcctgttaatgcttgctattctgcagcagaatcctcccagacctcacacatgtacttctcttttgcctcatctcatgcgtcaaaactatatcctattcctttaagaccaagcagttgtggaaatggttaataattttctcaaggcatgggttgagcccatgccccccgtgcagcagaattaatgggagactcctggaaactgcgg

SEQ ID NO: 896367 - DNA, 577 bp, Homo sapiens
tccttcaaaacttgataatccacagcaactaatgggacaaatggatgaatgggggaactcttcaggaagcaagtaatgcgtgctgttcagcaagcctacatgaaccattcagtaagaaatgttttaatagtgggctaaaagaagaaggaatcaattggtgaaagcaaaatgtataagatgagcttcattattatttaaagaactacagaatcaacatttgaaatacaatttcagattggtggctgttagattgaaataacatcmccattagctcaatctgatatgccaagggaaatacaaatgtgtgctaaaagtgcatcttaaacccaaaaatccttgcctgtcactcagactacaaagttggcatgtttgaccaaaattgatccaaagttttttaatcactcacaactaaaaattattagaactaagctggtcaggatgaaaatataaattaaaaaaatctgttctatgtgtcttaaattattctttggtcaaatgatgtgatttttgagagatctgaaaatataaacctatttctcatttccaaatacaaggttataagtatgtacagcaaggt

SEQ ID NO: 896368 - DNA, 651 bp, Homo sapiens
gctgtgggttactggactaaaagtattcattacaccaccgcaagctgaggcgtggcataaaagacatggggtttttgaggagagaggaaaggatttaacagcagagttagagatttgcggtaagcagtgttgaggaagagggtgtgggaagacaaattgcataatctgcactggatggcgaatgggagagcaaaactgagtattgtctctatgggtcactctcacttgagcccaaaggggcacctgcactcacacttcctcctgatctaccctcaggggccccacaggctcccacgactttcttcttttgtcactgacatttttcttttttctcttggggagtacttcttggtgaggtccctgtttccccgtgggaaagcgttcacactttctcttcaggctgaagggagcactaggatctctgcatcaactccacagtggtctcccmctgtgtactgtgcctcctccatagacacaggccctaatcgatgggctaggaatctaccctgaggtctagctcaagttctggctgttcaagagggttatcatttgcagaaagaaattattaacactcagactgaacatagatatacaaacaataattttgtaaggaagacaagacagattggacctacccaccttatcaaaaca

SEQ ID NO: 896369 - DNA, 590 bp, Homo sapiens
cttgaaacgtggtctacccctttctttagaatgtgttgacacttgacactcttgttctaaaccttgggacctcagaggacactatgaccccagaaaaatttccttttaccaccccattgtactttccctatcttcactcagcctttttttcttcactgtttacatctatccctctgtatctacaccacagctgcggcactgatccacttgtgcagcatcctcagtgagtcacttccttgtcatacccaccttgcaaatataaatgagcctcaaatcaatccagctgtccacctcatccaatcttccrtggtgctgggcacagctggggacaattgcatcatctcagaggctagtaccgctaaaccttatgcggaatccacaacctggtcaactttgtatataatttcccgtggtgactttttaatgttgtactattttgttatttccagaactattttatttttattgatacacaatagttgtacatatttatggggtacaagtgatattttgatatacacattcagtgtgtaatgatcaaatcagagtaattgggatctccatcacttcaaacctttatcttttcttta

SEQ ID NO: 896370 - DNA, 509 bp, Homo sapiens
tacaggaggattgtgtagttatatgtaaataccactccattttataccagggacttgagcatctgcaaattttggtatctactggaagtcctggaaccaatcacttcctaataccaagtgacaactgtatatttttttctattgatttgtaggagttctttatatattgtggatatgaagtcttttwtcaaatatatgtatttttgaatctcttctcgcactgtctgcctggccttttcactatctgaatggtgacttctgaccttcttaactttaacgtagaacaatttatcagttttctttattgttagaacctaactacttaccgtttaagaaatcttttcctactccaaggtcacaaaaatttcctttatattttcctctaaaagctttattgtttgcttttcccagttggatctgaaatctatcagaaattgatttttctgtatggtgttcaaatacattttgtttcccactgggacagcctatcaacccagcctttagaggcc

SEQ ID NO: 896371 - DNA, 578 bp, Homo sapiens
aatatccttgacaacattacaacaaatccacagcagtttgctatcctctacttttcccttcttcaagtgctaaaatcaaaggcacaactttgcagagcagcagtgagcagctctttataggcctccccactactggagtacttcagacagagtcttccaggggaaaaccaaaacttgattcaaggatagatcttaagacctatggagtagcagaatacatagagtgtttctcactctaagcaatctaaaatctctcyagttaactccagcaatggcaaggagggctgagagggtatgcgttgaatgtcactttggagatccgcagagcgggtggagtggttgacgttctatcagaaagccagagaaggatgaccaatgttcttttgtgcattgaatccaacccttcctcacttgaaggggaccaaaaagcttcccctgaaccatgagtcagggatttcctcacaatgggctcaagcacaagtaccaaagcttcactggagacttgtatccatgaagaggcatcgcaccacactatgggaccacaagcaccacaaaaagtgggccccgcgctttttcca

SEQ ID NO: 896372 - DNA, 578 bp, Homo sapiens
aatatccttgacaacattacaacaaatccacagcagtttgctatcctctacttttcccttcttcaagtgctaaaatcaaaggcacaactttgcagagcagcagtgagcagctctttataggcctccccactactggagtacttcagacagagtcttccaggggaaaaccaaaacttgattcaaggatagatcttaagacctatggagtagcagaatacatagagtgtttctcactctaagcaatctaaaatctctctagttaactccagcaatggcaaggagggctgagagggtatgcgttgaatgtcactttggagatccgcagagcgggtggagtggttgacgttctatcagaaagccagagaaggatgaccaatgttcttttgtgcattgaatccaacccttcctcrcttgaaggggaccaaaaagcttcccctgaaccatgagtcagggatttcctcacaatgggctcaagcacaagtaccaaagcttcactggagacttgtatccatgaagaggcatcgcaccacactatgggaccacaagcaccacaaaaagtgggccccgcgctttttcca

SEQ ID NO: 896373 - DNA, 654 bp, Homo sapiens
agttcttggaatgtttttgtcattaagtttccgtcaatgtcttgattgtactttcatgttaatagtctgctctgaattaggaggaaattttatttcataacacttgtcaccaaagacaagcacatctcataggccatccataacatgtataaacatatgaaaaatcaaagacaggtgtgcagttaaacctgagatcctaagatggaacaggttaaactggaaggaaattttgtagggctttgatattcctatttcacaaagtttaagtaagggcctgtttcctcgatattccagtaaagaaaaaattacatataaatttgcaagtatagttaagcaatttttaaaaaatcagaataacattgggcgaggagaaaacacatcttatcagtgaggkgaaaacacatcctatcagatagcatgacattataaggccatagtaactaaatacacataagtgtttaaggacaaaaagataaatgaattgaatggagagttcagaagtatatggagaaaatgtaaagtttgagagaaagtgagaaaatgaatgagtcagatatgtaaaatatgacccccaaagaagtagattatcaaaaatctacaatcattcattgatttagctgaccccattcattcttttcttcacattcaggtgtc

SEQ ID NO: 896374 - DNA, 587 bp, Homo sapiens
gtcatatagaaagccacagaatatttccttttgactctcttctctccacatcagacccacagtcaggctcatgctgaggtctatcttctcacaatctactagaaagtggcctgcctctacatgcttaccctgctaaaatgagaagcaagaaataaacaacttcatgttaattataaataggaggcactggatattaaacctgcccatagaataatggagaaggaaagcattgcgctccctttctccttgagtcgggagccatatcccttgccagaacagtgaactctcactgggtagcaggagaggccactatgataaggacccaagcagaagcctgggggtggggtyctcacgaccactcacagacccctgaacctggggggagtagcagagaacagccaagagcgacatggactgtcttgcattttcctcatctctttattctagaaaaaaaaagaggaaggaagaaaaaatgaaagaaaaatgctataattttcttttctccatctttcttggagatcagaaaacagtaggttctgaagatctcctctgtgctcatgggcacgtgaaaaatttcatgatgctta

SEQ ID NO: 896375 - DNA, 694 bp, Homo sapiens
atgaatacagactgctgggttgactaaaatagggaagagactcaagggtataaggaaataccagaataaaaaagcacactgtggcaaatgatgtcagaaagatggtgaaataggagttttcagccctcatcccccccagcagtaatactgattttgacaaatgcccacaggtgagagtacccctgtggagcacaggagtacaagtgcagaggtcttagcagtcttgttggagaaaatcactcaagaatagacacactgaagagggtaagaagaagagtttcacttatccataacacccctccctsaaggcagcatagctcagtgccaactcccttggttcttgatttctctcaaaagggaaggtgagagcatagtgaacacccagtgaccccagccatgtgggatgctctccagcaggcccactcctttctcatccctttcagaacactgagtggatcagcatgactgaatagtttgggagcaactaagagcaaggaaaaggggctgggactgtcagtagtcagggcatggaactcaacaaagggctacagtttctactaactgccttgtggacttcactaagaggctagtccacaaatttcataggatctgtttgctgcagacacccccacctagcccacatatgcctccagcattctgtatgcctcccttccttggcagctggcacaactgc

SEQ ID NO: 896376 - DNA, 627 bp, Homo sapiens
ataacaccgggtaagtgtctaacatagtaggtactcacacagcagtaactcctcctaacgcattgatccaatcctgtttttcttctcccagattctttctttgtagacccctgagcaccccatggatgtattttctcacgtcttggctgggaaagtgcacacactcatttcattactgcagctttttgcatttcattaaaaaacytgacaggccatttcataataatttattagcagagagtcaatttttattaattacaatcattaatttatcagtgttcccgtcatctgaagtttggtcagaaatgaaaggcgagaagtgcacagagaaaaatgggggaaagtggaaatctaggggatgaggatccagtggagtgggggaagggatggagggggctgtttgggctggaaggcttgatggaatggagctgccatcttgaatgcaaagcactgggcagggcagcacctggccccggaacctaggggtatgaccattgaatgatgcttccttcattcatgcaggaacaaaggtggtttaggagtgacaaatggcaggggttcacagactttaggagcaaattcctccaagttctggctctgtgttgccctccaacgtcttctccttcc

SEQ ID NO: 896377 - DNA, 627 bp, Homo sapiens
ataacaccgggtaagtgtctaacatagtaggtactcacacagcagtaactcctcctaacgcattgatccaatcctgtttttcttctcccagattctttctttgtagacccctgagcaccccatggatgtattttctcacgtcttggctgggaaagtgcacacactcatttcattactgcagctttttgcatttcattaaaaaacttgacaggccatttcataataatttattagcagagagtcaatttttattaattacaatcattaatttatcagtgttcccgtcatctgaagtttggtcagaaatgaaaggcgagaagtgcacagagaaaaatgggggaaagtggaaatctaggggatgaggatccagyggagtgggggaagggatggagggggctgtttgggctggaaggcttgatggaatggagctgccatcttgaatgcaaagcactgggcagggcagcacctggccccggaacctaggggtatgaccattgaatgatgcttccttcattcatgcaggaacaaaggtggtttaggagtgacaaatggcaggggttcacagactttaggagcaaattcctccaagttctggctctgtgttgccctccaacgtcttctccttcc

SEQ ID NO: 896378 - DNA, 564 bp, Homo sapiens
cattttgggactttcttccccaataccaggctatgggtgaaactgggagtcatatccaggtaatcctgccccagagtgcatgctctcagcattcatgctgtgctgcatgtgacccactgatttgtgctatacactgcaaaaaaggtggagataggtggcttgccatcaggaagaccaccatcaatctaggttgaagatatagatacaggaaaggcatagctaattaagcccaggtggaataatacttggcaccaacagaacatcatgcgatttgaaatttgccttcctgcccttctttctctggcccctgtgctttccttcttcccacttcatcttttctgtggctctgtttataggyttcacactgtctagtttggagcaggatttaatcgtggtttcattaataaatcaaaggaagaatgacagtattgaaaaaaagaacgaaaagaagattgaatgaatgtgggggcacagagggagggaggagagggaagaagctggttccagtctcgtagaagtctagaaagagaagactccagcttttgccatcagtgcctgcaggtg

SEQ ID NO: 896379 - DNA, 545 bp, Homo sapiens
tgctgggatgacttccaacagtctaagggctttgctgttgtctgtggcctattctgcttacctgcatgcaagttagaagtgcctgagaattaccatcctccaggagcaacctcaactaaagattgacaggagttggtaaataaatggctcagaaccctggctcctcgagcgggataacttcaacaagcatgttctgygttgcttcccagcattctccagcaggattaggctccagctgcccacgggagtttctgagttgattatgtacccttgattggctgtctttccttcctgttcacttctgcatcctcctttctggtgtttcctgggaccacaaataaactacttgtcctcaaaactttggctgaggatctctccttgtggtggagccgaaattcaaatgggaattctctccactgaactggaccatagactaagtagagaaatcagaatcattctttggaggtacggatacatgtaataggtgaaataaggaagagagttgaggggtaagcagaaaacaggaaagcctagaattctggaat

SEQ ID NO: 896380 - DNA, 614 bp, Homo sapiens
gcatgcagaatgcgctgcatggggcattaaatggtatctgtgcctttccttcctccctccatccattaaacaaatcttgattgagagtctgtggagctcctggcccaatgctggctactggggacacagctgtgaatgaggcagagcccctgccctcaagcctggtgagctggggaacactgaggaatggaattcccttatccgctgtatttgtgccaagacaactgagccaatccacaattatagagaacgcytgggaatttaacagtgttgtccagagagaggacgatgggggaacagtgaattgagtaggttcccactcacttggaagtgtttaataggacgactgtataagtgcagcacggccaataagcagaaggaaagcaggctgaaaaaagatcttccgagtctgtacattcagttcctgcactgctggaactcaccctcaggctgcctcactccgggcctaataactttatatttacacaaaattataacaagcctgatgattacattttttttccacaacaggtaaaaagcagtgatatctatacagagcacatctcagaagatacgtgccacctgacagagaagggaattcaggcttatggagg

SEQ ID NO: 896381 - DNA, 487 bp, Homo sapiens
atttttctgcagcagaacagactagagttttagactgagacctggtactcttgcatatcccagcacccagccctgagcctgatatgtatcagagcttaatatttggggttaaactgaaatgtatgtatcccaccccattcagccccaaaagaatggccactttgcattcaagcgcagtgttgtcattcaagttacgtttcctgagggccagttataattaggacatgtycccgtcatctgcatttttaaaataagtgaatggaaactcccagggggtgacttagattgggttcccaggaaacagattctgagatggaaatttgtatgtggaatgtttattggggagtgcgcttgggagatgtacctggaaaaagggaggcaaggaaggaaagaaggaagaagagagagggagggagggagggagagaaaggaggaggaagggaagaagggaaggattgggcagagggttgatccaccatgcagttgc

SEQ ID NO: 896382 - DNA, 675 bp, Homo sapiens
tccagagacactggggaactcagtgggcaaatctggtgtctgtctggaggaagaagtgatggaagaaccagaaatgactcccaggctaatgaggtgactgcaggggacaggggagcaggttgggaaaactgaactcagttttgtttatatgatggttgaggtatctgtgagtcccaatgggtctgggaggcggttggctttcaggggaggatttggagaagtgacatagcgtgtatgaatgggatagagcccactgcttggtaaggtgatgctagcaccagagtttgagctagaaaagkctctaactatcactcagccatttccccatggtatccctaaaaaggctgaggcttagaaatgatagcaagctcttccaaagccgcacagaggggtgttggcaaagtccaggcatcctgagtctgggtctcgtactgactcgcctccttcacagacatccacatgccaggtccgctgccaggcatagggttacagtggaaagccaaacacacatggtcactaccaagtgaatgatgacacgccaactgtaagaggcacccgatttcagagatgtggagacttgccagatgtgcatcttaggaaaatgagctatggtgattaagagcagctactatttcctgagcatatctcaccatgggctgagagaagtgcttttta

SEQ ID NO: 896383 - DNA, 675 bp, Homo sapiens
tccagagacactggggaactcagtgggcaaatctggtgtctgtctggaggaagaagtgatggaagaaccagaaatgactcccaggctaatgaggtgactgcaggggacaggggagcaggttgggaaaactgaactcagttttgtttatatgatggttgaggtatctgtgagtcccaatgggtctgggaggcggttggctttcaggggaggatttggagaagtgacatagcgtgtatgaatgggatagagcccactgcttggtaaggtgatgctagcaccagagtttgagctagaaaagtctctaactatcactcagccatttccccatggtatccctaaaaaggctgaggcttagaaatgatarcaagctcttccaaagccgcacagaggggtgttggcaaagtccaggcatcctgagtctgggtctcgtactgactcgcctccttcacagacatccacatgccaggtccgctgccaggcatagggttacagtggaaagccaaacacacatggtcactaccaagtgaatgatgacacgccaactgtaagaggcacccgatttcagagatgtggagacttgccagatgtgcatcttaggaaaatgagctatggtgattaagagcagctactatttcctgagcatatctcaccatgggctgagagaagtgcttttta

SEQ ID NO: 896384 - DNA, 574 bp, Homo sapiens
ttgtgtgtagctgtacctcatgcattctcattactatccagcaccccagtgtgtggatacaccataatttatttgcccattctgctgttgctggagaattgagttgtttccgtttttggccatggtgggttgtgctgctatgacattctagtgcatgtctttggaggaacatatgtacacatttctgttggatatgacctaagagtaagctttctgggtcatgcgctgtgcatatgctgagcttcagtagactctgccaagcaattttccaaaatggttctaccaattaacactcccaccasaagtgtatgagcatttgagcagtgtatcctcaataacatttggtattttctgtcattttcattttacttcatttttattcttttgggagtgagatggtattacattgtagttttaatttgcattgccttgatgactaatgcagctgaacatgttttcatggttactggccgtttgataattttcttttggtgcagtacctgttcaagtcttttgcctatttttattctattgggtgctctaccattttcttattggttataggtgattatac

SEQ ID NO: 896385 - DNA, 624 bp, Homo sapiens
actggccgtttgataattttcttttggtgcagtacctgttcaagtcttttgcctatttttattctattgggtgctctaccattttcttattggttataggtgattatacattctggatacaagtccttggttgaagatcctattgcaaatatcttctctgctctgtgggtttctctctcattctcctaatgaagacatttgatggatagatattctcacttttaatatagtacactttatctctcttttttcttacagcagaatagaattttctcaaggatgtttaaaygcagaaagcagtcttttccagtggagggaggggtgggaaggtgggaaagtcagggtcttggaggacataggtgtgacctgaccctcagagatgtgtaaaaatctgggaggtggggaaggctgcagaagttttgggggaccaatcatggaggcttccttaaagctatgctgtgaagttggacttccttcctgaaaccgacagaggactgaagttttgagcaggggttggcaagaccacagctgaggttaggaatgttaatcccacagtgaatgcctgatagagtaaagtggagttggggagggtccagcctggaaagacttggggcagccttatag

SEQ ID NO: 896386 - DNA, 629 bp, Homo sapiens
tatacatgcgagtgtgtttgtgagagaatatgtacatatgtatacaagcatggatatgtgtgcatatgcatgtgtgtgagagggagtatgcacatatgtgcacacatgtacatgtatatgtgtgtatgaattcacatgagtgtatgtacatgggtctgcatgtgtctatgtgagaatgtgtgcacatatatgtgtgtgagagaggaacgggagagagagagagagagwgtgtgtgtgtgtgtgtgtgtgtgtgtgtgttggggaatgagggagacagtggctggggaatgtagaagttctctatcacctggccaggttataaaaagtgaaggtctcaggtgtgaaataaaacaaccaccttggtcacaggcttccacaatttttggtaattatgcagatgctgcaaagatgcctactactagaagccttcttcctacgtgctgtgcacctcacgtgcatgtgacactcaccaccttcacagtgggtattgctttccccctttacaatgaggcaccgagaggtgaaatgacttctccagggtcacagaattagtaagtggcagcaccagaacccaaactcaggtcagccccactgcagcacccccaatggcacagtgccttcaagacact

SEQ ID NO: 896387 - DNA, 604 bp, Homo sapiens
tacctggaatcatcatgaggaaatactggcacccgcatgtgatacttgagctgaaatgtgatacttgggcttagcatccagtttcatctgattccaaaggattgtttccgctttgccataccttctccatcccagcgcctcggcttgtttttcccattccttccccccaggctctcagcttctgggacaggccaggggcagaggaaaaggagtcagggagaggcctctgcaacctgggaagtagagggcatcacctgctctggcaggaggcgaactgggaagactcctgtgctgacagcatttcctgttactctcctccggrggagaagttggcctccttccctcttgctggggactcacaaaatccgatttgaaatctactcaagtgtacattaaccaacttcctcttggcaccggctggggagcctataattagagcagacaccataccatttagtgggtttcattcacatgaaaagaaagtgtacttgcagagggagacggcttcagaagcaaacttctgggaacattctccagagaatttatgcttgcagtgtatccaaaggacccacaggccaactgcgtttctaagtgcagaggttat

SEQ ID NO: 896388 - DNA, 659 bp, Homo sapiens
ccttgctcattccttctctgcatccttggcttctgcctgagcaccattcaccctctgtgtgattaaaggcaaattaccttccatgagcctcagtctactcagctgcagaaatgggaatgatcctctttcatccagtggctgtgttgggagccagagcttggcgattgtatttacagtgacatgagcacaatatgtgaggaattaccaggaggcyccgggctgccacgagactggatttgtactgatatcgcccattacgaggtgtcatgttgcatttgcaggaggtggctgtatggaattccactctcttgcactgtatgaaatattcacctgccttctctggaagggacgtgggcttcttcttcatttcctgactgatccacctcagaggaagccaggctgcaggctgtcactaatgcaaggtgatgccaggatccaatgtagggccttggggactgggacagagcagtgaggctggtgggtgctgcagaatggaagaaggggatttgaggcccttaggaacccagggtcaattagagcttcttacctgctccctataggaaaagatgcatggcgttggatggagttatgagttgagttgtgtcccctccagcattcctgtgctgaatccctaactccagtacctctgaaagtgacct

SEQ ID NO: 896389 - DNA, 622 bp, Homo sapiens
tgaaaccagcaaactattggaggctaggagaggggcctggaacagagcatcctcaggggacacagctgtgccggcacttgattttagacttccgccttccagagctgtgagtcagcccatttctgttgttctgtgccactcagtttgtggtgctttgttccagtagcctgatgaaatgaatacaaaaggaaacacacaggtgagcagagggctgaggggctgctgcgtctgcaggcatagaggatggactccagggtcagtcagcattgacttggaacatgagagttgaagttttaagagggaatttggtgttgagggtcagaatcagggctctagagataagattcagacattcttagctcctcatttcatggcgctgggcgagtcatcaagcctccctttgtctcrgttttctcatccatataatagggacaacaatggacctcacggtattatgagattaaacagtattacaaatgttaagaacttatcatagtctgtggcatgcagtacacatctgaaacgtcatagctttcttcattcctagttgagtgaccttgggcaagtcactttgcttgtatgaggcctcaatttcctcctctgtgagagagggttgataatc

SEQ ID NO: 896390 - DNA, 658 bp, Homo sapiens
ccctgtgtccatgtattctctttgttcaatgcccacttatgagtgagaacatgcggtgtttggttttctgttcttgtgttagtttgttgagaatgattgtttccaggttcatccatgtccctgtgatcccattactgggtatgtgtccaaaagattataaatcattctactataaagacacatgcacacgtatgtttattgcagcactgttcacagtagcaaagacttggaaccaacccaaatgcccatcaatgatagactggataaagaaaatgtggcacatatacatgatggaatactatgtagcakcaccttatttaatcttcatgtcactgtaaagtaggtactgttattaaccccttatatagctgggaaaactgaggcacagagagggtaagtaacttactcagggacacacagctggtaaaaagcagagttaaactctgacttcaggccctgtgtgtgtagaacttaacgtatattgtgccccatctcaagacactgctcttttgccccacctggcatgctgtggatcagtgtagaagtgatccacattggtatatgagtctattgtcagactacccctgaggcaacccagccctgacctgctttttgtttgtgttgacgttgctcatccagtccagcagatcaccctttc

SEQ ID NO: 896391 - DNA, 657 bp, Homo sapiens
ctaatgccaagtttggcaagttgagtctttagggtgtctgtaggatctgttgtgatatttccacttacgttctccatattggtaacttgtaccatctttcttttttccccacacagtttgacttcaagtttaccagctttcttaatcttttcaaagaatgagcttttggtttcattgattttctttggtgttcatctgttttgatttttttttctttttaaattgcattttattaatcattattgtccttcttattttatatttaatttgtcctcctttttgtagyattctaatgtgagagattagataattgagtttaaaccctctctaatataaacatttaaatctataaatttccctctaaccactattttaccaatatgccacatattgtaatacattgtacttaataacttcactgagttacaacagacatacaatatactgctgatttttaaggagcaccgtttgataagttttgacatatttatttacctgtgaaatcatcaccacagttaaggtaatgaacatattcatcatttccaaattttccctgtgctcctttttagtttttctcttgcttctttttagtttttctctcctatctttccaccccaactctccaactctaggcaatcacagatttcctttatgtca

SEQ ID NO: 896392 - DNA, 637 bp, Homo sapiens
atcaaagttcattgtttacattaggattcacttttttgtgttctgtgttctttgggttttaacaaatatataataacatgtgcctaccactatgttattatacagatagtttcactccccttaaagtcccctatgccccacctagtcagtcttgttttcctctaaacccccaggaatcactgatcttttaactgtctccatagtactgccttttctggaatgtcatataattgggctcatatggtatataaccttttcatattgtttgattttacttagtaatattcacttaaaactcattcacatcttttaatggcttgatagcccccttcttttaattgctgaataatattccattgtctggatgtatcaaaatttatccaatcacctattgaargataccttggttgcttctaagttttggtaattatgaataaagctgccataaatatttgtgtgcaggtttttgtgtggatataaggtttcagttcatttgggtaagtaacaagaagtgtgattactggaacatatgataagaatattttcaactttgtaagaaattgccaaactgtcttccaaagcggtcataccattttgcattctcaccaggaataaatgagtgttccattccacatcc

SEQ ID NO: 896393 - DNA, 632 bp, Homo sapiens
cttccgctcctatattctggaaaggtttgtgttgaattggttatatataattgtttggtagcattcatcagtgaaataccagttatctgggcctggaattttctttgtgcacaactttttaactgtacatttaattttaataggtaaaggtctatttaggctatctaagtctttatgaataatcttagtacttcgtgtcttttaaggatttgtctatttaagttatcaaattcattgccgtaaaattattcacaatatttccttattacctacttaatgtctgcaataactgtagaatgtactccctctcatcccttatattaataatttgtgtcttcttttttttccctkatcagtttttctagaggtttatcaattttattgagcttctcagagagccaccgttaattccattgatgtttctgtcaggtatcactgtcctgcactgtcaatatgtgaaaagtcttgtttcatatagtttgtcctttgagaaaagttgtgtaaggtgggaaggtaaatccaatccttgtcctcccatcataggtagcagcagacgtcctccgtgattttcagggctataaaggagttctgtggtgagagagtgggagaactctgttagctctagctgaact

SEQ ID NO: 896394 - DNA, 607 bp, Homo sapiens
caaacaacagcaacaagcttttcatgagttgaaagaaaaactcaggtcggccccagccctggggctacctgacctgacgaaagtgcacactctatgtgccaaaaaaaaaaaaaaaaaaaaagggccatctataccaattctaagttaattyagactaaacaaggtcttactcatagcaaaggataattgaaatcccaaacttacaaggttttcaacaaaagtaaagtttgctaaaagttaacagtgtaacatgtattatagtaacttctaatcttgtggccttagacagtctagtccacagatataaagaaagttcacttaaaaaaaaaaaaaaaagaatggttatcttcaaaaaaaaaaaatggcagttggagttttaacccagactgtagggctctggccaaggccagtggcctatctctcaaaacaactagatggggtttccaaaggctggcccccatatctaagggccctggcagcaacggccctgttagcacaagaagcagataagctaactcttaggcaaaacctaaacataaagtcccccccatgctgtggtgactttaatcagtaccaaaggacatcattagctaatgaatgctagact

SEQ ID NO: 896395 - DNA, 656 bp, Homo sapiens
tgcttcctgaaaattcaaagtctctgaaaattctgttttaaaatatgtgctggaggtggggagacctgattccctgcctagtgcttccttcgttttcatggattctttattaagcagatattacttcttcataataaaatcgtatatgaaacaatgacttgatttctttatatgaaacatactttgtacatctaaaaatgttgttgaaatcatctgagcctctgagcaagagcttcgcctttgactctgaagccagtgctgtcagcartttctcccccttaatgtaatgctgtatgtgactcaatatgaactaagcagggggtgggaggtacagaccaccccagtaatccaggctttctctggaattctcccacttgtttatagtctgggcaatttgcctcctgctgctgcatgactcagactcggagagcttccaacctcgcaatgagccagcggctccccggagtcagacgctggcccttgtgtctcaggctcctggaaccttccgattaagcctccacttccatctcctccctggccacattcaggcagcaatgccccaaccccacacagagacacacgcccaatcagtgccctgtacaagcagggactgtgggtgagagggtacaaggaggtgttccaacccctcactgaga

SEQ ID NO: 896396 - DNA, 603 bp, Homo sapiens
ccatcctttatgcaagtcggtattaaatgcactttctaaatatgagtcacagtctgagcttatgcagaaaatcttccatggctattacccaggagcccagaaatatgacgtgagggtgacagaggagccacagccagcaggggccagacacaaggatcaaagtgcacctagtcacccggcagtaattcatctgaagcattctttgcatattatgggtctgactttttaaattacgtaaattgctcattagaagtgccttgtaattgccttmacctgcggtattgcgagaggtgtagattttaattattcttttttgatttgtaatgtggtttgactttttcagggtgatagtttggaaaaatacagatctgctctaattgttgtaccaagtgaaaatagatggctctgttgatcaacttccttgactttgtggtggagcgtacaaaggagtcttatagtttcccagcccttgttgatgactgaggggctttgcccgtggggcccggggaggatccctgtgagcctgtagtgctggtgccttgggctcagccagcccctcagatgacttgtgtggagccaggcagtgtgttcatgttggatgta

SEQ ID NO: 896397 - DNA, 603 bp, Homo sapiens
ccatcctttatgcaagtcggtattaaatgcactttctaaatatgagtcacagtctgagcttatgcagaaaatcttccatggctattacccaggagcccagaaatatgacgtgagggtgacagaggagccacagccagcaggggccagacacaaggatcaaagtgcacctagtcacccggcagtaattcatctgaagcattctttgcatattatgggtctgactttttaaattacgtaaattgctcattagaagtgccttgtaattgccttcmcctgcggtattgcgagaggtgtagattttaattattcttttttgatttgtaatgtggtttgactttttcagggtgatagtttggaaaaatacagatctgctctaattgttgtaccaagtgaaaatagatggctctgttgatcaacttccttgactttgtggtggagcgtacaaaggagtcttatagtttcccagcccttgttgatgactgaggggctttgcccgtggggcccggggaggatccctgtgagcctgtagtgctggtgccttgggctcagccagcccctcagatgacttgtgtggagccaggcagtgtgttcatgttggatgta

SEQ ID NO: 896398 - DNA, 528 bp, Homo sapiens
cttgtgccaaatttttgaagtttttgatgattatttactcaaatattttatctgtatcacaatccttttcatcttcttctaatattccaataacacagatattaggccttttggtatcatctcatagttccctaggctctgctcattttttwaaatcttttttattctctcttattcagattggataatttttattcaagctcactttttcctgtaatcaccatttggctctgtagcccactcagtgagttttctgtttgggttatggtaattttcagttctaaaatttccatttggttctttatattctctacttattttctgaaacatttcatttttccatttgtttttagagtgtttacccttacttcttggaacatttctataatagctgcttttaagtctttgccagataattctaccatctatgtatctatttctatgaaagttgagttttttttttctagttgttattatgccagccaattttggattttattctgtgcattttgaatattatgtgatgag

SEQ ID NO: 896399 - DNA, 634 bp, Homo sapiens
cttcagagatattctctagggttcaagaggaatggtttcctccagagagatccatgcatgtacccaggtttgataaacatcgggaaaaaggcaatcgtcatcatagctaccttttactcagtgctcaccacgtggcaggctctcttctccatggaaccctcagaaagagcccgggaggtgggtgccggtatcacctccactctgcagatgagcagactgaggaaggagaagccagcaatggcagggtggggatttgggcagggcggcctgacccatagctccttcttaaccttgggaccatasttcttccctctggcatcctgggactcctgttctcacctttctcatcccctccttcctcctcacaagtggaactggggtgaggagctccctcactgcacagatttccttatggagaggcaagacctgactccagccttgtgcttacgactgaccatggcttaaagggctctccctgctggggacgcatttcctttccctgcttggcagtagccatgcagggctgattagagcctctgccaagggaccacagctaacatggacatttgatctcgcttcctccggaacatagagcaagcccacagcaagggtcagtcatcctggctcccgagga

SEQ ID NO: 896400 - DNA, 634 bp, Homo sapiens
cttcagagatattctctagggttcaagaggaatggtttcctccagagagatccatgcatgtacccaggtttgataaacatcgggaaaaaggcaatcgtcatcatagctaccttttactcagtgctcaccacgtggcaggctctcttctccatggaaccctcagaaagagcccgggaggtgggtgccggtatcacctccactctgcagatgagcagactgaggaaggagaagccagcaatggcagggtggggatttgggcagggcggcctgacccatagctccttcttaaccttgggaccatacttcttccctctggcatcctgggactcctgttctcacctttctcatcccctccttcctcctcacaagtggaactggggtgaggagctccctcactgcacagatttccttatggagaggcaagacctgactccagccttgtgcttacgactgaccatggcttaaagggctctccctgctggggacgcrtttcctttccctgcttggcagtagccatgcagggctgattagagcctctgccaagggaccacagctaacatggacatttgatctcgcttcctccggaacatagagcaagcccacagcaagggtcagtcatcctggctcccgagga

SEQ ID NO: 896401 - DNA, 602 bp, Homo sapiens
caaccttagtgccccagggctctggtgttttccctaatcagtacctcagggctctccaagagctgttgtagaaaatgcctctggaggtctcaagaacaaaccccctccaggatcagaaaagcctggggcggtactccccacagggccattgtctggctgtgcaacagtaggtaggtgactaacccactctgtgcctcaacttcctcagccggtaacagggtggtaacagcacctgcctcctgccacgctgaggacactgagatgagcaagtgcagtgcttggtcaccgccccgtcagtgtgactttttttcatcatccaccctcatctcctggcaggcagggaccccaagggtggaggattaccttgctgamacaggaacaaacattccctgcatctgtgactttgcaaacgtatcaggaaccacaaggacctggaattgttccaagtgctacagtgagtgagtcataaaaagcagacataattctcctaacacctgcctgctgtgtgctctgcacgtgccaggaggggctggaggaagaggagtgtctactcaccaaggaggggccagtgtctctctgtttcatgagctgggagttttgaa

SEQ ID NO: 896402 - DNA, 602 bp, Homo sapiens
caaccttagtgccccagggctctggtgttttccctaatcagtacctcagggctctccaagagctgttgtagaaaatgcctctggaggtctcaagaacaaaccccctccaggatcagaaaagcctggggcggtactccccacagggccattgtctggctgtgcaacagtaggtaggtgactaacccactctgtgcctcaacttcctcagccggtaacagggtggtaacagcacctgcctcctgccacgctgaggacactgagatgagcaagtgcagtgcttggtcaccgccccgtcagtgtgactttttttcatcatccaccctcatctcctggcaggcagggaccccaagggtggaggattaccttgctgaaacaggaacaaacattccctgcatctgtgactttgcaaacgtatcaggaaccacaaggacctggaattgttccaagtgctacagtgagtgrgtcataaaaagcagacataattctcctaacacctgcctgctgtgtgctctgcacgtgccaggaggggctggaggaagaggagtgtctactcaccaaggaggggccagtgtctctctgtttcatgagctgggagttttgaa

SEQ ID NO: 896403 - DNA, 618 bp, Homo sapiens
acataaatgatttagtatgggagttggcccatgcaattatggaggctgagaagtctcatgttatgccatctgcaagctggagaacaggaaagcgggtggggttgtccaatctgagtctgaagagctgagaaccaggaggacactagtgtaagtcccrgagcatgaaggcccaagaacaaggatccctgatttccaagggcaatggaggatggacatcctggcccaagaagcgacaacgagagaatttacccttcctctgcctttttgtgctattcagacccgtgacagattggatgacacctgttcccatgggtgaaggcagatcttttttactcattctacccattcaaatgcttgtctcttcccaaaacaccctcagagacacacccagaaataatgctctaccagctatctgggtatcccttaacccagtcaagtgggaggtgatgcataaaattaaccgtcacaccatgtaaggtgatattatttacaggctctggggatcaggtcatagacatatgataggcattattctgctaaccacaggttgccagtaaagaggaagacatccagcccaggaagaagaggaagttgggcaaaggagtgaggatctgttcc

SEQ ID NO: 896404 - DNA, 589 bp, Homo sapiens
attgtacaattgagacccaaggcaactagctaacaatgctatgacagaaacaaaactacacattgaatattaactttaaaagtaaatggccaaaatgctccacataaaatatatatactatagatctaggaaaactggattaaaagaaccaagacccaatcatcttttgcctacaagagaacgacttaatggttaaagcacctacggactcaaagtaaagggatggaaaacatgtaccatgaaaatgtaaaacaaaagcaaataggagtagccatccttattrtatcagataaaacaaactttaaaccaacacaattttttaaaaagactaaaaagggtattatgtaattataaagggttcaatacaacaagcagatttaaccatcctaaatatatgtgtacccaacaccagggcatgcagattcataaaacaaatactgccagacctaagagaagaaatggacagcaatacagtagtagtcagggacttcagcactcccctgacataactagagaagtcatggaggtagaaagtcaacaaactctggacttaaactgaactctagaccaaatggacctaatagacatt

SEQ ID NO: 896405 - DNA, 579 bp, Homo sapiens
agtgcacgacatatagaaagcaacactttcttcccatcctataaataaccagtgtggtttcttgtatatcccattgcaggatagtctctctatatatgaaacaactctatcctttgccttttgcatttaacaacgctgtgtatcttgtaaattatataccattatcagcctaccttcatctattcactcaaccatatattgttaaccatttttaggttgcttccctgttacttaaaaaattagaaccaaggcagggcgcagtggctcatgcctgtwattccagcactttgggagtccgaggtgggtggatcacgaggtcaggagattgagaccatcctggctaacatggtgaaaccccttctccactaaaaacacaaaaaaattagccggacgtggtggtgggcacctgtagtcccagctactcaggaagctgaggcaggagaagggcgtgaacctgggaggcagagcttgcaatgagccaagagatcgcaccactgcactccagcctgggcaacagagtgagactctgtctcaaaaaaaaaaaaaaaaaaaaaaaaattagaaccaaaaacctacctt

SEQ ID NO: 896406 - DNA, 588 bp, Homo sapiens
acataacatttaccactttaaccattttccactgtaccattcagtgacattaagtatgctcatattgttgttcgaccataactactattattctgcagaacttttttgactttccaaactgaaactctgtacccattaaacagtaactccctccctctcccctaaccctggtaactrttgttacactttctgtctgtatggatttgactactccagggacctcatacaagtaccaatacatacaagtatttgtccttttgtggcagacatatttcacttagcttgtcatcttcagggttcatccatgttgtagcaggtatgaaactatccttcctttttaaggctaaataatattccactgtattccatattttgtgtagctgctcatctgtcaatggaaatctgagttgttctctaccttttggctatgtgaacaatcctgctatgaacataggtgtacacatgtttgttcagttctctgatttaatttctttggggtatatatccaaaagtggaatggctggaccatgtggcaactctgtgcttaattttttgtggaaccattataccattttccatagcagcagc

SEQ ID NO: 896407 - DNA, 596 bp, Homo sapiens
ctgccaaaagggacaaggccttgtccctccaaaaatgttagttaaaccagtaagtcttttctttcctgcccccatagattaaaaatttggaagataaaagacaagaaacctttgctttttgccctccatagcttttctctgaagcagtgagcatataatagtctcccagggaggctctgacatactctccagccacacacataatttaaatggttataagtgctttgctagcagaaatacggggtgttctgaaagtatgcacaggccttaaagagtttcagcaagaaaatggagaaagacattgggattggggtggatggcacraagcaaatgtaaggaggtcaaggcaggagtgttaagacagaaggacaataaggttgcaaagactgtggagtaaagtgagaccctgcctgtgatctctatcacatcattagctaacttgacactaaataatgctaaactgtccctttttctaaggatcctttcctcaccaaagacccctactctagacgtgcctggcagatggtaggcctcaccctataccctgggtcagttactttcaaagtatatgacgtagaaaccaacaacagttaaaa

SEQ ID NO: 896408 - DNA, 619 bp, Homo sapiens
aaatattaggacaagtatcaagaggaaatgggcatgccaaggtagggtcaatttgggatcccctgccatgaaattagatttcctagtctagccaggtgcggtggctcatgcctgcaatcccagcactttaggaggccaaagcagatggatcacctgaggtcaggagttcgagaccagcctggccaacatggtgaaaccctgtctctactaaaaatacaaaaattagctggtcgtggtggcgggtgcctgtaatctcagctcctcaggaggctgaggcaggagaattgcttgaacccaagaggcggaggttgcagtgagccgagatcgcgccattgcactccagcctgggtgacaagagagaaactctgtctcaaaaaaaaaaaaaaaaaatttcctagtctasaaaagtgagtgtgcacaggcctgtggtataagtttattgactcagtgaccatgcaaggaaagtgcatgttggatgtatgaaaatggatatatttggatatatgtaggcattagctgcctacaagcctacgaacagagagaaagtgaacttgtttctttttttctttttattatgaaaaatttaaaacattacaaagagtaaggacataatatgata

SEQ ID NO: 896409 - DNA, 594 bp, Homo sapiens
ctttattaaccttgagccttaaatttctttttctacaatttttagaatataacctgaatagtagtggccacatataatgcttcccaggatgacattaaatcccatttctcccaggatggcattcatttgctcagaatgtataaccgaggatacacatacacacacacacacacacgcatgcactaaaacagaacttaagaccagcatggaataacagacttgctgtcctgagttgatatcattttattctaaagcagagaaatttgatggttttgatgttttgatgttttaggtagtccmtcatagctttgtgccaggtaagtgcatcatttgctttagactttatgaaatactagaaataccttatgggtcttcagttttttccttgtagatccttagatgtcccgggatttgaggctgaaacccattggtttacagaatggaaacaacggagtcactgcttgtacattatggtcatttcaggcactatggtaactgagttgaatctctgcaaagatgatccagataatcaacatatatttgcatttgaagatggatcataatccaagaataagtttgccacaatcaattaaa

SEQ ID NO: 896410 - DNA, 620 bp, Homo sapiens
cagagaactcatctgaaggtcaccaacatcaaataccaaaggtagataaatccataaagctggagagaaaccagcgcaaacctttgaaacctttgaaaaaaggttagacgaattgctaactaaaataagcagtttaaagaagaacataaatgaccagatggagctgaaaaacacagcacaagaacttcatgaagcatacacaagcatccatagccaaattgatcaagcagaagaaaggatakcacagattgaagatcaacttaatgaaataaagcgagatgacaagattagaggaaaaagaataaaaaggaatgaacaaagcctctaagaaagatggaactatgtgaaaagaccaaatctacatttgatttgtgtacctgaaagtgatggggagaatagaaccaagttagaaaacactctttaggatattatccaagagaccttccccaacatagtaagacaggccaactttaaaatataggaaatacagagaacaccacaaagatactcttcaagaaaagcgaccctaagacacacaatcttcagattcaccaaaattgaaatgaaggaaaaaatgtcaactgcagacagagagaaaggttgggttacccacagagcta

SEQ ID NO: 896411 - DNA, 595 bp, Homo sapiens
gtttattgatttttcaacctatacacatagcaaggaatattttattatgattttggatcattacacaactataaaattaaagacacagctgacagaaggtgataggaggaaattggtggagaaaagtgaaagaaaatataggaatactgttagcttctttttattaagctgagcaatctgaattttctgatatccaaccatttttcaactaaaattaggagtttcatattgttcaacaaaatgcataatgggcagatgagagatacttttaaatacagatgraacaagatgaactaaaataatataattaaaattttgaagagtgagtgtgacttaaattctcacttttcttgcaaaagagtaaataagtgacatcttaagctaataaaccaagaaattccaaaataagtaaattacttagagttaaggaagttactaccccaagaatagaaacagacatatttaaatgttgaggaataaaggagaaaacaggcattcaggatagtttattatgagcccttgtgaacaatggaattttattatttgtgtgtgtgtgtgtgtgtgtgttacacacacatattactttgataaaaat

SEQ ID NO: 896412 - DNA, 564 bp, Homo sapiens
gtttatgtgatggattacatttattgatttgcgtatgtggaacctgccttgcatcccaaggatgaagcgaacttgatcgtggtagataagctttttgatttgctgctggatttggcttgccattattttattgaaaattctcacatcratgttcatcagggatatcggcctaaatttatgtttttttgttgtgtcactatcgggctttgtcatcaggatgatattggcctcataaaatgaattagggaggattccctctttttctactgatttaaacagtttcagaaggagtgataccagatcctctttgtacctctggtagaattaggctgtgaatctgtctggtcctggacttttttgcttggtaggctattaaatattgcctcaattcgagaacatattattggtctattcagagattcaacttcttccgggtttagtcttgggagggtgtatgtgtccaggaatttatctatttcttctagattttctagtttatttgcatagatgtgtttatactattctctggtggtagtttacaaactgtggaatttgtggtgatat

SEQ ID NO: 896413 - DNA, 612 bp, Homo sapiens
ccttgggcatgggacctgccaagccaggcacgagacggtatctcctggtctgttgcattgctgagaccatgggaaaagcagagtatttggtcaggagtgtaccgtttcttgaggtacagtctgtcacagcttcccttggctagaaaaggaaaatcccccaaccccttgtgcttcccaggtgaggtgatgccctgccctgcttcagttcaccctccatgggctgaacccactgtccaacaagtcccaatgagatgaaccaggtatctcagttggaaatgcagaaatcacccaccttctgcactgayctcactgtgagctgcagaccagagctgttcctattcagccatcttggaagtgtggacgaaaaaacctagtatttctatacaccaacaatagtcaagccaagagtcaaataaggaataaactcccattcacaattgccacaagaagaacaaaatacccaagaatacaggtaactaggaagctaaaagatgtctacaaagagaactaaaaaccgcttcttaaaaaaatcagagatgacacaaagaaatggaaaaacattttatgttcatggatagaaaaaatactatttttaaattaaaattgccatac

SEQ ID NO: 896414 - DNA, 612 bp, Homo sapiens
ccttgggcatgggacctgccaagccaggcacgagacggtatctcctggtctgttgcattgctgagaccatgggaaaagcagagtatttggtcaggagtgtaccgtttcttgaggtacagtctgtcacagcttcccttggctagaaaaggaaaatcccccaaccccttgtgcttcccaggtgaggtgatgccctgccctgcttcagttcaccctccatgggctgaacccactgtccaacaagtcccaatgagatgaaccaggtatctcagttggaaatgcagaaatcacccaccttctgcactgatctcactgkgagctgcagaccagagctgttcctattcagccatcttggaagtgtggacgaaaaaacctagtatttctatacaccaacaatagtcaagccaagagtcaaataaggaataaactcccattcacaattgccacaagaagaacaaaatacccaagaatacaggtaactaggaagctaaaagatgtctacaaagagaactaaaaaccgcttcttaaaaaaatcagagatgacacaaagaaatggaaaaacattttatgttcatggatagaaaaaatactatttttaaattaaaattgccatac

SEQ ID NO: 896415 - DNA, 600 bp, Homo sapiens
accaacagtgtaaaagtgctcctatttctctacatcctctccagcacctgttgcttcctgactttttaataatcgccattctaactggtgtgagatggtatctcattgtgcttttgatttgcatttctctgatggccagtgatgatgagcatttcttcatgtgtatgttgrcttcataaatgtcttcttttgagaagcgtctgttcatcttctttacccacttgttgatggggttgtttgtttttctcttgtaaatttgtttgagttcattgtagattctggatattagccctttgtcagatgagtagattgcaaaaattttctcccattctgtgggttgcctgttcactctgatggtagtttcttttgctgtgcagaagctctttagtttaattagatcccatttgttaattttggcttttcctgccattgcatttggtgttttagacatgaattccttgcccatgcctatgtcctgaatggtattgcctaggttttcttgtattgtttttatggttttaggtctaacgtttaagtctttaatccatcttgaattgatttttgtataaggtgtaaggaagggatccagtttcagctttc

SEQ ID NO: 896416 - DNA, 603 bp, Homo sapiens
cagtagtcaatcaggaacagtttgttcagttccatgtagttgagctgttttgagtgagtttcttaatcctgagttctaatttgattgcactgtggtctgagggacagtttcttataatttctattcttttacatttgctgaggagtgctttacttccaactatgtggtcagttttggaataagtgtgttgtggtgctgagaagaatgtatattctgttgatttgaggtggagagttctgtagatgtctattaggtccacttgttgcagagctgagttcaattcctggatatccttgttaactttctgtctcattgatctgtctaatgttgacagtggggtgttwaagtcttctattattattgtgtgggaatctaagtctctttgtatgtctctaagacttgctttatgaatctgggtgctcctgtattggatgcatatacatttaacacagttagctcttcttgttgaattgattcctttaccattatgtaatggtcttctttgtctgttttgatctttgtttattttgaactttaaagtctgttttattatagaccaggattgcaacccctgcctttttttgttttccatttgcttggtag

SEQ ID NO: 896417 - DNA, 603 bp, Homo sapiens
cagtagtcaatcaggaacagtttgttcagttccatgtagttgagctgttttgagtgagtttcttaatcctgagttctaatttgattgcactgtggtctgagggacagtttcttataatttctattcttttacatttgctgaggagtgctttacttccaactatgtggtcagttttggaataagtgtgttgtggtgctgagaagaatgtatattctgttgatttgaggtggagagttctgtagatgtctattaggtccacttgttgcagagctgagttcaattcctggatatccttgttaactttctgtctcattgatctgtctaatgttgacagtggggtgttaaagtcttctattattattgtgtgggaatctaagtctctttgtatgtctctaagacttgctttatgaatctgggtgctcctgtattggatgcatatacatttaacacagttagctyttcttgttgaattgattcctttaccattatgtaatggtcttctttgtctgttttgatctttgtttattttgaactttaaagtctgttttattatagaccaggattgcaacccctgcctttttttgttttccatttgcttggtag

SEQ ID NO: 896418 - DNA, 648 bp, Homo sapiens
aaaccttaataaaaggttacaggaactgctaactagaataaacagttcagagaagagcataaatgacctgatggagctgaaaaacacagcacaaaatattcatgagccatacataagaaatgccgaattgaacaagtgaaagaaaggatatcagagatttaagatcaacttaatgaaataaagtgtgaacacaagattagagaaagaaggataaaaagaaatgaacaaagcctccaagaattatggggttatgtgaaaagaccaaacctacgtttgattggtgtacctgaaagtgacaggaagaatagaaccaagttagaagacactctttaggatattatccaagagaacttccccaacttaggaagacaggccaacattcaaattcargaaatacaaagaatgccacaaagatactactgtagaagagcaagcccaagacacataatcatcagattcaccaaggttgaatgaaggaaaaaatgttaagggcagccagagagaaaggttgggttaccaacaaagagaaactcatcatactaacagtggatctctctgcagaaacactgcaagccagaagagagtgggggccaatattcaacattcttaaagaaatgaattttcaacctagaatttcatatccagcca

SEQ ID NO: 896419 - DNA, 674 bp, Homo sapiens
agagtgggtgcctgggtcactgacatccatgtgtgcatttgcatagcagaggtgtcagcttgggcatggaggctgactagcatagggctggttgcctccttgttcatgtccatgacacagttaacaacagcacagggtggtagctaaaaaagtggctttaaataatattgcatccacatggaaaagaaaaaaacaaaggtttttgctggtgatgaatgatatgatttggatatttgcatcctcaaaatttcakgttgaaatgtaactcccagtgttggaggtgggctggtgataagtgtttcaggcatggggctggatttcttatgaatgtcttggtgctgtgctcatggtagtgagtgaatgtgttcacttcagagctggtcatttaaaggattctgaatctttctcctttcccccatgcttactgtataaccatgtgacatgccagctcccaatttgacttttgattgtatgctccctgaagccttcaccagaagcagatgcaggcactattcttcttggacagcctgcagagctgtgagccaaataaacctcttttgtaaataaattgcccagcctcaggtatttctttgtagcaatacaaaacatagtaacacagaaaatcggtacttagaagtgttgtgctattacaaagaaagttaaaaatgtaaaag

SEQ ID NO: 896420 - DNA, 674 bp, Homo sapiens
agagtgggtgcctgggtcactgacatccatgtgtgcatttgcatagcagaggtgtcagcttgggcatggaggctgactagcatagggctggttgcctccttgttcatgtccatgacacagttaacaacagcacagggtggtagctaaaaaagtggctttaaataatattgcatccacatggaaaagaaaaaaacaaaggtttttgctggtgatgaatgatatgatttggatatttgcatcctcaaaatttcaggttgaaatgtaactcccagtgttggaggtgggctggtgataagtgtttcaggcatggggctggatttcttatgaatgtcttggtgctgtgctcatgktagtgagtgaatgtgttcacttcagagctggtcatttaaaggattctgaatctttctcctttcccccatgcttactgtataaccatgtgacatgccagctcccaatttgacttttgattgtatgctccctgaagccttcaccagaagcagatgcaggcactattcttcttggacagcctgcagagctgtgagccaaataaacctcttttgtaaataaattgcccagcctcaggtatttctttgtagcaatacaaaacatagtaacacagaaaatcggtacttagaagtgttgtgctattacaaagaaagttaaaaatgtaaaag

SEQ ID NO: 896421 - DNA, 665 bp, Homo sapiens
ctgcttttcataaatgcatacagcatttgacccttcctgtttcagtgaagcggtaatagaaaacataacatattagtctacggccatacaaccctgaagatgcccaatcttgtctgatctcagaagctaagcagggtcaggcctggttagtatttggaggggagaaaatataaaatatcagacatattttgataatttaatttaaataattactatagtttatttgataagatttcaacatgatcttgtttagttattttcccctcccctctcagtcaacagttaactatggcagtgcttcatataatcgaggatggcctttattatttaaacttgctgacattttctaccttrgaaaaaacgtgaccttttctaatggcattctatattattggggctggagaattgcatttatgcaacacactgacctggcttcttcacatttacttctttggtaaaattctatgaactgaggagttggtttattttcatcagttgttatttttgcagggacccttatgaaaactacttgaatcacacagttggttcttaaaaattagcataatgcatacttttacttttattcaaagctagaaatcagacttatttaaaaaaaactaaaaacttgccgctttctttcctaaggtaaatttagtaggttcata

SEQ ID NO: 896422 - DNA, 542 bp, Homo sapiens
gtgaacaggcaaactacagaatgggataaaattgttgcaatatactcatctgacaaaaggctaatatccagaatctacaatgaactcaaacaaatttacaaggaaaaaacaacctcatcaacaagtgggcgaagaatatgaacagacacttctcaaaagaaracatttatgcagcgaaaaaacacatgaaaaaatgctcatcatcactggtcaacagacaaatgcaaatcaaaaccaaaatgagataccatctcacaccagttagaatggggatcattacaaagtcaggaaacaacaggtgctggagagtatgtggagaaataggaacacttttacactgttggtgggactgtaaactagttcaaccattgtggaagtcagtgtggcgcttcctcagggagctaggactagaaataccatttgacccagccatcccattactgggtatatacccaaaggattataaaatatgctgctatgaagacacatgcacacgcatatttattgcagcactattcacaatagcaaagacttggaaccaa

SEQ ID NO: 896423 - DNA, 542 bp, Homo sapiens
gtgaacaggcaaactacagaatgggataaaattgttgcaatatactcatctgacaaaaggctaatatccagaatctacaatgaactcaaacaaatttacaaggaaaaaacaacctcatcaacaagtgggcgaagaatatgaacagacacttctcaaaagaagacatttatgcagcgaaaaaacacatgaaaaaatgctcatcatcactggtcaacagacaaatgcaaatcaaaaccaaaatgagataccatctcacaccagttagaatggggatcattacaaagtmaggaaacaacaggtgctggagagtatgtggagaaataggaacacttttacactgttggtgggactgtaaactagttcaaccattgtggaagtcagtgtggcgcttcctcagggagctaggactagaaataccatttgacccagccatcccattactgggtatatacccaaaggattataaaatatgctgctatgaagacacatgcacacgcatatttattgcagcactattcacaatagcaaagacttggaaccaa

SEQ ID NO: 896424 - DNA, 695 bp, Homo sapiens
agaactgactttgtataatttcattcgtccaaaatatgttgagctgtgttttaaggcctaatatatcatttatcctggagaatgttttatgtgcacttgagaagaacatgtattcttttgtggttcagttggttggtctatgaatttctgttatgtcttattgctttttagtatttttatgtcctctatttccattttgcaatttcgkgtacttgtttaatctattattgtaagtgggatattataagtattcgtctgttattagagaactgtatatttgtcccttcaactctgtcaatgtttttctttatatgttttggagctctcttgttaggtgttttgggtttagattgtttttcttattttaatttcttaaggtacaaatttagattattgatgtgagatcttcctgtttagatacagacatataaactacaaattttctttgagcatttctttacctgcagcccaaaagattttatacgttgtgttttcatttttatttttctcaaaatattttctaattttccttgtaatttctttattctccctttgaattttaagagttttctttaatttctacatatttttggatttctcatttttaaaatcaatttatagtttcattccattataattggacaatttactttgcataagttcagtaattttaattttttgaggcttgttttacg

SEQ ID NO: 896425 - DNA, 553 bp, Homo sapiens
tgtacatactcaagtttaaaattgttgtgaattctttatgagtttaccccattataaaacattttttgtcactattaacagatgtttttgcttaaagtctattttatctgatataagtatagtatagctaaaagcaaaatctcccaacacagaaatcttctccatgaaagtagtaaaaaagaaaatactttaattattgtttaagcattaaagcagaatgtcatgcatatcacaggcaatccactgagaacaaaaacagaaaagaatctcaactcctgatatagccaagcagatattaatacaacctgctttatacatgttttcaatataaaaaataataacaagtcttcaagtaagaggmcttgacatcaccttttgtaacatatagctaatcataactttacaatggaaactttagtggaccactcatgttagctaattagcttttatacagaaaaaagaaactcttttttatatctttacaacaggacgtattttgcatactgaagcaaggtgcccacagaagttaggctcttacaatctcacaaaaact

SEQ ID NO: 896426 - DNA, 538 bp, Homo sapiens
aaacaaataaaaacacatctcatgcccatggatgggtagaatcaatattgtgaaaatgaccatatggccaaaagcaatctaaaaattcagtgcaattcccatgaaagtgccatcatcattctttacaaaattagataaaaacaatcctaaaattcacatggaaccaaagagagcccacataaccaaagcagtattaagcaaagagaacaaatctggaggcatcacattacctgacttcaaacgatactrtaaggcactagttactaaaacagtatggtactagtgtaaaaataggcacattgacaaatagaacagaacagagaatccagaaattaagccaattatttacagccaacttgatccttgactaagcaaacaaaaacataaagtggagaaataacaccctattcaacaactggtgctggaataattggcaagccacatgtagaagaataaaactgtatcctcatctcttactttttgcaacaatcaactcaagatggatcaagggctgaaatctaagatctgaaaccataaa

SEQ ID NO: 896427 - DNA, 584 bp, Homo sapiens
aaccacagtgtgataccacttactcctgcaagaagggccataataaaaaataaaaaaatatatatatgcttgcctggatgtcatgaaaagggaacacttttacaatactgataggaatttaagctagtacaatcactatagaaaacagtgtggggattccttaaagaactaaaagtagcaataccatttgattcagcctttccactattgggtatctactcagaggaaaagaagtcatacgaaaaagatatttgcacacacatgtttatagcagcacaatttgtaattgcagaaatatggaaccagcccaaatgcccatcaatcaacgaatggataaagaaattgtggtgtatatatacacatcatggaatgctactcagccatwaaaaaaaccaatggtcttcatagaaacctggatggaattggagaccattattctaagcgaagtggctcaggaatggaaaaccaaacatcctatgtgcttactcataagtgggagctaagctatgaagatgcaaaggcataagaatgataaaatggactttgggtactctgggaaaagggtgggatgggggtgagagata

SEQ ID NO: 896428 - DNA, 584 bp, Homo sapiens
aaccacagtgtgataccacttactcctgcaagaagggccataataaaaaataaaaaaatatatatatgcttgcctggatgtcatgaaaagggaacacttttacaatactgataggaatttaagctagtacaatcactatagaaaacagtgtggggattccttaaagaactaaaagtagcaataccatttgattcagcctttccactattgggtatctactcagaggaaaagaagtcatacgaaaaagatatttgcacacacatgtttatagcagcacaatttgtaattgcagaaatatggaaccagcccaaatgcccatcaatcaacgaatggataaagaaattgtggtgtatatatacacatcatggaatgctactcagccataaaaaaaaccaatggtcttcatagmaacctggatggaattggagaccattattctaagcgaagtggctcaggaatggaaaaccaaacatcctatgtgcttactcataagtgggagctaagctatgaagatgcaaaggcataagaatgataaaatggactttgggtactctgggaaaagggtgggatgggggtgagagata

SEQ ID NO: 896429 - DNA, 646 bp, Homo sapiens
ctagcttcagtaaccaatttgatcaactggaagaaagggtatcattgattaaagatcaaatgaatgaaatgaagtgagaagagaagtttagagaaaaaaagagtaaaaagaaacgaacaaagcctccaagaaatatgggactatgtgaaaaaaccaaatctacgtctgactggtgtacctgaaagtgactgagagaatggaaccaaggtggaaaacactctgcaggatattatccaggagaacttcccaaacctagcaaggcaggccaacattcaaattcaggaaatacagagaacaccacaaagatactcctcgagaagagcaactccaagacacataattgtcagattcaccaaagttgaaatgaaggaaaaaatgtyaagggcagccagagagaaaggtcgggttacccacaaagggaagcccatcagactaacagtggatctcttggcagaaactctacaagccagaagagagtgagggccaatattcaacattcttaaagaaaagaattttcaacccagattttcatatccagccaaactaagcttcataagtgaaggagaaataaaatactttacagacaagcaaatgctgagagattttgtcaccatcaggcctgccctacaagagctcctgaaggaag

SEQ ID NO: 896430 - DNA, 641 bp, Homo sapiens
gggtgaaaatatttatgtcttctgtagcgcagggccaagggtggggggaactgaataaaaggcatctaaagctacgtgaaatgtttggatatagatgggcaaatgctagagtataaggaacaaacagaaagatggtttggtttgtggcatttctgtgattatggataatttttttcttcttaaatttagaatgtttggctgggcgtggtggctcacgcctgtaatcccagcactttgggaggctgaggcaggcggaactagggagttcaagaccagcctgaccaacatggagaaaccctgtctctactaaaaatacaaaaaaaattagtcgggcgtggtggtggcttrtaatcccagctactcaggaggctaaggcaagagagaattgcttgaacctgggaggcggaggttgtgatgagccgagatagcgccattgcactccagcctgggcaacaagagcggaactccatctcaaaaaaaaaaaaatttagaatgctcttggctttgctctgatgtttgaaaaatatcaatagcaaatccctaatgattaggatctattgacttctaaaaaacctcctgtatttccctaaaattttccccctttcaagttctctgcccaaaggtcagcgtttccttgcaaa

SEQ ID NO: 896431 - DNA, 631 bp, Homo sapiens
cttagaattcttgtaccaccttgaggggagtataccctgaaacctaaatgtgaaagtgatcatagatgggctagtatgctagagacactaagaggcgtggaaacccaggaagcagaagctggaagcgggtaagggagaggtctcacagaagagggctaggatagtctggctgttataatacaaggggccaaggagagcatcagatgcactgatcagtcagggaattcaggaagcatgagagtctctggctgccaatattctttctgtctaccctgtccccagtctaatctgtaaaaattcagggttcccccacttttcattgaggtcttcagcaggaatcatgctatctattaaaccaaaaagctcctctagaacatccttcatcctaaataacaaggcatgggagttatcttctcaaatactaggctaactcactgttttgcctcagtttcctcttggtgaggtagtggactacacatcrtttttaaggtccctgccaatcctaatcaatcatctatgcttctgtgaataagggatggtggcaccatgtcttcatgtaggccctgctttcacagcttaaagatttcatgggaggaaactgcagtgcttgttctatgctttgtttgttttt

SEQ ID NO: 896432 - DNA, 667 bp, Homo sapiens
tccattttcaacatcaacaatttccaacctcccaaattaattagtaaactgaaaaacattctgaaactgccagagaactatacttagagcagctacaaattactaactcattttaattcatttgaaggagtattaaagatatactctacagcaaggacaaaatcagtcgcctatatgtactgggccaatctattctcaactcttccagtgattaattggatctgtttgcaacagatctggccagggagagtggggtgaccagagcccaggaaacagcaaagttcgacctctttctttataaaagctagctacatataaggctcagtctttcataaraggtcacatttatatcatgcttaaaagcgtgccgatggctttcactttcatcatctcattcgatttccccacaataatcttgtgaataagaagcacttaacacagtgcccattaagagtgcaatcaaaggccgggcaggaaccggtcatcccatttcacagatgagaaatataggttcagagaaataaaagtaagcgactgaagctctctccagggatcccagaggggacagggctcagtctgcccatctgtgaaatgtgtgcgtgggttgagatgattatctctgaggtgtggtgcattccatgacctccgagaagctctacacggccac

SEQ ID NO: 896433 - DNA, 591 bp, Homo sapiens
tgctcaaggaaataagagaggacacaaacaaatagaaaaacattccattctcagggataggaagaatcaatatcttgaaaatggccatactgcccaaagtaatttttagattcagtgctattcccatcaaactaccattgacattcttcacagaattagaaaaaaaaaaaaacaggccgggcgcagtggctcaagcctgtaatcacagcactttgggaggccgagacgggcggatcatgaggtcaggagatcragaccatcctggctaacacgatgaaacactgtctctactaaaaatacaaaaaattagctgggcgcggtggcgggtgcctgtagtcccagctactcaggaggctgaggcaggagaatggcatgaacctgggaggtggagcttgcagggagccgagatcgcgccactgcactccaggctgggcaacagagcaagactccgtctaaaaaaaaaaaaaaaaacattttaaattacatgtggaaccgaaaaagaggccatatagccaagacaatcctaagcaaaaagaacaaagctgcaggtatcacactacctaacttcaaattatactacaaggttacagt

SEQ ID NO: 896434 - DNA, 591 bp, Homo sapiens
tgctcaaggaaataagagaggacacaaacaaatagaaaaacattccattctcagggataggaagaatcaatatcttgaaaatggccatactgcccaaagtaatttttagattcagtgctattcccatcaaactaccattgacattcttcacagaattagaaaaaaaaaaaaacaggccgggcgcagtggctcaagcctgtaatcacagcactttgggaggccgagacgggcggatcatgaggtcaggagatcgagaccatcctggctaacacgatgaaacactgtctctactaaaaatacaaaaaattagctgggcgcggtggcrggtgcctgtagtcccagctactcaggaggctgaggcaggagaatggcatgaacctgggaggtggagcttgcagggagccgagatcgcgccactgcactccaggctgggcaacagagcaagactccgtctaaaaaaaaaaaaaaaaacattttaaattacatgtggaaccgaaaaagaggccatatagccaagacaatcctaagcaaaaagaacaaagctgcaggtatcacactacctaacttcaaattatactacaaggttacagt

SEQ ID NO: 896435 - DNA, 577 bp, Homo sapiens
aataacttgcctaaggttacacagctactaagcccatctctaccaacccttgattaaatagaattgatttgcttatagtactgtcttcaaaccagacagatttatataaaatataaaattctaggctgggtgccgtggctcacatctgtaatcccagcactttgggaggatgaggcaggggatcacctgaggtcgggagttcaagaccagcctggccaacatgatgaaaccccatctctactaaaaatacaaaaaaaaaaaaaaaaaattagccaggcatggtcgtgggtkcctgtaatctcagctactcagggggctgaggcaggagaattgcttgaacccaggaggaagaggttgcagtgagttgagattgcaccactgcactccagcctgggcaacaagagcaaaactccatctcaaaataaaaaaattatagccaagaaataatttataatataaaagcaaagtataccaggatagtgatatgcacatcatgctattattcacaatggactgaagagattagagaaagcaaagcagtatatgaagagctctgtagtctaacattaaataaatt

SEQ ID NO: 896436 - DNA, 600 bp, Homo sapiens
cctgtctcaagggaaaaaaaaaaaaaaaaaaaaaaaaaaagtcgccgggcgctgtggctcacgcctttaatcccagcattttgggaggttgaggcaggtggctcacctgagctcaggggtttgagaccaggatgaccaatatggtgaaaccctgtctctactaaaaaatacaaaaattagccgggctatggtggctgacgcttgtaatctcagctaytcaggaggccgaggcaggagaatcacttgaacccaggagcggacgttgcagcgaccggagatcgtaccaccgcactccagcccgggcgagagggagaccctgtcttaaaaaaacaaaaaaagaagaagaagaaaaagctgtgtgttgtaacgtcctgttcacgaattcttatgcaaatgaggtgattaataaaatagtgtgtaggactggtggcgattctagatgacgtcatatacacgtttgtccaatccaaagaagcatgtttcataacagcgattccattggttgaaataaaactgtaatttgagccaatggcacagctttattttcgcgcccagtattgactataagtagtggagctctggtgaacttctctcggctgt

SEQ ID NO: 896437 - DNA, 590 bp, Homo sapiens
ccagcaatccaaaggctcttttcagagccactcacgcttccagagaaagagcctgtgcattttgcttgtagtcttttgggtggactccggccggcctccattaggagggaagacggcgggaaaaggtaagctaagctccctaggctttttgcgtgtgagtatagacgctccatcagacaaatttagcttgggttcttagatacccttggggaaaaaggcttgcagttgtgctttaagctataattacaagtttgctttcggttttcggttactctttccttttgtgttkttttttttttttttttttaaatggagtcttggctctgtcgcccaggatagagtgcagtgccgcgatctcggctcactgtaagctccgtctcccgggttcaaccaattctgcttcggcctcctaagtagctgggattacaggcgcccgccaccgtgcccgactaattattgcatttttagtagagacggagttttaccgtcttgaccaggctagtctcgaactcctgacttcgtgatccacccatctcggcctcccaaaatgttgggatatcaggcgtgagccatcgcgcgcggccgggtta

SEQ ID NO: 896438 - DNA, 645 bp, Homo sapiens
tacgtagggccgggggaattcaggtgcgtctgcggggcccagggcacccagggcaggcggggactgagacgactgagggttgagggacaaggaggttgggactggggaggrgagacccgggacccgcccagaacgctttcgtggggttggagagggcaggacacagcctctctgggcccggtagtatgcgaagacacgcataacgcaaaaggattcccgtcctggactttgggaattaaggccctgaacacattgagcaaaaagtagatctgtctgtacagacgtttctttccacgtctttcatagtaaggactttattaaaaagcaggcactcgaatcctaggtgggtagatgggaggctggggctggggatggggacgtcctctgttttctggttgtgcacattaaaaataactctctgctgcctactcctaaacgcagccggcaaaaatgagacgtcaactaagcgccgtttcagtcccagagccaggtcgtccatgggggttttcaagcgttttctcgatgactgatttttctagaagcgaatggattttattctcccaggtgtaaaggctacctcctgcttcacacccgggtaacataaaagacagcgctgggaccgaaactcgggtctcctgggtcctg

SEQ ID NO: 896439 - DNA, 614 bp, Homo sapiens
agagggctacagagagggagagttctgaagatctgcagaggttctttggcaattagaaagacttttagttgagttctatgtcccttgacataccctcatcatcgtgttgtttctgagcactttcatactttctggcactacaagattctccaggctcatcttgtatatttcctacccagtcctacaattcaccacttctccaaggagccctggttccttttattggaaaacagttttagaaaccaagatctgggcaatagatgtccttattggtaatgggatattgttgcctttaggccctctcagctgacagaccaacaaaatacatgcatgtgtgtttcatgtgtacatacataatatgtatacatattatatacacrcaaatatctataaatatatatccatttgtatctatattaagctaaatttgagttcatactgatatctccaattttaatccattaccacctgtatcattctagccttcttcccttgcttgtctataaaatttccctcccaaagtgagaagcctggctctcaccatctagcattcatttatttagttgttcaattccagtacccatgtagaggggtttcagaatttttaatccata

SEQ ID NO: 896440 - DNA, 627 bp, Homo sapiens
atcacagttacagtttattacagtgaaatttcagtaaaatagctttgaatatgcaatgggaaaagttaagtcaggtgaagtctaggaggaaccaggctctagcttctaggggtccccgcccagtgaactttcccagggacacacttaaatccccaagcaacagtgtgtggcaacacaggtgatgtgttaccaacttaggaagctcctctgagagttgacatccagagtttttggggtgatctgtcacatagagatgcaaggcttgtatgacctcaccaatttagaccacagcccccggtccactcttagaaccaaaaacaggcattcaccatgcatgataaaaagtatcttgtctaactggtgcagcagggcccaaggtttcaggaatwccgaaaaaaaaaaaaaaaaaaaaaaaaaaaactaaacaaaaacctaaacaaaacgaaacctttttgagggagaatattccaatgtacagcggttatctcccaggagtgtgttaaggactagttctgaaaacagtactttctttggaatgtcttgtgtttgaggaaaccaggtaagtggacgtaactctttcctgcccagttggctcccctggcctttggcctaggatatcttacagca

SEQ ID NO: 896441 - DNA, 633 bp, Homo sapiens
ggaaacttcctaagacattggcctgagcaaaaatttcttgagcaataccccaaaagcacaggtaaccaaagtaaaaatggacagatgggatcacatcaagttaaaaagcttctgcacaggcaggatgtggtggctcacacctgtaatcccagcaccgagggaggccaaagtgggcagatcacctgagttcaggagttcaagaccagcctgrctaacatggtgaagactcgtctctacaaatatacaaaaattagccaggcatgatggcaggtgtctgtaatcccagctacttggaaggctgaggtgggaaaatcacttgagccagggaggtggaggttgcaagcctgggtgacagaatgagactccgtctcaaaaacaaacaaacagacaaacaaaaggcttctgcacagctgaaggaaacaatcaacaaagtgaagacaatccacagaatgggagaaaatgtttgaaaaccacccatctgacaagggattaataaccagaataaataaggaactcaaataactctataggaaaaaaatctaataatccaataaaaaataggcaaaagatttgaataagcatttcttaaaagaagacatacaaatagcaaataggcatctgaaaatgtgctca

SEQ ID NO: 896442 - DNA, 620 bp, Homo sapiens
tatttttgcttttgttgccttcacatttggtgttacatccaaaaactcattgccaaggctgatatttagattttccaccatgtcttcttagagtttcaaagtttcgtgtctttcatttaagtatttaagccattttgagttgatttttgtttaaggtttaagataagggtccaatttattcttttgcttatggatattcaattacctagcaccatttaccatttgttgaagaaattagcttttcctcactggggattcttggcacactttttgtagatcagtgggtttatttttaggttatctattctgtttcattggtctatatatctgttttttttttcccaataccatactcttttaatttctgaaattttataatatattttgaaatcaggaagaagattactttggctattcagggtcatttgtaattctgtgtgaattttaaaatgttttmttttattttttctgtgaaaaatgccattggaattttgatagagattgcaatgcatctgtgggttgctttgggtagtatggatgttttattaatattaattcttctaatttatgaatatgggctatctttctatttatttctgtcttcaatttttatcaatacg

SEQ ID NO: 896443 - DNA, 587 bp, Homo sapiens
gagcagctgtcttttacggtcgcagctgtagggatgaaataagccctgtctccagtagcgctcccaggcttattaggacaaggaaattcccgcctaataaattttggtcagactgattgcctgctttcaaaccctgtctcctgataagatgttatcaatgacaatgcgtgccccaaacttcattagcaattttaattttgcctcagtcctgtggtcctgtgatctcrccctgcctccatttaccttgtgatatcttattaccttgtgaagcatgtgatctctgtgacccacaccttatttgtacactccctccccttttgaaaatcactaataaaaacttgctggttttatggctcaggaggcatcacagaacctgccaagatgtgatgtctcccccagacacccagctttaaaatttctctcttttctactctgtccctttatttctcagacccaccaatacttagggaaaatagaaaagaacttacgtgaaatatcgggggtgaatttcaccctataaatttatttcttttatagaagttatgtaagtcatagtcaaagcctgcatgtggttctttaaaacaaaa

SEQ ID NO: 896444 - DNA, 663 bp, Homo sapiens
ttgtttatgaatacaattttgaatttcacataattttcatgtatccttatttttatgttgatttttttcaattgtttaaaaatgtgaagccctttgttaactggcaggttatatgaaaacaggtggtacttgagatttggattgcaggctgtattttgctatccttgatcaaagaaataggtaataaaataatgatttttaggtctgacaaatagagaagaggaaatagataatgatatttattcactgaactgttaatgcatttaatttaattatcacaaatattctgtaagggaaataatgtagttttattaggactcttttacagccgagtaaataagcttttctaamgtcccaagactagtgatatataattttcaaattatttttttgacaagtaaatgcactcattgggtaatgctaaaaatttgtctatgatgatcaatttattgagaactttatgctagattatttttaggtttgggatacacagaagaaaaatgtcatgacatcaatcttcaaagaactattaatctattggggaatgtggacatgtgaataacaaaaagagagtgacaaaataaatctttatatatttcaagaaatatttatcaaataactttcatgtaccagattctattttacatgttgaggaagtagttc

SEQ ID NO: 896445 - DNA, 610 bp, Homo sapiens
ctcttcttgccctggaagagtgtctgtatccaagcccagcacagccagtttcctcctttgagctgtgtgtggtggagctcccaaactcctcccacttccaggtgctttccttgccctctgtgttggtgatcttctcttcatgtacgtgtccagagctgaactccctgttttcgatggcctctggccaacatagaacacaccggggtgctgctcccctagaagtgttttaattgagataaaatgcctatagagagataggcacacatcttgaaagtacaatttcacaggttttatgacatgtctgcccttgaactcaacatttcaatcaaggtacagacatttcctctcgtgttaagtcatacaaaaaaaatttamcaaaaaaaaaaaaaaaaaaagaaaagaaaaagatacagacatttccctcataccagaaagttctttctcagccccttttagtcagtccgcaccccaaaagacaaccacttttctaatttctagcgtcatagatgagctttgcctgttctggaactcatataaatggaatcatagagcatgtactcttctaggtctgtctctgcacagtgtcatgtttttgaggcttctccacgtt

SEQ ID NO: 896446 - DNA, 622 bp, Homo sapiens
gttcccctggggccagggtgaatcttacaagccctctttcggctgggagaacatggggttcttcgggggtgaggaggcatggctcctggaaggctctctgtatttccccattctaaagttaaaaagaagcccaggtttgttctcaggcaccaggtttccagacattgcaaatgctgatccgtgtttttccctcttcccccagtgcccagcccacggacttcgacttcctcaaagtcatcggcaaagggaactacgggaaggtgagtgacttggtgagggtgggaagcctgggtcttcccttctgcagcctcttccagcccctgctgccacttgtatgtatgaagagagagcactcgcacctgcagacaaaagcaggggcaggcgggaggccttgtactgctgttgggaagtccaaagtcacctacagggcctcaaattcatgtttctkctcaggtcctactggccaagcgcaagtctgatggggcgttctatgcagtgaaggtactacagaaaaagtccatcttaaagaagaaagaggtaccagagctcgggcacaggcatttcttcttctgcttctcaagccgcagcctagggtggctttcaaagatgggtcccacctctg

SEQ ID NO: 896447 - DNA, 617 bp, Homo sapiens
tccagatcttttctaagaccactaaggtgatgactttatgagactgcaagaaccacagcattactgggcttgaggtgccccctaacacaaaaacagcttagaaaacaacacccaagtcctctcaaataactagaaagtctttccaagaatgataggtacaaataagctcatacagtgacgactrcaataaatacctaactcttcaatgccaaacaccaaagaacatctaatagcatcaacattatttaggaaaacatgacctcaccaaatgaactaagtaagccaccaggggccaatcccagagaaacacagatatatgaactttcaaacagagaattccatatacctgtgtggaggaaactcaaagaaattcaagataacaaagagaaggaattcagaattctatcaggtaaatttaacaaagagagtaatataactttttaaaatatcaagcagaaatgctggagttgaaaaatacattgacatactgaagaataaatcagagttcttcaatagcagaatgaatcaagcagaagaaaggattagtgagcttgaagacaggctatttgagaatacacagtcagagaagacaaaagaaaaaacaatgaagcaggcct

SEQ ID NO: 896448 - DNA, 497 bp, Homo sapiens
tgtcaattttgtttttgttgcaattgcttttgagatcttagtcataaattttttgccaaggctgatgtccagaacagtatttcgtaggttttcttctggagtttttattgttgtaggtcttacacttaagtttttaattcatcttgaggtaatttatgagtatggtgtaagaaagtagtctaatttcagtcttctgcatatggctagccagttatcccagcaccattaattgaatagggagtcctttccccattgtttgttattgtcaactttgtcaaagatccagtggttgtggatgtgtagctttatttcttggttctctattargttcttttggtctatgtgtctgatatggtatcattaggtctgttttttatctgtttttgtatactgttttggttaatgcagccttgttgtatagtttgaagttggggagtgtgatgcctctggctttgttctttttgctttggattgccttgatgacttgcactctgagt

SEQ ID NO: 896449 - DNA, 600 bp, Homo sapiens
ttatttctttaagttgacattcaatctcttatatcctttcttctgcttagtcgattcagctattgatacttgtgtgtgcttcataaagtttttttgctgggtttttcagctccatcgggtcatttatgttcttctctaaactggttattctagttagcagttcctgtggcctttttccaaggttcttagctttcttgcattgggttagaatatgctcctttagctcagaggtgtttgttattaactaccttctgaagcctacttccgtcaattcatcaaactaattctccatccagttttgtgccctaattggagacgagttgcaatcatttggaggagaagaggcattctgttttttggaattttccacatttttrtgctagtttttcctcatcttagtggatttatctacatttgatcttacatgctggtggcctttggatgaggcttttgagtgggggtcttttttgttgatgtttatgttgctttctctttgttagttttctttctcacagtctggcccctcttctgccggtctgctggagtttgctggatgttcactccagacgctgtttgcctgggtatcactagcagaggctg

SEQ ID NO: 896450 - DNA, 668 bp, Homo sapiens
tggtcctccctctgtgcccgaggagaatttatttcaggactcccatggatatcataattcacagacattcaagtcccttatgtaaaatgacctagtatttgcatataacctatgtacaacttccaggatactttaatctttagattacttataatacttaatacaatgtaaatgctatacaaatagttgctatacttatttttaaatttttttattgctgtattgttatttttattgttttttgctgaatgttttcaattcatggttggttgaatctgtagatgtggaacccactgatatggagggctgactgtatttcaaaaacataatgagaagaaataagatgtgcagaatgatatatgaagaaaaacaccatttatgcaaatagaaactactatccccaaasagtatatattggccagtaatcacatatgtatatatagcatttatgcctacatatatacatgtatgtgtgtatgaggttttgtatctgcatatatgtatgtatgcacatctagatatacagatagatgaatgaataaataggtaaataaatgatagatagatactggaaaactgggtgcacaattcttagcatctgctatggagggctaacgatgaagaatggcaagtgatgtaatgttagaaagattaaagaggactttatt

SEQ ID NO: 896451 - DNA, 627 bp, Homo sapiens
accggtgctctcttgtgtttctgctattaggtgaggatgataaatttggctttcataaccattctgagagagtgcttgccaccaacacatttgcattataaatggaaggtgtttttctaggaagtgagtttctaggtttggcaaaaaaaaaaaaaaaaaaaaaaaaaagccttagactcctcagccttagctgtggcactattagtcttcttctggtttcaagtgaaatattgtaraattttccataaggtgtgtaagcagattgaaacctgttagtttcatgaggtagttaactttttggtttgtggatcagtttcagttttttaagagttaaataataataatgtatatacatattaggccacttcctttgaatgtttcagaatacattctagactttgcacgattaatctacacaagggaacaagaaaggaacagataggactttttagaaaattctaaacaaataagaaacaggtaattaattcagtgtccgtctcccttcaattttgaaataattatgatatgaagttgccacaaattacagtcatggatggcataatggtgttttgctcaataatggaactcatatatgatgatgacctcttaagattataatattgtatt

SEQ ID NO: 896452 - DNA, 598 bp, Homo sapiens
ccatttaagattactagtattaagaataaaacttctcttttaaaattactgttttttttcttttactattattttaaatttaagggtatgtgtgtaggatgtacgtttgttacatgtgccatagtggtatgccgcacagaccatcccatcacctaggtattaagggcaggatccattagctatttttcctgatgctctcccttcctcctcctcccacccctgacaggccccaatgtataacaaacaaacaaacaaaaacccagcatatcaaagagcaggaagaaatttaytcttgtttgtgagtgtgaaagggaaaaaaagagaaattaaatgacctttgataggattttgaggacctctgtgaagacaagggaagagagaaattccaggcagagggaggagcatatagaaaattgcaaaagtggaaagaaatgtatgctgtgtttagggatatattattgagtctctataatgtaaaaaaaaaaaaaaataaaaaaataaaaacgagaaacatgcagcaatgtagaaggccagaaaaactgatacgtagggcaaatccagaaaggccttttttgttagccaacatacctgtagtgga

SEQ ID NO: 896453 - DNA, 598 bp, Homo sapiens
ccatttaagattactagtattaagaataaaacttctcttttaaaattactgttttttttcttttactattattttaaatttaagggtatgtgtgtaggatgtacgtttgttacatgtgccatagtggtatgccgcacagaccatcccatcacctaggtattaagggcaggatccattagctatttttcctgatgctctcccttcctcctcctcccacccctgacaggccccaatgtataacaaacaaacaaacaaaaacccagcatatcaaagagcaggaagaaatttactyttgtttgtgagtgtgaaagggaaaaaaagagaaattaaatgacctttgataggattttgaggacctctgtgaagacaagggaagagagaaattccaggcagagggaggagcatatagaaaattgcaaaagtggaaagaaatgtatgctgtgtttagggatatattattgagtctctataatgtaaaaaaaaaaaaaaataaaaaaataaaaacgagaaacatgcagcaatgtagaaggccagaaaaactgatacgtagggcaaatccagaaaggccttttttgttagccaacatacctgtagtgga

SEQ ID NO: 896454 - DNA, 583 bp, Homo sapiens
aaaacccagcatatcaaagagcaggaagaaatttactcttgtttgtgagtgtgaaagggaaaaaaagagaaattaaatgacctttgataggattttgaggacctctgtgaagacaagggaagagagaaattccaggcagagggaggagcatatagaaaattgcaaaagtggaaagaaatgtatgctgtgtttagggatatattattgagtctctataatgtaaaaaaaaaaaaaaawaaaaaaataaaaacgagaaacatgcagcaatgtagaaggccagaaaaactgatacgtagggcaaatccagaaaggccttttttgttagccaacatacctgtagtggacataaagtccaaggaagtgccatgactagttatggattttaggtaacagaatctggagcattgtgtagaataaagtgcaagctgaaggaaaggagcctgagtagctggaattaaaaagtctaggcatgagataaggatggtttatgtagtggccacagtgatgaagagagggaagagaattagcagatatattttaaaggatttatatcataactggggtaagaatcagatagggaggg

SEQ ID NO: 896455 - DNA, 484 bp, Homo sapiens
catatagaaaattgcaaaagtggaaagaaatgtatgctgtgtttagggatatattattgagtctctataatgtaaaaaaaaaaaaaaataaaaaaataaaaacgagaaacatgcagcaatgtagaaggccagaaaaactgatacgtagggcaaatccagaaaggccttttttgttagccaacatacctgtagtggacataaagtccaaggaagtgccatgactagttatggattttaggtaacagaatctggagcattgtgtaraataaagtgcaagctgaaggaaaggagcctgagtagctggaattaaaaagtctaggcatgagataaggatggtttatgtagtggccacagtgatgaagagagggaagagaattagcagatatattttaaaggatttatatcataactggggtaagaatcagatagggagggtctaggtcgattcccacttttttgtcttggatgtgtgagagtgtggcag

SEQ ID NO: 896456 - DNA, 639 bp, Homo sapiens
aacagggagaattcgacttcctcttttcctcatcgaatgccctttatttccttctcctgcctgattgccctggccagaacttccaacactatgttgaataggagtggtgagagaggacatccctgtcttgtgccagttttcaaagggaatgcttccagtttttgcccattcagtatgatattggctgtgggtttgtcatagatacctcttattattttgagatacatcccatcaatacctaatttattgagagcttttagcatgaagagttgttgaattttgtcaaaggccttttctgcatctattgagataatcatgtggtttttgtctttggttctgtttatatgctggattacatttattgatttgcrtatgttgaacccgccttgcaccccagggatgaagcccacttgatcatgatggataagcttttttatgtgctgctggatttggtttgccagtaatttattgaggatttttgcatcgatgttcatcagggatattggtctaaaattctcttttttggtgtgtctctgccaggctttggtatcaggatgatgctggcctcataaaatgagttagggaggatcccctctttttctattgattggaatagtttcagaaggaatggtaccagct

SEQ ID NO: 896457 - DNA, 593 bp, Homo sapiens
gaactcttccctaaatcgtcctataaatcgagtatcacccttatagcaaaaccaggtaatgacataacaaaacaaaaagaaaactacagaccaatattcctgatgaacatagatgcaaaaattctcaacaaaataccagttaacaaaattcaacagcacatcaaaaaaataatacaccatgatcaagtgggtttcatcccagggatgcagggatagcttaacatacataagtcaataaatgtgacatatcacatacaaaggattaaaagcaaaaactatgrcatcacctcaacagatgcagaaaaggcatttgattagttgcagaatctctatatgataaaaagtcttaaaagactcagcattgaaggcacttacctcaaaataatagaaagccatacctgacaaacccacagccagcatcatactgaatgggaaaatatttaaaacattcttccagagaactggaatcagaaaaggatgtccactttctccacacctatttaacatagttctggaagtcctagccagaacaaagactcttagatttgataaacaaattcaacaaagtctcaggttacacaatcaatgtacac

SEQ ID NO: 896458 - DNA, 652 bp, Homo sapiens
tttttgagattctttataaattttagatagtttccctagactacagtacatttttatggctagaaaagtttgagcctgtcatgcattaataatttggtttccttgagtgttcttagttttgcaaggcagtgcaaaaattcacactcacacagagtcctagatgagttttctgccttttgaattgattattctataccgtaagcctgcctaatcagatactaccacagtcactgaaaatgaatgctttcatagatccttgctctcttagtcatgtaatcaccacgcaaggaagacagggagtggagctgacaattagatgacacacaaggctgtattccactctcaggwatcctcacaggaactgttaacagcagtagaaaataatggtggaataattttaaatgctttaattcaactctaggtcatatgtatattctttaacaacaggtagttaaagtcccagggacccaagttaaggcaaaatgtcagaaatatgttgaaatcacataaaattaaacttaattttcaggcatacaaggcatcctctgaaaaatccagagatagtaagaaaattatttgcattgactgaggtcctatgagtgttggtagaaacaaagaccagtagaatttgagttgttaataacataattca

SEQ ID NO: 896459 - DNA, 579 bp, Homo sapiens
gaggtacggtctcactttgtcacccaggctgaagtgagtggcacgatcatgactcatggaagcctcgacttcccaggatcaaatgattctcctacctcaggcccccaagtagctcagactacagacctaagccacwacatcaagctaatttattattattattactattattattattgtagagacagggtctcactcttttgccccagctggtcttggactcctgggctcatgcaatcatcccacctcaccctcccaaagggctggggttacaaatttgagctactatgcctggacaactttctacttaaaacagcttttgctgtatcatataaggtttaatatgttgtgttttcattttcatccatctaaagatactttttaaattccccttttaattttttcatttacccattggttgttcaaaagcattttgtttaatttccaagtatttttaaatcaaaatttcagatactgatttttagttttgtaccattgcaatcagataatataaatgatataattttagttttcttaaatttccagaagtttgctttgtgttttaccatgttttctatc

SEQ ID NO: 896460 - DNA, 603 bp, Homo sapiens
tattcttatcatttctaatttcttattatcataatcaattccaagttgtttttacctccatcactctatttactaaagtcacaaataagtcctggttacatcaagtagttactttcaacctattattgcattggatktttttctctatttggctctgtcaatcaatcactaactgttgaaactctctcttctctgttcacatgacatcaactttcctggatacccttctttcttacaagttctcctcagccactttcataggcataactcccttaaatagtatttcttaagtgtagttattcctgaaaagtttccagaagtcaaatggaaacatctcctaatgtctaaagttgaaataatttgagctaaaaaatagcactagtgttggttgtaatcaaagattaaaataaatatctttaaaatcatagtgtaaataagcaatcaacaaataaagcaaacctccttacagaacattacaactagttcatgtaaaattaatgagataattagaaagtgtcattaaaacaccataataatatttgctgcagccaacatacattgatgaataataaaaattagtgggtaaaaccttaaggagaaata

SEQ ID NO: 896461 - DNA, 566 bp, Homo sapiens
gtcgcgtgatctctgctcactgcaagctccgccttccaggttcacactattctcctacctcagcctcccaagtacctgggactacaggagcccaccaccactcccagctaattttttgtatttttagtagagatggggtttcaccatgttagccagtatggtctcgatttcctgaccttatgatctgcccgcctcggcctcccaaagtgttgggattacaggcgtgagtcacggtgcctggccccttcacccactttttgatggggttgttttttttcttgtaaatttgtttaagttctttgtagattgtggatattagccctttgtcagatggatagattgcagaaattttytcccattctgtaggttgcctgttcactccgatgatagtttcttttgctgtgcagaagctctttagtttaattagatcccatttgtctattttggcttttgttgccgttgtttttgatattttagtcatgaagtctttgcccatgcctatgtcctgaatgaatggcattgcttaggttttcttctagggtttttatggttttagttcttacgtt

SEQ ID NO: 896462 - DNA, 675 bp, Homo sapiens
ttcctcatccagcaagcaaggttattcccgctaggcaggatcaagattccctatttagaagtcctaaatacttggggtggtgcccaaaagatccctgttcatggtgccctccagggtttagacaggtgtcaccgttcgatggctattttaaagggcaagttccccaccatagtgtatggtcccccacatcaagacaatttaaagacaggtctgtaattttcatgtaggtagtagaagccttagagcatttcctccattgctccccaaatagactttccccttccttggggcctctcaagtacaatctgtggtgcatgggtacagctcttagagccgacattaaaacagttacgggggttccttaaaatcactgactttygccaactgtgaattcctaaatacagcaaaatggccaggccactctataccctaataaaaaaaaaactcaaaagacaaacaccaatctaataaaataaaaaccaaaaacaaaaacagccttcgaaactttaaaacaggccctggtacaaactccagcgctgagcctccccacaggacaaaatttcttgttgtatgtcaccaaaaaaacagacataggtcttaaaagttctcactcaaactcacggggcaaccccacaaccagtaacatacctaaattaaaaaattaatatagtagcc

SEQ ID NO: 896463 - DNA, 553 bp, Homo sapiens
gaggatccagtttcattctcctacatgtggctaacccattatcccagcacaatttgttgaaaaggtagtcctttccccactttatttttttgtttgttttgtcgaagatcagttggctgtaagtatttgggtttatttctgggttctctattctgttccattggtctatgtgactattttgataccagtaccacgctgttctggtgactatggccttatattttgaaatcaggtactgtgatgcctccagatttgttctttttgtttagtctttctttggctatgcaggttcttttttggttccatatgaattttagaattgttttttstaattctgtgaagaatgatgctggtattttgatagggattgcattgaatttgtagattgcttttggcagtatggccattttcaccatattgattctacccatccacgagcacaaaatgtgttttcatttgtttatgccttctatgacttctttcagcagtgttttgtagctttcctttagaggtcttttgcccctttggttaggtatattcctaagtatttttt

SEQ ID NO: 896464 - DNA, 628 bp, Homo sapiens
gtacaaaagttgatctgctgaacagctaaaatttgtgataaatttaagttaaaatggtatataatttgagtaactctgagtgtattatgttaagcttcttacacataagaacatgtcagaaatttcctaggggcaaatattttaaatactttagcatttcttctttttaatatatcctgaatttcaaagatttctagtccctaaccatgtcttagatatactgcctataaaactagctaaactttcaaacttccattttctgttcttactctactgtttgtaatatctgttctgctcaaacagctatatatatttttgtttcacccataacaaacttcattagaggaaaactgcargtaattttgactttaatttttatttagacaaataggataaatctggaaatgctacatatgattttgtagtttgtgtactacccaactttataagaatcatttacaatgtacattctagtttactttaatgttccctttccctttaatcttgaagttgtgctgcatgtaatttctacatccaaacatagttttgactagaattttttatgtggtatcaatgcagacagagttataaatcatcagacactgggatcttcctaaacacaactggt

SEQ ID NO: 896465 - DNA, 547 bp, Homo sapiens
aaacttttgttccagttatgcagttatgcattgctatgtaacaaacactataaaaaaatagtggcattaaaaagcaaacaaaaagatttacaatgcttctatattctataaatcagaagttcagaaataaacagagggttaacttatttctacctgacagtatttgaggacctaattgataaggttctaattgaggacctaattaaatgactaacagtcaaacaattcccaaacatctagaatattcttttgtcacatgtctgatatgtgagctgaaatgactcaaaaactggattcagccaaggctgtccaagggagtgtgtctacataacrgctaaccatgtgacttagtcttcctaacagtatggcagcctctgattagacagatttcttacataatggttcagacctctcaagtattctaggaagcaaggagaaacttgtaagactttttttttatgacctaaattcaaaattatgcactgctatttctattccattctattctatcggttgatgtagtcacaggcttgcccagattcaagaa

SEQ ID NO: 896466 - DNA, 645 bp, Homo sapiens
taggtatcaaatcactaagtattaatatatactattataatatgtagtaccatttaacatgagtaagcctgtgctaccatttttattaagtttttatcttttttaaaaaaaatgtcactgatgaagtttttagtgttatgcccctcatcctacttttcccataaactgtgaattttattgtgtgatttgtacagtgcaatgattcctagaaaggcatgtatcatgttatagcagaactgactatatattttctactgacagtcataataaaacattgttgaaatctaaaaaccatacaaacaaaaacaaaaacagtattgccaaaaaaattagcccagcgtagtggcaggtgcctgtagtcccagctactcgggaggctgaggcaggagaatggattgaacctgggaggcggagcttgcagtgagcccagattgcgccactgcwctccagcctgggcgactgagcgagactcgtctgaaaacaaaaacaaaaacagaattgcatggcctcattggtattttgtcaaagccgtctttgccactaaggtgcaaatatcattctaaattaactataactctcctctggagagggacagatatgaatgacataaactctctttgtttaaatgttttcagttataaaata

SEQ ID NO: 896467 - DNA, 642 bp, Homo sapiens
cggggcttgtaagaagataaatagctttaaaaatgccgttagagaagaaatgtctcaaatcaatgatctaaagttacagttttaaaaagtcagcaaaagaagtgaaataagtccaagatagaatgaaggaaataataaagacaaaagcaaaaatcgacaaaatagaaaacagacaatagagaaaattaaagctaaaagttggttttttgaaaagatgaacaaaattgataaactccttataccagtacagagtggtcttggttcatgtagctgtacagtaagtcttgaaatcaggtagtttaaatccttcagctttattctttttcaagattgctttgactgttaggtcttttgtctatataaactgtagactcagtttctcggtgccttttytccttattatggggttgtattttcctgcttctttgcatgcctggtgattctttctaattggatgccagatactgtgaatgggtaccaaatatatttgtattcctataaatattcttgatctttattctgggtcccagtgaagttacctgtaaacagattgatcctttcaggctttgctttttaaatttgctaggcaggacaaatagtgtgtagtctaggcctgtttttcctctgctacaaaggcgagac

SEQ ID NO: 896468 - DNA, 593 bp, Homo sapiens
ctgaagaggaagtgccaccatcttacctgtgaccttgaggatacctgcgtcctgctagagaaccaacaaagtcgaaaccatgagctggagaagaagcagaagaagtgagttgcatctctcaccatcacctgggctgccagggtgggctacattggagctggcgttttctggggtatccaggtyctcctaactccctcacttcaactcccttgttttgctctaatcttcctccctgtcccgtcacaccttattcctgtatggttctcccaagaatccagcaagaaattattcttttctcttagccagcctcaactatgtggccaattgatcttgtgaccttggggaactttctttgcctttctgggccttaacatccccatttgtcgagtgaagggtttgttgcagacggtcaagacagcatggcgattaggagcccaggcattgatataaaagtcatctcattcaagtcctaaaggtgcctctttctagatgtgtgaccttgagcaggtcattcagtccttcccagccagattccttatccgtaggttggtgataagatcgcccccttgtgctgaggactaaatgatgcagtc

SEQ ID NO: 896469 - DNA, 593 bp, Homo sapiens
ctgaagaggaagtgccaccatcttacctgtgaccttgaggatacctgcgtcctgctagagaaccaacaaagtcgaaaccatgagctggagaagaagcagaagaagtgagttgcatctctcaccatcacctgggctgccagggtgggctacattggagctggcgttttctggggtatccaggttctcctractccctcacttcaactcccttgttttgctctaatcttcctccctgtcccgtcacaccttattcctgtatggttctcccaagaatccagcaagaaattattcttttctcttagccagcctcaactatgtggccaattgatcttgtgaccttggggaactttctttgcctttctgggccttaacatccccatttgtcgagtgaagggtttgttgcagacggtcaagacagcatggcgattaggagcccaggcattgatataaaagtcatctcattcaagtcctaaaggtgcctctttctagatgtgtgaccttgagcaggtcattcagtccttcccagccagattccttatccgtaggttggtgataagatcgcccccttgtgctgaggactaaatgatgcagtc

SEQ ID NO: 896470 - DNA, 591 bp, Homo sapiens
ccaaagtgctgggattacaggcgtgagccaccgcacctggcctaaaggctttttaaatggtgatttttctttctctgacacaatgcaattactattgatcctggagttaacatagtgttctccttgctcctccttgctagtggaggactattctcctatcctcctccttccagcttggaaacttatgtccttagattatacttcccgttaccccttgtgatggtaaaatttacatgtaaccttgactgggccaagggttgcccakataattgatcaaacactaatctgtgtgtttctgtgagggtgtttttgtatgagactaacagttgaatcagtagattgagtaaagcagattgtcttctctaatgtgtgtgaacttcatccaatcatctgaagacctgactagaagaaaaaggctgatcttctcctgaataagagggaattcctcctgcctgactgccttcaaactgggacattggctttttcctgccttcgaacttctactgagacatcagctcttcctggatctcaagcgtgctggcctttggatgggaactacaccattggctctaagtggttctcaggccttca

SEQ ID NO: 896471 - DNA, 665 bp, Homo sapiens
atattataatattctacgtatttatcctcaagtgcttagaagaaaatgttttaacatcttgaattagtttagtcacttcttcaaggccagcggtttttgtcttgagattcagttgtttttctttgcaaaagagtgatatcaaattacacatttaaacctgatgaaagtaacttttcctcctagaatgtcctgggtaatagatttgctgccaaattgtctccctgtgattagtaatggcattagcagragtaacctacatgagtgagataaacaacatgagatcaagactagcaataatccttctgctttgagtttaggttatgacacatcttcgaggcagcaacagaaattacataagtttattgtttatttttcctacagattctctatgggacacatcttgcatgtatcaaaccttcctcaaattttaattaagacctctatcacctatagtcattaactaagctcacttacagagttgtaggagaagcatggattttgatacttcgggatttctggagaagatgtgatctctgttctcatgggaaaattaggacatgctgtccacttcgagacacatttctagacctcaaagtggtaccatggtgctagggttgaagtaagttaacctttctgagtctcagttctctcagctgagagaactg

SEQ ID NO: 896472 - DNA, 665 bp, Homo sapiens
atattataatattctacgtatttatcctcaagtgcttagaagaaaatgttttaacatcttgaattagtttagtcacttcttcaaggccagcggtttttgtcttgagattcagttgtttttctttgcaaaagagtgatatcaaattacacatttaaacctgatgaaagtaacttttcctcctagaatgtcctgggtaatagatttgctgccaaattgtctccctgtgattagtaatggcattagcaggagtaacctacatgagtgagataaacaacatgagatcaagactagcaataatccttctgctttgagtttaggttatgacacatcttcgaggcagcaacagaaattacataagtttattgtttatttttcctacagattctctatgggacacmtcttgcatgtatcaaaccttcctcaaattttaattaagacctctatcacctatagtcattaactaagctcacttacagagttgtaggagaagcatggattttgatacttcgggatttctggagaagatgtgatctctgttctcatgggaaaattaggacatgctgtccacttcgagacacatttctagacctcaaagtggtaccatggtgctagggttgaagtaagttaacctttctgagtctcagttctctcagctgagagaactg

SEQ ID NO: 896473 - DNA, 665 bp, Homo sapiens
atattataatattctacgtatttatcctcaagtgcttagaagaaaatgttttaacatcttgaattagtttagtcacttcttcaaggccagcggtttttgtcttgagattcagttgtttttctttgcaaaagagtgatatcaaattacacatttaaacctgatgaaagtaacttttcctcctagaatgtcctgggtaatagatttgctgccaaattgtctccctgtgattagtaatggcattagcaggagtaacctacatgagtgagataaacaacatgagatcaagactagcaataatccttctgctttgagtttaggttatgacacatcttcgaggcagcaacagaaattacataagtttattgtttatttttcctacagattctctatgggacacatcttgcatgtatcaaaccttcctcaaattttaattaagacctctatcacctatagtcattaactaagctcacttacagagttgtaggagaagcatggattttgatacttmgggatttctggagaagatgtgatctctgttctcatgggaaaattaggacatgctgtccacttcgagacacatttctagacctcaaagtggtaccatggtgctagggttgaagtaagttaacctttctgagtctcagttctctcagctgagagaactg

SEQ ID NO: 896474 - DNA, 635 bp, Homo sapiens
cgcccgtgacacagcctcaggaggtcctggcaacatgtgcccatgtgcccaaggtggtcggggcacagcttggtttttctgttgtgtgtttttttgagacggagttttgctctcgtcgcccaggctggagtgcagtggtgtgatcttggctcactgcaatctccacctcccgggttcragcgattctcctgcctcagtctcctgactagctgggattacaggcacacgccaccaggcccagctaattattgtatatttagtggagacagggtttcaccatgttggtcaggctggtctcgaactcctgacctcgtgatccgcccacctcagccctcccacagtgctgggattacaggcgtgagccaccacgcacggctacagtttggttttatatatttttagggagacatgagacatcaactaatatatgtaagatgtccactggttttgcctggaaaggtaagacaactcgaagtggggacgcggcttccaggtcataggtatgtgagagacaaatggttgcattcttttgagtttctgataagcctttccaaagaaggaaatcagatatgcatttatctcagtgagcagagggatgactttgaatagaatgggaggtaggtttgccggaagca

SEQ ID NO: 896475 - DNA, 626 bp, Homo sapiens
tttgatatttgacattttagaaatctggtttcagtcgagtgagggaaccaaaagcagttttcagtgagagtaagtggatggtcctgaattggagaaggggggtttaaaatacctgcttgttaaattttgcagttaaggaaaagacagatgggtagawtgaaaaagaaggtataagagggaaagttcttttaagataggaaaagacgtatgcattttaagcattttaattttgataattacctagttgccaatactggttattgtcaagggttgtaaatttaatctaataagggaaaatcattatttgttttgctctacattcttcatttatgagtctgggtctcttctaaatttcacaatgtgtttttcatcaaaattgtgtttctgttaggaagaaagtagaggagagtagagatagagtaggaagctagcagtctccatggataaatttatattttatctatatgtcttctgggtttattatgtcatgtctccaaaagcttgcttgtaaagagtaagatgacatcgagctcttatttttcttcccaaatggaaaatttcttaatccttttctttcctgattatccccccatttgaatgccatcttgacttactacctggtaaat

SEQ ID NO: 896476 - DNA, 628 bp, Homo sapiens
tggcttccactagtttccattattgcttatgggtctgtccctttcctccagaaaagtcctatctttttaaagatgtaatgtcagatgaagcttatgagccaaccacaggccatttttttaatcgacatctcctgaaggaaattttctgccttagctggcctgacttacttgtattttgtggcagaatccagtctttctaggaatcatccagttttaaaaatcatctcagtggttgtagagctgacagcagaattctctctacctattttctccrccatggagaaagcattcccagcatcatttatacaaatgctatgcacatttccacttcccagcaatactcatccagcagtttagatgccatgggagggtactccatagttcagttctatggtatgctttgatacgggcatggctggacactgcacattgttcagcaattccaaatggtagtctttagtaagagaaaaaacataattagagtcacttaacatattatgtggcagcggggggtggggaaatatcctttaagaagtagctttcacatacaaatggagtccaaaatagtgaacttttcccattggatatttatatgaatacaaccatggattaaatgccaataggagaa

SEQ ID NO: 896477 - DNA, 567 bp, Homo sapiens
cttatgagtgagaacgtgctgtgtttggttttctgttcctgtgttagtttgctgagaatgatggtttccagcttcatccatttccctgcaaaaacatgaactcaatgtttttttatgactgcatagtattccatggtgtatatgtgccacattttctttatgcaatctatcatcgatgggcatttgggttggttccaagtcttttgctattgtgaagagtgctgcaataaacataagtgtgcatgtgctttatagtagaatgttttataagcatgggtatatacccagtaaagggattgctgggtcaaatggtatttgtgtttctagattcctgaggaatcgccacactgtcttccacaaaggttgaactaatttacactcccaccaacagcrtaaaagtgttcctatttctccacattctctccagcatctgttgtttcctgcctttttatgatagccattctaactggcatgagatggtatctcattctggttttgatttgcatttctctaatgaccagtgatgatgagctttttttcatacgtttgtcagccatataaatgtcc

SEQ ID NO: 896478 - DNA, 634 bp, Homo sapiens
cagaaactaaaattttgtttaaagtataagtattgcaacaaaagtattctaagctaaaactttgacaggtttctgagaagtagatttgataaactatagcaaaatatgaaaatcaattatgaaacagactttgttttttatttatttttagattacaacttttggcttgatgaatcttatacctataagtgatcctggggattgtgtacttatctccctcattttatgaatgaggaaaggtattaagcctacactttgtgtgtaaatttcttttcttcttattataagacattattgcaaaatttaattctgtggaaaaataatgacattatttcraagataaatgtattatattgacacactaggtggaaggaatgaactagtaattaatttcatgtaacatttgggactgaaagttagagttaaatatggaggaacctaaaagttcaccagtgctcaggggtggaggttctggtaaacaagtaagtgttttgatttctggtaaaaaatagtagcttaacatttttgacaattagggaaaattctgtttcaaaatagcaaaataaagctttctttaatgctaagaattttttaaccttcaagatgtaaaacactcacaaagggtaaaaaacaa

SEQ ID NO: 896479 - DNA, 518 bp, Homo sapiens
tcacaagagtgcaagaaacctccagtgggaaaaggagaggttgagccaaattgcatgtttaccctatttgggaagtttaagtcttagccgatcaggatcagcttagattgtgtggtccaaccccagccaatagtggaaggacacagaaacaggaactgctttagggataaaaaccccttctctcctttgtttggtgtgcgcttgtgattgtaacaggcatgagcagcacccttctgcagaagtaaaggtgccttgctgagaaaattttctgtccaagtgcaggtttcttttagctatgctgagaacttgtttccaacaatatgaaaaagacacttacacatacatttttatagaagcacaatttgcaattrcagaaatttgcaaccagcctaattgtccatcagccaatgagtgagtaaagaaatgttgtgtatatttatgtatatatgtatatatatagtcttattatatatatgtatatatatataatacacagttatatatgtgtatataataag

SEQ ID NO: 896480 - DNA, 629 bp, Homo sapiens
gtgtacaccagacagatatggaaggatactcaccttttgaatgaagatgtctctaagttgaaatgctttcatgaatatatagtcagaaatattctaaatacaaaaggacttgagggtgattgatattttggatcatgtttcacgtaaagcatgtagtaaytgtcttagaatcatgctggaacactgtttgttgcagagtggcattatacacagaagttatattttggaatcccaatgaatgggatgtaggtacaaaatgacaaaagaataatgaagagagccataagatggatctcaaaaacaacattctgctaatatagtatattatcaaaatagtgttttttctaagctccattttattgccttcatcaaaagctcatgtttctagggccatgataccgagtgggatatggcactgtctcacccactgacacaccaagattttatatgacctctctctttcttttcttctctcttcgtaggagatttggaagagtgtttgaaaattttggcaatcaagaataagaaggtgatttatattttgaacagaagttaatattggttcttattttattaatgacctttactggtccttttttcctagtctttctctataatgatctcattat

SEQ ID NO: 896481 - DNA, 625 bp, Homo sapiens
cccatggttttgagatgctttggccttctagtgctctcagtataaaaaaagctatgcattgcttacccacttgcaagaataacagacccatacacatggacacaagcatcagaactactgcgttcttatcaaagcaagaactagacaattatcctagtttcaacttgattttaggaacacacaagttagtaatttatagcaccaaaaaacacaccaatattttaaaatataagtatttaactataccaatattttaaaaaaatttatatcaacagccccttcttggtgtaccatcacactgctgatgctgaaatgcattgatggtgagtgtccgctgtacctcatggtcccgctgcctggctgctgtggccctgttcatgtcttcggcatccctgacatrgttaagggcctggtcaagtgcttcctggagatctgacaacttagcattgtagtcatccagctgctccaggacgacaggaaacagagtgcgggtctcattgtgcagccgctgccagctctcagcctggctcagtactgggaagaaatggagataaaggctcagtgtggctttctcctgttcgcttccattcctcccagcattttgcaaagttgcaaaattctcagg

SEQ ID NO: 896482 - DNA, 526 bp, Homo sapiens
tagtcttttatccctccccactccactcttccctgcaagtccccaaagtccattgtatcattcttatgcctctgcgtcctcatagcttagctcccacgtatcagttaggacatacaatgtttggttttccattcctaagttacttcacttgatggccagttttagaatgacagaatgctataaaatctggtgctattcctatatcatcagtcacagttcagtcccaaccaactgcctttcatatgtaatttattcttcraatttttactgtatctcaagttgctggactagaaaattgcccatgtctgcttatcattttgacattgtgctgactgaagagcttaaagtttcaaagagaaaattgttgaaaaaataggcagaccttgaaatgcaccatgcttccagtggctcctgggtggtccaaccactgctgaaattgaattaccacagagatttcaaggattattctcactggcctaacatgctgttttcagtgcttcattccaaattcccatcaacattgatg

SEQ ID NO: 896483 - DNA, 563 bp, Homo sapiens
tgccagatgggaacttgaagaatttttctgctgtatcacacagctcacgaaggaaaacatgctatttgagcataagttcttataaatgccctctatgacttccactgaagccacttctggtaaatatttcaacacccattttcacttaagttgtcagtccattcattaaaaatgggaaatatgtagcaagtacttttctgctggaagacttctcaatctttcgcacaaggctctatcatgcttcaatgaagaacrgtctattggagaattcatttcagttaaggaaaaaaatagtctcctgggggcttaaacacagacttgcaaagaccacaagggcaaagctttcattttcatcagctattgggttcaaacttaaatttcttttttaaaaactaattttgatctatagacctggttattttaggttctaaaataggctaggcaacaactgtttcattctcctggtttatgtggaacgaagccaaacatatggcaaactatacgattacagaggaatttggatgtatgggttcctcctctatgtatcattttcaatcccaccg

SEQ ID NO: 896484 - DNA, 614 bp, Homo sapiens
gaaaaaaattgtgctgattttaaaacaatactttcattacagatgtttccagaccccttccctgatccaaggaaacaaaataccattcagcaacagcccagatttagagatgggacttgttccaatataaacatttcttagctagaccttctccatgaaagtgcatagtcaatttttccatatacagtgggaaagacaaagcttttagcttaaaaggcattctcactcgcagcacggagctcctggaatgagcagccagggacaccrtggttgactattgatgtcacgccaaatgctatcttgacttgttcttcagaattacacaacagaatcgtatcagagcatacacataccatgagcagaaaagtaggcactgttttggatttcagtatttggtatggtcatttattcattttgtctctgcttcatgtaccactggctatccagggcccagcccaggggctggcacaaaatgcgttttcaacaaataattgtggaatgcataaacaattttttttgagcacgaattttaaaaggaacttgcacaggcaatttggggaatcagaagatgaatcatggacccttctggccttcaggggttcaatgggggaaat

SEQ ID NO: 896485 - DNA, 593 bp, Homo sapiens
cagcctaggcaacagagtgagactttgtctcaaaaaaaaagaaaaacaaagaaaaattcctcagagctcatacaaggctgggtagaatatgtgtttcaacaatagtggatcttttaatatagtacatggatcattgagtagagtcttcagcaaratattggcaaagtagggttagggttaggttagggagatgggaatagactgaagactactctggacttgccctaacagagtttaagagcaacatttgaaaggatcaaactgatttcaagtaacttgagtgcatccaaggggagaaaacccatcaaaataaaaataaaaactacaataaaatccagcaccaaaagtgtaacattcacaatgattagcatctaataaaaagttaccaggcatgaaaaaaaaaaggaaaaggcaatccacagtcaagagaatctttagtcaatggtaatagactgagaatgacagatgatggcattagtaaatgatatggtttggctctgcgtcccaacgcaaatctcatgttgaattgtaacccccagtgttgggggagggacctgataggaggtgactggattatggtgaacacctatatg

SEQ ID NO: 896486 - DNA, 593 bp, Homo sapiens
cagcctaggcaacagagtgagactttgtctcaaaaaaaaagaaaaacaaagaaaaattcctcagagctcatacaaggctgggtagaatatgtgtttcaacaatagtggatcttttaatatagtacatggatcattgagtagagtcttcagcaaaatattggcaaagtagggttagggttaggttagggagatgggaatagactgaagactactctggacttgccctaacagagtttaagagcaacatttgaaaggatcaaactgatttcaagtaacttgagtgcatcmaaggggagaaaacccatcaaaataaaaataaaaactacaataaaatccagcaccaaaagtgtaacattcacaatgattagcatctaataaaaagttaccaggcatgaaaaaaaaaaggaaaaggcaatccacagtcaagagaatctttagtcaatggtaatagactgagaatgacagatgatggcattagtaaatgatatggtttggctctgcgtcccaacgcaaatctcatgttgaattgtaacccccagtgttgggggagggacctgataggaggtgactggattatggtgaacacctatatg

SEQ ID NO: 896487 - DNA, 624 bp, Homo sapiens
atctttggatctcttttcagaaatttgacagtgtgatagattaattgaaatgttttccttccttccttctttcctccctccctccctccctctttctttctttttctttctttctttctttctttctttctttctttctttctttctttctttctttctttctttctttctttctttttctttctctctctttctctttctttctctttctttctttctttctctttctctttytttctctttctttctttctttttctttctttctttcatctctctcctttccttcctttcttccttctttccttccttcctttcttttctttttaatttttttttgcttgtggatatccaattgttccagcaccatttgctgctatcttttctctgctcaattgcttttgagacattgtcaaaaataggttgcacatattttttaataaatctacatcttggtttgctattctgttccattggactatgggtctgtctttccctcaatatcaaaaaggcttgattattgttgctgtataaaaagtcttaaatttgggtaaactgatttctctcattttattcttcttttaaatactatgctagctattttagttacttgtctttccataca

SEQ ID NO: 896488 - DNA, 624 bp, Homo sapiens
atctttggatctcttttcagaaatttgacagtgtgatagattaattgaaatgttttccttccttccttctttcctccctccctccctccctctttctttctttttctttctttctttctttctttctttctttctttctttctttctttctttctttctttctttctttctttctttttctttctctctctttctctttctttctctttctttctttctttctctttctctttctttctctttctttctttctttttctttctttctttcatctctctccyttccttcctttcttccttctttccttccttcctttcttttctttttaatttttttttgcttgtggatatccaattgttccagcaccatttgctgctatcttttctctgctcaattgcttttgagacattgtcaaaaataggttgcacatattttttaataaatctacatcttggtttgctattctgttccattggactatgggtctgtctttccctcaatatcaaaaaggcttgattattgttgctgtataaaaagtcttaaatttgggtaaactgatttctctcattttattcttcttttaaatactatgctagctattttagttacttgtctttccataca

SEQ ID NO: 896489 - DNA, 611 bp, Homo sapiens
ggagctagggcctggaaaaggggtcttgtggctctgacaagtgtcctatcctgctgtgattgagctcttatcctggatgcaagacaaagttctccctactctttcctctcctcttctcaagtagaattagggatctcttgttgagctgcaagctgtgcgtccttgggttagcagagggtgatgcctgcactcccttaggcatcccagttggtgtctcagtagattgtgtgtccccacagtctcctggctctgggctgagttcagtagtaagatttatctaggggttacagtccttgtggcctagactgccttacaagtttatttasagccccagggcaccgtagcccacagtagcgaggcttgtggaaactcaagttctgactggtgggattagtgattctcccatggctaaggctggtttaaatgctccctctgtgggtaggcattagttgagtttgagttgattttgctttctgttataacaggacagcactgagttcaatgcctcacaactgctgcagtctccctgccccagcacctagagatgctctctgcaccatgcagctactgccagtgggtaaaaggtgggatcagggattcaacactgtttt

SEQ ID NO: 896490 - DNA, 632 bp, Homo sapiens
gactgtgcacctttatttagtagctgtatgatgtttgcccacacagatttctactgctaccaataaaatgatcttttactaagtcctaggataatagccaagagcacctgccctggagtcagcctgtatggccgcatgagtttgggcaggtcatttaatyttttgagcttcaatttctcatatttgatttcagaatagtagtagtacctggctcatagagtcatcaagatgaaacgagatcacctctctaaaaaataccttgtccattgcacacagtaaatgttctgtgaaagtccacagttgtttcaacatctagggaggatcctttcagcccatgtcttcttggagctactgatctgaccattttgacctagtggatggttttttttaaccatatagtttaataaagatggaccacaatacccatatgtccatcacatcactttatcttaccactttctgttacccaggcttaatcttcttgaaagcagaatctaggcatgcagatgagaaaattggctcagaccctgtctcccagtggagagatgtagtatccagctaaatcctagaacttctgacttgaatccacttcttttcccagtatttgatacaatctgttaaatgtcttaatg

SEQ ID NO: 896491 - DNA, 632 bp, Homo sapiens
gactgtgcacctttatttagtagctgtatgatgtttgcccacacagatttctactgctaccaataaaatgatcttttactaagtcctaggataatagccaagagcacctgccctggagtcagcctgtatggccgcatgagtttgggcaggtcatttaatcttttgagcttcaatttctcatatttgatttcagaatagtagtagtacctggctcatagagtcatcaagatgaaacgagatcacctctctaaaaaataccttgtccattgcacacagtaaatgttctgtgaaagtccacagttgtttcaacatctagggaggatcctttcagcccatgtcttcttggagctactgatctgaccattttgacctagtggatggttttttttaaccatatagtttaataaagatggaccacaatacccatatgtccatcacatcactttatcttaccactttctgttayccaggcttaatcttcttgaaagcagaatctaggcatgcagatgagaaaattggctcagaccctgtctcccagtggagagatgtagtatccagctaaatcctagaacttctgacttgaatccacttcttttcccagtatttgatacaatctgttaaatgtcttaatg

SEQ ID NO: 896492 - DNA, 614 bp, Homo sapiens
tttaaaacgtgtttgttaggcatagtgattaaaagcttggattcatgatccagattgcttgcatttgaatctgggttcttccaattcctaactgtataattgtggatactttacataatttctctgtgcctgattttccttctgtaaaatgaacacacccccgccgccccactgccctattgaagtaattcttgtggaattattgctccttgcacttcaggttggtatatggtaaaacagaatatcaggcttcattcaccgtagtgatgagttagctgaccaacagaagaggtttttaagggaaggtttgcatatcacacctttccctggttaaccattttctgaatgcctgctaatactatactcatatatgacaagctatatcaattaaaattccttgatraagcaacatgggtgagcaaactcaaatatccatggtacgcacagcttgactcatggggttctccctctccttctctcgcctctgcttcccctgggttgggcaatatcctcagtcagctcttgcctcatagtgccaagatggctgccacagctccagactagatatcattcataggctgtggactagtagaagagcacagagctcctttgcc

SEQ ID NO: 896493 - DNA, 574 bp, Homo sapiens
aaactgaatcatattatgcccagggttataggagacctggaggtttaaagaagtttaagagaggagatgtgacttctccaagctcacagtgccagtcacagctcttggccccctgccttcccttttctctcagttctctaaccacagcaactcaactcagaaggggctcttcacagagcttgctctccttgaccattcccccgatggggatcaggtgctgagacacaggaatgggaggaaggcctcagagatgggacctccatgataggccacattgctggaagaggccagctttgcaggactgaaacctctttctaccaaaaagggatctggagattatgaaatagtttttccatgcaaggaagcctttcrgcagctgcagcagctggctaaatcacagattagccacagctgtagcctctactacaagacaggctctccccaccctggccccaacatcctccccaggctggaacttcccaactgctggacactagcagccctggtgggacctttcttagggacattcaaggtcaatgagatgtaaagtaaggtttgtaaaactggataggtg

SEQ ID NO: 896494 - DNA, 574 bp, Homo sapiens
ggtgaaatgttctgtgttgtgttgactgtgtaagagaagaaaaagtgtttatctcttacaggaaggtaaaagtgggaagcactttagctttgtagtttgaaatgaaaataaaaaactcgggaccccaattcactctgccaaaaggaaaaaataaagctgaaagctgagttatgcaagaagctgcctttccttttgttcctacgccggataaaaggttaaatatctccacaggtagctactccaygttcaccttatcctgagaaaagtgcaaatgtactcaacacgtaattgactatcccgctacctgctcctttctcttccaacatgggaattataccctccctatttcctcttcagcccacttttcccatttaaatattgaagtcctcaaaatcatctttggagaaaggtacagaccacagattgtttctgtgattccatgtttctttctcccaggcatgtccttaaccttggaaaaataaacttctaagttgattaaggcctatctcagatactttttggtttgcagtagctaagcccaaaggtttagacttgggtatcctgggttcaaatc

SEQ ID NO: 896495 - DNA, 636 bp, Homo sapiens
ggctgtaggatgtgcatccctaaaaatgctcctcatcctgagcctccgcctccttgtctgtaacgtgggaatgacagcgcgtcacccctcttagatgtgaacagcagtgagcactatgtctggtatgtgagcaaggattagtcaaaattttgaggtttattttattttcaatcgatttactgaatgtgacttccttttcttcctcatctgttctgctataaagaataatgctggccgggcacggtggctcacatctgtaatcccaacactttgggaggccawggcaggaggatcacttgaggccaggagttcgagaccagtctggccaacatggtgaaacctttctctactaaaagcacaaaaattagccaggtgtggcggtgcactcctctaatcccagcttcttgggaggctgagatagagaactgctggaacccgggaggcggaggctgcagtgagccgagaccatgccactgcactccagcctgggcgacagagcaagactcgatctcaaataataataataacgcctaggttgaaaggcatctttcaactatattgattataaaaggaagaaatatttctagccactaagccaaattctagtaatatgtaaaatgtttaattttaatagtc

SEQ ID NO: 896496 - DNA, 636 bp, Homo sapiens
ggctgtaggatgtgcatccctaaaaatgctcctcatcctgagcctccgcctccttgtctgtaacgtgggaatgacagcgcgtcacccctcttagatgtgaacagcagtgagcactatgtctggtatgtgagcaaggattagtcaaaattttgaggtttattttattttcaatcgatttactgaatgtgacttccttttcttcctcatctgttctgctataaagaataatgctggccgggcacggtggctcacatctgtaatcccaacactttgggaggccatggcaggaggatcacttgaggccaggagttcgagaccagtctggccaacatggtgaaacctttctctactaaaagcacaaaaattagccaggtgtggcggtgcactcctctaatcccagcttcttgggrggctgagatagagaactgctggaacccgggaggcggaggctgcagtgagccgagaccatgccactgcactccagcctgggcgacagagcaagactcgatctcaaataataataataacgcctaggttgaaaggcatctttcaactatattgattataaaaggaagaaatatttctagccactaagccaaattctagtaatatgtaaaatgtttaattttaatagtc

SEQ ID NO: 896497 - DNA, 485 bp, Homo sapiens
catagtaattctagtctccctgacattgtttcatgtagaaaagaatgtttgacccaattctgtcaaatgaggcttctggaacagttttccaatatagtaagagttggtccttctccttccaatggtggttgtcacccttgcctggaatatggcagccattttactactatgaggggagctgaacatgacaaaggatgacagagaagaaatatgggagsaatctgggtcctcaatgacattcttgatcccctaagttaatcaatcttggtgctttcttaccttgggatttttcattctctgagtatttatttcttcatcatttaagcaaattgggtaagggtgctgtcttacttgtgctcaaatcattctaaccaacatagaccccctaagttttcacagaaaatgcccttcagactgcaaaacttcaagaggatggtaaaactggacacagtacatggaaatttgaaattctccaagagtagagt

SEQ ID NO: 896498 - DNA, 509 bp, Homo sapiens
agaagagatctgagtggagctgctctttagaacacattagactgctaatttaagaaaattgaaaggttttgttttactgtcttttatgtgttcttctctgctaccccctcaatttaatttgcatttaaaattattctcatgtctcctcagctctccaaggtgtggagtactttctaatcatgaaggctgctccagtagggtttggtgcaacaccacttttatgctgagctgcaaaacaaggcaggtagtcataattgtgagctgttttctggagcgaaatacagagggcacgtttgatgtcaccccttccctcttgcctggctttcttcctttccttgcttctgattgcctggtcaaatatccagcgcagatcatgccagtctgcctaaatgcatttctctctgtctgaatgtaacaaaataatmccaacaacaaaaataaactttggctagtatctcaagttattctggtttaatattcttcctaccaaacctcagtaatgactttta

SEQ ID NO: 896499 - DNA, 644 bp, Homo sapiens
acttctcaaatgaagacatttatatggccaacaaacgtgaaaaaaagctcatcatcactgatcattagagaaatgcaaatcaaaaccacaatgagataccatctcacaccagttagaatggtgatccttaaaaagtcaggaaacaacagatgctggagaggatgtggagagatagaaacacttttacactgttggtgggagtgtaaattagttcaaccattgtggaagacagtgtggcaattcctcaaggatctagaaccagacataccatttgacccagcaatcccattactgggtatatacccaaaggattataaatcattctcctataaagacagatgcacatgtatgtttatcgcagcactattcacaatagcaaagatttggaaccaacccaaatacccatcaatgatacaactgggtgaagaaaatgtggcacatatacaccatggaatrctatgcccagccataaaaacggatgagttcatgtcatttgcagggacatggatgaagctggaaaccatcattctcagcaaactaacacaggaacagaaaaccagacaccacatgttctcactcataagtgggagttgaacaatgagaacacactgacacagggagaggaatatcacacaccagggcct

SEQ ID NO: 896500 - DNA, 632 bp, Homo sapiens
atcattttgtcacattgaagacatttagacagttgagtccaagttagagagcattaagtaaacataggttggtttatcatgtttacctctgtaatgtacagggtcatttgctaaggcaagagcaggcttggttgatggggaccaagcacagctggttactaaaataagaacctgataatgagtcataacaaagaactgaaagaaagttgattttcagtcagatgatctagattcaaattccacttctgattttgtgacttgttaagtcactaaagatctttgggcctcatctgtaaaaarggaattgtattatatggtcaccaccagtgccaacagtatgtaaggttttctattctgatagatcacagggtaaactgtcacaccagcacatttacctttaatcctaagaaagccccaataaataataggatgtgtttgtcttaccagtgttgctccttaccagaggtcataagtagatcctaatgtcactggtgaaatgaataatttttccacatgaagttttaaaaattgttatacattagacctgaaaaaaattagaaaatacatgaaagaaactagactgtgaacaagtgttagctttaataaagtttgaaagaataatccatcttact

SEQ ID NO: 896501 - DNA, 632 bp, Homo sapiens
atcattttgtcacattgaagacatttagacagttgagtccaagttagagagcattaagtaaacataggttggtttatcatgtttacctctgtaatgtacagggtcatttgctaaggcaagagcaggcttggttgatggggaccaagcacagctggttactaaaataagaacctgataatgagtcataacaaagaactgaaagaaagttgattttcagtcagatgatctagattcaaattccacttctgattttgtgacttgttaagtcactaaagatctttgggcctcatctgtaaaaagggaattgtattayatggtcaccaccagtgccaacagtatgtaaggttttctattctgatagatcacagggtaaactgtcacaccagcacatttacctttaatcctaagaaagccccaataaataataggatgtgtttgtcttaccagtgttgctccttaccagaggtcataagtagatcctaatgtcactggtgaaatgaataatttttccacatgaagttttaaaaattgttatacattagacctgaaaaaaattagaaaatacatgaaagaaactagactgtgaacaagtgttagctttaataaagtttgaaagaataatccatcttact

SEQ ID NO: 896502 - DNA, 558 bp, Homo sapiens
tcagctattgttatgtgacttatgctggaccataattcaaggaatttccatttcacttgggcacgttttccaagaagtaaatctaatacaagttatctcaatctaaattaagaataatcgacacttgaactttggcattgaaactttaatgacttgtaagatttcatttatcacatactgtcacattataggtgttcagtatatattagcattcattgaaatgtgcattttcccccatttgtggaggcatcttactgcaatttactcttatatgttaaccaagtctgtagtcacatgtaaatatgtcatgamcatacataaatgaatatgtagaagaatatgcaattatgggccatactgttctttgttactaaattgtttcagcaaacacaaatcttttattcaaactatgtagagaattgaagtaaaattaatgagatgcatttatttccaaatatttgggcctagacactataattattaattctgttgtcttttgaaacaatggctatcttttttggttttcttttcttttttgttcttagcatctcatttgcc

SEQ ID NO: 896503 - DNA, 621 bp, Homo sapiens
ggttaccatagtctgggaagtgtagtgtgatgctggggatggggaatggttaatgtgtacaaaaaaatagaaagaatgaataaaacctactatgatagcacaacagcatgactataatcaataataagttaaagagtgtaattggattgtttgtaactcaaagggtaagtgcttgaagagaaggatactccatttttccatgatgtgcttatttcacattgcrtacatgtatcaaaacatctcatgtaccccataaacatatatacctactgtatacctacaacaataaaaatgtttaaataattgaaaaaaattattccaactgaagaagcatattacagctgactgaatgcagaaataggaaaatgtagtgttttctatttaggcaggcacctaagactagaagtcctcacttctaactattttgaaatgtacaatacattgtttttaagtatagtcaacctactctactctcgaacattagagcttatttcttttatctacctgtatgtttccagccattaaccagtcagtctctctttatctccctccacacactcacattctcccctgcctctggtaattatctttctaaagtttataagataaactttttcctat

SEQ ID NO: 896504 - DNA, 610 bp, Homo sapiens
atgtcacttagtgaatgctctatgagaacctgaaaaaaatgtatattccattctttcttttccctgtctctttttaggggcacagagttggttgatgaatggagggctggagcttgaggctggatgtgtaccccagaagggtctctaagattcaaaaccttttcataccaatgtccctaattcctccatgttattggcattggacttgatctctcttcatacatatttttgtatacataaggtgtgcaagggtgtgtgtgcatgtgtgtgtgtgtgtgtgtgagggatagggtctcagagtgaatgtatttgttttttatactttgaccttgtacacagtgamctttctaaatttttattttaattgtttttcaattgtttatgtagacaatcatgctgtctgagtagagatattcacatcttcctttaaagcatttattcattttatttacatctttctttaaaacatttattcattttatttatttcccttgccttattgtgccagctagaatctgcagtaaaatttggaattgcacgtggtgataatggacacccttgttttatccttgagctcagggagatatgattcaatatttcaccaggagca

SEQ ID NO: 896505 - DNA, 627 bp, Homo sapiens
acatacttccacataataaaatttatctatgacatacccacagccaatatcatactgaatgggaaaaattagaaagcactccccctgagaattggaccaaaccaaggatgctgactttcaccaattctattcagcatagtactggaagtcctagccagagcaataagatgagagaaagaaataaaggacatctamattgggaaagaagaagtaaaactattgctgtcctttggtgatacaattttacacctagaaaaccctaaagactaatccaaaaagctcctagatctgttgaataaatttagtaaaatttcaggatataaaatcaatgtacacaaagtaggagcactgctatacaccaacagaaacaaaaatgagaataaaatcaaggacttaaccccttttactatagctgtgagaagataaaatacttaggaatatacttgacaaaggaggtgaaagatttctacaaagaaaagtacaatacactgctgaaagaaatcatagatgacacaaagaaatggaaacacagcccatgctcattgatcagtagaatcaatattgtgaaaatgatcatactgccaaaacaatctataaattgaatgcaattctcatcaaaataccagc

SEQ ID NO: 896506 - DNA, 627 bp, Homo sapiens
acatacttccacataataaaatttatctatgacatacccacagccaatatcatactgaatgggaaaaattagaaagcactccccctgagaattggaccaaaccaaggatgctgactttcaccaattctattcagcatagtactggaagtcctagccagagcaataagatgagagaaagaaataaaggacatctaaattgggaaagaagaagtaaaactattgctgtcctttggtgatacaattttacacctagaaaaccctaaagactaatccaaaaagctcctagatctgwtgaataaatttagtaaaatttcaggatataaaatcaatgtacacaaagtaggagcactgctatacaccaacagaaacaaaaatgagaataaaatcaaggacttaaccccttttactatagctgtgagaagataaaatacttaggaatatacttgacaaaggaggtgaaagatttctacaaagaaaagtacaatacactgctgaaagaaatcatagatgacacaaagaaatggaaacacagcccatgctcattgatcagtagaatcaatattgtgaaaatgatcatactgccaaaacaatctataaattgaatgcaattctcatcaaaataccagc

SEQ ID NO: 896507 - DNA, 672 bp, Homo sapiens
aaaaccccattatccagacttttaagatcttatatctaagcagcttttaaaacctagaagtaaatgctgcaggcaacaggatctatcttttcttttctgtttggtcatactgttgcaggggaaggggaacagttagaaatctatttctatcaatactacttattctaattttgtgtgagagtgtatgtatatatatatatatrtgtgtgtgttcattcaaacatttactgaaagtttactgtctcacctggggacagagggatatggtagaatagacacaagccctatccacagaaagctcattctttagtaaaggatacccatgttaatcaaataaccatacatactcctgtaaccactgcaacctgatgagtgctagaaaggaaaagcacaggttcccaggagagggaagaaatgcaatccaataatgacatttcagttaattgggttcagaactatatgctaaagaactctgaccaaaggagaggagtgtcataagcattccaatttcctttcaacatttttgttctccttcttttcttaatgtaatccagtggaatcagtctccctttgctgagtagatctagaggctactttaactcattcagaccactacgggaccatttagaaactgtatattgtacggttttaaatatacacatacacacagaa

SEQ ID NO: 896508 - DNA, 691 bp, Homo sapiens
ccctctgtttttactttcacttaaaagtctgtcttttggtttgtatacagccatgtttcatggcttgagaaaatcaggaatttccatataaatgtgttaactgagtttggattccagtgtaaaatgcaaaacctgtgtaagtcaaacattgatttggataaatgaaatgcaaatgcgcttaaaacaatagtagtctttaatgaagaaacaatatatgagacaaaaagaaagaagttagctcttttgttagaggtctagacaaaggatcatttgtgaatttgatatttttcttccagttattaacattatctggtataagcatgggacatacaacagaaattatataaatgcttgaacacatgaattaatgcatkaatgaacaaatactctcatgagttttattttactgtgcgaataaattttcataaaatatcatgtgtgtcatatctggatgatctgatcactaaaaaggttacctgtagagtcaagaaaatcttgcataactggtaatttaaaagtaagaaatactaatagaataatatggtcataagccataaatgtcagccactgattacaagagagcacatatgagaaccggcataaatcagggtaaacttattctcattcctgtattgtgatcacaaggcaaaagtctgctttaggcgccctagtgatctagttagaactaaat

SEQ ID NO: 896509 - DNA, 617 bp, Homo sapiens
ccaaatagacctcacagacatctacagacctctccatccaaaactaacagaatatatatttttctaattgccgcatgtcacattctctaaaatcgaccacaccattggacataaaacaatcctcagcaaatgtaaaagaactgatatcgtaccaaccactctctcagaccacagtatgataaaattagaaatcgagactaagaaaaatcacttgaacccatatagttatgtggaaattaaataatctcctcctgaatggcttttgggttaataatgaaattaaggcaaaaatcaaaaagttatttgaaactaatgagaacaaagacacaacataccagaatctctgagatacagctaaggcaaagttaagaaagaaattatagcagtaaatgcccacgataaaaagttagaaaggtctcatgttaaaaacctaacatcacatctaaaaagagaaccaggagcaaaccaaccccaaagytagcagaaaacaggaaataaccaaaaccagagatgaactgaaggagactgagacaagaaaaccattcaaaagatcaatcagtgccactgatttgtgtacattgattttgtatcctgaaaccttactgaattcatttatc

SEQ ID NO: 896510 - DNA, 540 bp, Homo sapiens
cataaatattacttcatagcattttcaatcattaagaaagataagcccttttcttgttggttcttgatattttcctacctgtattcaaattaatgcagaagtaatagccattatcttacttactggtagcaaggagttacattataaaagcttcttgtataaaattttattcactaatagaaaagaaagagaaatagtggaaaactgttaacatttaacacagcgtaaaatacattgcccattctaaatggtttgaggtcttaaagagtctcttccaggggtttttgaatgttcaattctagtaaataycacagccaaagagttccaggcgaagtgcaatactttgattccatgttttaggaatgacacggataaacctggaaatgattggggggttgaaaaagttcttcacatgtcctttggtattagtatttccttcaaaaatctgaaagccaaataagagaaaatctttaatgacaacataaatggctaaggttttttgtttttgtttttttttagacagggtcttattctgttgcc

SEQ ID NO: 896511 - DNA, 634 bp, Homo sapiens
taaccagctagaggttttcacaggcataaaagaggtagagacattttagttatggagagaacagcatctatgtgcatcactgcatatgtccagctttgattttcaacctctctaaagagaccatataaagacatttcatgtgaatggaagggggttaagtaaaacacatatttctgatcccgaattctaactttgaaatgacaccattaaaaattagcattttatctttgagrcccttgttatatcacaaagactaagagcaaattatagagagtgcaaatttttttaaaagattgtaaaatgaagtatggagtgacaaggttataccatgaacaagtctaaagagtcatctgaaaaagaattggataacatctctttaattattatttatattgctatgtaaattatataaatgtaatataacactatttttattattttaacttctctgggtgtcagctttgccctctgcaaaattgcaaaatgaggtatttgggctgcttcaaatggtggaaggagcatggcctgtttactgggagaatgggattctagtcctgattctgctaccaaactaagctaaaattatttaatctcctgtgtatttagaattaaaaggaaaaatctagaccagatg

SEQ ID NO: 896512 - DNA, 614 bp, Homo sapiens
caaaaacactcattgaacaccatatatatggcagtgatgttgccagatactgtcatgacattgaagtttgagtgacctgaggactttggaagagtcaggcctagtttgaatctcaggtaggtcttattgaaaatgggctgatggaggtaattccaaattagagcccttccttggagrgttgtgatgtgtctatataatccaggcactttcttcacagagatgctgtcggcactctgattggcagaaccattcttggtctagatcacactgagagtttacctgagtagaacctctgtttcacaaaggttttcctaggagcctaagtcactgaaaagaactaaaaattctactcattctcctatacctcccaaatcttgattctttgagtggcagtgagaaaataatgcatctttgtaccttaccatttacctcacaaccttgcagttccaatcgaagggtaggtctgttataggctcgagttggagagatcctaatatatctagccacaataggtgggtcaaactgattctcttttattgtagaggcatctgaattgccattaaaatactagaagaaaagaggaaagtttagttatgtaacaatgatctataaag

SEQ ID NO: 896513 - DNA, 614 bp, Homo sapiens
caaaaacactcattgaacaccatatatatggcagtgatgttgccagatactgtcatgacattgaagtttgagtgacctgaggactttggaagagtcaggcctagtttgaatctcaggtaggtcttattgaaaatgggctgatggaggtaattccaaattagagcccttccttggagagttgtgatgtgtctatataatccaggcactttcttcacagagatgctgtcggcactctgattggcagaaccaytcttggtctagatcacactgagagtttacctgagtagaacctctgtttcacaaaggttttcctaggagcctaagtcactgaaaagaactaaaaattctactcattctcctatacctcccaaatcttgattctttgagtggcagtgagaaaataatgcatctttgtaccttaccatttacctcacaaccttgcagttccaatcgaagggtaggtctgttataggctcgagttggagagatcctaatatatctagccacaataggtgggtcaaactgattctcttttattgtagaggcatctgaattgccattaaaatactagaagaaaagaggaaagtttagttatgtaacaatgatctataaag

SEQ ID NO: 896514 - DNA, 491 bp, Homo sapiens
aaagaagttcctcttagatcttaacatcaggataaatggtgctttctttttgtagatgatgtaaacttcaccctgacatatttccttttttacactgactgccataaagcttaggacaaaatttgaagacagccttacagggtcacatggtatctacttatctgtggctttattttctttgtccccrtattctatcccaattacatagactccttgttttatgcctttataacttgagaaactgtctcagatcctttgtattactgagtaagctgtaaataaatacaaatactaaataaaaactaaaagttgcatttgaatttaaaattatatgagcatctttttcttttaaaattaaaaaataaccaggtactccataatattttactatgtaatttctcccatgattctgtatttgtgttacttactttgagtgtgtctctgacctgggctctgataataggacccaaaatcccatcttctttcatatt

SEQ ID NO: 896515 - DNA, 497 bp, Homo sapiens
agaaagcacttgaacttcagggtcagagttgaaaatatcttggtggttgtatcatttgctaactgtgggaacttgggaaggtttcttgaagtccctttaacctcagttttttcatttataatttaagataatataatcctttttctagagataactttatcctttttgatgggttatgaagactggaaaatatttgtaaaatttctggctcctaacaaatgctctgatagcctgtgggaatacatgttcacattttggttaagtattttctttcccagtcatgttgcaattaatacagcctctttcctttatgttctactttagataagatagatcttaagtgtgctygagttctggtaacacatgtgagtaagatagaaattggtgattttcttagtttgggttgctgttaacaaagtaccctggattgagtggcttataaacaacggacacttcttcctcacagttctggaggctggaagtttaaaatcagggtg

SEQ ID NO: 896516 - DNA, 598 bp, Homo sapiens
caagttttaagataaatactaaattatttgaacacattttaattgaagaattatctttactatcatggctaatatttattatctgttatatgccagtcattattctaagatttcacgacaacaaacctgtatgacagagacatgattattattaccattttacagatgagaaagatgaggcacacagaggttaaataacttcataaaagtcactgagccaggatttgcacttattagtctagttctaaaacctgcacataaaccactctcctactcaattattctctcaaaggtatgatggctggaacatgtagaaggaaagatatttaaatgtgaaccatgaaaagtctgaaattattttaaaatgttmtcataccaacaactattataatatggatacaattttttataccagtgcctgatggaactctactatgcttacaatgatctgaacatcagcataatgggataattagaaccatattaacatcaggtacttactattcagcggctgatacaataacttgcatgactattatctttatgattattgccatcattgtcatcattatttatagagagcttatccgatcccagg

SEQ ID NO: 896517 - DNA, 598 bp, Homo sapiens
caagttttaagataaatactaaattatttgaacacattttaattgaagaattatctttactatcatggctaatatttattatctgttatatgccagtcattattctaagatttcacgacaacaaacctgtatgacagagacatgattattattaccattttacagatgagaaagatgaggcacacagaggttaaataacttcataaaagtcactgagccaggatttgcacttattagtctagttctaaaacctgcacataaaccactctcctactcaattattctctcaaaggtatgatggctggaacatgtagaaggaaagatatttaaatgtgaaccatgaaaagtctgaaattattttaaaatgttctcataccaacaactattataatatggatacaattttttataccagtgcctgatggaactctactatgcttacaatgatctgaacatcrgcataatgggataattagaaccatattaacatcaggtacttactattcagcggctgatacaataacttgcatgactattatctttatgattattgccatcattgtcatcattatttatagagagcttatccgatcccagg

SEQ ID NO: 896518 - DNA, 622 bp, Homo sapiens
attttatataagggacttgagcatctgcaaattttggtatctgtgagtagtcctggaaccaataccctgtggataccaagggatgactgtactagaatttccaaagtgtagtccttggagtctctgcatcagaatcacctagggtcttaataagaggcagatttccaaatatcacctcagcctcaatgaatctgagttctggaggtgaaacttgggaatctggactttaacgtgtgctccttggtgatcttgatgtctttgaaatcttgagaatctatgaccaaaagccccattccagacaagtgacagaaatcaactactgtcatttctgagccatccacaagtgtcatgggattggcttctcgccattaggcrtcctagaagcaggagaaggaagtcacggcactcatggagttcagccagcatttgtttgcagtggtgatgataatcataataaggctttcctgtactgtttcccttaatacattcaagcactgtaagtccctacattaatcctcacaagtttttaaggtagatattaagatcctcattttataggtgaggacactgagcctcagagagtttaaatatcttgcctaatatcacacagcatcatgattta

SEQ ID NO: 896519 - DNA, 622 bp, Homo sapiens
attttatataagggacttgagcatctgcaaattttggtatctgtgagtagtcctggaaccaataccctgtggataccaagggatgactgtactagaatttccaaagtgtagtccttggagtctctgcatcagaatcacctagggtcttaataagaggcagatttccaaatatcacctcagcctcaatgaatctgagttctggaggtgaaacttgggaatctggactttaacgtgtgctccttggtgatcttgatgtctttgaaatcttgagaatctatgaccaaaagccccattccagacaagtgacagaaatcaactactgtcatttctgagccatccacaagtgtcatgggattggcttctcgccattaggcgtcctagaagcaggagaaggaagtcacrgcactcatggagttcagccagcatttgtttgcagtggtgatgataatcataataaggctttcctgtactgtttcccttaatacattcaagcactgtaagtccctacattaatcctcacaagtttttaaggtagatattaagatcctcattttataggtgaggacactgagcctcagagagtttaaatatcttgcctaatatcacacagcatcatgattta

SEQ ID NO: 896520 - DNA, 594 bp, Homo sapiens
aggctctgagataggcactgggaaacaagaacaaatgcaaaattcatgtgactattttttaaatgaaattataagatctcaaagaaggtttgcattcatagttggccacccagatcatggccccagacactcagaagttctgttcacagtcttctgccatcaggggtccttgagtacatgrtcttgagaagtccagcaaggctgtgagataaactccagcattcttgcctctgctcagtccctactcaccctaaagcccccaggcctggagagccctctatttcctcccacttgagtttgcccctttttgcagatccagctccctccagttgcttcgtactccatgtgcccaccttctccacactcctgtaactgtttatgtttctcaccccttatttgactctctgcaaaagttaccttctatttgtattcacctatttacatttaagtctaaggagagagaccgccatgtcttatacagtcggtcagtctggctggtaacacattcctgtgtaaatacaccaaagtcaaaaacgcaaatgtcaaaacacaggcaaatgtcaaaacacttgttatggtttaaaaaccataaat

SEQ ID NO: 896521 - DNA, 583 bp, Homo sapiens
gatgttaacagcctctccgtcacgatcttaaatcaaggcttcggcaagatcattaatcatagtaaatcataaagtagttaagccagaccctggcatatatagatataataagttattatgatctctcaataaatgttagtttgcattttattatatcagtttccaaatgaactgacccacagggatcatttatacatcttgatcaggcagccttaattgactcactcagagtctaatccactcccattctatgagatgaaaacaccctataatgaactatttgggtatcacaaaacccccttaccaaataagtttcaaagggaraaaaacaaacaaacaaaagaaacctctttgtgtctggttctatactagagttgtcattgcattctagaacttactcaatgccctgaatgactaaatacagagaaaaaaagtcaaacttgcattgaaatgtctgtggaaagagcctctaatgcattaagactttcaagatggaaaacaaagatggaaatatttgaaacattaagtgttccctgatgttctttccagcctcccaccagcggcagagtttacctcagggcac

SEQ ID NO: 896522 - DNA, 657 bp, Homo sapiens
caggtagttgttccaccctttggaagggcaatcttatgggggaaggtgaaactttacttctgtgcctagattttagaagcagaatcaactcttaaatagctggctaaaggaagaataccattgtggggctaattccccagtaatttggttgacattgggttgcatttttaaacataactttttccacactcgcattcaaggttcctgtcttcccatcctcattcaagaaacatttattatgctccgtttgctaggcactaagatgcgtgctaaaaacgtcatgttgaacacttagttgtttgagaaagctaaattttcaatagtaagagtgttataaattacggtggatccacaaawtggagtattatacacctgttgaaaactatgtctagaggtagagaaagccttctttgaggagaccaaaaccaacaaataaaagcatgataaattgactatatcaaaatttaaaacttctctatgacagaagttaaaagataggcaacagaataggaaaaagtgattttcaacatatatattaatttatagtcagaatacgtgaataactacaaatcaattctccccaaaatgacagaaatatgaattgccgaataaccaaggcaatagcatggccagaaaacgtttgaaaagatgttcagc

SEQ ID NO: 896523 - DNA, 600 bp, Homo sapiens
gcagtttgattagtttagatgtatgatttagtagccaatataagaaacttgtaatttttagtaattagaatttattataaataataaaacagggtattaattattaatattatggtatctttggggtgtcacttttctggccagaaacctctgtggacaagtggcacctctgcccaagtattgcttgggcccactgggctcattccacccacccggcctgacaggctgcacttggctcatgctacyggcctggatcccatgcctgccaagggagattgcatggagtgacaaggggtgtgtggggaagtgtggggtctggctatttttcagtcagatgtgccagctgctgcagtggggtggtcagctccaggtaccagcatgggcaccagctctccacgaggctgcagctggaccagtcgcactccaagcagcttccacagctggcaccagggaaaaggtggtgcccagaagcttggagatgccaggaaccatagggccccaaagagggagtcacagccctggcttggagagctcccaggtctgggcttcccaaagggctgcagctcttcttttcttctctttgcccacaacatgttgagc

SEQ ID NO: 896524 - DNA, 557 bp, Homo sapiens
ctgcacataaacgagaaatcggcgtttattgtcttaattccttggatctgggcaattttatagcaagagaaagctaagcaacttgggccaggcacggtggctcacatctgtaatcctagcactttgggaggctgaggcgggtggatcacttgaggtcaggagttcgagaccagcctgggcaacatggtgaaacctcatctctactaaaaatacaaaacactagcagggcatggtggtgggcacctgtaattccagctactcggaaggctgaggcaggagaattgcttgaatccgggaggcagaggttgcagtgagccaagatcgtgccactgcactccagcctgggcaacaagagtgaaattccatctcaaaacaaagaccctcacccaagatgtctgctgttccygagctgatgctttctgacctctgatgcctgtgggctccctgcttctttgtaggtgccttgctctgcctaccaccaaccggaatgtgagattttgccccctcttcagtttacacacacttacataaaatgctgctcacagaaacacattgtg

SEQ ID NO: 896525 - DNA, 677 bp, Homo sapiens
gcctgggcactgggctgcctgcacagccacacagagtcagggaccttttgccaaatgttggtgaaatgtctcaatggcaaatttaattgtgcccaagtctccattctcggcttcctctcctctctgcaacaagcccctctactgccgtgtccccagaaattagaggagtgaggctgggcaggcatgtctgccaatgccaggagcagctttgattgaaaagggaaattgcagggcactgaacatcrcaggaatactaggaagatgaggccaacatcttctgtggagtctcagggttggggcatccacacgggcacatcgaagtgtaccacgctgcacaatggtagaatggctggcagagtggttcggcactttcggggaagctccaggtgattccagatgacaggaggtgactccctgtcttcctcatagggagctgccataaacaacacacagctggcaggagagcccagatggagcgagagttacaggccaagcaccacatctccccacccacccagggcactgctgactctggggccagctccgggaggaccattccccagcccggcgcaaggctctgctgaggtcaaccttacagcagtgagcaagagccgtggttaatttgtctgtagatatttcaaaatagggaatgatggtgctgaagtccctgtttttag

SEQ ID NO: 896526 - DNA, 630 bp, Homo sapiens
tgtactgaatactggaggcaactataacataatggtgtttgtgtatctaaatatatctaaacatagaaaaagtatagtaaaaatacaatattacaatcttatgggaccactgtcatatatgcagtctgtcatcaaccaaaatgtcattatggggttcatgactgcatataaaatctgcatcataaccccacaaggcaaaataacaatatttatcattataataataacctaacctacatatttactgtgtttcagacacttttcaaagcmctttcacgagtattaatatgtttaatcctctcaataactctaaatccaggtactattactacccctatttcacaaaagcaaaatatcgaggcacaagtaatttgcccaaagtcacaccattatgtattttgcagagtcagaattcaaattcaagtagtctagattcaaagtctgtgccattgaaactcaaattgagtgacctgtgtaaagtcacacagccaaaaatgtgtaggaacaggatgcaagctcatgaatgtctgatcccaaatcccaattcttctctcccatcagaacatatcgtccccacctctaacttggaatgcaaaagagatggacattttacacattattctctaattc

SEQ ID NO: 896527 - DNA, 616 bp, Homo sapiens
gagcagaatctgatcctcagtcattaccttctggccacttgacatcttcaaagagtctgtactactgtgtgtctttgtcccaacagcaaagcctccaagctttgtcacagctaacttccactcaggtccttcatcaagctctctgaggatgactaaggcttttcttgacatcagtgctacaactgggttccaaaaaaaaaagtcattcctccgctttccaggaattttatgaggctcatgcagtaatctctgtctrgacacctgaaatcagttctattcaattcctcagaccaaaatagggcagaggagaattatggatcttgccacgttctaaagccttatgcaggaaaaagggcacatgtttcctctactatgaggcaccgctaattgggaaattctgttgtcaccactatttcccttttattcttccctagaaagaaagtacaggtagaggtctttctagggactagacatctaaaccccaatcttcactgactagtctctctttcttaattccagaagatttgtatctctgccatagttggaaaagttttaaatcataatgcatttttttcaatatattgagaagagtggaaaatttatgtgatgattggtg

SEQ ID NO: 896528 - DNA, 640 bp, Homo sapiens
aaatacataaagcaaaatttaactattaacctaatattccccaaaacacatcagttaatatgccaaacatgaaagaatacagtaccacttattgagcacttattgtgggtgctcatttccaaaaataattttgcttaatccttatatcaagcaggtaccataattatttccattttacacataaagaaatcaaggattagagaacttaaagaatgttctcaatatcacatagctagtaatggtagaactggtattctaactttaatctatctagccttataactcagaaccttaaagtgggtagaacacagaaatayaaggttagcacaatactgctaaataaaacttgcagatagcattggggaatttgttataaataggtgattttcagccaacagaatgaaattctggaaaaatgtcttctccatatacaggagactgtccagaacaaagaagagatgaggcaggaacacggtccaaggcagaagaattggtgccataatagggtacagagtaggttcacagggactcataagaaccagaactggacatctcagtggagctaaatcagcagccagagtatgctggtgtcaagctcaaggttatggggttatagctggaccaaagtcctgtttctcca

SEQ ID NO: 896529 - DNA, 665 bp, Homo sapiens
ttttctccaattaaaacacttctcatcctgtttcttgttcccaagacttaaattactgaggctcctaaatgtttgaattattgaattcatgtaagaataccagtttatggctagtagatattaaaaagaagatataatttgagatatttccttttgattcagacstaacactgtgctttcaagcttaacatcctattattttcctatatatagctagtgtttatgaaagtttctctactccttatttttaaatccatataaataaagcatttattggatttatactgaggttgaattaaagaagtgtaagtttatttttagcatcgtgagaagtgtctcacttaaggtagtttttaatctggttgtgtttgcaatgaaacaatattagacagttttataattgatttctttctttttcctaccatttcatcagcaagtcccttcagctctttcaaaataaaccctgaatctgatcattgtggtctgaatcactattatattttgccagaactgctacaatagcctccaaattcttttttcctcttttcttacactcaattaatgaaaattttaccttacccaagtaaaatcagctatgcccagtgatcttttaaagacaaatcagattaacattcacctgctgaaaacccttcagtgaatttctg

SEQ ID NO: 896530 - DNA, 583 bp, Homo sapiens
cactacagcctcaaactcctgggcacatgtgatcctcccacctcctgagtagctagggctacaggctatttttttctatttttttgtagagatgaggccttgttatgttggccaggcttgtcttgaacaactgggctcaagtgatgcccccacctcggcctcccaaaatgctgggattacaggtgtgagccaccacacctggcccacatttaatttttcaaatattttaatatctgaagaggattctagagtatggatgggctgaaatttataccaatccttcccaaaggaaaaacatatttatttctawttttttgctaaaaaacttagttatggtgaccattatttcacagatgtttttaaaacattaaaaacatttttatgcacgtggtaaccattcaagtagtttttcagggtgaataatccctgtctgtctccaggtaccctcaaaaggggaagtcattgttagcagttttttctgaattcttccaggaggagtgtgtgctttcaattgtgtgtgtgtgtgtaaatgtatatatatgtatgtatataaacactcacatacacacatatacacacacat

SEQ ID NO: 896531 - DNA, 583 bp, Homo sapiens
cactacagcctcaaactcctgggcacatgtgatcctcccacctcctgagtagctagggctacaggctatttttttctatttttttgtagagatgaggccttgttatgttggccaggcttgtcttgaacaactgggctcaagtgatgcccccacctcggcctcccaaaatgctgggattacaggtgtgagccaccacacctggcccacatttaatttttcaaatattttaatatctgaagaggattctagagtatggatgggctgaaatttataccaatccttcccaaaggaaaaacatatttatttctaattttttgctaaaaaacttagttatggtgaccattatttcacagatgtttttaaaacattaaaaacatttttatgcacgtggtaaccattcaagtrgtttttcagggtgaataatccctgtctgtctccaggtaccctcaaaaggggaagtcattgttagcagttttttctgaattcttccaggaggagtgtgtgctttcaattgtgtgtgtgtgtgtaaatgtatatatatgtatgtatataaacactcacatacacacatatacacacacat

SEQ ID NO: 896532 - DNA, 613 bp, Homo sapiens
cctgatttcccattccacatctccatatttctgtgtgtgtgtctttaattcctctagcgccactggttagggtctccctgaccgagctggtcttggcaccaaggacctcatttcttatggggaaattgaggcctggagaagaaaaacttcactaaattcccagagctcagtaggaagctttatagtttaaaagttaagarcgtttatcttgaagtcagactgatgtaagttcaagcactggtcctaccacttcctggctgtgtgacctcgaacaagttacttaagctctatgagccttagcttccttatctgtattaggggacattaataatacctacttcaaagatagttgtgaggattgaattaatggaaccagacagtttcagggcttaatccataaagcctagtcctactactcactagctgtgcaaatttgggcaagtggcttagtctctctgagcctcaattttctcttttataaaatggaatgatcaataaatacaatacttacatcttgagtttgttgggaggattaaaaaaagatgagtatggacagtgcctgactcatgtcaagctctgatacaatcgaaatgttaggaattctttcttattt

SEQ ID NO: 896533 - DNA, 613 bp, Homo sapiens
cctgatttcccattccacatctccatatttctgtgtgtgtgtctttaattcctctagcgccactggttagggtctccctgaccgagctggtcttggcaccaaggacctcatttcttatggggaaattgaggcctggagaagaaaaacttcactaaattcccagagctcagtaggaagctttatagtttaaaagttaagaacrtttatcttgaagtcagactgatgtaagttcaagcactggtcctaccacttcctggctgtgtgacctcgaacaagttacttaagctctatgagccttagcttccttatctgtattaggggacattaataatacctacttcaaagatagttgtgaggattgaattaatggaaccagacagtttcagggcttaatccataaagcctagtcctactactcactagctgtgcaaatttgggcaagtggcttagtctctctgagcctcaattttctcttttataaaatggaatgatcaataaatacaatacttacatcttgagtttgttgggaggattaaaaaaagatgagtatggacagtgcctgactcatgtcaagctctgatacaatcgaaatgttaggaattctttcttattt

SEQ ID NO: 896534 - DNA, 613 bp, Homo sapiens
cctgatttcccattccacatctccatatttctgtgtgtgtgtctttaattcctctagcgccactggttagggtctccctgaccgagctggtcttggcaccaaggacctcatttcttatggggaaattgaggcctggagaagaaaaacttcactaaattcccagagctcagtaggaagctttatagtttaaaagttaagaacgtttatcttgaagtcagactgatgtaagttcaagcactggtcctaccacttcctggctgtgtgacctcgaacaagttacttaagctctatgagccttagcttccttatctgtattaggggacattaataatacctacttcaaagatagttgtgaggattgaattaatggaaccagacagtttcagggcttaatccataaagcctagtyctactactcactagctgtgcaaatttgggcaagtggcttagtctctctgagcctcaattttctcttttataaaatggaatgatcaataaatacaatacttacatcttgagtttgttgggaggattaaaaaaagatgagtatggacagtgcctgactcatgtcaagctctgatacaatcgaaatgttaggaattctttcttattt

SEQ ID NO: 896535 - DNA, 671 bp, Homo sapiens
attgttggcgagtcatagccagcatttttatttcttggggacacagaaaataatgtgtcttaccctcagtggtgtcttcaattacatgaactatgacaatttttacacctttataagtcttttaaaataaaaaattcatttatacttcagaaaaaatacctatgattagaccacgagttaggggagactttgcagtggtgattgccttggagttgccttgamggaagagtgggagttggcccaacgggagtgggttggtggagaaggcattcagactgagagatagcatatacagcatattataaagagtgtgctgtgttggggaaagggctagaagtttgatgtggcaaaaatgtaggctctgggatgagatgagaatgataaactggctggaatggtaacctggagccagcctttgaaaggctctgtgtgccgtgcgagggagttgaggctgtcttggcatgttaggcagcattgtaaagcagctctccctccctgtttgcatcagcaaaggggtgggcagcattggcaccaataacagaagagtgaagacaatacatatgtcgaataagatctctagcacagagttctccaaaatggaaagggctgcaccctggaatcagatggaagggagaactttaccaagggggtgctatttccttctgctctgt

SEQ ID NO: 896536 - DNA, 652 bp, Homo sapiens
tgttgatcctaaccctgtgtcagcctaggctaatttatgtctttttttttaacagaaaagatttaaaagtaaaaaaaaaattaaatagaaataagtttctagaatgaaaatataaggaacaatatttttgtacagctttgtaacatgttggtcttttaagctaagtgctattacaaaagctgaaaagttttaaaaattaaagtttataaagttaaaaaagttacattaagctaaggttaatttattattaaagaaagaaaattatttttaaaatcaatttattgtagcctaagtgtacagcatttataaaatctacagtagtgcacagtaatggcctaggccttcagttcactcaccactcacttgctgactcacccagagcaacttccagtcctgtaagctccattcatgatgagtaacctatataggtgtgccattgtaaaaatctttttaccatatttttactgtactttttctgtttacatatgtttagatccacaaatacctaccattgtgttacaattgcctacagtactcagtatagtaatgtgctatccaagtttgtagcctaggagcaatargctttatgatatagcgtaggtgtgcagtaggctatatcatctagctttgtgtatggacactttatgatgtt

SEQ ID NO: 896537 - DNA, 542 bp, Homo sapiens
attttctgcaatttggactgaatcttgaattctttccaggctacaggtccctaaacttaacgttttcaaatttttcttccatttttctgacaatgacattgcgactaccttttcccgaagaccttgaaagctaraacttattccttgtaatacaggcaagaaaatcatgtcagatcagactgccaccacctttttcctctgtaactaaaaatgctttgagtctaatatctggataaattgtacccaacattaaccttggcttttatttctataaaaatgccttttattaaaaacttttgccttcatcatatatagaggcctagcccatcatatatagaggcctaacctcctgaaatgagacacagttgtttaactgatctagtcacagaactaaaactgactataaaagatatggtatatttaaatgtactctttcctgtttatcccaatttgtctttctaacaacctctgacccaaatctctctctactagcaaactcatctctgactggctctcagggctattcaccagaatctctcagg

SEQ ID NO: 896538 - DNA, 636 bp, Homo sapiens
atggagattttctctgtttgttggttttggggatactaatactgcatataaaacaaccccaaaaacattgcagtggccaccaacataagctaaggtattattcacacatctagagatgggctgcaatggttccacttcaggctgaaagtcatgtttaggtcgacttcctttgtctgtcattgcaggacccaggtcaaaggggcagcaatcccctgagacattcctttctcattttcccattcagaggcagcagtgaaaaaggccaagtgagtcaaatcataaccatggaagtccataaaaagcccgagaaagcctggtgaaatcacaatcactcatactccaatgcaaggaacacagtcaagtccaacatcaatggaacaagaatgttttctttttgcattagagaagaggaaaaggaacagtgaatatttactaaacaacagttgcaaagttaaaagtgaagttcaaaatataaaagaaaaattttatttggaagtttcaaaaatactttacatatacaaaatcataaacatctaagataatcaaaggccaggactccagagaaagagaaagtgagtggtgacataaggagsaaatcagacaggctaatctgttccagcaggggcagttttaatc

SEQ ID NO: 896539 - DNA, 590 bp, Homo sapiens
tgtactaatctaggtgcaaggaagacacagataaactggggatgtttcctaaccctaaaaagtgagcacacagatgagtgagacagacacatacacagataatttccactaacawggtacagtgaagaaaaatatgcatctgagcatgatatgatattaatatgtcatgagagaaaagaagaagagcagctagcccaaagtggaagtggaattcaggtaatgcttcttgaaggtcatttgcccaagatgagtcttgatgaagataaagaaagatggggaaacaattcagaatgatggaatagcctgagaaaggcatgaaagtatgaaaccttgcatagtgtagataatatttctagatcataaaaaagacaagtacaggctatacttaagaggtaggtatggtcctcaatactgagagtcttctataccaggttaagatgtgtagaggacatcacattgaccagaggaagccactaatagggattgattactctggaagccttatggaggaggaatttaaaaatggattaggcacataagttagggaacaattgcagtggttcaggagagacatattgagggcatgaagg

SEQ ID NO: 896540 - DNA, 590 bp, Homo sapiens
tgtactaatctaggtgcaaggaagacacagataaactggggatgtttcctaaccctaaaaagtgagcacacagatgagtgagacagacacatacacagataatttccactaacaaggtacagtgaagaaaaatatgcatctgagcatgatatgatattaatatgtcatgagagaaaagaagaagagcagctagcccaaagtggaagtggaattcaggtaatgcttcttgaaggtcatttgcccaagatgagtcttgatgaagataaagaaagatggggaaacaattcagaatgatggaatagcctgagaaaggcatgaaagtatgaaaccttgcatagtgtagataatatttctagatcataaaaaagacaagtacaggctatacttaagaggtaggtatggtcctcaatactgagagtcttctataccaggttaagatgtgtagaggacatcacattgaccagaggaagccactaatagggattgattactctggaagccttatggaggaggaatttaaaaatggattaggcacrtaagttagggaacaattgcagtggttcaggagagacatattgagggcatgaagg

SEQ ID NO: 896541 - DNA, 624 bp, Homo sapiens
ctcttgtggaagttatttaatttctctgactttctgtttcctcatggggaaaagattaaaataaataatgtagacaaaaagcactttgtaaatgatataccaaggtactatttttaatttgggtagcttgagtcaaaagaactttagatttggtaaatgtgaactctaatactcaagaaccctgtggccctgttgttcttgccagagctgtgggttgtaaggaacagagacccctaaaaggggagggaggggccgtcaaggatgtggagtctcgtaggtgtgcagggctgtggttccgcgagccttgtgggagacaagtgaaggtgagtctagtttcacagtagcccctgggaacagcttctctgcctcccttgggcagcctgggttttcgctctcagcattttggcctttttgtgtgcatctgctctattctgtctccattctgtcagcttacattgcttacttctcatttctactcacctaataatttcaccttatttgtgcccacatcatccttagccctatctttgygcaaactttctgttttaccatccactaccactgatatggtttggctgtgtcctgactcaaatctcaatttgaactgtaataatccccacgttt

SEQ ID NO: 896542 - DNA, 424 bp, Homo sapiens
cctgatttccaattattttaattttcaatacaaactggacagaaaattcatttcaatgcagttgagctttttattctttctaagctgagaytaagtcatctgctatgtgaaccgtaagtccaggggcagtaagagtaagtacatgggcttctccctggcaccagaagtggtctctggagccatgtggatggaatagacttggaggagttactttcccattttcttgccacctttcctgtgaaatttacatcctttggccttatgaaaactgacagaaaatatcaaagaaatttactttcccaaaaagaaaaaattatggaccttttaggccaagttattgctggttctttttattttttaaattaaatttttttttctgtctatccctttaatgggcgataaaattgattgaatctctggctgc

SEQ ID NO: 896543 - DNA, 424 bp, Homo sapiens
cctgatttccaattattttaattttcaatacaaactggacagaaaattcatttcaatgcagttgagctttttattctttctaagctgagactaagtcatctgctatgtgaaccgtaagtccaggggcagtaagagtaagtacatgggcttctccctggcaccagaagtggtctctggagccatgtggatggaatagacttggaggagttactttcccattttcttgccacctttcctgtgaaatttacatcctttggccttatgaaaactgacagaaaatatcaaagaaatttactttcccaaaaagaaaaaattatggaccttttaggccaagttattgctggttctttttattttttaaattaaawttttttttctgtctatccctttaatgggcgataaaattgattgaatctctggctgc

SEQ ID NO: 896544 - DNA, 640 bp, Homo sapiens
aaagatactagaaaggtagagtctagggagctgtcagcaagctttgcttctattttttatactggtcagttgtgacttttgttaagtcaaagaacttagaaatttakatgaagggaggctgcctttgtgcagccagttagctggtctgggcagtcaatttgagtggtgaaattaaggctttatctacttatatttgggaggaattttctggcagattgcaaaatcttgattaagttagccccagtttaatatgtacctgtggcgggcttttttttttttttttctttaatcctttacattttcttgttataaattatgaattggtccacttcttattagacagactttgtatacattccaaggcaaacataaagtaaaaatcatattttcaaatatgtaatagaataattgagatgattctcagatgcatgtcccttagtagagtcatagtgaaggcatttgctggctggctggaggcattgttttattgtctgtttcaactcttgagagaaatgaacagatggagacctgtattagaagtactcacacatagaaaaagctttggaatatttttagcattgtactcaggagcagcaaatcctatttccacaattttgtgtatttgttagtgtgttatctt

SEQ ID NO: 896545 - DNA, 617 bp, Homo sapiens
tgggctgagccggtttttccttgttgctattttaaaagataattaatggtgaactagagatacttagtgtgaggggacatgagtgagagaaacagtggatagtgtggcagtttctgatcacgatgtctctggaggtgtccagtgtgaggtgcagctggtggagtctgggggaggcttggtacagcctggggggtccctgagactctcctgtgcagcctctggattcaccttccgttaactactgcatgcagtggatctgccgggctccaggaaaggggctggagtgggtaggtttcactaaaaacaaaactaatcgtggaacaacagaatacgccgcgtctgtgaaaggcagattcaccatctcaagcgatgattccaaaagcatcgcctatctgcaaatgaacagcctgaaaaccgaggacacggccgtgtattactataccagagacacagtgaggggaggtcagtgtgagcccagacacaaacctccctgcaggggcgcgcggggccaccgggggcggtcaaaacccactgaggacaggacaggtcccaggagcagatgctggggkagttttcctttctcatcagctggagaagtcaggtttgtatttgcagga

SEQ ID NO: 896546 - DNA, 654 bp, Homo sapiens
gtagattcttctcaggtataaagctctgctttcttgtattatgtaatgtttttggtttcggatgttaccagaattacactgcactgtgagaggattcattcctcgtgtgtgcaatagtgaatgaaagctscaatgttaggggtggctttgaaagctacgttaggggtggctaagggcagttagcaggaaatgatcatcactatagaaggctactcatttctttgcacatttccataaataattgtagtttatgccctaaaaactgcatgctttcttggccctttttcttaaatgcctccaatccaagaccagtcatctaattaagctgtatgtcaaagaccaccaatcaagttaagtctgtttaatgaaacactttgtaaacaaaaaagtacatctgtgtttgtatagtcagctttaaattttacattgctttacaaatattaattttgtaaatttagtctcataattatcgtcagtatttaaaatcttaaagtcatgctatgttaaattaagtaatcttagctttctcactatgaattagagttactaagaattagaatagtaagagcatgtaataagcttttggtgaagtttataaagaaagatgaagatacgttttttgctttaaaatattttgttttccagtttacagga

SEQ ID NO: 896547 - DNA, 650 bp, Homo sapiens
taaaatgatctgctgcagaattttgacttccttgctgtgcatttttgcatttaaattgaagtttctattactcgtgtgtctagaatgtaaaaatacgtcttacattttctcgaatttttcatttcactggagtttccagaagatgagaaaacctcccttgtgtataaaatacctggtaacacattgctcaatagtttcgttgctgagaccagctcagtcgggagaccctaacccagcggtgctagaggaattaaagacacacacagaaatatagaggtgtgaagtgggaaatcaggggtctcacagccttcagagctgagagccctgaagaaagatttacccacgtatttattaacagcaagccagccattaatattgtttctatagatattaaattaactaaaagtatcccttatgggaaatgaagggatggaccgaattaaagggggtgggtctggctagttatctgcagcaggaacatgccctaaggcacagatcactcatgctattgtttgtggtttaagaacgcctttaagcggttttctgccctgggggggccaggtgttccttgccctcattccggtaaacccacaaccttccagcgtgggcattatgrccatcatgaacatgtcacagtgctgcagatattt

SEQ ID NO: 896548 - DNA, 695 bp, Homo sapiens
tttataaatactggtctattgctcaattagggaaaatgatctctgttggagaaagcttccaatttkggagatttcttcattgcttcttgagttgtaagacatgaaccaaaaaattgactggagttttttggagtttcatggctggagtttcatggctgtgttgttaaaaatttcttatacggtttctttcaattatttgagatcagtttttctgatttttttctccagtagataaattttcacaagatctcaggaaaccatgtctctggtgctttagtttgaaaaactaacttcctaggtaaagaagcttctgtctaaccatgatgagctcatttcttctgcataccatgaagtttgagaccccattgtccagaatcatgaaaattttacactccagtttactgaaaatcttgactttgaatttaatattgattggcattgacaaaaatggttcattcttggatgtgtcctaagttgctcacccaacatatcagtggactgagaatcttccattagctccctctgtccatagcactgagtctattgacaatctttgcagtcctctatgaaggagagtcctgaggttcatcagattcttgtagacactcagatgaaccaaaggaattaacggaattgaggactgccagccatttccacaacactaggaataattaccatctaagtgtaaaggtcta

SEQ ID NO: 896549 - DNA, 695 bp, Homo sapiens
tttataaatactggtctattgctcaattagggaaaatgatctctgttggagaaagcttccaatttggsagatttcttcattgcttcttgagttgtaagacatgaaccaaaaaattgactggagttttttggagtttcatggctggagtttcatggctgtgttgttaaaaatttcttatacggtttctttcaattatttgagatcagtttttctgatttttttctccagtagataaattttcacaagatctcaggaaaccatgtctctggtgctttagtttgaaaaactaacttcctaggtaaagaagcttctgtctaaccatgatgagctcatttcttctgcataccatgaagtttgagaccccattgtccagaatcatgaaaattttacactccagtttactgaaaatcttgactttgaatttaatattgattggcattgacaaaaatggttcattcttggatgtgtcctaagttgctcacccaacatatcagtggactgagaatcttccattagctccctctgtccatagcactgagtctattgacaatctttgcagtcctctatgaaggagagtcctgaggttcatcagattcttgtagacactcagatgaaccaaaggaattaacggaattgaggactgccagccatttccacaacactaggaataattaccatctaagtgtaaaggtcta

SEQ ID NO: 896550 - DNA, 564 bp, Homo sapiens
cacctttttctttttgaggctggaaattggcatgattcaagatgcgtaatgttagcaggtttcagaatgatayagcgaaaatcataatgagaaggcaagagagagaataagagaaagacaggaaaacaaagaaacaaataaatttcacaagagaagaaactgctggatgtcagtgttgggttttgttcctagacatatctgtactgagtgagaaaccatgaagccaagggaagagtctagaacttgttcaagtgaagcatcagcatatttctccaaggcacctattgtcaccccatcacaagggtgatgagtttttgaataccattaaatatgagttcctagtaagtaatcatgtttccatgaaattcagttaaaatgcaaagggtgtgtccagatcactcacgcacaaaaatacaaaatttgcctttgcatttatggctgcatagaggtaaagtccattgagacttcagcaggttacagagatctgttaagttttggattcccataggagagtgcctcttagtgaaggttggactattaattaagtatgtacaaattccctct

SEQ ID NO: 896551 - DNA, 605 bp, Homo sapiens
tgacccacctcattttcacttcataaacctgtggattgacatgttggagttactgctgcatttgtagataatgataaataataaggccttttaacaatgtttgaagctgctattctctgatrtctcttctaaaataaagaatttccaagtggatgacaatgaaaaaattgttagaaatatttggtggtaaggcatctttaacatcctgttgaatgtttctgcatagcacatcaatcccttaaaatactttgctatatctgcatttaatgaatgagtctaatattgaggtgcaattgaaaatacctgggcctttgatgaatcagctcatagggtgataatgtctgggtccttgagaaagcagaccctgtgttgtaagttttagtagaagtaccttttgcaaagaaagttcatgtgtttctgaacattatgctacttttaacttaagaatgcaatatatgatttatttttacttcaaactgggtatatacccagtaatgggatcgctgggtcaaatggtatttctagttgtagctccttgaggaatcaccacaatgtcttccacaatggttgaactaattttcactcccaccaacagtataaaaatg

SEQ ID NO: 896552 - DNA, 605 bp, Homo sapiens
tgacccacctcattttcacttcataaacctgtggattgacatgttggagttactgctgcatttgtagataatgataaataataaggccttttaacaatgtttgaagctgctattctctgatatctcttctaaaataaagaatttccaagtggatgacaatgaaaaaattgttagaaatatttggtggtaaggcatctttaacatcctgttgaatgtttctgcatagcacatcaatcccttaaaatactttgctatatctgcatttaatgaatgagtctaatattgaggtgcaattgaaaatacctgggcctttgatgaatcagctcatagggtgataatgtctgggtccttgagaaagcagaccctgtgttgtaagttttagtagaagtaccttttgcaaagaaagttcatgtgtttctgaacattatgctacttttaacttaagaatgcaatatatgatttatttttacttcaaactgggtatatacccagtaatgggatcgctgggtcaaatggtatttctagttgtagmtccttgaggaatcaccacaatgtcttccacaatggttgaactaattttcactcccaccaacagtataaaaatg

SEQ ID NO: 896553 - DNA, 605 bp, Homo sapiens
tccagaccattttctaaatctaagaaaactaattttatctcactgcttcttagtcttgtttcctgcagctgacaaccaaaactgtcagcgatagagcccagtgtaaatcaccagcctttaattattgcagaactatgattttacaacaacattgtgagttacataatgatcctactttatggccgcggtgcaaatgcttaacttccactaaatcacagagctcagaatggctagcatggaggtgtatatgtatatgtgcattgttctagaaatttccaattactgtatattattgtttgcagtaattaggtcaatctgaactgacaaaagtctccatggccttataagcacagagaccacctccacggcaggtggaaatcaaggctgggaacaggctaccagctgctcccctgggattcctccaattaccctgtttaaagcctctgctcactcatgcgctggaagagggatgtcagagatgcagyctactcttcctaaagggctgacagggcataaagacaagactgattatccatggaacattcctataggaatgcacctatgtgcaggcacactaataagctgtgtgtcttgcagtgtgtaaa

SEQ ID NO: 896554 - DNA, 706 bp, Homo sapiens
ttagaatgataattgtctcttttttttcctttttttttttttttttgatactgagtctcactgttgttgcctgggctggagttcaatggtgcaatctcggctcactgcaacctctgcatcccaggttgcagcaattctcctgcctcaaccccccaagtagttgagattacaggcgcctgccacgatgcccggctaatttctgtatttttaatagagacggggtttcaccatgttggcctggctggtctcaaactcctgacctcaggtgatccaaccgcctcagcctcccaaagtgctggaattacaggcaggagccactgcacctggccaattatcctcttttcatagatggataaactaacctaggcctttgaaaataaacccttatctgagagtgaaaagataagccatagatttggagagtttgcttgcaaatcaaatatttggaaaaggacttttattacaaatatacaaattaccttacaattgaacaacaaaaccacacaatttaattttaaaatgggcaaagacctgaatagaaagtgcatctaacaataagtataaaaagtgaccaactggattttcattaggtaaatgtatgtttaatattgaaaaaatcctagtaacctaatagaatgggtaaaatacacaatatagacaataccaaatgttgacgargaagttgaaaaacaggaattttcaccca

SEQ ID NO: 896555 - DNA, 495 bp, Homo sapiens
gggttggttccaagtctttgctattgtgaatagggaattgttctaatttcaaactagttaatttttatcttcatgcagctagattattatgtgtggctatttattccgagagkgataaagacaacattaacaattttcactgcaggcatgtctaggcaactccctgtgcactatgaccctgggacgttggagattctatggggactcttccctacctgcctaggagagttctctgccttctacctctagcattttcctctttgaagaagtacatctaactgtcattagaatagagacaaagacaagtcttaactgcttccagctgaggagggatgctgtttggggaagatctctcttggaggtctaagggaccccaggaaaagggagccattatcccaggcttcagttgcatgaccatttggagtttgatggtctgaaaatgagaagaggcaaatctggttattagaagacatgtatgaaaaccaaacaaggtgg

SEQ ID NO: 896556 - DNA, 665 bp, Homo sapiens
aaatcagagactcctgaatatacacatgaatacacactgggtctacctatatttttagggaaacactagaatacagcaaaataatgtcatgattttattaaaaaggggggtttrtcaaaccacaccaggcatgtccagctctgtcctggagctggttcagggaacaggtgggtcctgtgtttgggagccatgacaacaagctcacagcgtcagttctagttgaaacctcaaaaaggcaaagggatctcaactaaaatatcatgtggatgtcacatctgtgggtgctgcatactcccccgatgtgaatatggaaaggttaattacctcttgaactctctgccgagattagtgctggtctctcaggaacacccaaaatggctcgatagagccagaaagcagactggctcagggtttttgtgatggtttcgtcgtgggtcagagtgaggcttcccacgcacaggaaggggattgtacagtgcgaaacacccactggtgtcaaatgaggaagctcccgcaattcctaactagattcacattgtgtgataaaagacacacaatagacataacttcatggtcggatatcacaaaatgccgttaaaagatgtggtaaaaaggcaactttaaatttttagtcattggagtgcgtacaacacaaaaatcatttt

SEQ ID NO: 896557 - DNA, 604 bp, Homo sapiens
aatcctctcttctccttgtgcatataacacctctctggtggccaggcacgatcgctcacacctgtaatcccagtactttgggatgctgaggcgggtggatcacgagtcaggagttcaagaccagcctgaccgagatggtgaaaccccatctctactgaaaatacaaaaattagccaggtatggtggtgcacgcctgtagtcccagctactcgggaggctgaggcaggagaatcacttgaacctgggaggtggaggttgcagtaagctgagattttgccactgcacttagcctgggtaacagagcaagactccatctcaaaaggaaaaaaaaaaaaaaaaaacctctctctgatttgaccactgaagggttttctgctgatgtgtttggaaggggagatccagggggatgagtttcaggcagggaggagcctgtaatgtaaattcttcctaaacagtttcaatcattccttctyatagtacaaccttgagaggtacctgaatccttcacttaagcctttgaggaactctgtggggtgagtctgccactttcaaggtgtctccgtattgcaggcatttaagttctctatggtctatgagtttatta

SEQ ID NO: 896558 - DNA, 575 bp, Homo sapiens
ggctaaagtgctcccaggtcctcggtaaatctgaaaggcaatccgggacacaggactgcaactcctagtcaagtcctaatgctgggctggctttagagtcagcggactggggtagcgtgtggcctagggagacacaagctggggtggctaagggaatgcttgtgccacccctctcacaaccccaggcagtgcctctggaagtgactccttccttctgcttgaggagaggagagcaaagagtaaaaaggactgtcttgcaccttcattaacaactcagctacaaaaggatcagataccaggcagagttagttgtgaggcccccattccaggccttagctcccagatgacatttctagacacaccttgggacagaaggaaacctgccgaatggaagagaagaacccagtcctagcggcattcatcatctgctgacaaaagagctcgggccctgaataatgagcagtgatacccaggtagtacacastgggccttgggtgagactgaggcgtgctggcttcaggggagcccagcacatttgcagctgtggaggctatggagagagactccttgtgctt

SEQ ID NO: 896559 - DNA, 422 bp, Homo sapiens
ttcttgctttcttagctcacgcaacagctggttgtttaaaggagcctgtcacctcctgctctctctattgctccctctctcgctatatgacaygccagctcccccttcaccttgcgccctgagtaaaagcttcctgaggcctcaccagaagctgagcaaatgccagtgccatgctttctgtacagcttgcagaaccatgagccaaataaacatcttttctttataaattacccagcctcaggaattcctttatagcaatgtaaaacagactaatagagatgtgaaggagtctgatttctatgccccagcgaggaggacacaggtggtttgcatggaacaggtaatcagagtccttgggagaacagtggtcattttggcataagcagtgggtcatgcacccagaggcctggggggacaagttt

SEQ ID NO: 896560 - DNA, 469 bp, Homo sapiens
gtgcctgctctgtgccaggcacccagactatttatcagactctcctggccaggagcagtggctcacacttgtaatcccagcactttgggagcctgaggcaggaggactgcttgagcccaggagttagagaccagtccagatcatgcagtgagaccctgtctctaccaaaaaaatttaaaatttagccaagcatggtggcacatgcctatagtcccagctaatcagagggctaaagagggcagatcacttgagccagggaggtcaaggctgcagtgggccgtgatcatgccactgcattgcaggctgggcagcagagtgagaccttgtctcaaaaacaaaacaaaaagttcctaactggtaatactgcccacagatgatctgattccacctctatctcctaggactcttacaggagcaasagacagaaatctcaacctcatatggcttgagccaaaagggcttttattgg

SEQ ID NO: 896561 - DNA, 625 bp, Homo sapiens
tccagggtgtagggagagagaaaggagggatgactgctagtaaataccaggtttctttttggggtggtgaaaatgttcaraaattacatagagagtagtgatggttacataatgttgtgaatacatcaaaaactacttaaatgtatacttttaaatgatgaattttataatatgtaaatatgttagttttttaattatgccaaaatcaaaaatatatatacgtggcagagtaagaattttaactgagtgtctgacatcagacccacaatgccacccactgtcatgctaatagttgatatacatttgccaaattaaagtattagttcattcgacaaattcattcagtcagtaagtatttactgagcagtggttatgtgccaggaaatgtattttttttaaatgtcacaaaatacacataaaagatatactttaaagcattttaagcgtataattcagtggcgttaagtacattcactgttgtgtaaccatcaccactatcaatttccaaaactttctcaacccctgaaacaaaaactctctaactattaagcaaaaacccttattttcccctaccctcagttcctcataacttttattttacttttcatttctaagaattctatat

SEQ ID NO: 896562 - DNA, 629 bp, Homo sapiens
tgttccctttggccctgtccctcsgggtcagccttcactgaggctgtggagtattgggttcttttcactatgaccttgccatatagttaggtgcttgtttctcattgcctgtggctccctagtctttgcttcaaacccttcacactttttctctaacttttctccatgccatatcatcatctcctttgtttacttcagggtcacttacctaaagaggatgaaagtttctttggggcttctgaataaaggtggccaggttcctaaatattcacattcatcttgccaagcagacttctgattgcctaaaatattctttatgatgtctcctccataaaaccttctagagtgatccaaggagagcaccctgcttcttcttctgtgaaccctgggaatggattcatttttgttgtctaccagtagaccatctgattgattgaaacatcttattccccaacaatgacttgggaaaagaagagttttctgtgagaaagaattagtgatgatcagagtgaaacatgtatgttaaagctatattatagttagttttgaatgctgtttggtactgattgtagaatttggggcattttgagatttcaataagtgataaaagcatcttaaatcttgaaaca

SEQ ID NO: 896563 - DNA, 629 bp, Homo sapiens
tgttccctttggccctgtccctccgggtcagccttcactgaggctgtggagtattgggttcttttcactatgaccttgccatatagttaggtgcttgtttctcattgcctgtggctccctagtctttgcttcaaacccttcacactttttctctaacttttctccatgccatatcatcatctcctttgtttacttcagggtcacttacctaaagaggatgaaagtttctttggggcttctgaataaaggtggccaggttcctaaatattcacattcatcttgccaagcagacttctgattgcctaaaatattctttatgatgtctcctccataaaaccttctagagtgatccaaggagagcaccctgcttcttcttctgtgaaccctgggaatggattcatttttgttgtctaccagtagaccatctgattgattgaaacatcttattccccaacaatgacttgggaaaagaagagttttctgtgagaaagaattagtgatgatcagagtgaaacatrtatgttaaagctatattatagttagttttgaatgctgtttggtactgattgtagaatttggggcattttgagatttcaataagtgataaaagcatcttaaatcttgaaaca

SEQ ID NO: 896564 - DNA, 590 bp, Homo sapiens
tatttttccacattgaaacactttgcagacacaaatatctatgaaaagatgctttgtcagccactgtgcctttttttctgtgaagactcaacggatgtgtgtgtttgtatgtttgttaacagttacatatgtttgtatgagtgtatatatatatctgtgtgtgtgtatctctaacgtcagtgtataagtaagttgggtttatggtgggctttgactatgtcattaggtgggtacaaaacccaactgatgtggagaaaaattgatgtttgatgttgatagatatgcttatacctaatttttagtttttaaactattttaaaatatactatgattttatatgtatatttcctatagactctttaagatgtatttataatgtttctaatatgaaatcactaaactctagtacattatagcaggtgctttgtaatctggaatggagaagaggtaggggcatttggggattcctgtttacttgctgctgccacaccttttccgactgatctgtcctggtagrtgtttattagcaaaagtcagtatcaccagctctttggcacctttctgtttctgcttgtgaattcataatgttt

SEQ ID NO: 896565 - DNA, 643 bp, Homo sapiens
gaagaacaaaagcatgtgaggctagacgcacacattttatcatcctcagtccgttctcatggggagcccaggacctctcttcaggggcgagtcttccatggtgttttattgtcaggcagagaacagtgctactgctgctgtagatttctctgactgggctctcctggctgtgacctgttagagcacacgtgcacacagagatgcacacacacacacacacacacacacacacacacaatgatcatgtgcacagcacaggatatgagcagaaatacatcacatttctttgatccttattgcagtcaaggcacatgggtgcagctgcaacttgaactttagaatcagggtgtctcgttcctcgaatgagttcatactatctagcattttcattcttgccatctgtcttctacaataggtccctctttttttccacctcatggaatgaatgttcttttatcatcctgtttattaaaaaacctccaacatatcactacacagaggaaaagcaaggctgttgtggatactcatgtgcttatgctgtgcacctacattcagccccagagccacataaagggctttctaataactgggatggcaattgcagatggccaacattrtaacactgaggcacagaaaatagtct

SEQ ID NO: 896566 - DNA, 672 bp, Homo sapiens
atcccacagatacctacgtcggataagattattctgagacatgacacaccaagacaaagcaatgccacttgaagattttctctaagaacagacaaaaacaagggcacctgcaacgcacaaaacaccaaacatccccttctcgtgctaaacagaatggctgttccttctttactcagtcagaattgccccaccttctaacagcattctatctacagcaaagcccggttcctcagtcttaccccaaatcatgcaaccgaagttcaaattctgtaatgggtttttttctataacctaccgtccgtcgctcatggtgtgtggtctcctttgcctcaaagaacactaaacccaatttgttcagcttatggtgtgttcctggtggtctttcaatgaagggccctgacagtatcaaagtatcaaagtctctcccaattcccataaaaccaactaccgtcaagcaaattaattccctacccacaatggagcaattttattttaaggcctttaatcgtgtccacatacatgttctgtgtattttcctattacaggaaaaactgtatatactattctggattctacttttawctgctgaacattatatcaattttaatggctaaatcatatcccaccatgattttaaagaatttctccttacaggtataaaagaagacaatg

SEQ ID NO: 896567 - DNA, 610 bp, Homo sapiens
cacactggtaattctactgcagcaagccttgaatgacaacagtggacgtgaaagtagttgctgcctttgaccacatcttcccaaagtggcacgtcaccaacagactttaaaatcatgacgttataacgtaatggctgtgaagatttggaagaaagcactctaaaatgagagctctgagagatgtagagagaaggcagtcaaggaatagcgcctataagcacctcctgcacatccggtccctgcgcctccatcctcaccctgccctcagctcactcccctcctgttagaaattggctgtgcccctgaaaagtcatttgcatttgcctaaagactgagtacacaagctcattccaaagtagaaggtgttgaagttccattttggcctcaggtcaaaattgttttctctatttcagcttaatgagcaagaaagcagaatctaatatgtgtatatttctaacgcctgtgtatatttctcaactgtttcccagctcagaaaggtgaggagtatgacagtcaccctgaaatgacaacagaagccaacaataacaattatagtaataatgtgtgtayagaaagtactaaatgaccattaaatgaagagcagattact

SEQ ID NO: 896568 - DNA, 629 bp, Homo sapiens
tctttaaaagtcaaagacagagagaacattttgaaagcagtaagagaaagtacactttaaatgaaatgacccatcacataaaaaggacctgtagttgcastgtgctgagatcatgccactgcactctagcctgagtgacagagcaagactccatctcaaaaaataaaaataaaaaaggggactctaataagactgtcagtggatatctcagcagaaaccttgcaggccagaagtgcgaatgatgatatattcagagggctaagagggggaaaaaaaaatggcaaccaagaattctatacccagcaaactgtcttttcaaaatgaaggagaaaataaagatgttcctagataatgctggtcatggtggttcatgcttgtaatcccagcactttgggaggctgaggatggtggaacacttgagctcaagagttcgagtccagcctcagcaacatggtgaaacctcatcccttcaaaaaatacaaaaataaaccaggcattgtggtgtgcacctgtagtcccagctacttgggaggcttaagtggatagcttgagcctagtaggttgaggctgcagtgagccgagatcacaccactgcactctgacctgggtaacagaggaaacctagtctc

SEQ ID NO: 896569 - DNA, 604 bp, Homo sapiens
gacaagagcaaagtgtttggaaaggggagctgggggagagaaytgtaaggccctgaactctttacaatgccccagccctggttatgcagtctgccgaattttgatgagagagctgtattcctgtaagagacatcatcgtccagatgtagatgcactgccgtgatgtccaaataggaaacaaagaccacttggaagtggatactttcctgaacttactgctctgatgaggggcccttcttttgaagcaaaatgagtcttcatgtagctgagaactctcttctcctatcactttacaaactctatcttcccccaaaggcctttccaaaggaagcagccaggctcagtggccatgatgttttcctgaaggtatgggagatagattatccagttaaaaacacagttatttccctaaacctgacttaacctctgcatataactgcctggagcctattcaacgcagttgacaattgcctgccccggggcctccctctgtcctgaaattacccatttaaatcttcctattttttttaatccctaatagtctgtggcctactttttgttgtttacgttttgtatgtttttcaaaaccccaaagatttgcttc

SEQ ID NO: 896570 - DNA, 604 bp, Homo sapiens
gacaagagcaaagtgtttggaaaggggagctgggggagagaattgtaaggccctgaactctttacaatgccccagccctggttatgcagtctgccgaattttgatgagagagctgtattcctgtaagagacatcatcgtccagatgtagatgcactgccgtgatgtccaaataggaaacaaagaccacttggaagtggatactttcctgaacttactgctctgatgaggggcccttcttttgaagcaaaatgagtcttcatgtagctgagaactctcttctcctatcactttacaaactctatcttcccccaaaggcctttccaaaggaagcagccaggctcagtggccatgatgttttcctgaaggtatgggagatagattatccagttaaaaacacagttatttccctaaacctgacttaacctctgcatataactgcctggagcctattcaacgcagttgacaattgcctgcccyggggcctccctctgtcctgaaattacccatttaaatcttcctattttttttaatccctaatagtctgtggcctactttttgttgtttacgttttgtatgtttttcaaaaccccaaagatttgcttc

SEQ ID NO: 896571 - DNA, 614 bp, Homo sapiens
atgtcagaggtgcacacataacatgttaggcatgcatgggagcagtagcatgtttgcgttattrtttgtttacatggcttagtatctaagggacatgaagtattgtcatttatcagagactaggtctcaagtttgactctggtttaagttttccataatctgctcagtacatttcttcatttaggcagctctttcacaacggtaaaagcatcaggtgacaacttccatctggctggtcccaagttacttttcatgtaattcatccttttaataagctatctcctgacatattgggtccatcttgacaagccatgtttttttttgtgagacatcattctaattatcttaatatcttagaaggaagaactccataattatcttttatgggaaggctcgagacacacatttgaaattgtatgcccaggactttatgtgcagaagaatcaaggtatagtattatccagtgtctctggcaagtttttgggactaaatttcaggctacaagatgtttgttgttcattgcaaaggtcaggtttgactgcgtttattaaattacaaacttgcttgtcttgtatcatcggaagatggtatgaattaaggctttctcattccag

SEQ ID NO: 896572 - DNA, 668 bp, Homo sapiens
tttacttgtttattttccatctagacttggagcctttaatgtggtagccattaatagcacgtggctgttgagctcttgaaagatggctagtccaaaatgagatatgctggaaatgtaaaattcacacacaacatttcaaagtcttgttatgaaacaatgtagactgtctcattagtagttttatagtgattacctattgaaattaatatatacattgggctaagtgaaaatgttattaaaattaatttcattttttctctttattttttaaaatgtgtctacatgaaaatttaaatttatgtatagggctcattttatttcatttggacaacactgatttagaccgtgagatacttaaaggtagggacagtgttttattcatctctgcatataaagtcaggcctgtggtaggtgctcaaggacttctctgcatgagataagtgactgaatattaagtcccaaatgaacagtgcagacactgagaacaatgggactacaagggagaggaaatgagcactatttccatacaagtccaggaaaatctgtacaagggatgcagaaggcctcgaagctggaaacgaaggccttgaagctaaattcttgagtagctaaagaagagattgtgcygtgccaggtgcggtggctcacctctgtaatcccagcacttt

SEQ ID NO: 896573 - DNA, 589 bp, Homo sapiens
tgtcatatctaaaaaatcattcagcattttaaaactatttcttgtgctctttgatgaacccaaagatwtaacaaaaaagatgtagtttattactaaagaggtttactgcctcaaacaagccattacagaaacattaattaaatacaaagtagctggaaatgaacaaaaatagagtcagcatatttagctctaggcaaacggcccatccagttcactttctatagataatgcttcttgaattaattttttgttttgtttttcaatgaaggcaaatgcagcctgcaagggggaagccaatcttgttcagatctgcttttcctctctacactcttcccactttatgcttgggccattgcagcaaccccttccaccttatctacactgagttttctagaccttcttttgccagaagctatctatttccatggtttggtcttgtctgcaaaactatgctctttggagccccagatcaggcttctgtcccttaggtactgtgtcttatgttacttaggtactgcgtcttactgaataggggatctagattttgtgagttttggttcagtcccttggaacacccattgccctgtga

SEQ ID NO: 896574 - DNA, 642 bp, Homo sapiens
ctatatctgcttaatgggaataccagtcccctgtccttgtcacttggatctcatattaaagatctcctttcatttctattgagacagaaaaacaccctctccttctactcacatytagtcagattccagaatcatttctttggcagtaaatcagtagtgaatgaaaaggctactcacatctatccatatcctattcccaaaggagaaatgggaacagaaagccctggaatgaatacaagcttccttctgctaggattgaatggaaatacttctctccttttaatatgccatctgtgtagattttcatggagttccttttcttattttcctatcctggccttgctgaactctgataggataataataataacaacaataataacagttatgatttaatgagaatgtactgtttaccagcattatgccaaatatcttagtcatgtgtgagaatattctgaatcccattttatggatgaagaaattaggcacaaggagggtaagtcagacatgcaaaaagaggattatgacttcagagcagatgatttaaccctgcttagattcttcctgcaaatagcaaagaggtaaaccattttgatataaacttaacgatgtgtacctatacaattccatttatatgaaatg

SEQ ID NO: 896575 - DNA, 678 bp, Homo sapiens
cttacattcctggaatttactttgatataccaagaataataatgataaaatgtttgctttgattactgtggggggaaaaatgaaatgttcaattgtattaaaacaaacaaacttttcagraaaaaaaaaaaaagataccaggatttcatgtggatattatcatccgattgtgtgcactttaggaagggagacatggtctcattcatttctttgtgtgccccctaattagcctagggtctgaacagaatagagactctataatgacttgatcttgattttctgaatggtgatgatcacagctcttccctcacctccaagctggaagtcagtggcttctccttactctgaaaacattctctgtctgaaactcacacctgaacttggaatctattggattagtttttttggtttgtttttattatatatatacataataatgttagcagctatcctttatcaagcagacaaattgcactttactgactaatttaagccttacagctgctgtattagtacattttcatactgctataaagaaatactagagactgggtaatttataaagaaaaagaggtttaatgggctcacagttccacatggccagggaggcctcacaatcatggcagaaaatgaaggaggagcagaggcatgtcttacatggcatcagggaagagagca

SEQ ID NO: 896576 - DNA, 599 bp, Homo sapiens
tcacagggcaatgggtgttccaagggactgaaccaaaactcacaaaatctagatcccctattcagtaagacgcagtacctaagtaacataagacacagtacctaagggacagaagcctgatctggggctccaaagagcatagttttgcagacaagaccaaaccatggaaatagatagcttctggcaaaagaaggtctagaaaactcagtgtagataaggtggaaggggttgctgcaatggcccaagcataaagtgggaagagtgtagagaggaaaagcagatctgaacaagattggcttcccccttgcaggctgcatttgccttcattgaaaaacaaaacaaaaaattaattcaagaagcattatctatagaaagtgaactggatgggccgtttgcctagagctaaatatgctgactctatttttgttcatttccagctactttgtatttaactaatgtttctgtaatggcttgtttgaggcagtaaacctctttagtaataaactacatcttttttgttawatctttgggttcatcaaagagcacaagaaatagttttaaaatgctgaatgattttttagatatgacattcccccagc

SEQ ID NO: 896577 - DNA, 664 bp, Homo sapiens
gttaggcacaagctgagtttgttgttgtttgttttgtttgttgttttcatttgttgatgaatcaaatggagattccactaggtttactagatgsttaaaagtagttagaagtacaatgtaagaactgttataataggggtgggggctaggaagataactcaatcagggatatcagggaaggattctgaggaggagtggtctgaaacagctcttccaggttttgccaggaggagcagttggtgaaggggcatccctggaagatggaacagagttcctatcatttaccatgtctccttggacagaaacatggcatatgatagagcatttggggaactctacgcagaacattattataggagcataaggacaaagtaagaagttagaggcactaagattgaagaaatcagtcaccgccatagtatagcacgcatgtacagcagattactgtgggcattttcccagaatttcctgatttttccattggaaaagcagagtttctttccatctgagggagcttatttaagtgtgttatcaattctccaaagggtagtggtaatcttacagctcaagaatgaagagatgtccacattcttaccacctggctttggaacaaaatggaaatgtccttgccacatttaaagattagagaagaaaaaaaattcca

SEQ ID NO: 896578 - DNA, 627 bp, Homo sapiens
tccctttctcatggcgtttagtaatccttttccctgtgtgcttagtagtactttgtccagatttttactgtagtgcttatatgttgctgtgtctatctgtcacttcatcttctctttctctttcgctacctgccacaatacacagtgcatccctcaaactttcaaagatccgatctttcacctgtgttctgagtcccatcccttcatatctttctaaatacgccacactggcctggttttcctcttacctttacggctactttatctcattctctccacatataccactgccttcttcagagaatgcaggtcttttccagggcttctttattcctgctttattgctttctctctcccttattgttttctttctctccctttttgtactctcttcctgtctttttattaggcagctgaacttttcaagatctcactcctctctcagttacaccctcatttgtattttcagcctagactcttcatttgcattttagacatgcatatgtgatagcctacttgacatgtctgcttggctacattgcattcatttcaggcataatataccataataataaaatgataatatcaacttaaartaaaaaatgtttgagtggaaacaggaaatca

SEQ ID NO: 896579 - DNA, 670 bp, Homo sapiens
  misc_feature 60: n = A,T,C or G
tgatcataaatgtagacttggaggtagaactctttaccagaaataaaraggatcactacntgttgattaaatgtttcttttgccaacaagaaagataatatttgtatgcacatatcatttagtaaaatacagagcacaaattaagaaattttcaaggaacaatggataaagccgctatcatattaaaatatttttaaaaacatcatcttctcacaattattagattagccatttgtttaaagagtctctgaggatacaggaaatgtaaatgtcacaattaacaacctggagctaatggatgagagaagttgtccctggctgtgtgtgtactggtggtatgaagcgtgtgtggatatatcccacacaccccaaaacccaccacaaacccaaaaactgtgtttcatataacatctgaaaatgctagtttaaggcatattttaaaattagtgaaaatattattgaatattagaaatattagtgaatattagtgaaaatcaaccacataccagttcataaaagaagtctgaagaattagcttatataaaccatattatttaatcaaaacacacaaaataaacaaaaataaaacataatcaaatatgttgacaatttgaaaacatacatctaaataacttagattacaaagaaaaatattacagaaattttagta

SEQ ID NO: 896580 - DNA, 557 bp, Homo sapiens
acatcgactctccagagggcagtattttcctaggaagtaaatccacttagtctgaaaggatattgtagcagtcagtacaggttaggttacrtagtccatcgtgacaaataggacccaaatctctgtgacttaaaacttcatgatttatttatcccttacactaaatatccagtagaaatcagcggggacctctgctcactgtatgtccttggggactcaggctgaagaagcaacaacttttggatattactagtcaccatgtcagaggaaagaggactctggagagtctcaaatgggcaagtaatgctctgatctagaagtgagacacatttttctgcttactacttattggctggaattagtaatatggtcttgggtaattagggtaggctaggaagtttaccccatcatgtaccgagagaatggataattttttcttttttctttctttttttttgacggtgtctctctctgtcgccaggctggagtgtagtggcacgatctcggctcactgcaacctccgcctcctgggttcaagttattctcctgactcagcc

SEQ ID NO: 896581 - DNA, 603 bp, Homo sapiens
  misc_feature 13, 37, 154, 165, 176, 204, 309: n = A,T,C or G
ataacagaatatntgggttcaaagcccactctgccanttcccaacaatgtgactttgaacragtttattaagattctctatgcctcagtttcctcaactggaaattagagaaaaacatagtccttctctcacagagctgatataaagattaaangaatttatcantcagaacattnttcaaacagcacctaatgccataagtantcaaaagatttaactgatagttgcagtactaaacacaatctaatgatttgtaaatgcttatgtagtaaggttgatgatagaaaataacatattctaatgaaatcntcatgatttttaaaaaattatgttgaatgtatattctactcgataggaaacaatgtccaaacctctagatgtaaaagagtctatgtggttttactcatgtatattacctaaatttagaaactaagattaaaccattgcctaataattcatcaaacaagcaaaataaaacctaacataataatgatttattgtttaattaatattttaactttcaaagtgcttttctcatgctttgattgaaaacaaaaatattggtcttgtgtggtatacactcaaggtttctagaattaaaga

SEQ ID NO: 896582 - DNA, 595 bp, Homo sapiens
acataatgaaagaaaagaaacaataaattggatttcaccaatattaaaaaggtccaccctttgaaagatgttgtgaagagaataaacagacaagacacagactgacataattgtaaattacatatatrataatggacttttttccatactgtagaacaatctttcaaaattcaaatgtaagggaagaaactgcctgatttaaaaaggacagtagttttgaataacgttttattaaagaagttttataatcggtaaataagaacatgaaaagatgctcaacattattagtccttaaatacacagaaacatggataaatctcaaaataattatgctgagttaagtaagcaaggcaaaaatcaacatacactatgattcaatttctataaatctctggacaacacaaactaatatatagtgacagaaaacagattagtagcatgagggctggggataagagaggcacaggcaggaggcatggattacaataagactttaagaaacttttggggatgttataaatatctatcttgattgtggtcataatttcataattgtatacatatgtcaaaacttataaaatattacattttaaat

SEQ ID NO: 896583 - DNA, 561 bp, Homo sapiens
  misc_feature 499: n = A,T,C or G
ttgcaaagaccagaatacaagcacacctctgtattttatgtcgttgctgttgttgccatcatactcctctgagagtgtatggaggtccacacccaactttcttggtaaaacagcatcctatttttatctgttggattttcaattctaagattcaaatccaagcatcttcttgcttgtaggcaaagtgaccactagagggaagcaactgccaggcagagcaatttcttcacgccatgggtaatttgatccctgtgtgtcatactccaagggtttggacagaatacctagttctaacaggaagttagtagtcacggagcctggctactgccaagctctttcactgactttgatcaaaccacacttggggctgcgtgcagtggtttatatctgtaatcctagcacttaagaaggcctacgtgggaggattgctttagatcaggagtttgagaccagcctgggcaaaatarggagacgttatctctacaaaaaagtaaaatangcatggaggtgcacaactgtggccctagctactaaggaggatgaagtgggaggatcgcttga

SEQ ID NO: 896584 - DNA, 655 bp, Homo sapiens
gcaacaataacaactgtatttcaatgaatgtttattttgtgccaagttctttattatgaaatttatatatagcatttaattttatattttcatataaaccttatgaattttgtatcttagtaatctctattttaaagatgacaaaagtgaagctcagcaatatttactaaggtgaataaggtcatatagctagtaaatggaggagccaggatttaatccttatctgtctggctccagagtttattctcttaactatcatgttaattgtggctaggataaaacaataacaaaacaaacctaggaaacaaatgcttctttattacttcaaattcactgaaagtatataccataagaaatctttttttattcttacatatccacaaatactggcgtgtgtttcttagccaatcagcaatcagatgcttgaagaaatctttaatccctaacattgaaatatgaaaactgcacatctcttatccttacttcgttttacaaagtatacaggaagtatatttggaagaaaaaatatgtaacttgakatatataaaagaaaagactaagtagcagttgagatgcttgcatttaagatctaattctgctcccaattccctgtgtgatcttgggcaaatcgcttcctccctcttggcctcagttt

SEQ ID NO: 896585 - DNA, 543 bp, Homo sapiens
tcaataattaataaaattagtagatacaaaacattaagaatatataaattagaataaataaacaaataagaatagataaaacttgagcaattttctcaaccaacttaaccaaattgatacttataaaacattccactaagcaccagcaaagaacaatttttttcaagtgcccatacaacttttacctaggtagaccatataatgaaagataagtcaagttcaataaatttaaatatatttaagtaatacaaggtatgttttctgatgacaactgaatgattttaggtgtcaatagcaggaagatattcagaaaattataaaacattaggaaataacattttttgtttgtttgtttctgagacggagtctcgctctgttgcccaggctgcagtgcagtggcacagtctcgtctcactcaacctctgcctcctgggttcaagygattctcctgcctcagcctcccgagtagttgggactacagctgcatgccaccacggatggctaattttttcgtatttttagtagagacggggtttcaccgtg

SEQ ID NO: 896586 - DNA, 519 bp, Homo sapiens
gtcatataaactactctacatgtttgtttttgtttaaacaattatcttttaaagggttttaaatgttaagaaaactcatatatttacccatgtagcttccatttccagtgytttttattcctttgtgttgatttatatttcattctagtgttatttttcttctgcttgatggaattctttgacatttctttgagttcaggtctgattaagtgaatatttcacttttgtatgtctgaagatattcgtatttatttattctttgttttcttttacacagatgtttaaactgggcataaaattctaggtcttgagggtttcttttcttttctttttttttttttttttttttttgagatgaggtcttgctgtgttgtccaggctggtctctggtcttgaagtcctgggttcaagcaattcacctgccttgacctcctataatgctggaattacaggcatgaaccaccacacccagcctgcagttttaaaaattataattttattattttaaagatgttactt

SEQ ID NO: 896587 - DNA, 662 bp, Homo sapiens
ttccatttaatgaataaccccccatcttgaagtgctattttgtgatgaacacttacagaaattaatccctgtataagttattaacaccagttttcttcacatattttgatawatggaatattgaatgtatttgtattttccaaaaactataaatccagaaaaatgagactactcagtatgtgtcaagggcatgatcaatgtatgacttcacatccagaaaatatagccaactaatttcatcacatgtgacatcagacccaatatagaagaatcttttgacatcgagtaatttgaagaatgacttgcattttatgactcaacatgatttctagatgggattaatatcagagtaatattgcaagggtctccagtttccagcctgagtggtcagataaaatgagacaagaagaaccttcaaaaaagagtcaatacagggcctagcattgatcatccacatagttgtttggaggttccaacactaagttaaaacattagttgctgaagaaaggcttcccattatagtgggaagtgttacataaaataagtaactgatattttataggtacttacaggaaatgaacaaggttatgaaaaggagtaaattttacaaatgagaaaataataatgttaataataatggattctattataattattataat

SEQ ID NO: 896588 - DNA, 590 bp, Homo sapiens
ggataagccttcttcctcaaatgatttcctgttggtcagtgtgggaatattattcctcgatatttggtaagtcacagtgatgttgcgtggagataagtggtgatattgtgcatgtgggaagataactagagtgagatgagcagctacaaacatcaggggctttgcattctggcaccaacagtgccatgtatttgatgtgtaactttgggaaataatcctggattttgtttcagtcacttcctttaaaaaagattacattgcatgaaatcagtggttcccaaatttatattttcccaatgataaacagtggaaaaatattttattaaataaagtcatacatgaaattctcatataaagtacttctcaaaactctttataagggacagaaactcaattcaaacaagcttaaaagtaaaataggaaatttattacctaaaataaccaggaaatctaagtggaagaaccatgtcagacatggctgggtgaggaattgaaagctgtcatcagagatccacatctccatttcctatgtaccwatatctacttggctttcttctcagtgcgctctcaatgtgtggcagcaacatggt

SEQ ID NO: 896589 - DNA, 642 bp, Homo sapiens
ataattaaagaagcattaaaaatcctagaacgttagtaccagaaaacccactgagtgcctttagctctgaatttacagaaaasacaatgaaggctaagagaggaatagggattgatccacagttgtcttggaggcagggacagagtgacctatcttgctcctcatccatatctctatttctacagcactgcaccaccctctatgcaggcaggtcacttgactaatccattcattcaatgaaaaatgtgtaatagcatttacaatgcgtcaggtatgtatggtgctagacatcacacatgactagtttgttggttttaaattttgatgttgtttggtttcctttactttttctgttatttgcttgcttggctgttattgttgaataagaaaagagagtaaataggttttataaaatgtagctaactgtaacatatgcttttttgtcacttttttcttattttgttttatttgtaaaaatacaccagatttatatcctcacagaacaaacttacagcctaacaggggagactgaattaaaacacacacacacaccactctacttggtatgttgatgggtggccccatcaacatacataaatagatattcagttttaaattataatatgtaatttgaaggaaaac

SEQ ID NO: 896590 - DNA, 641 bp, Homo sapiens
cgtacaacctcaccaacagtgcatgagtttctcttttttagccatgcatggtggtgtgtgcctgcagtctcagctactcaggaggttaatgaaggaggatccccttgarcctaagagttctaggttgcagttagccatgatcaggccactgtactccagcctgggcaacagagcaagattctatctctaaaagtaaaaataataataatatattttttaaaaagttgccctctctctacatccacaccagcatttgtggatttgttttgttttgttttgataataggcattctcgaaatggggtgaagtgatatctcattgtggttttggtttgcatttccttgatgattagtgatatcacacatgttttcatatagctgttagccatctgtatgtcttcttttgagaaatgtctattcaagtattttgtccatttttagatttggttatttttttttttttgctattgagttgtttgagtttcttatatattctcgatattagtcctttgtcagatagatggtgggcaaatttttctatcattatataagttgcctctttcgtctgctgattgtttgctgtgcagaagctttttagcttgatgtaattccatttgtctatttttgcttttgtttgtttgt

SEQ ID NO: 896591 - DNA, 627 bp, Homo sapiens
gtttctctaaatttgatgacatggtcctgttctgtccttgactcattctctgatcttaggtaagttaacttcttcatgtcgcagttccccatctgtaaaatgaatatatttgttcyatggaatcactcattttttaggttatttctgactctttattttcagtgacgctgacttaagtcatctttagaaaccttacagaactctattaaagcatagcatatggaactattgatacatccttatgttatatgagatttaccaatattttctgcttgtaaacaaaatctgttagaataataaagcttctcatacaagtgttgaccaatgctgaatcctggcatcataaagaaatgctgctatttttctattataaaaagcacattcaaaaaacctgacatttaaggccgggcgctgtggctcacgcctataatcccagcactttgggaggccaaggtgggaggatcacctgaggtcgggagttcgagactagcctgaccaacatggagaaatcccatctctactaaaaatacaaaattagctgggcatagtggtgcatgcctgtaatcccagctactcaggaggcttaggcaggagaatcgcttgaacccaggagatggaggttgtggt

SEQ ID NO: 896592 - DNA, 644 bp, Homo sapiens
ttagtaactcagctttcccaatttcatttcagtcactgactagatattatacattgtcaaacttgtgcactatttactctgataattctacttcatgtagaattagccagcyagaattttcttccaaaagaaaatggtcatgtaaacttgacttttaacagagttgcatcttcaatgttaaccatgaaattaaaggagaaaaaagtaaatgaattatgttaagacacacttaattgaaaagcagacagtttaaatcagcaaggatttatattttataaaattgggttataggcctaacttagacaataactgtatgctttcagtgattcatttccagtccatgagcctcggcatccccatctgtactatagagatgcattatttcagtgattcctttctcttctctgagcctcagtatccccatctgtactatagggatggaacttggtaattttcaagcatacctcctgcacctaaatgctatcatgatattagtaatataacaaacatgtactaagtttataccatgtgccagacaccatctgaggaaatgggaacagagaaagtaacaagacagtgaccctgtcatggaaaaattcattgtctcatggataaagtagctaataaatgcatgattgtgagat

SEQ ID NO: 896593 - DNA, 621 bp, Homo sapiens
gttcaggagcgttcttatcttcaatgcctataacaataatttaaaaaatggaaatagtgttcatcaacactaagctgtgttatagtcatgaaatattttataacaatgaaaaggagtatgcwaaaactttgatgaatctcaaaatgttgaagaaatacaccaggcaccagaaaaagatacacactatatgatgctatttatgaacaattcaaaaataaataaagctaatttatagtgagataagtggtttgggattctatagctctggattggaatcttgaatttgcaaataagtggttgtagggtttggataagttgaattacctctcaaagtctgtttccccacgcagctcgtaaagcaattaatatagtgcctttcatatgcaaggtatgtggaaaataatgattctcattattagtgttccaaactcttaggtctgctgttcctctgaagtatgttattctagatttggaaaggaatttctgtttgtggctttaggtctctaccatgccccctatcacatacatctttgttcttctttgtttcttcaatccctctttctatccttatgtcttccatttttgcttttttaatgccttcttctctatctttccatcctg

SEQ ID NO: 896594 - DNA, 621 bp, Homo sapiens
gttcaggagcgttcttatcttcaatgcctataacaataatttaaaaaatggaaatagtgttcatcaacactaagctgtgttatagtcatgaaatattttataacaatgaaaaggagtatgctaaaacwttgatgaatctcaaaatgttgaagaaatacaccaggcaccagaaaaagatacacactatatgatgctatttatgaacaattcaaaaataaataaagctaatttatagtgagataagtggtttgggattctatagctctggattggaatcttgaatttgcaaataagtggttgtagggtttggataagttgaattacctctcaaagtctgtttccccacgcagctcgtaaagcaattaatatagtgcctttcatatgcaaggtatgtggaaaataatgattctcattattagtgttccaaactcttaggtctgctgttcctctgaagtatgttattctagatttggaaaggaatttctgtttgtggctttaggtctctaccatgccccctatcacatacatctttgttcttctttgtttcttcaatccctctttctatccttatgtcttccatttttgcttttttaatgccttcttctctatctttccatcctg

SEQ ID NO: 896595 - DNA, 630 bp, Homo sapiens
agacacaaaagactgcatattatatggtctatttatatgaaagtttcagaaaaggtaagcytccacagacagaaaatggactagcagtggccttggggcataaggaggaactgtaaactgaatgcaaacagacacaaggtttctctttagagtgatggaaaatgttctaaatctgaatagtggtaatggttgcacaactacatgaagttactaataattattgaattttaccctgaaaaataggtgaattttatggcatgtaatgtgtacttcaataaagctgttaagcaaactcataaaaatgacaattattatgagaaagatgatcaaatttggtcttacaatatttttaaataatgtaaattatttgatattcattaaatttgatatgtattaaagtgtaaaactagtgtatagcacacagagaagcacatataaaaacatggtgtcattttcaaggattctcatcttcctttcccatgttctagggaagcagaattgcatagtggaaaaaagatttggaagtataggtctaagtaatttcatttaagagctgtataaattatcaattaccagagtttcgtatttcccacctgtaaaatggtctcacatccttctaacagtaaagag

SEQ ID NO: 896596 - DNA, 660 bp, Homo sapiens
atttttctccatagccctgtgaagtgattaaccaacctctcactgtatcaaagtcttcaacgtgatacccaacagggagattgtctatgccctttrccattttctcagcagtacttagcacagtccctatgtgttcaatactcattaaatgaatgaatggatgaatgaatacattaagggaaaaggatagactaattttggtgacaatttgtcaaaaacctggggagctcacaattattacatgcccacaagcagcacgctaaggactttaaaaagaatgcttccccttagagagtgattaatatctcattttatagaagagaaaactgagactcaatgaggcaaagtagctggtcccagatcgttgacagatgctgaaccgtatgtgaagacatatacactatagcacaaaccatcaaagtttacaccaagaacaaggacgagctgtttaaagcatttcatcatagaaaaagagttttctgataaccatgagattattgctgtgctagatataagaaaatggtgtttttagccattattggtgccatcaatgttacttttgatttcacatttttagaaatacttgttcatgggcccttttaattagaatagctaaagaaacatcagcaacgtagctgaccagaagtgctgagcatgcat

SEQ ID NO: 896597 - DNA, 649 bp, Homo sapiens
tacacatacatttccggttggtgctatataggtgttttatactgtttttagaactttatttattttgtatattaccacattgaagctcttttcttacaatcagagacaaggaaaaaaggaaagaaaaagtgcctaaaggcatctatatttcattatgacattttcctttttaatgtcataacatataaaaatgtaaagtgaattaaaaagatatcaagcaaagaaaaaagctgatgaaattattaaaccaaatagtcaagaaaaggcaaaggcctaacttgtttacatgcatacctcctgattataagaccaatacacaggcaagcttgactgcctcttaaagctagtttttgctgcattattaactgtttctctagcacatatcaaattcaacattttacccaagctcattagttgaaagactaaatatggagcctttggttctctcctaaaagggcctcattactatgactaaagtttaaaaagagtatcattactaagcctgcaaaaatggtcatgccaatwatgagatggaaaaatccagacatgcggtgctttctaaagaaataataattttttaaaagggtaattccctgatgtcaaggcttggccatttttaacctccacaagctatttaaaagatcagact

SEQ ID NO: 896598 - DNA, 585 bp, Homo sapiens
gtttcaaatcttggtaggttgtattttyctaggaatttatccatttcctctagcctatttaatttgtttgcatgtaattgttcataatagccctttatgatcctttttatttctgaggcaaatgtgtaatgtctctactttcattgtggattttatttattgtttttcatttatccttacttagtctagctaagggtttgttgattttatttttgttaaaaaactcttagttctatttgtttttctatggtgtttgcattttctatttgatttatttctgttttgatctttactatttcttttcttttgcgaactttgagtttagtttgctcctctttttccagtcccttgaggtgtaatgttagattatttactttgaatctcccttcttcttattttgttttgagacagggtctcattctgttgcccatgctggagtgcagtggcacaatcctggctcactgaaacctccacttctggggctcaagcaatcctcccatctcagtctcttgaatagctgggactacaggcacgcatcaccatggcaagctgatttttgtattttttttgtagagatgaggtttc

SEQ ID NO: 896599 - DNA, 605 bp, Homo sapiens
aggtaaattcagagttgggactcaaaatcggtatgcccacctccaagttcatacatttggagttgtctgtatggtagaatattatgcatattacttaagatcgtgaattgctaaaagaaaggggttgtgcttattactttggaatatgagctttggaattcattctgaatttgaatgtctaatttcatcatttactaggtgtttgactttgaattgattacttaactttttctctgtaaagtgaaactactaattcttaagccttgggttgtgaagattaaagctgattacatgcagtgtatatgacccagtaccgagcatataggaggcatagaacaacctggatctgttattactgtacaatttatcagagcattcaaagcgcttttgtaataattgactcatttatttttaagacaattaggatgcctaataaaacattgataattgcaatggttttataagttaagtcaattgttttgggacattaagctataaatcaggagagacagcagttacatgataaatacaaaatccaaactcctatatcctctgacttgaagtttracgctatgctcaaaagactagctgtaatgcgcagtggt

SEQ ID NO: 896600 - DNA, 640 bp, Homo sapiens
gaaggttttgtgtgtgtgtccaggcagggggaaaattctaacagtggagctctgagtataggggccaagtctagttctgctcaaaatttccagcaattatttagagaaggataattaatatyacttacctgttctgaaatgaagattgtatagcaagcatagttaataccctagactggagtcagggtcccagaagattcaatgggtcaagtttaaccagacatgggaaaatcggataccatgctccagtgatgaaaagccacctaccatttactgaactggccaacttcctttctccccttggcatttggcacatagttaccttcatggtctacctcttcactttttaaaaataaataggtcagacagtacaagaacggatttcctgcattcataaaatgaagttagcccttcgcgttaacatggttaactgttgctagttcttcaggtctaattctcaatgtcatttcttctggacagtcttccctcttcactttcctcaagactggaatgaatatccttcctctatgtccccatggtatcctacactttcctccatcatggagttcattacggcactgatgctttctatctctcccgcgattcagtaaaattcttaaggacaaagattacatgttta

SEQ ID NO: 896601 - DNA, 640 bp, Homo sapiens
gaaggttttgtgtgtgtgtccaggcagggggaaaattctaacagtggagctctgagtataggggccaagtctagttctgctcaaaatttccagcaattatttagagaaggataattaatattacttacctgttctgaaatgaagattgtatagcaagcatagttaataccctagactggagtcagggtcccagaagattcaatgggtcaagtttaaccagacatgggaaaatcggataccatgctccagtgatgaaaagccacctaccatttactgaactggccaacttcctttctccccttggcatttggcacatagttaccttcatggtctacctcttcactttttaaaaataaataggtcagacagtacaagaacggatttcctgcattcataaaatgaagttagcccttcgcgttaacatggttaactgttgctagttcttcaggtctaattctcaatgtcatttcttctggacagtcttccctcttcactttcctcaagactggaatgaatatccttcctctatgtccccatggtrtcctacactttcctccatcatggagttcattacggcactgatgctttctatctctcccgcgattcagtaaaattcttaaggacaaagattacatgttta

SEQ ID NO: 896602 - DNA, 645 bp, Homo sapiens
atgtgcagaatgtgcagttttgttacataggtatacacgtgccatggtggtttgctgcacccatcagcctgtcacctgaactaggtatttctcctaatgctatccctcccctagcccccctttcccagacaggccctggtgtgtgatgttcccctccgtgtgtccatgtgttctcattgttcaactcccacttatgaatgaaaacatgcggtgtttggttttctgttctggtaatagtttgctgagaatgatgatttccagcttcatccatgacactgtgaaggacatgaactcatccttttttatggctgcatagtattccatggtgtatatgcggtgtggcattatttctgaggcctctattctgttccattggtctatatatctgttttggtaccagtatcatgctattttggttactgtagccttctagtataatttgaagttaggtagcatgatgcctccagctttgttctttttgattaggattgtcttggctatatgtggtcttttttggttccatatgaaatktaaagtagtttttttctaattctgtgaagaaaatcaatggtagcttgatggggatagcattgaatctataaattactttgggaagtatggccattttcatgatattgattcttc

SEQ ID NO: 896603 - DNA, 588 bp, Homo sapiens
ttagtgtaatttattaaacagctgkaattaactgatatattatgagttgtatcacaaattatctcattgaaacagattatttcgctcctgctaccaacatttctctccagagtcatcctcctgtttccattctcctgtatcacccctttcctttccagctttccccctacaaatctgcttaaaaattcacctatgttgctatcaaaaagcagacgcacatgacctattgtccgctatattctcctgttcttaatccccaacagttctcccagtccccacctctgcattcactaagatatcagcatgttctcttctccttcggtaagagaaaagagtagacacaagcctctcatataagttaattcatgcaaatagatgtctatggatctgctaaatctttcattttattaggcagacataaataagactaaattatcttcacagtaagcaaggatctcacaacagaaaaaagaaatgcatataaacataatttatatacaatctgccctttgtatacaagggttctgcatatgcagattcaacaaaccatgggttgaaaatattggaaaacaaaacaataaaaagtac

SEQ ID NO: 896604 - DNA, 599 bp, Homo sapiens
aacagtaatgaaagcagctagcttataataagcacttactatgtgctggcactatgctgaatgctacactttgaacactctgaaactgggttataaagttgcatgactccctgaagtaccaattgctaatgggtgatgaaactggaattctcatccacaccagtttaattttatctctcttcatcctcaaggcctgacacattgcttggaacaccgcaattactctgtaaatgtaccatgagagaatgaatatatgaatgactgaatgaatgaatggtggtgccccccagtggctaatgcaaacatttgaagaatgtagaatggaaaggtaaagaaggaagagagggagggatagaggaagaaatagaggaaaaatctgaatgaacattataagatttcaaaaagattggctaagaaatctcagatatgcaaagtatattttatttgcaggtgattttcaaacataaagacattttacatccattagagcatttcccacctttaactagtcctttargagatatacagttgtccctcagtgtccacaggggattggttcgaggaccaactccctcaatgccaaaatctgaggttgctca

SEQ ID NO: 896605 - DNA, 601 bp, Homo sapiens
  misc_feature 391, 394, 406: n = A,T,C or G
tgaaggtagatgccacagttttttcttcagactgtagacactgaagactcgggctgatttagaatgaaagaattcaggtgaaacagattctagcctgggctgggcagtttgttagctatgcaatcttgggcaagccttttaatctctctgagcctccaattccacatctatttggaaggaataatagtatctgactgcctggatcacacaattgccatgagggtctcataaaataatatcccagaaagagttctgggaagagttaaccagcatgcagatgaaagggggcattgttatttttcggtcactttgttcattcttttccagtaatcatgtaaaagaaattgcttggaatttttatcatcagaatatccagggtttattttaatgngantaatattcattnaagcaataacaggagtcaggtctggtgtagtggaaaaattatgcgtgctagagactgacccagggtttgaatctyggctccgctctgcactagctgtctgaccttggcacattgctcagtaagagccgctggtttctcatctgtaataattgggtgatagcagctatcctgtggcatgtcatggcactcaaatgg

SEQ ID NO: 896606 - DNA, 559 bp, Homo sapiens
cagagcggagtctgagactagcagagtctcgagagcaaagccccaggagaaaagaggtggaaagtagactgagcccaggggaatctgcctaccagaagttgggcctgacagaggcccataaatggagacctgactccagagagtctcaggaacagagtttggtacaactggaggcaacagagtggaggctgaggtcaggagaagaaagacaagactactcggaagaatgtgggagaaaagaagagtggccagttccaggggtagctccaaaagagactgcagagctgtccgagaccctgacaagggaggcccaaggcaacagttccgcaggagtggaggcagcagagcagaggcctgtggaagatggcgagaggggcatgaagccaacagaagggtggaaatggaccctgaactccgggaaggctcgagaatggacacccagggacatagaggctcaaactcagaaacyagaacctccagagtcagcagagaagcttctggaatctcccggtgtggaggctggagaaggggaggctgagaaggaggaggcgggggctca

SEQ ID NO: 896607 - DNA, 600 bp, Homo sapiens
ctctgatgaatgggaataaattgtctgcttaattctctcagtccatatctgtatgccagcctatgctttctgctactcctaagcagaacgactttttttttttttttttaaraattcctgttcctctctcagtgagtatatgtcttgatcatagaaggggcaggacatgtagatggatggaatgtcttttaaatgtagctctttgtccctcttggtcttaagttttctgggacattacccaatttttctagcctagcactcagcagatttcctggaggataattttcaaatatgttccagttagtcataactctttttataagtgcctatatttttatgagtcaacatgatcattacatctaaaccttttaaatattaaaaattttgcatttttttaggaaaatgaaatcttttgttgttataaaatgaataaacatttaaactgagatgaaacgttaggcaacatttagaaaacaaaagttagaactaagcacagcttaaattttttttttaaacaggaggaagatgtgtcaggattatagcttaattaaaatgccattcatcaaatacttattgatctccagtacattggtgaataaa

SEQ ID NO: 896608 - DNA, 666 bp, Homo sapiens
tattgtaaactggcctttagaaagcatgagccagtgtccacataaagataatgtgtaatcaaaagtctcatttcccatttccagaatgataaaatcattaatttaaaaaaatttgattgatgcagcagagtgataattctttgttttaaattgcattacttcaattgtttacacaattggacatttttcaaaattcttctaaaaattgactatgatttcttcttttagaaatgcttatttatttatatttttcatttaaaaattatttggctttacttttatgatatttacatttctacaattaaagaagtaattatctttcataagtgtttaaaatattttttactcatttttaaattttatttaatagccacttcatattgttatataaataatttacacattcaaatcttttccttcatgcttacaacttctattttcatgtttgtagagctcgtctatatttagagaactctccaacattagatgcatttacctaaatttgctttttaactcactataattttgaaaatatggtaatatctgatctattttattttagattatattttgaacrtaatctaattggcatcctttagtattaaacaatgtgcatacttctatttctttaaaaaataacctttcctcactaattgaatattactt

SEQ ID NO: 896609 - DNA, 571 bp, Homo sapiens
aaggtgatagttggagtggaatgtgattcttcgctaaatgtttttttgaaaataaaaatttacctgaggggttggatattggtttatatggggcactgaaaacagctattatgtgggttgccttctgttagtgtaaatgtgtacttgtcctggcacttggtgagagctgtcttatgatttcaattgtcatcgatctgttcaatgttaaaggatgtcttagaaaatcagtccaaagccagcctcataggctacaaatctagttttagtgctattataattttttgtggccaaggtaacagaaattccataatcctaacttggtataaccttttcttttccctataatgtattcaaaaacatatatacataatagactatgatgaatgggaattcaaaacatcaatttattattattggttgagtttatgcttaaaattcaagtgcagatttctctgtaagctaaacaggcatatgtggcctagytagaaggcctaagggactttactctcttgctaaggccaactacaaatctaaaaatcttacccctctcctgcaaattacatatgactgg

SEQ ID NO: 896610 - DNA, 628 bp, Homo sapiens
tgaagtccatcttttagatacggcatctagtcacactctcaccagcagtttttgttgtctgattttctttttttttcatatgggtaayatttttctctttctttgcatagtttatattggaaactggaattttgcataatatattgtagaaactctggttactggtctttctcccttctctccccactaggtctttttttcattatttgctcgtttacttgttcagttgctggctggattatttttgtaaagtctatcctcccctatacttctgctgtgttaagtctttgatgttgcttttcagaggatacacatatgcctagtcaccttggggtgacaataattttggcagagcttatgttgtcccttttcctgactacatccagcttttaatctaataattacctgctgattgctccattgtttccaaaatgccctagaacataagtttctctactgagtaatgcaataaaattcagacttctttgaaggaatgattactgaggtcagtgtttgcaatttgttattacccaaagagggttcctcctggctctttctttttcctgtttagaggatgtattaaatgatattcaggtggaacagtctattctgaggatgttggccaaca

SEQ ID NO: 896611 - DNA, 664 bp, Homo sapiens
agataaagaagcctgcagtgcaagcagaggccacaagttgtccacatacaatgttggtcataagcagtggatatcttagagggttacaratggccaggaagcggtcatatcccatcaaagtgagaatgatacagtttgtgccaccaagtcccaagaagaagcacatctgtaagctacaacctgtgactgaaatgcttctgtccttggccagtagatcttccagcatcttggggacgatggtcagcgtatagcaggtctcagagaaggagagtgcactaaggaagagatacataggggtgtggagggacctgtccacccaagttagacccatgatgatcagattacctgcaagggtgagaaggtagagacaaaagaagaccacaaaaagaaatgtctgtacatgtgggtacacagaaaagccaacaagaatgaattccttcaggattgtctggttgatcttcatcgtttgaatgtctgaaatttgaaagaaacaacaataaacattcaacaccattatcttttgataccatcaaaggaaaattgtgatgactaagataaatcatcagaattacaattaccaactgctttttcttgtagtttagcaaaactatgtatatgtaggtaatgtgtttttctcatttttcatccattcattttttccttt

SEQ ID NO: 896612 - DNA, 617 bp, Homo sapiens
ccccaggctcctcaactgaggccacctttgagaaactggtgayattattttttccaaaatgaacttgactcctaattaaccccaagacaacagctccagtgcagtagatctaacctcaggagtccagtgtttacagtacatgcttctaataaccacatcccacgttggtcatcagaacttctgaagatggtgacttatctggagaagctgggagtcctgatagatggaggaggctagctctgttgattcagatgagagtttctatctcaaggcagcttccctctcatttgctgttatttcctcaggctctgatttgtggcagtggtgctacttgtcaggagactgccaaatactgaatagctgcttctctctaaattagaagggagagagcaatgtaagtacttaccgagcagtgggaacattgacctagcttggggatttgtggggactggacttgaatgatgggtagtgtttgagaaagcctctttctgtgcctcccatggagatcagtgatggcatttctggtaagtagcagagttaaaaaggagaatcagaggctacctttcactgaacttactaagagtgactgggaatggcctttataattctcagaattt

SEQ ID NO: 896613 - DNA, 576 bp, Homo sapiens
atctctactttactttatttgaaatacacttcaagttaaaatatatttttaacataaatttttatatgtttgatgcattctatttctattttataaactgtatgcttttatctgttttcttcttcaaagtttgttattttctccatcggcttgtaatacattttttattaatattaacatctgaagaatatttttggtagttttccatttgttgtttgctttctattatttctaattgtgcctttctgtaaataaatattttattttacaccaattgttgcttaatactctttgataatatctcattattgtttacgtttagcttttcaaattttctgtccagtaatacaatgttttctaatcctttacatttttttgtattttattaacatataaattttgaatgtatccgttgaaaatttaaactgatatttaaaatgtattaaagatgtrtttattaagttactattataggtcagaaacagtttaggtggcattgagatgttttatattttaaaaatcattaaatttttgtttaggtaaagaattaaggtataaactttcttctgataactg

SEQ ID NO: 896614 - DNA, 698 bp, Homo sapiens
ataaaataaataaaaacaagtccttatttatttactatcacctacatgtcagacactgtgcactgtggtttacaaatcttaacgttaatattcaaaacactcttcaagaaaatatcrttatcaaataatgaaattaagactcagagatgctaagttactttctaaagattaagtaattagcaagtgactgaataaaatatgatttaaatccagatatatatgagttcaaaaaacatgcttttttctactgtaccagtcttctccacatgaaatgattgcaagtggtacaaaaaacatcatgaatcacattttgtttaggacatgcctgactatatttatattaagtcaagtaaatttgaaaaatgcctataaacgtataataggtaagacacagattttaaaaaaaacctaagtgtgatacataaacatctcagttttgaaaatcactgcactacatcatgttgaagggatgtgtactttccctagtctctggtctcaagccaaatgtggctccagcagacagtatgaaggtcgctataacactggaagtcagtcagcacttgctgcagctccaccaccccacatagaaaagcactgaatttttagtttctcgtctctggccactgttgatccctggggccaccatatcctcaggcccggccttggcctactctcagccccaactcatgccaatatcc

SEQ ID NO: 896615 - DNA, 624 bp, Homo sapiens
gcaatcaaagtcatcaggatccgatcaagtattattattttccacggaaaactagcacccccaactccctcatcttccaagttcacagttctcagaggtttggaccatttccttctctttttcacaccccctttaagatggcaaaaaatactgatgattttccctttttaaaaaatttattttattatttctaattatgattgtaactgctagtactgataaaccttaatttagtgttgagaaaagctttaggaactatcactttccagtggcccccataattttggatttcactggattgttggaatatctgaaatgtattatatatttccaacagctcataaaaagaaaaaacctttaaatatcacaaaaaggaaggctaaaatagaaggataaatcatgtgtatcaaacttcatatttgtacttatgtttctaattttgattcagcccagcaaaaactcatatcttctcactcataaaggaatccatatcgccacaaatgggcatcaaccctctgcctggatttacagcactggaagcttcctgacccataagacagttctctccrtttttgaaatgttttagtttacaactgtcctttccaatgaccagaaacctggctt

SEQ ID NO: 896616 - DNA, 604 bp, Homo sapiens
aactccttaaatatacttttactgaatccctcagaaaaagaattatttattcattttctatgccctcataatatttacatttagcatattgktacctttttaacaagtctgtcttccccaaaaattgttaagatctttgagagcaaatgtagtacttcattaattattatatatttccctgctgatgcctggaacagtaggcatagaattgtgaaatcaattaatgttttattctagcctaaatttaagttacattttctcttttgcacctgaacacatcccttttgttgtcttcttagcaatacaaagcttacagtattctaataaacttagcgtctcacatttagtctggcctcaactttccctaatcctgttgaaagacctatcattgttcccactgacccagagaaattaaattcaagaaatagttttgatcatcttttgtgtgcaaggaactgttgttggtaatgtttcccctttatacaagttagcttttctgaagccaactgtatgtgtagaacaagtaaggcctagcaaacataataatttcaggagcaccctaaaggcctctggaccccaaattattgcatgatcaaatgtcttt

SEQ ID NO: 896617 - DNA, 487 bp, Homo sapiens
ctagttcaggtcctgctttccttaagaagtgctataggtgcctgtaatcccagctacttgggaggctgrggcaggagaatggcttgaactcgggaggcagtggttgcagtgagctgagatcgcgccattgcactccagcctgggggacaagagcaagacgtcatctcaaaaaaaaaaaaaaaaaaaaaaagtactgtaagcatagaatcaaaactccctaagctgagaggaatgtgagcactcattcattgccagcctttcattttacagacagagagaatgaggctgaggagggtaactcagtcagctgaagtggatttagggttgaatctgtctgtctttactgcaagttcaataatctttataattttattacgtaaatattgggatgttcttccttcttcagagggatattataaagattaaatttttaaaaacatgaaggcagctgtaactatttctggcatagtacagacatacataaaat

SEQ ID NO: 896618 - DNA, 638 bp, Homo sapiens
taatgtaccaaatataacaaaatcacagctaacaccatactgaaagtcaaaaggttaaaattttttccttctagatrtggaacaagaaaatgatgcccactttctccacttctattcaacatagtaatggatttcatagccagaataattaggcaagagaaaaaataataggcaccaaaagtggaaagaaagaaactaaattgccttttatttgcagatgacaaaatttacatataaaaatgtataaaaagtccaccaaaaaactgtttgatttaaacaaattcagtaacattacagaacacaaaagtaatgtacaaaaatcaatagtgtttttatacattaacagttaattacatgaaaaacaagtcaagaaaacaatagcattaacaatagctacaaaaacaaaatatttaggaataaatttaaccaacaaggtagaagagctctacattgaaacctataaaacattaaggaaggaaaatgaaaaagacacaattaaaaaaaaagatatcttgtattcatggattggaagaattaatattgttaaaatgatcggactactcaaaatgatctatagattcaatgcaacctccatcaaaatactgatgatattcttcacagaaattaaaaaacagtcc

SEQ ID NO: 896619 - DNA, 677 bp, Homo sapiens
attttttttcaaaaggcaaagtttagaatcaccatatagtcacttcataaacctatatcatatttcatttcactggtttctgtaatttgaatagattatctctggagcatgtccaagaagttagacttgtgaaaatatgacagttttacaagtaaatgataggagaaccgggattgggaaacatctgactgaggcacatggagttcgcaggacagaaaggatgttctccgtgaacaggggaggagtaatgaaagcactgaggagcatgagactttgcctgtgcctgtgcctgtgcctgtgcctgtgcctgtgttatgactatcgacctcattgaggccaggctggattaatacagttgagtacactaaagcacacctgaatgcttaagcaggaactgagacaaaacagcatagagattgtttcacctcccatagatcatctgctctgggtttagatgtcctccttttttctttattggttgtgaataaaattaaatccattccagcaaaaggaaaaacctcatcaaagaagaggaagcagagaaaagtaggtccaactacacctttagcaaccacagacaagaagttcacagctgaagraggagaggagactcctatagctcaggtaagcttgagtaagaggagcaggcttcaattcccacagaagaaactgccatg

SEQ ID NO: 896620 - DNA, 606 bp, Homo sapiens
ctattaataaatctaagttccagtgaaatttgctcgtgctgctgaacaaatctaagttaaattrtagatagatattagtaacttaaggtaagaattcccaaaactagatgtatggggtgaagagttaactattgataacagtagagaatctcatttccaatttcagggataaatagtattaggggaaatcctgagagacaacagtggaagtacagaagtaaagatgagaaaataaattactaactaggaagattcttcaatgaatgcttcctagagtatggtctattatagataaattgagcaaacagaggatggagataacagaaattaaaggtacagagtacagtgctatcgtttaaatgcttttgtcccctacaaaaccaatgcttaaacttagtacgcaaagcaacagtgttggcaggtgaggcctaatgggaagtgtttaaatgatgagggctctgctcttataaatggattaatgccactataaaaagagcttgtgggggtgaattagctattttttggctctcctgtcatgtgaggacacagcaagaaagcctcatcagatactgatgccttgaccttggacttccaacctcaagaatt

SEQ ID NO: 896621 - DNA, 626 bp, Homo sapiens
gccaagtgcatagtaggcactccattaatgctgaatacataaatacatgcatgaacatatgaaacctatgggtaaataaaaagctaaatatattcacattcactctttgtaatgcttgctgttttgagcctgcaatgttccttaccaccagaaagagcccaagatctcagataatgaaggtaggatcctggataagaaaaaaaacctccacattctgcctcctacttagcctttcttcttctctctcctcccattcaattggcctagctattctgactcaccaccccctacccctttcccacctctaccctcccctgaaacggaaaaaaaaaaaacctcacttggctttcctccccctccaatctgccctagagatgacccccagctcgttgccagggagatggtctgggtaacaggtgctactgagggaaggctttttctgtcaggaactgcttagggtgaccaaccatcccagtttgctcaggactttcccgatgttagcactgaaartcctgaaaaacgactcagtccctggcaaactgggacagtgctcataatccttcacgctttactctacaaaaccttatgtcgctgcacacagttgtcagcatctgtgtgccctacag

SEQ ID NO: 896622 - DNA, 538 bp, Homo sapiens
tctaagagttagaagacatgcacccaaatccctcatctagggataaaatattagcctcacaggattggaagacactttaaaatcatattgttgcacatcccagccaacacttgtgtcttctactattaactgtcagtgtaaccttggttcagttagcctcctttgagcctcagttgtacctatataattaaggggttggaatagacattttctaagaattcttagatatctaatatcattttattctagaattctaacatttagaaatgtatttccaaaagctaagtttcagtaaaactgatttagaaagatccctttctgagatatatcaagactcggagatactcagtcacaaagaatggcaaacaccagggacttgggacacttaagccaagaccaagtacaaacaccctgcatctctcatcttgttatatctggcctcaggattgacagcagctttggtcacagacgcargggtccttggagggtttctagatcagactcttcatccatgaaccttactaactcaaacttgaga

SEQ ID NO: 896623 - DNA, 590 bp, Homo sapiens
gaaatggcatctttctctttcaaggacagctctattcattccctcagggtttggcaagatagctctctggagaagcagatagggctgaggaccatttgtgcactaagggttacctgtcctaggtctaactgctcytaataattagattactgctgaggggttttcttacatcctacaaccttacattatgatttagaaacttcagttatgaaaatggcacctctttttatatatcagtcagaagcagctatgatatgggctccagtcttttgggaaatgaggcaagttataaacctgtcttttcttctttgtaattctagcatccctagagtatcttgcacataagaggcatttaatgaatatttgtttacttgaatgaatgaatgaatgaggccatatggccacactggatttttgaagtagtcaacaaatgagggtttgtgactagaatctgtcctcatttatcacctgttcttccatcaaacatttgctttaagtaccagtgtctgctaattaatcttgggtattaagcagacatataccttgacaagtcatcaggctgaaataatttggtgggagtatttctaagt

SEQ ID NO: 896624 - DNA, 537 bp, Homo sapiens
ccttagaacctgacagtcaattcttaaataatgttggtgaaacgaatactgatggatttgcactcttcccaaagccgtgtttggctatgaacagtgcagggaacaattcttgacttacctctcagaatgttagggcatcaaatacaagaaatgatgccctagatcaaactttgtctatataatagaatttgttggtaatggataaataataagaaacttgaggcagatggctaccgtatataacaacctctttagaggatagtttgactatatatgtcaactaatgcttgtattctttaaatcagcaattacatttctaggaatttaatagatgtttttgtacatttgctataacagagatattgaccttaagtttcttttcttaacaattctggtttgtcactgacagaaayagtttgcaatatagtttgtatatttgtccttgcccaaatcttatgttgaattgtaatccccactcttggaggtggggcctgatgggaggtgtttgggtcgtgggggtggatccctcatggcttg

SEQ ID NO: 896625 - DNA, 647 bp, Homo sapiens
aagcctgctgttcaagcaagccaaacaaaataatcagtaacaaacttggttacaggccaccatcttgtttcatgtccttgggaacatgacctgtaaccacrtggcagtactttgttttagtctctgccattttacaatggtggctgtcttcttgtgctaagtcaattcctgggtgagggccacaaaatcagataagccagtttgtcaatctgggtagtgccagctgatccatctagggtaatgtttataaaatatcttaagcactgatcttgagagcagttaaggaagggtcaaaaatcttgtagcttccagctgtatgactcctgagccatggtttccagtcttgtggctagttttttggtctggtccccaaacaagagggaagtatatcttaggaaaggactgttatcatctttgttttggactacaaacagtgaaccaggcccctcccaaagttggttcagcctacacccagggatgggcaaggacagcttgggggctggaaacaaaatgaagttggttgggtcagatctcttctactgtctcagtaacaattttttaaacacagtttcaaaagcgcttatcacccccttaaaaatactttgtacactcgcggttaagtcataacctaattaaggcttgttggc

SEQ ID NO: 896626 - DNA, 647 bp, Homo sapiens
aagcctgctgttcaagcaagccaaacaaaataatcagtaacaaacttggttacaggccaccatcttgtttcatgtccttgggaacatgacctgtaaccacatggcagtactttgttttagtctctgccattttacaatggtggctgtcttcttgtgctaagtcaattcctgggtgagggccacaaaatcagataagccagtttgtcaatctgggtagtgccagctgatccatctagggtaatgtttataaaatatcttaagcactgatcttgagagcagttaaggaagggtcaaaaatcttgtagcttccagctgtatgactcctgagccatggtttccagtcttgtggctagttttttggtctggtccccaaacaagagggaagtatatcttaggaaaggactgttatcatctttgttttggactacaaacagtgaaccaggcccctcccaaagttggttcagcctacacccagggatgggcaaggacagcttgggggctggaaacaaaatgaagttggttgggtcagatctcttctactgtctcagtaacaattttttaaacacagtttcaaaagygcttatcacccccttaaaaatactttgtacactcgcggttaagtcataacctaattaaggcttgttggc

SEQ ID NO: 896627 - DNA, 658 bp, Homo sapiens
tggaatttaatgtaaatcacaatataaatttttaatgttaacaattatgttatttctacattaatggtgtcttatatagagtaataaatgtgttcattgaaccgttagagagcagtgtgttttttgtttcaactgacaaataccaaagagagtttgcatcaagggagaaattttcagattagtgtcacaaattatagatctctgtgtttcacttgaaacatatttggagatccaagccaacaagccaaaataccgtgtttttcactgtgcttaattcatctttctttcttgcctttggggcttttccacctttcttttctgagatgtcctctctgtatctggatgcttggggcttctcaagacagcaccccacttagagaatggaggcaaatcaagatttttttccaagtcaattgattacttaattctgttttcaaagtctatctcaggcaaaatggtgaagtatatggagtggatcctctgttcaccttcacctccccatcgcttctgttggtcctctcaaacagtcccctgttgtccctcctctctttctctaygtctcttgcatcttactggatcaagacagcacatcagttttagagctttttctacatttttccaccaatcctattgccaatatttcaggacagttgttccc

SEQ ID NO: 896628 - DNA, 604 bp, Homo sapiens
caaaaggaaaatcattgaaccacattaatagtgaaaaaaagggtaaaaattcaaagaacttgtttagtcccacagataaggagactggaagtcatctctctatcctaacaacaagaaaaagctgaaaaaactgaaaaatcaataacttttcttagatctgtaagagaagtgagtctgtagggcaaactgctgtccccgaattggagacaggtgaatacagagacacagcttactgaagcagaaacctgtaagtagaaacctttgtgggtactactaccagagtaggaaaaccggaactgtaattaacaaattgctggaggctcaagttggacaaatttgaaggtagaaaactccaggggaactcagtgggggttgggggtctgcatgtttttgcaagttttacttccaagagcttgaccaggttctgacagagaatattggagaaaaatacctctgtgcttctggcaatagtagagaaaaaatggacactttgaaatatgccagagcattctgttcttttaaatgagtcctaccctcaggaaaaaktgtttaactagaacctgcactattagagctttttcagagcctaaaagacccgtgagaa

SEQ ID NO: 896629 - DNA, 600 bp, Homo sapiens
acaaaactatttttatatgaagatttcctataccttatgttcattgcagcgttgttcataatacccaagattttgaatcaacctaagtgtctatcaacagwtgattggaaaaagaaaagtgtagtacacatacaccatgtaatatgatgcagccataaaaaagaatgaaattatgtctcttgcagcaacatggatggagttgtaggccattatcctaagtgaattaaatcagaaacagaaaatcaaattattgcatgttctcatgcaatattctcattcaaaatgttctaagtaggagataaacaatggatatacatagacatgaaaatggaaatagtagacactggggtctccaaagggggagaggatttggggggagggtttaaaaaattacctatgaggtatggtattcactattttggtgatgggtacactagaagcccaaaccttaccattactcaatatatccatgtaaaaaacctgcatatgtacccccgaacctaaaattatttttaaaaatcccaatgaaagaaatcaaaggctaatgaatggccatgtttatggatagaaagacacaatattatcaagatgttggttcat

SEQ ID NO: 896630 - DNA, 387 bp, Homo sapiens
agttggctgtaagcagttgggtttatttctggattctctattctgtcccattggtctatgtgcctatttttatactagtaccatgctgttttggtgactatagccttatagtatagtttgaagttgggtagggtaatgcctctatatttgtcctttctacttagtcttgctttggctatgagggctccctttttgtttcatatgaattttaggatttttttttctagttctgtgaagaatgatggtggtacttttatgggaattgcattgaatttctagattgcttttggaagtatggtcattttcacaatattgattctacctatccatgagyatgggatgtgtttccatttgtttacattgtctattatttctttcagcagtgtt

SEQ ID NO: 896631 - DNA, 573 bp, Homo sapiens
aagtgattaatcaagcctaagtatgtctggcaaggaagtcagtatctgcccttaactgtgactagtttaaakaaaccccttttcagaaatcacatttttccaggctgttttttttttaaaccgatagaccatctcgaacttcacatgcatcttaaatcctgggacaccagtacaaaatttacatccaaacacaatcctgcactacatacttacagaagctttattcataattgccaaaacttggaaacaatcaagataggtaaatggaaaaacaaactatgttacatcaatgggtaaatggagaaacaaactatggtacatccatacaatggaataccactcagtgataaaatgaaatgagctgtcaagccatggaaagacatagaggaaccttaagtgtatactgctaagtgaaagaagccagtttgaaaaggctacagactatttgacttcaaccatataacatctggaaaaggcaaaactatggagacagtaaaaggatcagtggttggcaggagctcagggcagagaaggagaaatgaataacaggtgaagcacagggaattttttagg

SEQ ID NO: 896632 - DNA, 674 bp, Homo sapiens
gctgacccttggagcctccaaccccttgagagacactgaggcaacccagactcctcccctggtggagggagggaagctacctccatttcagaggatgtgggtcagtttaaagagagagtggtgaggcacaataaagattcatttcaccctgtagccctagaaaagtgcaaaaatgacaggtctagtctctttgaaattgtgtatcctaatgcattttcctgaggagctgtgaagttgtacaaaagttcaaagagatgcttacacagctaggtcctgacaccttttcaaccatccatgtttccaaaataatagtttactgttttttaagaatttgtgaagtaaaatagtttggatttaacattttccctcttaactcaggttggaatttgtttgcgtggagtttgttttttcttcttggaataaggattagatctgaaaaatgtacatgtgccatagcattcttttaatagaagtagacatttttgttcctctctatgaaacaactaaaatgtccccaaacaagaaaaaaatttttaagtgtaagttcttgtcataaggaaatcttccttatgtgcttagagtgagggattcttctgggtgtygatggccaacaagacacacttgatgtttttagctgaagagatgaatctaatcagtttttagtattattgttt

SEQ ID NO: 896633 - DNA, 625 bp, Homo sapiens
aattctttcattgagcctctttttctgtgagttttccttgcatccacggttgtgggagtgtttctccagcacggttttgcttttgccccttctgttgcccagggttattgctgtccrgggccaaatatctggttactttctgcacctagaaggtgacacaactgtatatctcaaacttgtaagactttggcctgtggtttcaaattcttggatgtgaatttttttttcttgttattttacatagaactcaaccagagaccactgggaacatcgtttcatcttcttttaatggtgcatagatttttctctagtccattgtttaggaccagactttatgtaaggcatcttattttctatgtcccacctctcagggcccacatcactgtttcctatcccccagtggacaataaagaaagcctctaggataatgaaacaaacagtcctctccctggatagctactatgctacctcactccctcctgtttttcctttcccttttcctttcttgtgaactcatttctataccttttttaaaaacaaaaatgttatatttcattcaatatttccaagcacttactccgtgtgagcttttgggttatctgagcccatcgtcctgcctgtgtcc

SEQ ID NO: 896634 - DNA, 637 bp, Homo sapiens
acaaacaaattacttaaagtagcatgaaactgtaagaaaggaaacataatatttacttctaaagaaacatatgtcaaagtgaatygagaggcttctaaacctgcattgaaataaacattcaaagatggcagatttaaaaaaatgtggatcagaaagacattccagaatcaaaagccaccagctgctacaagtgtgaaaatgaaacctctggagggactgttgcctcctgctccatgtggctgtggcatgtgatgcctatagcagctactgaactgatatttgtgcccaccacccagtctgggtagagcaggtgtctcactggcacagtgcagacgagcttgacatcagaaaaacttaccagaagtaggtctttgcctagttcatcgatatctgttacaaacttctcaattggttgggcagattttgaatgaaaagcctgcctgggaagggcaacatctctaggccagtcttcttctcctgggagtccaatcacgctacaaaagaaccacacatggacataagcattagctactatgcagaagctgttttctcatcaatttccagagaaaggcaaaatctaagggggagacatggggggcagagtcccaggagaccttcactttatcactggcagggt

SEQ ID NO: 896635 - DNA, 607 bp, Homo sapiens
tgcataaactttataacctcaaaacattttggaaatgaaatgacagaacttgcttactcaattgcttctatatacaccaaatatttttttaaagtattatgttaagtccttgaaaatattttgttctactcaatagaagcagtttaggttggtagttctatgtggaaaccgtgaggaaataattttatattatgatgactagaccagtctttgaacatcactttggttattgttccattagtaaatattataattatttctgagatttactcaccttcaaagaatgttggcaatgccagcattattaacactcctctagttagaacaaagaggaaatgtaataacaaaacataataatagccaaataaagagtgacttagaatgtacacccttatctaggatcctgagtaattcgattattcttaggaaatacacttttgtgctagaacaaagacttttgaaatagctaatttctgggtttcttttcattttgaattaacttgaatttcaaggaaacaagggtagtttttacwgatacagtgcatagaagctctgtgtacaatgaagaaaagtaggaaagtgagaaaaatgccattagatttttcat

SEQ ID NO: 896636 - DNA, 711 bp, Homo sapiens
accaaacaagctttccatgaattagcttttagatttacttattagtttaactgttctgttgtattgtaactcattaatttataatwttatctttattaattattctatttttcttcgcttttttgttgtttttctagtttttgagttagatgtttgacgcttttttaaaaagctgtgcattttcctctgggtaatactttagctgtatattatgtattctgatatatagtgtttccattacattgttttctagaaaatctgtagctttgatttatatttgtttcctctttgacctaagatatcctaagggaaaatttaacattttccagaaagaaaacaaattttctttgttttccaagaatgttgttcaaattatttctactgcttggaatttttatcatttttgtgtatccagtaaatagtcaatatttgtacttgctctctgaccacataaaagaatatattcgtgtagtttctattaatagattagagttcaattcagatattaaatgtacatcattattcatgatatttaggtcttctacatcttcacttatcttttttctacttgctttgccattaacagataaagttgaattaaaggcttctactacatacatttctccctgttattccttataggttctgtaatttttgcttcaagaatattgctttttaaatttaatatatagatacttataattacactct

SEQ ID NO: 896637 - DNA, 569 bp, Homo sapiens
attgccatgcccaatgtcgtggagttttctgccatgttttctcctagtagttttacagtttcaagtcttacatttaagtctttaatgtattttgagttgatttttgtgtattgtgtgagattagggtctgatttcattctgtatttgaatatctagttttcccaacatcatttattgaagagattctcttttcccagttgtgtgctcttgacacctttatcaaaatcaattgaccataaatgtatggatttatttctggactctcccttctgttccattggtctctgtgactgtgtttatgcaaataccatgttgttttagttacaatagctttgtagtatattttgatgtcagagagtgtgatgcttccagctgtggtcttttatggttccatatgaatttcagaatttctttttctactttcatgaaaaatgtcattggaattttgataggtattgcattgaatctgtacatcatttggagcagtatggacattttracaatattaattttccgatccacataatgagatatctttccacttatttgtgtcttccttaatttctttc

SEQ ID NO: 896638 - DNA, 502 bp, Homo sapiens
ggtaccatttcttctgaaactattccaaacaattaaaaaggaatgactcctccctaactcattttatgaggacagcattatcctgataccaaaacagcgcagaaatatttttaaaaattttaggccaatattcctgatgtacatctatgcaaaaatcctcaatagaatgctggcaaactgaatccagctgcacatcaaaaagcatagccaccatgatcaagtcagcttcattcctggtgtgcaaggctggttcaacatatgtaaatcaataagcgtaatccatcacataaacagaattaaagaaaaaaaacattgttactcaaaagccacagaataggtcttcaataaaactcaacatccctttatgttaaaaactctcaataaactaggtattgatggaacataccacaaaataataagagtsatttatgacaaacccacagccaatatcatactgaattggtaaaagctggaagcattccccttgaaaagtggcaaaaaa

SEQ ID NO: 896639 - DNA, 641 bp, Homo sapiens
cttttctttcattacctaaaaaatgtgccatttccttctggcctccatgatgtcatttgagaaaccctctgtgattcaaactggtctcctataggtaaggcatggttctctctggctgctttcaagatttttttttcttcagttttcagatgtttaattatgctgtatctgactctctacctcctactccatccttgcaaatttatgtggtgtggattcatattggtgtgaatttccttgggtttatcctaacagagattttctcagcttcttgaatctttaggtttatgtcttttgacaactttggggaattttcatccattattacttcaaatactttttcagtcccactctgtctctcatgcacctctcataatattaatatttttatttgtttcaagagaacttgtaaattcaacagaatttgtaatagatcattgaagcatttttatgacatctgctttaaaatccttgtcagataattccagtgcgtggttcatctcagtattggtgtcacttggttgtgtttttttctggtatttggtatgacaggtaatgytttgttttgtttcactttatacaatacttttatctccttttgtttttagttgacatataataattgtacaaatttatgagat

SEQ ID NO: 896640 - DNA, 511 bp, Homo sapiens
gccaccactctctttgctaaagcctagcaggagtgacccttactccagttcccaataagcggttcatctccatctgagaccacytcagcctggacttcattgtccatatcaccatcagcattttggtcacaagcattcaacaaatctctaggaagttccaaactttcccacatcttctcatattcttctgagtcctccaaacttttccagcctctgcccattagcctttttcaaaatcacttccacattttcaggtatctttataacagtgcccctctctcctgataccaattttctgtattattccattttcacactgcaataaaaactatgtgagactgggtaatttatgaagaaaagaggtttaattgactcatagttctgcaggctcttcaggaagcatgtctaggaggcctcaggaatcttacagtcatggtgggaggaaaagaggaaggaagtatgtcttaacatggtggagcaggagaaagagagagagaaagtgaaggggaaa

SEQ ID NO: 896641 - DNA, 663 bp, Homo sapiens
tgtgtggaacagcatttggtgggataaggtgaatggtagcaagtggaagaaagtgcagccatgagaatttatgagggatggaaatcactgagatgaggcagggactgaaaagtgacagagctgaggatttcaggtggagcacttctcagcaccagactactcacaaaataaaggatcagtgtgaaagaagactcctagaatgctggcttagaaaactggatggaaggaggtacccagaaccaatgtagggatggcaacatgaaaaatggatttacgtagaatcatgatttcataatggagcttagactttcgatgagtttgaggctctgaagtaacaatgaggtacagctacctggtaagtgattgtaggggagtttaatatgtatatgtaaaattcaggagacaaaaacaagttgaagataacaaagtgggagctttaaaaatgcagactgaagttgcagctgtacaaacaaatgaaaatgcccaggattcattcagttgcaagtgtgagaaagagatgacattggataaatagaaagaaatgtaatgattcacttgtctataagaagaagcctggacttggcctcagccgtgagcggctctgaggaacctcccacaaggtgagtgtattgaagtctgartccacaccttgctttcggctca

SEQ ID NO: 896642 - DNA, 652 bp, Homo sapiens
caaaaaatggtgctgggataactggctagccatatccagaagactgaaactggaaactagaccccttccttacaccatatacaaaaatcatctcaagatgggctaaagacttaaatgtaaaacccaaaactgtaaaatccctggaagacaacataagcaacatcattctggacataggaatgggcaaagatttcatgacgaagatgccaagagcaatcgtaacaaaagcaaaaattggtaagaaggttctaagaaaactaaagagcttctgtagagtaaaagcatctatcaacagagtaaacagacaacctacagaatgggaggaaatttttgcaaagtatgatctgacaaaagtctaatatccagcatctgtaaggaacttaaaaaaccattaaaaagtgggcagaggacatgaacagatacttttcaaaagacaacatacatgcagccaacaagcacatgaaaaaaagctcaatatcactgatcattagagaaatgcaaatcaaaaccacaatgagataccatctcacaccagtcagaatggctattactaaaaagtcaataacagatgctggcgaggttgcagagaaaarggaatgcttatacacttttggtgggagtatttatttacaataattgtggaaagcagtgt

SEQ ID NO: 896643 - DNA, 591 bp, Homo sapiens
tggtaaggagatcaatgcaactagaagagctaattaccctaaatatatatatatatatatatatacacacacacacacacacacartacaggagcaccaagtttcataaaataagtttttagagacctacaaagagacttaaactcctatacaataatagtgggagactttaacaccccactgtcaatattagatgatcaacaagacagaaaattaacaagggtattcaggacttgacctcagctctggatcaaatggacctaatggatatatacagaactctccacccaaaaacaacagaatatacattcttctcagtgccacatggcacttactctaaaattgaccacataattggaagtaaaacacccctcagcaaatgcaaaaaaactgaaataataacaaatagtatctcagaccacagtgcattacaaactcaagattaaaaagcccacacaaaaccacaaaactacatggaaattaaacaacctgctcctgaatgactctagggtaaatagtgaaatttaggcagaaatcaagaagttctttaaaaacaatgagaacaaagagaaaatgtaccagaatctctgg

SEQ ID NO: 896644 - DNA, 619 bp, Homo sapiens
gtgatggacaagatagatttgtctggcaagccaaactatttattcttcatggtgtgtttttaaatgctttacctttattccttgtttggctaatgaatcctattaatctgatgtaagaggtaagctaaattgaacaagtatattacttggtaaattcttttagagtgactcaatgcagatctctatcaaggaagtgacaaagaacccctaacacaactacccaaacaatttttctgaagaattaatttcattctatttctctattgctcaagagagaaagaggttcttttgcagacctctattaaataactaaagaacaacattattttacttttaaaaagttaaattaaatgagtttaaaacctccatttaacatttatccctctattaagtaagttgaagccctgagctgatacagattagtcttcagatagatgcaactttatctgacattgctcatagctaccaggcccagttcctctgctctaggagggcacgcatgttcccctccaatgtcytgcctgtattcactctgcctcttcacttgaaaaacctttccctgtcctttcaagtgacttgggttgttggcagggattctccttcctaagaagccttcctc

SEQ ID NO: 896645 - DNA, 598 bp, Homo sapiens
tacacaatccactgcttatttttatagcatgctgaactgttctctgtgttaagtactcatctttgctctgaagaagaaataggctcctcaaaagcagaaaatatgtccacccaagacataagccaaagctggtaatagtgtctcaataaataataaattgatttgaaagctactccttagttgtaatatattttatgatatttcagaaaataattgaagatccaaacctttaaaaaatgccagaatagacacataacattgtccaaaagtcctttattataagtggtctggggagcttcaacaccaagtcagtatttacctggatttaatttaactcaacaaatttacatcgtattttaaatcactagttaggaaggtttaatatattttaacaaaaatgtccactatctgagataactaaacattatttcctcaaaagagaaacatttagtatgcaaaacttaatgcaaggaaaagtacaaattttcctgaaaaagattcacgcatatgtggcataaaaatgggccaaagcctagtaaagtaccgggcctagaagcttattttaatcatttctcrataaatgaccatatcaatctag

SEQ ID NO: 896646 - DNA, 594 bp, Homo sapiens
atgttcaaactgagagccaagtcaagaatgcaaacccgtttacaatagccacaaaataataaaatacctaggaatatatctaaataaggagatgaaagatctctacaaggagaactacaacacactgctgaaagaaatcacagatgacacaaacgaatggaaaaacatgccatgctcatggattagaagaatcaacaccattaaaatgtctacacttcccaaagccatctacagagtcaaagctattcctatcaaactatcagtgtcattttccaaagaactagaaaaaactattctaaacttcatatggaaccaaaaaagagcccaaatagccaaagctgttctaagcaaaaacaacaaagctggaggcatcaaattacccatcttcaaactacactagaaggctacggtaaccaaaacaggatggtacaaaagcagacaataaaccagtggaacagaatggagaataaagaaataaagccatatcctacagccatctgatcttcaaygaagtcaacaaaaataaccaatggggaaacaactccctgttcaacaaatggtgctgggacagctcactagccattatgcagaaga

SEQ ID NO: 896647 - DNA, 594 bp, Homo sapiens
atgttcaaactgagagccaagtcaagaatgcaaacccgtttacaatagccacaaaataataaaatacctaggaatatatctaaataaggagatgaaagatctctacaaggagaactacaacacactgctgaaagaaatcacagatgacacaaacgaatggaaaaacatgccatgctcatggattagaagaatcaacaccattaaaatgtctacacttcccaaagccatctacagagtcaaagctattcctatcaaactatcagtgtcattttccaaagaactagaaaaaactattctaaacttcatatggaaccaaaaaagagcccaaatagccaaagctgttctaagcaaaaacaacaaagctggaggcatcaaattacccatcttcaaactacactagaaggctacggtaaccaaaacaggatggtacaaaagcagacaataaaccagtggaacagaatggagaataaagaaataaagccatatcctacagccatctgatcttcaacgaagtcaacaaaaataascaatggggaaacaactccctgttcaacaaatggtgctgggacagctcactagccattatgcagaaga

SEQ ID NO: 896648 - DNA, 601 bp, Homo sapiens
accaataatgttcaaactgagagccaagtcaagaatgcaaacccgtttacaatagccacaaaataataaaatacctaggaatatatctaaataaggagatgaaagatctctacaaggagaactacaacacactgctgaaagaaatcacagatgacacaaacgaatggaaaaacatgccatgctcatggattagaagaatcaacaccattaaaatgtctacacttcccaaagccatctacagagtcaaagctattcctatcaaactatcagtgtcattttccaaagaactagaaaaaactattctaaacttcatatggaaccaaaaaagagcccaaatagccaaagctgttctaagcaaaaacaacaaagctggaggcatcaaattacccatcttcaaactacactagaaggctacggtaaccaaaacaggatggtacaaaagcagacaataaaccagtggaacagaatggagaataaagaaataaagccatatcctacagccatctgatcttcaaygaagtcaacaaaaataaccaatggggaaacaactccctgttcaacaaatggtgctgggacagctcactagccattatgcagaaga

SEQ ID NO: 896649 - DNA, 601 bp, Homo sapiens
accaataatgttcaaactgagagccaagtcaagaatgcaaacccgtttacaatagccacaaaataataaaatacctaggaatatatctaaataaggagatgaaagatctctacaaggagaactacaacacactgctgaaagaaatcacagatgacacaaacgaatggaaaaacatgccatgctcatggattagaagaatcaacaccattaaaatgtctacacttcccaaagccatctacagagtcaaagctattcctatcaaactatcagtgtcattttccaaagaactagaaaaaactattctaaacttcatatggaaccaaaaaagagcccaaatagccaaagctgttctaagcaaaaacaacaaagctggaggcatcaaattacccatcttcaaactacactagaaggctacggtaaccaaaacaggatggtacaaaagcagacaataaaccagtggaacagaatggagaataaagaaataaagccatatcctacagccatctgatcttcaacgaagtcaacaaaaataascaatggggaaacaactccctgttcaacaaatggtgctgggacagctcactagccattatgcagaaga

SEQ ID NO: 896650 - DNA, 667 bp, Homo sapiens
ttgtggaatctgtgtttgtgtgaggaggggcatggtgctctcagaacccacctcctgtggccagagagccctgtcctgtgagggtggttrtcacagtggcagggttcaattcagaagaccttgagggcaggctgatgtttcctgaatgggcccctggttgttgcttgtccctgactctccatttccccatctgagtggatttggacctaatagggcactggagctggttcgaatcctgactggactacttggcaactttatgtctgggagcaagttacttaacctccccaagcctgtgtctgtgaaatgcgggtaaatgaatgtagatgtttggcagcagctactccttgttgagctctcacagtgaactctcctgcctctgccctccttccccgcctcccctggtgcctagcgtcaggtctagccacttcctcctgggcccctctcccttttctgtggctggctgcctgcccgcctggcgctggacctttcatgtaacgggaatcagcatgtatattctggtctggtctgtttctacacttaattttgtttccagtagtatttccctgtaccggcagagttcacaaacacatttgaagaggctttttctcaggattcttaaccttcccaaaggaagtcccatggatgggtttctagaagtctataa

SEQ ID NO: 896651 - DNA, 587 bp, Homo sapiens
ctaagaaaaaaaaaaaaagagacgatccaaacaaataaaatcagagagaaaaaagaagacattacaactgatacaacaggaatttaaaggatcattagtgactactatgagcaattatatgctaataaattggaatatgtggaggaaacggataaattcctaggctcaaacaacctacccagattgaaccatgaagaaacccaaaaatggaacagaccaataacaaagtaacaagattgaagctgtaatgaaaagcctgccagtaaagaaaagcctgggaaccaatggcttcagtgctgaattccaccagacatgtaaagaactaataccaatcttactcaaactatttcaaaaatggaggaataaatacttccgaattcattctataaatccagtattatcctgataccaaaatcagacaaagacacatcaaaaaagaaaactataggccaatatccccgacgaatgttgatasaaaaatcctcacaaaatactagcaagctgaattcaacaatacattaaaaagatcattcatcatgaccaagtggggtttatcccagtttcaacatatgctaatcaatcaatgt

SEQ ID NO: 896652 - DNA, 585 bp, Homo sapiens
tagtgtgcttataagacgagaaagagacacacgggcttcctctctgtctctcatgtgataaagcaagaaggcagccatctgcaagctagaaagagcagatcaggttagarcctgaccatactggcaccctgattttggacttcccagcctccagaactgtgagaattatatgtctgttatttaagccatctgatctatggcattttggtatagcagactgaacaaactaagataactagtatcctaggcaaaactacctgtatctggacatagctggagttaactttattcttgagggtgggaataaagacctggggtgcaaagaatgattactcagatgataagttctcgcaaatagttgtctaaatttttctactgctgtgactgttgccttttatcagctatctttgtaccgcctcttccttaccctttgagtatctctttccaccagctgcatttggtgcagaaaagttttcaaagcaccctcaggtgttggatttaaacttgtaagtgtcttcattcctcatttgcccttggctagccaagagactgattgttcaagactccttatgtttctgcagggtt

SEQ ID NO: 896653 - DNA, 640 bp, Homo sapiens
agttattctgaacgacatctttctgtaaaagttcaggaaaactactttttcacaaaacaaatgagcaacaaaaatgagcaacttaaagtcgaatttatacaaagttattataagaacaaagaaaataaggtacatgcaatacaaatgtgaaaaataatctaattttcaaaatgagctaaaagacattaaaaagatacaaatatgaaagcaatataactcaaaattagaaaacaaaagtaaagtaacataaattcaaagaattacaaataaagaaaaaaatacagaaattaagaagaaattacaaagaatgtaagagcaaatgagcccaacagatcactccagagaaataaaactgtgaaaagcaacaaaatcttaaaaattataatgaaataaaaatattaaaatgattcaagaaaaagcaacatgtattgaaggtagacttaaaaaaagacttaacctatggataatacgagtaccagaagaaatatcaaaacaagagagaagaaaatactaaaaattataattcaagaaaactttcatgaaatttaaaaaaagattaagakaagatttcaaaatacatattctgtacataccagacaatgttggcccagatacataatctagtaaaatgactagattt

SEQ ID NO: 896654 - DNA, 610 bp, Homo sapiens
ggccataatcctaagcaaattaatgcagaaacagaaaacaaaatatttcacgttcttacttataagtgtgagctaaatcttggctacacacagacataaagatgggaacaatagacactggaaactccccaaggatggagggagtggggcaagggctaaaaacttcctattgggtactatgttcatcatctggctgatgggatcaacagaaacctgatcctcagcatcacacaagtatacccctgtaacaaacctgctcatgtacccccccaatctaaaataaaaatagatgcttttttaaaaaagaaaatcataattaaaaagaaaaggaccttggcacagagagcccctctcctgcctgtctgcagatgtactctcagagagatgctgtgatctggaggtggatcgggtctaggtaggttcacagggtcagcgtccacgctgggctctcactcagccacaactcaccaccgatctggaggtctgctcagaggaacagaggagtggggtgaatatgaatctcrtctctagggtcagacttcctaggtccaaatcctggcccttctcttcttagctatgtgagactgggtaagtgaggtggcttctttgt

SEQ ID NO: 896655 - DNA, 590 bp, Homo sapiens
ttcaaattcaagataacacagcgamggaattcagaattctatcagataatttcataccgagattaaaataagaatcaagcagaaattctggagttgaaaaatgcagctgacatattgaagaatgtatcagaatctcttgataacagcattgatcaagaacaaaaaagaattagtaagcttgaagacaggatatttgtaaatacacagaggagacagaataagaacgaatgaagcatgatctagaaaatagcctcaaaagggcaaatctaagatttattgaccttaaagaggaggtagagaaagagataggggtagaaagcttattcaaagggatactaacatagaacttcccaaacctagagaaagataccaatattcaaatacaagaagattctagaataccaagcagatttaacccaaagaagactacctcaaggtatttaatagtcaaagttccaaaggtcaaggataaagaaaggatcctaaaagcagcaagaaaaaaaagacttataattgaactccattatatctggcagcagagttttcaatggaaactttatgggccagaagagagtggcaggacatattta

SEQ ID NO: 896656 - DNA, 605 bp, Homo sapiens
atatagccaaaggagatgaaatataagcacttcatagagatatccgcactcccatgttcaatgcggcactattcgcaatagccaaggcatggaatccacctaagtgtccactgacagaggcctagataaggaaactgtggtctacacatgcaatggaatatttccagctcttcaaaaggagattctggctgggcacggtggctcacacctgtaatcccagcactttgggaagccaaggcgggcagatcacctgaggccaggagttcaagaccagcctggccaacatggagaaaccctgtctccactaaaaatacaaaaaattagccaggcgtggttgcggatgcctgtaatcccacctactcaggaggctgaggcaggagaatcgcttgaatccaggaggcagaggctgcagtgagccaagatcatgccattgcactctagcctgggcaacaagagtgaaactctgactcaaaaaaaaaaaaaaaaaaaggagatcctgcctatgtgacaacatagatgaayctgaagacattatgctaaatgaaataagccaaacatagaaggaaaagtactgcatgatctcatgtatatatgaaatttttttt

SEQ ID NO: 896657 - DNA, 596 bp, Homo sapiens
cacaggggatgttaatactaagagatgtcctaagggatcttctgtacttcacacatactcttccttacctccattgtgaatagtaaactgatttcatcttgatagtctgggtcarttacccagccaacactgtaactcccttcttagtctgttgatttgaggtacgagaagcccaaagtgtccaggtggcaaccttaacttccagtttaatggaatcgttgttgtgtctcctggtgtcagcgttcctccctctggaaatgagatctctaagccagcagaatgtaatgtcggaggaacacgaagcaaaaattttgctagtggatcactaggggtgatggtgagtggtgccatgtccacttccaccttttgattctgggacctgtgaatcctggtgatgggagaaacagtaccatacattgaatgctgattcacggcatacacagccttctgaagaactttgccccagccctgcatagtattgtcacctagttggcattgtaattgtgacttcaaaagtccattccacagttctatcaatccagctgcctcaggatgatggggaacatgacaagaccagtgaattccatcaggatgag

SEQ ID NO: 896658 - DNA, 596 bp, Homo sapiens
cacaggggatgttaatactaagagatgtcctaagggatcttctgtacttcacacatactcttccttacctccattgtgaatagtaaactgatttcatcttgatagtctgggtcagttacccagccaacactgtaactcccttcttagtctgttgatttgaggtacgagaagcccaaagtgtccaggtggcaaccttaacttccagtttaatggaatcgttgttgtgtctcctggtgtcagcgttcctccctctggaaatgagatctctaagccagcagaatgtaatgtcggaggaacacgaagcaaaaattttgctagtggatcactaggggtgatggtgagtggtgccatgtccacttccaccttttgattctgggacctgtgaatcctggtgatgggagaaacagtaccatacattgaatgctgattcacggcatacacagccttctgaagaactttgccccagccctgcatagtattgtcacctagttggcattgtaattgtgacttcaaaagtccattccacmgttctatcaatccagctgcctcaggatgatggggaacatgacaagaccagtgaattccatcaggatgag

SEQ ID NO: 896659 - DNA, 552 bp, Homo sapiens
tgcctgcctaacagacgaacgccggatgcccgcgttcggccccgagccggcgcttcggggctttctgtggaggcggggcgatggttacagcacagttyccccgcgctcgccttttccacatccacctccgcgaggccccccgcaagcgccgttggaaacctagtcccgagggggctgcaagagcttgggagaagaagcgccaacaccgacagaataccaggccgacccaatgcggaaatcaattctcagccgggaccttttccccaccaagcaggcgggccggaagtctgcctctggcccgcccccgaggtgtcattgggtggaatacccagaagagggctgggacgtggttaactctagttctttattggttaaaacgtacgaagctggaggagaaggtgggacctagcttcctccggacttctcattggctcaaaaaaaactcgctcggctctcggattctcattggctgaagtcgagggaggtttgtgtcttattatcctccgggtccctcgctggctagtaggagagactggtgcttgccccgcccgg

SEQ ID NO: 896660 - DNA, 552 bp, Homo sapiens
tgcctgcctaacagacgaacgccggatgcccgcgttcggccccgagccggcgcttcggggctttctgtggaggcggggcgatggttacagcacagtttccccgcgctcgccttttccacatccacctccgcgaggccccccgcaagcgccgttggaaacctagtcccgagggggctgcaagagcttgggagaagaagcgccaacaccgacagaataccaggccgacccaatgcggaaatcaattctcagccgggaccttttccccaccaagcaggcgggccggaagtctgcctctggcccgcccccgaggtgtcattgggtggaatacccagaagagggctgggacgtggttaactctagttctttattggttaaaacgtacgaagctggaggagaaggtgggacctagcttcctccggacttctcattggctcaaaaaaaactcgctcggcyctcggattctcattggctgaagtcgagggaggtttgtgtcttattatcctccgggtccctcgctggctagtaggagagactggtgcttgccccgcccgg

SEQ ID NO: 896661 - DNA, 673 bp, Homo sapiens
attctggtcatatcagtgatgttcttagaactctccagatccttacagcactgccttcgtcttcaatctcatctgttccccatccctcctcatcctgcgcttcaggtatattcaccatctccccatgcctccagtgaattctgcccactcatgcctcagggccttcatacatgcagtttgctggttcgttctcttgctccttctttacttttttacatggataaattttaataattttttaagtcacaagatggagttagagctatacaacattcatgaacaggaacagtcttaatattatgaagatgcccagatccaataaaattcctatcaaaattccaaagtgctaaatttttaacagcagcttctaaagtgattctaaatttgtatgtaggagtaaagcctgtagaatagccaggacatttctgataaagaagatccaggagaagtgactaatgctaacaaataacaggacttactttgatgccagagtaattcagtcagttacggaaatggtgcaaaaatagacaaatagactaatagagtccagaaaaagattcawacgcagatagacaatagaattacatatcacgacaatggaaaagggaagggttttttttgttttgttttcaattttgttatcttgtttttaaataaatagtgctatttcaat

SEQ ID NO: 896662 - DNA, 542 bp, Homo sapiens
ggcactgctgacattttgggcctgatacatttttgttcwgggaggctgtcccgtgaacgtagaatgttaagcagcatctctggcctttacccactagatgccagtagcacctcacccccagttgtgacaaccaaaatatctccaggcatggccaaatgtccttaggagaagaggggaaattgcccctagttgagaaccactgggttagaccctatagaccatcatgagcattgctcaggagtggccataaatgcaactgggcttggctagttttcttcaaggccctgggatagtagcaacagtctgcacagtccagccagccctatcagaatgagccaagcaagggtctagggttcttggacaatgggaaggatggaacaggaggagggttggcaaggaggctctaaggagcacttggctcagacaggttacatctgcatccctgccaggcctcctccaaggcctgccttctggcctcctgtttcctcactcacgattagccccacacactggctactagagtaattgttgtaacagtaata

SEQ ID NO: 896663 - DNA, 626 bp, Homo sapiens
tgttggtaggaagtacctgggtgtttcatttgcatgatatgttggtaatcttagaattatcatatcttgcaagtcatttttaagtatgttgtaatgtagtcagaagctttttaaatatgaaatttaattcttgctggtgtcaattacatttaaaaaaatacaaaatagctatataagattctaggatctttcagaattttataatgtttataatggaaagttggttaaataaaaattgtaccctacacaattttgttgttggcttaaaatagcatttaatttattagtgctcagataatagttatcccctcaatagcatttttactttcatatgttgatatcaaacagtgaagtgagacagcaaatcagtacaacgtggtgattatcaaacatcataaatccatgaaggatagcgttgatcttactgagaagagtttaattttaaaatgcatacctggaaaaggcaagttagattaacatttcaaactcatatagcattatctgattgattatagttatgaytgatcattttatgtttggaccatcactttgaatccaattgggataattataaattaaggatttattatttgctttgaattttagattaaaaaatttaaaaccat

SEQ ID NO: 896664 - DNA, 699 bp, Homo sapiens
tccctgatgaatacacacagagaaattctcaaaaaagtraaatgaatcaagaatatatcaaaatgaatgtacaccatgaccaaatggaattattttacagatgcaatattgatctatccgataatcaatcagtgccttacacaaagtaataggataaaggaaattaacagaaagagcctttcaacagacacagggagcatttgaccaatccaatattcattcacaatctccctggaaaggaagggtacaagcaaacttcctaaatctgctaaagagcatcaatgaaaaacttacacctaacgccataatagtaaaatactggttgttgtgtcttgacattttagaacaaggcaaaaatgttaacatccaaagaaattacatgagagaaaaaaacaaaatcatcaatgtgggaaaataagatgttagaattgtctatcattgcagaggacataagtgaatataaaagtttataaaaaactcattaaaacccactaaaaccaatacatgagttcagcaaggtcacaagatacaaaatcaatatgcaaagttcaattgtacttttatgtactaacaatgatcaacctgaaaataaaattaaaaaaacaatccatttgtgtatgtatgaaaaagaaagaaatatttaggagtagatttaatgaagtgcaattttaccgtaaaaagaaatctttgttaaaaaat

SEQ ID NO: 896665 - DNA, 714 bp, Homo sapiens
gttcacgacggacaacctggacatgctgggcctgcacatgaacgtggagcgcagcctgtcggaggacgagtggaaggcggtgatgggggactcataccagtgcaagctctgccgctacaacacccagctcaagkccaacttccagctgcactgcaagacagacaagcacgtgcagaagtaccagctggtggcccacatcaaggagggcggcaaggccaacgagtggaggctcaagtgtgtggccatcggcaaccccgtgcacctcaagtgcaacgcctgtgactactacaccaacagcctggagaagctgcggctgcacacggtcaactccaggcacgaggccagcctgaagttgtacaaggtaaggcccagctccttatggctcaggcgctctttctgaaaggagggggttgcgcaccggggagttagggagcactggggaggagtcggacagtctctggcatggcctgcttggctgttggttgggaacctggagttgagaggagagtcggcggtgtccactttgtcaccaggtggaaacgtgacaggttcagtgagtagcttgactagctgaaggttctctttctgggtgcccaattttgggtcaggttttgttgacagcgcctctagggttggttcttttctttcttacatgggctcttttgcatcctctgctcctgtggtttccctctctcctttaggctttctgttctc

SEQ ID NO: 896666 - DNA, 569 bp, Homo sapiens
caagctctaggccattcctgccacatgtttccaggccttcattcccacccctactccctaccgccataggaggaaaacagaagggacaggaagagaaagcrtaggacaaggcccattattaaacaagtaatacctttcttggtcgtggtgaaatattttgagtcagtcattttggtcccttatctgtagccaggcttctgcaagagagagaagagaggggtgactttcagttatgctccatcccatcttcagttatggtgcagagggaggagaaggatccagaacacatgtggtacaggaaaacagctgcttatctatttcctggagaaacaaactttagatcatggcagattagattttgaaaagtaattctgaggaatctatcaaccttttttttttttttttcttcagagatgggatctcaccatgttgcccaggctggtctcaaactcctgggctcagccaatcctcctgcctcggcctcccaaagtgctgggattacaggtgtgagccaccacacctgatcccatcaaatttttgaatgtgcctcttctagaaatctttcccac

SEQ ID NO: 896667 - DNA, 587 bp, Homo sapiens
cagctccagccccagccccaaccccctgagctcaagcccttggggactcctgctgggcagctctctaggccctagggagatgctccacagacccaggctgccctttgggaagtggggaagccaagtgggtcaggtgtgcaccacccaggggcggggccaggcagccggctgtggtgggaggcagttgagccctggattgtgactgcttcagggcagttggtagatgcccctctgggagagatccccaggggtgacagccatggaccctggaagggcctgggctagggacagggaccagagccagtccagggagaggacagagccaatggactggggtgtactgtaacagccctgctggcgagagggaccagggcaccgtcctccagggagcccatgctgcaagtcgggccagaggtgcccctgaacctgaaggccaatgagacccaagacaggccaagtgggttgtgagacccctgaggagctgggccctggtcccaggcagygctggcccctgctgctgctgggtctggccatggtcgcccatggcctgctgcgcccaatggttgcaccgcaaagcggggacccag

SEQ ID NO: 896668 - DNA, 602 bp, Homo sapiens
gaacacatacataaggagacagagaaataataatgcccccaagttcccatcacccagccccccmaataagcaattcacagacattactgacccacccatagcagaataacccctccattacacaataccagacatcacatcttttcagctgtaaatatcccatttctatgctggaaagatatgggcttaaaagtaactgcaatattattaccaaacctaaatagaaattatcactaattccctaatatcaagaaataatcacgggctcctcaaatccctcacaaatgccagaagcgtattgacttagttaagtgttggtgctgtggttattttggggttttgggtggtttatttcagaattcaatatggcatcaaatggtgatgggcgcatgtgctgtcaggccagttgtcactggtgaatatttcctcaattgctctagtgctgcctggcaaggcaggagctgcaggagttgagagctgtccggggaccttcccacggttggaatacagccacacctcccaaaacaagaacccagggctatcatctacttctttttttttccccctgcaaaatggttctagcatggagggacttaactgga

SEQ ID NO: 896669 - DNA, 633 bp, Homo sapiens
tcattgtgaaactcaagtcactttagctatgcacataagctttagttatatacatcatcctattctttatgaataggtctcaagtgattcagatgttaatttgtccatgaatcctgaattgaagccaaaatttcaacagtgtaggctgtacaaccaaaggtaacctttcatgatttcctgaggagaatttaattgcttgtctgagccaaagccacaaactacgaatctagcaaaacaacttaatcagaaaatatttgaaatattgccagcaaaaggcaattcaatccttgtggccatctgactccaagttatattgtctatttttattactattttaagttattacaataattgctatatcatcatattattattaccatcaccacatctattacttgaactattaacaaaaataacttactttgttgcacttgacaatttcataaatccaccagatcattacaatagccccatagatcaaaaatggcaaagtatattatctctctaccctgtttaaggatattttaaggaaacagatgctcaattttgttragtaacttgtccaaggctgcacagcacataatgagtagcagcaacttaaaatcagttctcactctacatccacatgatttc

SEQ ID NO: 896670 - DNA, 569 bp, Homo sapiens
ccatctggggattactgacttctagaattcttcaaactcctcctgatagtgtttcaatgaasttgacctttagtgcaagcagtaagaactgcatctttaatctcacatattgtgaaaaggtggttaactgctgctgcctttcttcttgcgctgctgcttgttttaattaatagcatttcttcccccctatttctcctggggttttgaagagctctttgaactgtatttagtatatttcagtcttggtttggtgtagtctctcaatttataaggtcgtttaattcaagttcaattattctgcacaaattggcaggatgaaatgctaaaagaagattggcactttcaatcacataaatctcatgtcacataaagtgagcaaattccttcattgttctcattgacctctgagataacaatttatggctggcacaaaccagtgtgggcaggcttttctttggcaggctcctgcagaagtaatgctttggcatcttcacctcaacagaaactgaacataagcagagaaagtgaccagagatcaggatcatctgtgggacaacttagtctgaata

SEQ ID NO: 896671 - DNA, 569 bp, Homo sapiens
ccatctggggattactgacttctagaattcttcaaactcctcctgatagtgtttcaatgaacttgacctttagtgcaagcagtaagaactgcatctttaatctcacatattgtgaaaaggtggttaactgctgctgcctttcttcttgcgctgctgcttgttttaattaatagcatttcttcccccctatttctcctggggttttgaagagctctttgaactgtatttagtatatttcagtcttggtttggtgtagtctctcaatttataaggtcgtttaattcaagttcaattattctgcacaaattggcaggatgaaatgctaaaagaagattggcactttcaatcacataaatctcatgtcacataaagtgagcaaattccttcattgttctcattgacctctgagataacaatttatggctggcacaaaccagtgtgggcaggcttttctttggcaggctcctgcagaagtaatgctttggcatcttcacctcaacagaaactgaacataagcagaraaagtgaccagagatcaggatcatctgtgggacaacttagtctgaata

SEQ ID NO: 896672 - DNA, 560 bp, Homo sapiens
aataattaaaaacactttctattcctcctcaagcttctaaactatgcctaatagcaactactccacaatcaagaattacacacacccactgggcatggttgctcatgtctgtaatcccaacattttgggargccgaggtgggtggatcactttagttcaggagttcgagaccagtctgggcaacatggcaaaaccccgtctctacaaaaaaatatgaaaattagctgggtgtggtggcacgtgcctgtagtcccagctactcgggggtgctgaggcatgagaatcggttaagcctcagcggcagaggttgcagtgagccaagactgcatgcaccaccgcactccagcctgggcgacagagtgagaccctgtctcaaacaaaaaaaaaaaaaagaattacacaaatctcttgatggggcaaataaatatcctttgtttgtactttaaaaagaaccaataggtaaaggatgaatgacacgtattacaggcagaaaaagaacaacactgtcatgaatgcaatgccaagttagtgaggtttgacactagtaagtgttatggatt

SEQ ID NO: 896673 - DNA, 595 bp, Homo sapiens
tccccatgataaccacaaaatgtagctatagaaaacaaacagaagaaatgtgaaaggaatttaaatgtttcactacaaaaaaataaacacaaaagaagataatgatataggatgtgaaggatgaaaatgctataaggcctacagaaaacaaatagcaaaatgacagaagtatgtgcttacttaacagtaattgctttaaatgtaagtggcataagctctcaaatcaaaagacagagattggcagaatgaataaaatacgtgattcaaatatatgctgtctacaaaagactcactttagatccaaagatacaaatagattggaagtgaaaggatggaaaaagatatttcatgcagatagtaaccaacatagagaaagtctggctatactaacatcagacaaaatagtctttaagtttaaaaagtttacaagggacaaaagaacattatatattaatgaaagttttagtatagcaagaagatagatcaattataaacatttactcacctaatmacagatcatgaaaatatataaaataaaaactgacaaaattgaaaggagaaatatagtagtataataatagagacttcaatatct

SEQ ID NO: 896674 - DNA, 437 bp, Homo sapiens
tatataatattatatatattattcaggggtggggatggggttggaatgatgttggtcaaagatacacaatttcagatagcaggagtaagtttwagaactctattgtacaacatggtgactatattatattatacaatatatatattatattctagaaaatgccaagaaagtggatgtaaagtgttctcaccacaaaaggaaccatgggagataatgcacatgctaattagctatatttattcttactgaaaaaataactgtgaagtaacatatatgttagttagctatatttagtcatttcacaatgaatatattcttttttttcctttccttttcttttttttttaaaagctaaatgaaagattttattagtcttgggaaaaaagacagaaacacaataaaaacttctctagtatgaacatgtgcaagtttcacaa

SEQ ID NO: 896675 - DNA, 599 bp, Homo sapiens
gaaattaattgctgtcttatatgtgcctattatacaagaataaaataattctcatatattcatatatacttatatataatataaatatatattattactaatatatatttatatattatttgaaaccttatatattcttactatatatgaataaaacactttctggagagaaaaaaaacagacatcagagtcgtgcctgggatagcctatttgataaatatttgttgcattatttcctacatgaatgatggcacaatacattttcttttaaagattagcatttcagagagatgctcagaccataccacttctaaggaaatgattgtggcttagaaaggaaggaaagaggaacaagaagtagtaaaggatggttaagcactgagtaagcttttttttcatttttgttatctggcataaagcattaggaaaaaacaactctatttttccagatgtcccagtctttcaactgacatatttacagctagagcackcttattcatttatttatttatttttggagtggaggaagaggaggtagtcaggtggtttacaaaaggtggatttctaagtctctgtcaacatagaccaaccctgctgga

SEQ ID NO: 896676 - DNA, 638 bp, Homo sapiens
agcccatgtttagcccctctgtcttaagtaactttcatttttcttttccagtgatgttttccttgttacccttgaacatgttcaggtttctctcatgctcgacatttttacctagatyagctacccttctcactgtgatacagggtcatatacctgccagactcctggatcatgagtatcctaatttgctgcttccacaaggtacttgcccattttatcattaaatttctggatttgaggtccacatttgcttgacatgtgactaaaattctgttttcaaaggttatcctttggtctcagaattcttctgcaatttttgacattttgattttcacttttcttcttttatctataacacagcactttcttggttctctgacttctttatcactttcttaatctatttactaaaacatttatctgttatcctttattcttgatttctaatcattctcaatatgtgatccatagtcataatttcattgtttcaattattgaatcaaatatatgtatccactctcaatcttctcaatttcaatcacataattccatttgctcacaagataaatattttcttagggaaatttaatacctgtcaaattgaaaacactatatatcttgacaatggagcttctttc

SEQ ID NO: 896677 - DNA, 625 bp, Homo sapiens
ccagattccaggtgagaggtttcttcctgagatgaggctgaatcagccaagaatagcctaaaagcagtaaaagtgaatggcaattaagcaaaatgtggaaaaatgacagaagattaagggaccacaaaatatttgatctctaatgttataccaaagacttgttaattatgaaaatctgatcctttgtgtttgttgtatttatgttcagaaatagtctaaaagaatgagaaatgtgtgttacatagtgaaactcaataagcaatacatttctttaaaatcctcttctttcaaaatggagcaatattcattccaagaagcaaaaccagtttataagaataggcctgtaatgccagcaaagagtttgtcttcatttgctaaaatagctgtttaaaaatcattaacatgtgtattaatcaaagttgtctagagaaacataaccagtaagatatatatgtagaaagagatttattataaggaattggctcgcatgattgtggaagctgacaagtctcaagatctgtaataatcaagctggagacccataagagcgaataatgtagttccagtccaggttcaacacccygagaaccaggagagcagatggtacagctccagtctgaaggcc

SEQ ID NO: 896678 - DNA, 585 bp, Homo sapiens
gagatataagaagtagactgtgtaatttctagattacatccttaaaggaagatgcttgttctttttccatccaccacttgaaacataatcatggttgtaaacyatattgggctgtgcagataatggcagcatcctagcagatcatgaagatggaaggcatatggctctctgaaagattgactggtgcagagaaatcatattagctgtaagacagacacctccttacacatttttacatgtttgagaaaatgaacttctctcagtttaaccactgtttttgagtttcttttacgtttagttgaacttatattttaaccagcacagtaagtttaattttgacttattttcttaactagtcaagagtttaatcaatgtcatgggtactcatgggaatatcatgtatatgaatttcatcagttctggatgttgcaatgaaaaacaaagcaccattgaaagcacctatgtattcttctattgttttctcacattagtgaagccaaatcattttgggagtattttttttcattctttctagttattatgtatttctgtagaatatgaacacaaaataattcagcaatctca

SEQ ID NO: 896679 - DNA, 661 bp, Homo sapiens
tggagatataagaagtagactgtgtaatttctagattacatccttaaaggaagatgcttgttctttttccatccaccacttgaaacataatcatggttgtaaaccatattgggctgtgcagataatggcagcatcctagcagatcatgaagatggaaggcatatggctctctgaaagattgactggtgcagagaaatcatattagctgtaagacagacacctccttacacatttttacatgtttgagaaaatgaacttctctcagtttaaccactgtttttgagtttcttttacgtttagttgaacttatattttaaccagcacagtaagtttaattttgacttattttcttaactagtcaagagtttaatcaatgtcatgggtactcatgggaatatcatgtatatgaatttcatcagttctggatgttgcaatgaaaaacaaagcaccattgaaagcacctatgtattcttctattgttttctcacattagtgaagccaaatcattttgggagtattttttttcattctttctarttattatgtatttctgtagaatatgaacacaaaataattcagcaatctcactaagtcttaccttctttaagcagttagtcattcccttttttgttactattattgctactattaatacataaag

SEQ ID NO: 896680 - DNA, 578 bp, Homo sapiens
tttgaagctcaaatccagctcagggagacatagaatatctttaaggcaaaaaagatcacatcaccttgcatataagtaggtagcttgatatagtttggaatgtttggttttgttcgtttttgcctgcggtttagttttatttggtgtgacattatgtaacgcagtttggtttgtttttaataagagaagttttatactttatcttgggaatggccaattaagaagttaacatatttatgcacatttaaggggaacacaccctctgttctgaattggggcatgtttgaaggatactactaccatagctcttgtactcagaaattgttgataaggcaaaataaggtcaatgtgtgggacccagggatcttttagaatagagagtatttagatcttaatgcccactcactaaaacttgaaaccagggaaaattgttagagtatattagataaccctgaccacagtctggtagcagattatggttatgagaacyctaaaataatcagaccatttcagctggtgatgataatttcatactgagttcaggggaagaactgatttctgaagaatgtatgtccagt

SEQ ID NO: 896681 - DNA, 631 bp, Homo sapiens
cggttttttgtggcttactcagttaccctgcttttgtctcgttttaacatggcctcagagtgaccttgtctgatggtgatgtttcatgagttcattcatgtccagcaggagaataacatggcccagctgtgagcattaaaccagttaccagatgtcaggggttgcttttattctttctcaatatatacaaaccttatattcataatatatacctcaaataacatatcttttctgctctaccttctagtaactgattatggtgacagttaccacttaaacacattcttttcccaccatccatttcacatctgtagccagcaccttgacagtagagattctctacctggtggagtgatcgacacattcttctttaaagaggctaagcctctactagtccagcccttattggattgttctaatctcccattgacatttgctcttccatatagaagtactaagtggatcctctgggtcccagacgtcttcagatgcaagaacaatccaacttttccttgtcaattggaatcagttttcccagccrgtttagcaacctcctgtctgtcagtttagtggaataataagcccaaaatagccaggtggtaatctgaattctaattcaatccaataatct

SEQ ID NO: 896682 - DNA, 621 bp, Homo sapiens
gaaggagtcccaaggtggtatctgttacattcttgaatagtggcaggtggccctatacattcaggcccctgaaccaaaacaatgaaggcttggacasagccagcaagagccaaatgagtggatattttagtctctgcctctgattcattgggtgaatttgctcaaatcacattgtttctatgtaccttttttcctctcatctacaatttagagaaaatatcttcctcatgtgcttctgaaaagcaataaaaacattggtaaagacttcaaaatccttgaaaaagcattttgcattatactaaatatgcattatactaaattttatttaaaatgcttttatatttgcattgtttgcagaggtgtgttcccctcatagtttataccaaaatacatttatccttcgcatctggataaatgaatcttattcttgacatcagttgtttcaattgcccttcttttaaatttctttcatttttgtcactttaacatgttgctgatgttagttgagatgccaaaattgaatttagtatagacatacaagtttcctgacagatttattatattaaaaaacaagagaatggggactagtgtttttgagagtctattatgtggcagatgcta

SEQ ID NO: 896683 - DNA, 596 bp, Homo sapiens
agaggctgagctcagacaccaccaggtggtctttctctacctgccgtggtagctgaagacaaaggtcataatgtcttgagagctctatgaccctgcgygctgccagagaaaactgaatacttaaccaggtgtccacaggggaaggctgaattctcccttaggaccgcagctgatgctctcttgaaagcgtgacctcctggctgtaggccagctaatggaaaaccggcacacttaacgaaaacacaaacaagtaccctcatagagtccacctcactctcacgctacttccaccagagcaggtgctggtatccatggctgcaagacctgaagatggatcacatcatgggactccttgcagacaccctcaagtactagcccagagcctggtagcttcactgggtagctagaccaagaagagcaaaaacaattactacagttcagctctcagaaagccccattcctagaggaaggggagaacaccacatcaaaggagcaccctgtgggacaaaagaatctgaatagcagtctttgaatcccagatcttccctctgacatagtctacccaaatgagaaggaactagaccaacagttctagt

SEQ ID NO: 896684 - DNA, 614 bp, Homo sapiens
ttaatcaataacacattgaattaataacaaaaytgaatctcagagaaactaagggacattttcaagacagcatttcttagtcagttactagaagggtagtaggattcatcaccggattttctgactgtaagtgtaagacattgtttcatcaactttaaaggggaaaaaaaacctttaaaatgtatttatttaaattttacattgaacacaattgtatacatatacatatgtatgtatatgcatatgattgaaacagtctttgcaaaaattatggcagtgagagaaatctgacatagaaaaacaatgacagtgaaaaaaaatgtgacctaactgactccatcttgcttctagcctccaagttgcccttgttcattccttggtgcaggccaaggtaactacgggaggaatttatttcatagtttaaccttcaagcaaagatgataatagccccttcccaaaactatcctctttttgcttggtgaccaaaaaccacatttgtaaaactaacaaattagccacaggattagaactgtggtcaggaattatagagccagaggttacaagattcctaacctttccaattttttctatagataacattactgtaaaaccta

SEQ ID NO: 896685 - DNA, 643 bp, Homo sapiens
gtggtgacacagaggctggtggaggggagcaggcttatgggtagacttagaatttgccatgctttaagatcaaaccaaatccaaacattctggattttataatamtcccctaaaaatctcaggggcacatttatggcactcacacattcagaaggcagtgctcctgcaacaagagaacaacactgaatcatctggtctattatgatccattccagttcctcagttgctgtgctaacagcattaacaggtacaatttattgagcgcctactagatggcagactctgatccagacacttcacctacattatctcaaggcatcatcacaattcttaaggtaggtacggagatgcccactctacaaatgagaaaactaaatttatagaggttaagtaccttgcttgtaagtgtcatggccatgattagaaatcactttgttatattgcatactcctcacaagacagtgattccgtcttctaaggaataaaatgataaataacgtggaggttttgtgctgagagaagtcatgtgtgctcagatcatctccttagagaaccatctctagatcttctcaccttaaacatcacctctctttcacctcactaccccccaagagcatagggtatgacaaagaaaggggaaaat

SEQ ID NO: 896686 - DNA, 635 bp, Homo sapiens
aatcaatttctttctttattattatactttaggtgctagggtacatgtgcacaacatgcaggtttgttacataygtattcatgtgccatgttggtgtgctgcacccgttaactcgtcatttatattaggtatatctcctaatgctgtccctcccccttttccccaccccacaactggccctggtgtgtgatgttcccaacgctgtgtccaagtgttctcattgttcaattcccacctatgagtgagaacacgcggtgtttggttttctgtccttgtgatagtttgctcagaatgatgctttctagcttcatccatgtccctacaaaggacatgaacttatcattttttatggctgcatagtattccatggtgtatatgtgccacattttcttaatccagtctatcattgttggacatttgggttggttccaagtctttgctatcatgaatagtgccacaataaacatacgtgtgcatgtgtctttatagcagcatgatttataatcctttgggtatatactcagtaatgggatggctgggtcaaatggtatttctagttctagatccctgaggaatcgccacactgacttccacaatggttgaactaacttacactcccaccaacactgtaaaag

SEQ ID NO: 896687 - DNA, 629 bp, Homo sapiens
ttcatcgaaatcaaattgaactttgcagctatcctaaatattggcccaatgaattaactctatgtggcttttttaacctaccaatatatgaaataataggaatgcttcatttaatagattatcttgctggaggagatggaaacagagaaacaaaaaaaaatatttctctgggtctgatttcttcctacactactcttattctttctcctagataccacccatacattccaaattctgcttccattttaagtgaaaccataaaactctcaagtttttctcccaacttgacctacttttggataaacaaaaagactgaagcaggaatcatttatataaggtctatatcactagcaactcaaagaacaaatggatgattgaaagatggttctcttttaaccagagctaaataaacttttatgtcacgactttctactctaaggccagagtaaaccttagagatattattttattttccttccatctacactaaaaagcacccagcactttataaaacaagcaaagtagagcaatgtacatttatctttgcagtcagccatgacaaaaatcatcttcaatttcagatygtctcacccagaaggggtaaataggaataattataagtcttgagc

SEQ ID NO: 896688 - DNA, 628 bp, Homo sapiens
tacagatgagaaatctgagattcagaggcattattgaagcccatagctaagactccaacccacatayctgtggccactaatcataaacagttttcactgcactagctttccaggctaactgaatagcagttggttgggtgttagcccctctctagttagttagtttacatgaggagcctcaataattttgtgttttgattggttccacatttttgaagggggaatggcagatccattttttaggctaaaatagatgttccttattagcaaatccggacttccaggaaatacactattaaatgaggttgagatgaggttttctatgcattatggtatgaatcttgcctttgtgccagtgatttatggcataacgaatgtatgtttgttggttgaatttactagccaagcctgcatagtgtgtttgcctaatagttgccaatttccactggctcctaggctgaaagaaataataatcactacaacgaattaggctcttataggtattcggaattatactggaggcttaaattgtgttatttatttctaataacaaccctgtgaagtttatggaagtgaaaacttgaggaccaaggagattaattatcttgttccaaaccagacagctggt

SEQ ID NO: 896689 - DNA, 629 bp, Homo sapiens
gttttgacactcattctgtgacaaaagaacattttgtaatgtgatatatttgttatgctaacattgctattgcagtcacacaatgatgcattttcctctttcattctcatttcataaaatataaaaataatcacaaatatttgttcattgtcagaacacccactctcctgttttattgtatttattatttatttatttattattaattttttttttgagatggaatcttgctctgtcacccaggctggagtgcagtggatgatcttggttcactgcaacctccacctccctggttcaagtgattctcccacctcagcctcccaagtagctgggattacaggcacatgctaccacacccagctaatttttgtatttttagtagagatggggtttctccatgttggtcaggctggtctcgaactcctgacctcaagtgatccacctgcctcggcctcccaaagtgctgggattacaggtgtgagccaccgtgcccggccctgctgttttaggccataggcataaaattgcatctatttgatatttttcttctcatagcygcaaaatgtaatttcattacatatcattgattcatttattcatcaagatttgaaactatgttctcaaggctt

SEQ ID NO: 896690 - DNA, 588 bp, Homo sapiens
aaataagcctgactaacagatatgcctgttctgtcaaactctcatcttagagcttaggtctatcttttaactgaggccaatccatattctaagcaggggccacttatacatytcattgtatgggtccctgtattagttcattttcacactgctgataaagacatacccatgtctggggagaaaaagaggtttaattggacttacagttccacatggctggggaggactcagaatcacggcaggaggcaaaaggcacttcttacatggtgtcagcaagagaaaatgagaaagaagcaaatgtggaaacccgtgataaacccatcagatctcgtgagacttattcactatcacaagaataagatgggaaacacttgtccccatgattcaattacttccccctatgtccctcccacaacatgtgggaatgctgggagctacaattcaagttgagatttgggtgggggcacagctaaactgtatcattctgcccctgacctctccaaatctcatgtccttacatttcaaaaccaatcgtgccttcccaacagtcccccaaagtcttaactcatttcagcattaagccaaaag

SEQ ID NO: 896691 - DNA, 640 bp, Homo sapiens
cagagttaaaagcctttgaaaactgcctcaatgtcttccagctagtgaactttcatatcagtgtcactgttcatattatcttgtcagttgggggtctttttttatacaagacttgttaggcaacgcctgstggaaatatcagtgtggtaggatctcaagcggctgtgtggttacctagactctggggcaatcaatcctttgaataataattctgaaaattgactcatggactcttagaactggaagcgctcttagaaatcatcaaacagagcctgactccctcaatcaggacctgcttttagctgcacagcgaatttggttctactatcactatttcccttagttttgctttctcagttcctctttctgctccaaattatagcagcagtccaaatatcgatccctatgatgcttccacattttatgttcattaaactgcacagtgacatttctatggtgtagctctttttacttaatgtgaacggtagaagctactagaagagacactggactaattctgaggtggtttgcaggaggagctaaggctgcacagctgcccactgtgccacagctctctctaaaaactggacccaatcaagctgttagttagagatgccaaatcatcaatcgtctccaacct

SEQ ID NO: 896692 - DNA, 650 bp, Homo sapiens
atgtttcataatttttgttgaaacaagaatatttaaaataatatggcaactctggaacacagattctccctgctcctcatggtttattgttgttgatattagttattattgttgttatataacaacatttctgaaataattttttaaaagtctgtattctttgtcatgtgtggccactaaaatctctacttggttatctcgcctaatgactgaacacaaactttcttaaatgccttcaacaaataagtctcccagagttttctgagagtgtctgtgcctgagtgtgtgtgtgcattcaaacacatttttaacactcatccaggcagttgacaactttgtcttaggcttcatttctttgcacagaatatcaaaattaggccaaaataaaatgaggaccttctcagtactttactaagcatttgaacagtcctgaacattatagatacatctctatgcatgtgcatgaacttctagattcccaggaatatgtaggaccttttctaagcactttatagtcatttcattttacacaatttccttttaagtttcttgattacctattattttccccaacygttgtgcctagcctctgataatcgtatgtatggttgactttgtggatattttatgtgtgcttgaaaaggagtgtc

SEQ ID NO: 896693 - DNA, 549 bp, Homo sapiens
gagtattcaactatatttccaatagcaaactgacaagcccttggcactttttttttgtttttttttgttttagatggagtcttgctctgtcactccagctggagtgcagtggcacgatctcggctcactgcaacctctgcctcctgggttcaaacaattctcctgtctcagtctcccgagtagctaggactacaggtgcatgccaacacgccaagctaatttttgtatttttagtagagatggggtttcaccatattggacaggctggtcttgaactcctgacctcaggtgatccaccggcctcagcctcccaaagtgctgggattataggcatgagccactgtgcccggccagcagttcttatgtagatactgacttagaaaatgcttttttgtcttatcccaataattaaaaataatcaaaagaatgccaatatagcaggaagagcagcatactttcattgtcctacctcagagtgatgtcarctctcttgttctctaatattatattgtccagatcatttggatatcttacagaatattataccac

SEQ ID NO: 896694 - DNA, 634 bp, Homo sapiens
atttccgaacgtgttcaaatccaacaaattgtgaattgtcttttcttttagtattagtctctgaatatggaaggctgtcaaacattgtcgaaagacataaaaaaaagcaatgagattaaaagcaaataaaaattcaaaacagatgtgttgggactctgcttatgcttacacagctcctaataatgagacagcatttttttaatgtgatgtgactgtttgtgctataattattctcttatgcaacagcaatttttgaattcttcatttcaaatttattttaaaaacttggcattaaatatttttgtctactctattttcctctatagcaaacaataagcatcaaattgagaaatttgtttgttaggagttctttgcaaagtggtcctaaacttcaatatttttattgtccacaacaaaaattccagtttcctgagtgagatgtaatttgctttgtgttgattaatccttgccttgaaatcttgaatgtcattgtgagttagaggaatacatttgttccacattttgttcttagcctgtcatcatatttttttttcaaaactgactggtgaatttgatttcttgatgtcaaatctcttacattaatccaccattgargtagtgtcattggtctcag

SEQ ID NO: 896695 - DNA, 601 bp, Homo sapiens
catctcaaaaaaagtaatgtagggaaactgagtcataacaccactctttagctgttgtgccaatgcagtactggccttgatgagaagcttctgcaccaactgggattkcaccagctccttcatgtcctgtttcctatctcatctcaaaataacgaccacagtgagttccaactagaactaacttcggtgatctcactaacaacccattttctgtaataaaaatagccagaaattgtgtaaaagaacaataggtactaaatgtgggcaaatagttcaatatattttctgggtcaaacagattgatgcatgaatttgggtcacaagtttctgctttgttgcctctggtcacggtgtttttgaagaagagccatttctgacactgggtggctgaggcttggaggcatttaggacaaagccatactggcgcaattatatttctgagaaatgcaactgagcacagagataaccaaaagggttgcaattcatcctgcacatggtaggaccagcaagggcctcaccacaccgtggaaaagtgtccattgggctttataggttcaagcttcaacaggggctctgcatggttacaatatgaagcatgaga

SEQ ID NO: 896696 - DNA, 559 bp, Homo sapiens
tctatctgttgggaacatttcaagtcctcttttctagctattttgaaacatgcatgttgttaactgtaccactccgctactgaacattagaacttattttttctatctaactgtatgtttgtacccattaaccaatctccctttatccccccaatacacactgttcccagcctctggtacctattactctaatcactacttccatgagatcaacttctttagctcccacatatgagaaagaacatgcactgtttgattttctctttctgagttgtttcacttaagataatggcctccagttccatgttgctggaaatgacataatttcattcatttttacagttgaataatattctattgtgtacatatgctgtgatttctttatccatttgtccattgatggacacttaggttgagttcatgactttgctgttgtgaattatgctrcaataaacatggcagtgcaggtatcccttggacacactgatcaaatcattcatcttttaagattgcatctttggcttcagtgtttattttatctacagtgaatatctacaaa

SEQ ID NO: 896697 - DNA, 604 bp, Homo sapiens
aaaaagtccatattgggtacartgtacactactcaggtgacagctgcactaaaatctcagacttcatcactagacaattcttctgtgtaaccaaaaaccacctgtaccccaaaagctatatatatatttgtgcgtatatataaattaatgtgtaatatgttgttgctgttaggtgacttgttgtgtaaagtcaactaggtcactggctgttagtgttttatcaatatctcgggcagggattttcaaatcacttaccatgtttgtaagtctgtctactgcacttgcaattctatcagtttttacattttgcattttcaagcttaatatttggatacataagcatttgcgattgttaggctttcgtgatgaattgacacctttatcattatgaaatgaccctctttatccctagtactatttttctttagaaatctactttttctgatattaatacagccattccagctcaaatttaattaatgttagcattaattaatggcatttctaatccagtcctatgcttataacctatttttgtttcatacttaaagtggatttcctctaggcaacatataaagagatctttttaaaaataaatccaatt

SEQ ID NO: 896698 - DNA, 604 bp, Homo sapiens
aaaaagtccatattgggtacagtgtacactactcaggtgacagctgcactaaaatctcagacttcatcactagacaattcttctgtgtaaccaaaaaccacctgtacccyaaaagctatatatatatttgtgcgtatatataaattaatgtgtaatatgttgttgctgttaggtgacttgttgtgtaaagtcaactaggtcactggctgttagtgttttatcaatatctcgggcagggattttcaaatcacttaccatgtttgtaagtctgtctactgcacttgcaattctatcagtttttacattttgcattttcaagcttaatatttggatacataagcatttgcgattgttaggctttcgtgatgaattgacacctttatcattatgaaatgaccctctttatccctagtactatttttctttagaaatctactttttctgatattaatacagccattccagctcaaatttaattaatgttagcattaattaatggcatttctaatccagtcctatgcttataacctatttttgtttcatacttaaagtggatttcctctaggcaacatataaagagatctttttaaaaataaatccaatt

SEQ ID NO: 896699 - DNA, 604 bp, Homo sapiens
aaaaagtccatattgggtacagtgtacactactcaggtgacagctgcactaaaatctcagacttcatcactagacaattcttctgtgtaaccaaaaaccacctgtaccccaaaagctatatatatatttgtgcgtatatataaattaatgtgtaatatgttgttgctgttaggtgacttgttgtgtaaagtcaactaggtcactggctgttagtgttttatcaatatctcgggcagggattttcaaatcacttaccatgtttgtaagtctgtctactgcacttgcaattctatcagtttttacattttgcattttcaagcttaatatttggatacataagcatttgcgattgttaggctttcgtgatgaattgacacctttatcattatgaaatgaccctctttatccctagtactatttttctttagaaatctactttttctgatattaatacagccattccagctcaaatttaattaatgttagcattaattaatggcatttctaatccagtcctatrcttataacctatttttgtttcatacttaaagtggatttcctctaggcaacatataaagagatctttttaaaaataaatccaatt

SEQ ID NO: 896700 - DNA, 508 bp, Homo sapiens
cacaattttgtttttaaaaattccccccttttggtcaggttctcacttaggtgagagtatgatcaaaacttagagccttagtaccactctcagttaccatcattttgggtttctggtctcagcatgccattcataggttacagtgtccttgtggtcacatatttcattcagcttttgtcattccacttgaagagagaccatttgacattctagagatggctgcatgcaagcatgtaaaacctttgagagaatacaatgcaccagggagactattattatgactatcaaaaggataataccaagagtttgaagtatgttccttatccagggtccccataaaccaaaccacctaaaatcaaatagatcaaagaatgagctagataagsagtctactcacttaactaaacagtctctttgttaatccactacaactgaaactctataatacctgatgttttccaccataggccatgactgccagcagctgcatagatacttttctctttgg

SEQ ID NO: 896701 - DNA, 508 bp, Homo sapiens
cacaattttgtttttaaaaattccccccttttggtcaggttctcacttaggtgagagtatgatcaaaacttagagccttagtaccactctcagttaccatcattttgggtttctggtctcagcatgccattcataggttacagtgtccttgtggtcacatatttcattcagcttttgtcattccacttgaagagagaccatttgacattctagagatggctgcatgcaagcatgtaaaacctttgagagaatacaatgcaccagggagactattattatgactatcaaaaggataataccaagagtttgaagtatgttccttatccagggtccccataaaccaaaccacctaaaatcaaatagatcaaagaatgagctagataagcagtctactcacttaactaaacagtctctttgttaatccactacaactgaaactctataatacctgatgttttccaccataggccatgactgccagmagctgcatagatacttttctctttgg

SEQ ID NO: 896702 - DNA, 583 bp, Homo sapiens
gctcaagagtcgtgtagccagaagtcacaagatgtgtattctctccaactgctcctacaaataatatcactattgtaaaacctaggattggtctttgagatatttcacacttttgtattctgacaactagctgactccacccagatccatgactcatatcaaggaactgactcaactggtcctgggatcacactcagaaactgactcagtgcacaagaccgttttcaacactactatgatttcatccccaaccaatcagcagcacccattccctagccccctgcccatcaaattatcctgaaaaaccctagcgtctgagctcttgagaaggcagagaaacattcccatccttctacttggctggtgctgagattattaaactttctctactgcaagttctgctgttctcagcgtttggcttttctgggcagcaggcaagaagaacccatagagtaattactctatagtcatacratacattgttactattattattttggtaaacagctatctctattagatcaattaagaatgaaagtaaaagatattatgttgttttcattcattcttctctgatgtgctc

SEQ ID NO: 896703 - DNA, 586 bp, Homo sapiens
agacagggagggtctctgtcacccaggcttaagtgcagcagctgttcaccggtgcaatmataacacattatggcctcaaattcctgggctcaagtgatcctcctgcctcagcatcccaagtaactggggctacaggcttgtgccaccatgcctggctaatctaacatttgctgaggacctgttatgctagagtgccagactgtgaccaagagacatatggtaatagttctcatgaagcttacaatccagtggggaagacaatgaagatgtaattagaagcttactgagtgctataaatgcaaagcctcagtaaatagaaatataaacacagaataaatgagaggttgaataaatgtataaataatcccttctccacaattacttatctctcttctttgtattacatttcacctaaaatataatgcttcttaagttcctgatcatattattctagaattttaccataaatagctgcctcaatttttttttataaaactttttctcggtttgacaagtgatgaaaaagtagcgccaagcattgactttatattgcgggaccacagtctccaatacttcgtattccctg

SEQ ID NO: 896704 - DNA, 641 bp, Homo sapiens
tactagccataaaacactgtaataaattaaagaaaccagaagtcattgattcagaaatggcaaatagatagtyagggcaattttatcttttgcaagcaacaatttctagagtgctctacatgtttgctttttactcaactttaactcatgtaacatctttcagcagaaaatctcaagaagcttttataaacgttaattaactgaacttcacaatactctcaagaactgagtattaatacatccatttacatggcaggaagccagatgaacattacggtggagcaatatggagcttccttggtttcagctatataaaaacatcaaacaggcagtaccagaaattcaatgttaatctgaaaactgagtatttagctgcttttagactgctaaattattattatcctatgttcaatacaaggaaagccattttactaaaacaaaaagaaagccttattttgaaatgctacttcaacttacaaatgactgatgtgtcatctagctataaatctaaagataataataaaattggaaagattttcatcagatagacttttaacaccaagcttgatgcagtttgtttcaagattaaatatgaaaaaagcagctgcttaaaaaaagttattcaatccacgtgtcaggaa

SEQ ID NO: 896705 - DNA, 630 bp, Homo sapiens
tggggatctaagaattggagtaaggtagaatagaacacaccatagttaagaacacaagtgctggagtcatgtagacctgagtttgattctgagactttcacttactagtcacayggctccaccttttctatgctcagttttcccatctgtaaaatatcagtaagaacccatttcattgggttaagctaaatgagatgatgtatgtaaagcacaagcactgatacatagtaggtactcaagtagatgcatatgcagcaataatcatacatataccttatgatttattccttatgtgattagaaggaacaattgggaaagtatccagtagactaaagatattattaagtaaaaaataaaagtgcatatataccaaatgtgtcaatacccagcagatacctatagtcttagttacttcctagcaaaattccccaaattcccaaaattcaagaaagtaaatacaacaattagcaagggaagagaaatatctgatccaacaatgccacacgatgtgggccaatttcctggacatgcagatgtacgctgttgaccttaaacttcttttctgggttccaaatttcaacctccctcatcagatctctaatcagaagtgggcagagaggcctcatatct

SEQ ID NO: 896706 - DNA, 630 bp, Homo sapiens
tggggatctaagaattggagtaaggtagaatagaacacaccatagttaagaacacaagtgctggagtcatgtagacctgagtttgattctgagactttcacttactagtcacatggctccaccttttctatgctcagttttcccatctgtaaaatatcagtaagaacccatttcattgggttaagctaaatgagatgatgtatgtaaagcacaagcactgatacatagtaggtactcaagtagatgcatatgcagcaataatcatacatataccttatgatttattccttatgtgattagaaggaacaattgggaaagtatccagtagactaaagatattattaagtaaaaaataaaagtgcatatataccaaatgtgtcaatacccagcagatacctatagtcttagttacttcctagcaaaattccccaaattcccaaaattcaagaaagtaaatacaacaattagcaagggaagagaaatatctgatccaacaatgccacacgatgtgggycaatttcctggacatgcagatgtacgctgttgaccttaaacttcttttctgggttccaaatttcaacctccctcatcagatctctaatcagaagtgggcagagaggcctcatatct

SEQ ID NO: 896707 - DNA, 615 bp, Homo sapiens
cattattttttaaatgaatgctattcaatgagctgtttagggctagcttttgatcatttttcatgttaactattatggaaaatttaaagtacaactaargctgaaggtcagtgcaaagaagagaaaatatttctcagattttctgaggcttgtcaagtctcagctgtcatctggttgggttttggaactcatttatccttgcagtaatattaaagcacatactacatgtgaggccctataccttctagcctacattaaagctagaaaggtttcagctctgccttcatggaagttacaatctgttagagaatgcacatgagtaaatgaaattatcaatacaacaccactaaatctatccagaagcaacttataccacaaaagcaactacctgaggtgcaatctagaggcagaaagagaatttgaatctactgcagtagatcaatgcaatacatgcacacacacatgcacacatatatacaacatacgctgagcctacctccttagacattatcttatgttgcagaccagagcattccttcttgtctggatcactgctttgtgtggtaacaagaaaaatgaattccttctcaaacgatccatctatagaaatcctca

SEQ ID NO: 896708 - DNA, 592 bp, Homo sapiens
attcttgttcaatctcatttctttaaaacagtccattaaccagactaaatctaacccttgggtattatgctgaattaaggattcattttaatatataagtacacaatatttctggatacaaattaaacagaatagactgctgggtatgtactagatatttttctttcattcttctatttgctcattagattcccttttctgtgctgccatttttttctttataatcattaacccatccatttattgtctgttaggaagtaaggcaacatatatgcaatgaatataataagaaaggaaaactgaaaaaatgttgttttagaaaataacgttaatagtgtcacttgaacccagaagttcgaggctgtaataagctatgatcgcgctcctgcactccagcatgggcaacagagtgagatcctctctcttaaaaaaaaaaaaaaagttaactgtggattaagacayctttttcaaaagataaagccattttcctttgcccgggtgaatgctaagcagtttgtgaactcacagtatcactgggatttggaagtctcacgtgttaaaaagtaagacatgatcaaagcttgaatacagc

SEQ ID NO: 896709 - DNA, 675 bp, Homo sapiens
gtggtggtaagaggcaagaatcagcttcttaccaaaatggaaaaggaaagttccattttgtggagactgccacatggctggaaattggggtgaggagagaagtctctagaagccaaccacctcagtccttcaactgcaaggaactgaactctgctaccaatgacatgagcttagaagaccatcttgaacctcagatgagatgccaaccctggtcaacaccttggctgtggcctggtgagaccctgaacagtggattcagttaagctgtgcccagactctgtactaatggaaatggtgagataataagagcaggttgtcttaaaccaccaagtttgtggtaatttgacacacaaccaaagaaaactcacaccttaggttttatctgtcacaatttataaataagaaaactgaggcttagaaagtttaattaaatttctcagagtcaaaaaactgtgaaaaaaagttggaacaaataatagtaagaccagtgaaagcgatatgacaagaaaatattttaaaataattcagtgtagaactttgtgtgatgaatttgaaaatttctagaaaacaaatatatgtgtgtatttttatatatcaagcatatatctatatccatatatatgtgcatattttcatacacacacacacacasagagtcaactatgtcaaatctaa

SEQ ID NO: 896710 - DNA, 623 bp, Homo sapiens
ctgaggcttccctccatgtcattgtccatgctttgggacctagactcttagagcagtaaacacctggacctgtgcggatcacagtgacagaagcgaaagcatggcgaatgtgtgttggttcttaaaacttccatcccagaagtggcacacatcacttgtgctcatgttttggtagccaaagaagtcacatggttaaggctgatgttggggatgcgaggaagcacattccttccacaggatggggccctgagcattggtgagctgtaagcaatgcgttctaccacagggattgtttgaggagtccttgattctagtccctgagatctggactcctaggcattacaggtatcatgagatggacaattaaagcttctagacctgttgaaattcacctggtgaccattctcacttaaaacaacaataagaaaatatttttggatagaaaagtaaatcaggccaaatcctaccatgagattctatggttaagctcaacaactgattattktgtgtgtgtgtgtgtgtgtgtgtgtgtgtgtgtgtgtgtgtatttttctctctctcaggtctatgcagatagccttttctcttacaccaatttgaggtattcatacccatatatcttc

SEQ ID NO: 896711 - DNA, 593 bp, Homo sapiens
gtgatgccccccccaccacctctttctaattctagtccatgctatacatacaactattaacagtttagtgtacatccttgtggttacttgttttgtgcttataagtcacacaaacacacatagcgtataaaaaataataaattccctagtccacagtaactgttaaaaaaacagaaagggatgattaataattatgattctgaacttgattttttaaaatttaaaagtagtttgtagctatctttctaagccaatgcatatagatctccccaagtcttccaaataactatagaattctcagttgcacaaacacccataacatatttaaccatcttctcgctggctttcgtgttgtttccatttttttgtctcttataaacaatgtcacagcaagcacatcatatatctttctgtaatggtgttagcattttccacaggctgatttgagaatccaataagrtagtgcatgtagaagtgatttgtgactctgaaagtgtaagagagtactcattattgccaatatcttgaattgcattaaaaaaggtgaagttttagaagttgagaaatgtgatgatcaaaaaagatgcttttcc

SEQ ID NO: 896712 - DNA, 593 bp, Homo sapiens
gtgatgccccccccaccacctctttctaattctagtccatgctatacatacaactattaacagtttagtgtacatccttgtggttacttgttttgtgcttataagtcacacaaacacacatagcgtataaaaaataataaattccctagtccacagtaactgttaaaaaaacagaaagggatgattaataattatgattctgaacttgattttttaaaatttaaaagtagtttgtagctatctttctaagccaatgcatatagatctccccaagtcttccaaataactatagaattctcagttgcacaaacacccataacatatttaaccatcttctcgctggctttcgtgttgtttccatttttttgtctcttataaacaatgtcacagcaagcacatcatatatctttctgtaatggtgttagcattttccacaggctgatttgagaatccaataagatagtgcatgtagaagtgatttgtgactctgaaagtgtaagagagtactcattattgccaatatcttgaattgcattaaaaaaggtgawgttttagaagttgagaaatgtgatgatcaaaaaagatgcttttcc

SEQ ID NO: 896713 - DNA, 566 bp, Homo sapiens
agaataatgctttaaatgcatgaaataaaatacacagaattgcaaaggaaatgagttacactgaaatacaatggtcaaactatttttaaatcatcagatttatgaaatgggagtatacgttcttctcattaacacatgaaataataaaagcccagcagtgagtctaatcactgtgatcacctaaacgtagtaaagagcatgaatgacatttgaggtatctgcaacctcaaagtgacacgaaaacatctggatttctgttggtgacaaagtcacaggtgctactgatatgactgtggtttttgcctacgttcaaatgcgaacttcagttacaggtgagtgaaaataacgatgccacgtgttctccatccaagttcacggatgcctggctgagaatctctgctccccagaagctgtgcagccaagaggaatgggaacgtggcccctccctctcccagggactgtcattgccttttgatattcatgtattctggagtcctggtgtgagaaggggtcaccttcctgccccartgtccttccctactccagaattcctcaaatctgcgtat

SEQ ID NO: 896714 - DNA, 557 bp, Homo sapiens
atatccatctgaagaagaacaatactagaccccatcttgccatataaaaaatcaaactaaaatggattaaagacttaaatttaatacccaaactatgaaattactamaataaaacattggggaaactctccaggacattggagttggggcacagatttcttgagtaaaactccacaagcacaggcaaacaaagcagaaatggacaaaggggatcacatcaagttaaaaagcttctgcacagacaaggaaagaatcaagaaactgaagagataatccatagaatgggagaaaatatttgcaaactatccatctgacaagggattagtaaccagaatatacaaggagctcaaacaactctatacaaaaaaaatctaacaatccagttcaaaaatgggcaaaatatccaaatagatatttctcaaaagaagacatacaagtgataaacaggtgtatgaaaagggggtcaacatcgctgaccatcagagaactgcaaatcaaaactataatgagatattatcttactccagttaaaatggcttatatccaaaagacaggca

SEQ ID NO: 896715 - DNA, 583 bp, Homo sapiens
tgcttcagttttcctccaccatattgaaaatctcacctgcagccaccatrtccattctttcctcactccatcccattacagtgaagacatgttttttattattatccataacacatcccctaatccctgggctagacccatcccagctccccaggtaccttgtgacactagttatcctcatgctgacctgaattttcaacctcatcctctttactggcctctccagattagcatttctctcttttcaaaaaaaaaaaaaagttacaaatctttaccatctcattttttgttctcctttttagctaaacttattgaaagaggtgtcccacttgtttttcctactttctcccctggtgctctgttataattggaatatttgtcccttatgctgcacgttgaaatttgattctcagtgttggaggtggggcctaatgggaggtgtttgggtcatggaggcgtatcccttgtgaataatttggtgccatccttatggtaatgagtgagttctcttcttgctctattagttcctgcaaaagctggttgttaaaaagagcccagcacctcctcacctctttcttgtttc

SEQ ID NO: 896716 - DNA, 620 bp, Homo sapiens
cgaagccgtaacactgccatctcaataaagttgttttcttctaccactggctcacctttgaattctttcctgggaaaagccaaaaaccttcctggactaarccctaatttttgggcttgcctgtgatgcattaatgtgtttcatgtgtatccagggattccaattctgggatatcaaaggttacatggactgggagaggcaaagtcaaaactactttgtcctgcatatcctacctccccactgctctcccgtgcaccaagtgaaacaatgatttctatcatctgttttccagtgccaaaacattttctatactaactagctcagctagaaaactttgagatggttactgggagaagtgtcatgctcattcattgactgggaatgatgccaatgggctaaatgagacatatatatatatatttttttttttcctgcaagaaggaagccaaagatagaagctaccagttcaagtcaagccaagctgaaaatcagtctcatttgtcaccatctgatgttgtacagggatatcagtgctgtgaatgaacccacgtatcctcatgggctattgcccgactgtctcattttaaagaggatttatacttcagagtcttgctatgtat

SEQ ID NO: 896717 - DNA, 620 bp, Homo sapiens
cgaagccgtaacactgccatctcaataaagttgttttcttctaccactggctcacctttgaattctttcctgggaaaagccaaaaaccttcctggactaagccctaatttttgggcttgcctgtgatgcattaatgtgtttcatgtgtatccagggattccaattctgggatatcaaaggttacatggactgggagaggcaaagtcaaaactactttgtcctgcatatcctacctccccactgctctcccgtgcaccaagtgaaacaatgatttctatcatctgttttccagtgccaaaacattttctatactaactagctcagctagaaaactttgagatggttactgggagaagtgtcatgctcattcattgactgggaatgatgccaatgggctaaatgagacatatatatatatatttttttttttcctgcaagaaggaagccaaagatagaagctaccagttcaagtcaagccaagctgaaaatcagtctcatttgtcaccatctgatgttgtacagggrtatcagtgctgtgaatgaacccacgtatcctcatgggctattgcccgactgtctcattttaaagaggatttatacttcagagtcttgctatgtat

SEQ ID NO: 896718 - DNA, 679 bp, Homo sapiens
aatctacttctgagttcatccaggttattggcagagttcgtttctctctggctgtgtgactgagggtcctggccttttgcttgctgtcaactgggagcctccctcaggtcctagaggccacttgcatctcctggaggccacccacagctccctaccacgtggacttcctcaatgtggctgcttacttcatcaagccagcaaggctccctccctctgatcttctaagacagagtcttagataacataaggcaagctagggagtgacagctcaacacctttactgtgtgctattggttagatgcaaggtcacaggtctgtccacactggaggagaggggatcatacaaggcatggacaccaggaggtgggaagtcactggggtcaccttaggagctgccctgacagccttggagcactggggcactgacagcctctgctatgggttgtgagacttcagtgctgcgaagaacaaaccccttgagtgtgggacccgtgcttgactctctctgtcccacctccagctcccatacaatgggggcttctatgggttgcaggcattggsgggctccctgggacctggggtgggcgcttcaggtctcctttcaccttccaaccactggccccttcccaagctcactgtgtgacctcaggcaagttgcttgaagcttctgagtcttgat

SEQ ID NO: 896719 - DNA, 690 bp, Homo sapiens
tggacaataagtaaatgaacaaacaggtatggttgagttctgataaaagcttatttatgaaaacaagttataagccaggattgggccatgagttgtgatttgctgaccaatctctgatctagagcactgttgcaggctggtctctttagaatgctgtagtggagttagagggcaaaaagttttgaggagagtaacacttgtgaaaagaaaatgagaagagacagggttgtgctggaggagctgtaaaaccaaattgcagacctcacaaggtctctgccagcctagcagggagctctggagcaaaggatgctgatatagttttgctgtgtccccacccaaatctcaacttgaattgtaataatctcaaagtatcaagggtggggccaggttgagataattgaatcatgggggtggtttcccccatactattctcgtggtagtgaataaatctcatgagatctgatagttttataaatgggagttcccctgcacaagctctcttgactgtcaccatgtaaaaagtcccttttctcttctttcatcttctgccatgattgtgaggcctccccagccacgtggaactgtgattscattaaacctcttttatttataaattaccagtctcagatatgtctttattagcagcacgagaatatactaatacagatggccattacagaagtcctcatt

SEQ ID NO: 896720 - DNA, 544 bp, Homo sapiens
ttttttactttccaaaccctatattctatattcttaattatattttcagcaatgctaactcttgtcaatacttccatcatgactttcatawattttatgttgttttattttttcctccacatttcttaagttctactaagtcatttttctactcttaatgtcttctttgagccattttatcttacttgattttctctttcatttctttgattttgtagagaagtgtttgtatcatttttcccagaaatgctacatgaactttctaggctatagtctacatttgccttttagtttattttctaaattttatttatcttggaataggagtcatttcttcagagaagctgtaagctaaaagatactgtgtatgacaagctgggcaagtgagcagggagagctgaccactcagaattggggattctgtctcagaacactttcctctccactgtgctatttagtctcctctccctgctgttagcatttttatccttctttaggtggtggctttgcatatgtctgttgagggaggtcatcctatctattt

SEQ ID NO: 896721 - DNA, 591 bp, Homo sapiens
agacagtgaggcagcaagaaagggatgggagaagcaaatatgagatgcattcgggagcagattactgtcgtgggcaactggtgttcattccctctggggacctctgggagatggagtagaacattcaccagagctgtcccacccaagaagcaaggagcttaggcatttctccaccaactgccattcattactggtccaggggtgttcactttatggcacttcaggttggccacaacactggctgagtgtccttctgatgccagagaatacctccaaatagagtagctggccgctttcagtaaaaagccctgtgcatgcagcaacatggcacagcacaatggcatccactacaggggatgggcttcattgtaatgtcaaagagcaatagtacatgtaaagtccttagtactattactggcacagcataagtccatctatcagtaatagttgagaaaatcatttctgggaatatacaaatctaggaaagtagctttcctcagcatgggaatccaaytgtgatcccaagtatttggcaaaaggaaggccaccgtactctatgccttattgagcagtgcagaaggtgaaatcgtg

SEQ ID NO: 896722 - DNA, 667 bp, Homo sapiens
agaaggcggggagaagctcagactccaatacgggactcacactgcagcagagagagggaaggagggataattgggcaggaagagacatagactgcagcctaattcgaagacaagtttggccaggccagtgaggggttctcaaagacacctgtcagaggagaaccacatcttgtaggcatgagcctcccttagtggcctcactgtgctgtcattagctgggtacagcctgagggaagtatggctttggtgtaaatgtggtgtcccagaagagtaagagcagggctattagtcaatcatgcctcctgccacagaacatctgagtggttcattttcacgaccaccatatctcccaaataaagtactgtaccacagggtctgcttttggtggtgatggtggtggtcagggaacccaaactgagatgatgaaaatccctgaaaatgaaccatatgtaaaagaaagcaaagccaaaggccatcgtttgagtacctggatccaaccattcctgatgtcagtaacccactgaatgttacagctaaataagccaatacaatttcctcttgttgttttttgtttgtttgttgttcttattgttgctatataatctagytagagatggatttctgtcaatgagagccaaaagagtccagactaacacagacatcatag

SEQ ID NO: 896723 - DNA, 590 bp, Homo sapiens
gctgtacctctcactaaaaactgccctcagttatatggaatgacatcatccaaggtcatacaccctcggcatggtatatggccacagattgattaatgtaaaggttcaaaggctcagcccttctctcccaatttgagacaacttgaagggttatcccaactctgaagtccctatccaagttccagagatctcagttacagccacattgcaggtcagtttatcccttctacaattctcactttcttacaagtatgtctccccagtaagactctgcttgcaagtctcagtttatttctaaaaatccactttaaagttgtactattatctctattattcagatgataaacgcttcagagaattttaccaaaggtctgcagtcacacagctgatggtaattccaaagttacatggttcccaaattgagtctcctccaatcatccattccacatcttttcccattttccaggtgccttaatkactggaagggtgtcctaaggattagacctgagacttcttgtcactgcagtggtttatcttccctccttgtaatagtgcaaatttggtttgtaaattagactcagtgtgtctag

SEQ ID NO: 896724 - DNA, 611 bp, Homo sapiens
acagagaaggagaaagagagattgagagagaatattttttgaaattttaagcataatctataaaaaagtgcacacatcatgagtatacatcttcaaaagttttctcaaagggaataaamcttgtaaccagcaccaagactaagaaacagaacgtgaccagcaccccagaaggcccctttgttcctctgataggtacctctatcctgtcttctaacaacttagatgagtttcacctgtttttaagctttatatcaacaggaaccagactgcacattttcttttatgcttggcttttaaaatttcacttcatgtttgtgagattcagccatattaccatgtgtagctgtgggtgcaaattatcagaatggtgaaaccaagggtgagagaggctgctgaacacaccaacttgcttcaactaactacctatagaaaaatcctagacatagctgggaggaatatctgccacaaagggaccacgacacaaggaagaacagatctttgaaaagaagacactgacagtgaatggagagagaacacagacactgggctgaagtgagaggaagctgggaaccctgcatgaggcaatcatgctccaggacttgttcctgggc

SEQ ID NO: 896725 - DNA, 589 bp, Homo sapiens
gtctctcagagggaaattgttattgaggcyttcaggcttttgtcattacaaaacatttgtgcatctccaggcatacctgcaactagatgctcatttggtaagatgcaatcagaagattccagagcaggttgcttttacccccattgataagcaaacatatccattgtacagatgcacctgctgtttgcaaggattcctacacctgatcctttttaaaaagaaagaacattttgcaaggtaggaaattcttaagccctcatttagaggtctcacaaattcacatttttctaaatatgctttcgtatgtgtggaagaaagaagggcacaggatgggaaacataaaagatggccataggtggactgtttctatctttttttatatatcagttttctattcggatggccaaatggaaaattggtgtaaaaataaaggtaaaaatggttattaagcacttgttctatgtctagcacccttttagatagttttcacttgagcactttcacttgagcctcaaaacaagcacactacgttgcatatggtattataggattgtctaggttatgcagcagttaatcagtgaactctgaa

SEQ ID NO: 896726 - DNA, 526 bp, Homo sapiens
tgcatatggtattataggattgtctaggttatgcagcagttaatcagtgaactctgaaatttcagtggcatcccacaacaacagtttatgtctcatactaagwgcccaatttgtatcattgaggagttctgctccacatagccattcagggactcaggctgatggatgctcatcatgtggctgccacaattattgtactgacagaaacaaaagctgaagaggcacacaatgccttttaaatgtttcatcaggaagtggcacatcacttctactcacagtgtattgggctgaattagttacacggctttgcctaactgcaagaaggctgggaaatgagtggtgagtaggagaacattgatatttgggagtagatgtttctaacacaaatgagtgttatgatctccaatttgacagaggaactaaatggatcaatgaggttacttgacttaaggcacacagttttaaagcagcaaaatggtatcataaatatatgtcttctaaaatttgatttctgaattactacact

SEQ ID NO: 896727 - DNA, 505 bp, Homo sapiens
tgcagtttttccttgatgtgctagagacaaatgagggaaggatttcatacagagcttctgtctctgctkggtgtcaacagctgctcctgagtcaacagagcaatggtgtgtatctggactgaagagaacaaaggttgcttaaattgttttccatcccctctgaaaccaataagtgctactccactgcttagcgcaattgagttcctgaacggtggtgcagcagggtgtcaaatcaaatcttaattctgtcaaatgctggcttgatgagcttacagaagcaggtgcaaggccaataggggagaggtcagggggtcctattccaactggctatgccaggggccccagtgagacactcttctccaggagaaaggacagccattccactaaatatttgagatcttagagatactttccagtgggtttaatatggccgtgagccaaagcacatgccacatctgactttatgataaagttcaacaagacaggtaggaatcaaaacacatgg

SEQ ID NO: 896728 - DNA, 614 bp, Homo sapiens
agtaatgaggaaatgtagatctgtaattcaacttgagcatgttacctttacccagaaacaccattaactcccttatcaaaaagaaaactgacgttctgagagcctgtgtttctctaaaatgtccagtaattaggtagcgaagataagacagaatgagttcttttaattccagttctaacaagcctttcctcttgcctacactcttccagtgaatattttccacttctacgagaaactgagaaaatgggtttaagtcacagcatgaagaagacagtctgaataactgatgaagtgacttaataatgcatttgagcatccattcattcaaaaatatgttgttaaattgagtgtttactacaaactgaacacactgttgtgtgttaggacataagtggaaaagggagaaatagaaacgaggcccttgttcttacaggaattctggtctaacagggaagacagttaataaaaggtaaacacataaaaagagcacacgtcaatgactatacgttctattaagacagcaagcaagtgatgtgatggagtctggagttgacagggaacaaggatgytactttacatgatgtagacagggaaggtctttagggggattggtg

SEQ ID NO: 896729 - DNA, 549 bp, Homo sapiens
tctggggtacacagagagagccagtgtgatggggaaggcaaaagagctgggcacagatggctcatgagaagtgcccgctatcatgttttactttttttttttttwaatttttttttgagacagagtcttgctctgttgcccaggctggagtgcggtggcgcaatctcaactcactgcaaccttcatctcccaggttcaagcgattctcctgcctcagcctcccgagtagctgggactacaggcacctgccaccacacctggctaatttttgtatttttagtggaggcggggtttcaccatgttggccaggctggtcttgaactcctgggctcaagtgatctgcctgtctcagtctcccaaagtgctgggattatagacatgagccaccgtgaccggcctatgttttactttaaatatgtaagagctctttgcttttagctatgaaaatacagaaaaaaaataataaatattattggtcatattggcatatatgagacctcagtaaataagagctcttatgatgattctgcttccccccttttacagatg

SEQ ID NO: 896730 - DNA, 571 bp, Homo sapiens
gtagaaactgtgaagggacatttgggaacacattgacgcctatgtggaaaaagtgaacatccccagataataagtagaaaggagctacctgtgacactgctttgcgatgtgtgggttcttctcrcagagttaaacagttctttggattcagcacgctgaaagcaccatttttggattatctgggaaaggacatttggaagtccattgaggcccatgggaaaaatagaatatcctgataaaaacttcaaagaagttatctgtgaaactgcttttaaggtgtcaattcatttcactgagttgaatctttcttttgacacagcaggttgggtagcctctgattggagaatctgtgaagggacatttgggaacccattgagacctatggggaaaaacaaaataaccccaaataaaaactagaaataagctatctgtgaaatggctttgttatgggtggattcatctcacagagttaaacctttcttttgattcagcaggttggagacactctttttaaagaatcagcaaaaagatattttggagcccttttgaagcatttggggaaaacaaaata

SEQ ID NO: 896731 - DNA, 476 bp, Homo sapiens
atccgtgaaactgttttattatgtgtggatttatctcacaaagataaacctttctcttgattctgcaggttggaaacactctttttgtaaaatctaagaaaagacatttgggaacccattgaggtctaaggtgtaaaagagaataaccccagataaaaactagagagaagttatttttgaaattgctttgtgatgcgtggattcatctcacagagttaaaggtttttttttcagcaggttggaaacgctctttttggacaatctgcaagaggacattttgtagcccattgtggcctatgaagaaaaattgaatatcccagataaaaattaggaagattctatctgtgaaamtggtttgtgaggtttggattcatctcacagagttgaaactttcttttaatccataagtttgagaacactctttttttaggatatgtgaaaggacatttgtgacacctttgaggcttataaggaaa

SEQ ID NO: 896732 - DNA, 543 bp, Homo sapiens
agttatctgcaaatggatatttgggagcrctttgaggcctatggtgaaacagaaatcatcttcacataaaaactagaaagaagctttctgagaaactgctttgtgacgtgtgcattcatcttacagactttacctttccttttcatacagcagtttggaaacactgtttttgtccattctgggaatggaaatttgcaagctcattgaagcccgtggtggaaaagcgaatatcccaggatataaactagaaggaaactacctgataaataactttgtgatgtgtacattcaggtcagagttaaaccatacttttgattcagcagtttgggaacacattttttgtccaatgtgcaaatggacaattgggagctcattgaggaaaatggaaaaaggggaatatcccaggttaaaaactacaagaaagctatctgagaaactattttgtcatgtgtgcattcacctcacaaagttaaacctttcttttcattcagcattttggaaacactgtgtttgtacgattggtgaagggatatttgagagtat

SEQ ID NO: 896733 - DNA, 543 bp, Homo sapiens
agttatctgcaaatggatatttgggagcactttgaggcctatggtgaaacagaaatcatcttcacataaaaactagaaagaagctttctgagaaactgctttgtgacgygtgcattcatcttacagactttacctttccttttcatacagcagtttggaaacactgtttttgtccattctgggaatggaaatttgcaagctcattgaagcccgtggtggaaaagcgaatatcccaggatataaactagaaggaaactacctgataaataactttgtgatgtgtacattcaggtcagagttaaaccatacttttgattcagcagtttgggaacacattttttgtccaatgtgcaaatggacaattgggagctcattgaggaaaatggaaaaaggggaatatcccaggttaaaaactacaagaaagctatctgagaaactattttgtcatgtgtgcattcacctcacaaagttaaacctttcttttcattcagcattttggaaacactgtgtttgtacgattggtgaagggatatttgagagtat

SEQ ID NO: 896734 - DNA, 535 bp, Homo sapiens
ctgctttacaaagtgtgcattcatctaccagaattaaatctttttttcattcaacaatatggaaacactgcttytgtagaatctgtgaagggatattttggagtgtcttgaagtctatggtgaaaaagaaagtaaattcagataaaaactagaagaagttttcagataaactgctttctgatgtgtgcattcattccacagagttaaatatttatttgattcagcagttttgaaacactgtttttgtccattctgtgaatggacatttggaagcttattgaggccaatgttgaaacagcaaatatcccaagattaaaactacaataaagcagtgtgagaaactgcttggtgatatgtgcattcatctagcagagataaatctttctttttgattcagctgtttggaaacactgtgattgtcaattctctgaatggacacttggtatgtcattgaggccaatggagaacaaatgaatatcacaggataaaaactagtaggaaaatatctgagaaaaccctttgtgatgtacgcatt

SEQ ID NO: 896735 - DNA, 535 bp, Homo sapiens
ctgctttacaaagtgtgcattcatctaccagaattaaatctttttttcattcaacaatatggaaacactgcttttgtagaatctgtgaagggatattttggagtgtcttgaagtctatggtgaaaaagaaagtaaattcagataaaaactagaagaagttttcagataaactgctttctgatgtgtgcattcattccacagagttaaatatttatttgattcagcagttttgaaacactgtttttgtccattctgtgaatggacatttggaagcttattgaggccaatgttgaaacagcaaatatcccaagattaaaactacaataaagcagtgtgagaaactgcttggtgatatgtgcattcatctagcagagataaatctttctttttgattcagctgtttggaaacactgtgattgtcaattctstgaatggacacttggtatgtcattgaggccaatggagaacaaatgaatatcacaggataaaaactagtaggaaaatatctgagaaaaccctttgtgatgtacgcatt

SEQ ID NO: 896736 - DNA, 689 bp, Homo sapiens
gaattgggtatccatcccctcaagcatttatcctttgtgttacaaactactcaattacastattttaggtattttaaattgtacaattaagttgttatcgatgtgctatcaaatagtattgacataactctgatgcgctatcaaatagtaggtcttattcattctttctattttatttacccattaagcatccacaaataagagcagatttcttcttagaagtcatgcgagcaggaagctcgcatgtggagctatatttataaaatattaaaagaaaaaacttactacccaaacccatctccagaccatgaatttctctctggatatcttattaaaatattgtctcctatcaaatctctatcaaaataccaatgacattcacagaagcagaaaaaaaattctgtaactggtatggaaccacaaaagcccctgaatagccaagcaataccaaacaaaaaaccccaagatgaatatatcacattatctgaatcaaaatatactacaaattatggtaaccaaaacaggatcaatggtattggcataaaatcagacattgagactaataaaattgtatagaacacaccaaaataaattcatgtatttacatccaactgattttcagcataaattccaagaacatacattgagaaaaggacgcacttttcaataaatggtgctgagaaagtgga

SEQ ID NO: 896737 - DNA, 607 bp, Homo sapiens
caagtcacaaatacatccctgccgtgtgattggggagctgcctaaaatggccacccrggactgtgtttcagacgaaatccagcatatcagcaacttgagtctcgtggtgagctctgtggccacaatcacacagagcctctgccaaggctcaggagccctcgcagtctttctcaaatggtgttttctgctcattcaaaacaaaataagtaggggggggggctgctcacgtgcttccagtctgggacactaggaccacctaaaccacacccacgatcttgtctgattattttgattccttgttggctcagttatgcattatggcaaccaaaccacagtgtcattggccataaaatgccaatccttggtccccacctaccctgggatcccctcaaccacatcttgctacccagttaaggtttcagcaacactgagaaaaatgtatttttatattgagagaggaaacattctttcaattgtgaaaaatttataaggcaggaatgtgaaaatattttaaaagacattttacaaagggtgaaagaccctccattaaaccactcaatatatgacactgtaattggcctcccaaaccctgacttcagctctgggt

SEQ ID NO: 896738 - DNA, 658 bp, Homo sapiens
ccacccccgttctctgcgtggctcctaccgcttcctcagcccacatcttgctgccagtctctgcttctcagcccacatattccaaaacctgcctcggaatgcaaactggggtaccagaagccttccacactgctcagaatgaggcctgggcagtaggagagcaggctgctcaggatccatgtccggctccgcaaaatatctcactcttccaggcctctgttcattcatctgcagaaagagctaagcttaaattattttcttgactggttctcatggaggtataaagagtcctgttactgcccaggctattaagtgctttacaaactataaagtgcggtacaaatatcgttcttgtcagtttataaagtgccttacaaactataaagtgatatacaaatattgttcttatcaatgtgctttggaagaagctggatccacagtcacaggcagcagttctaaggggcaacagggacacacaggaactcagctgatgccaggggtgccgggcctctgtactttcaaagacattctgttctrttcctaggtatcactaccagaacattcctaaacaataaccatcctgctgcaggtggtgcgagaagggacatcacagagcattttacatagggtcctacaggctgatgcctttggggtccag

SEQ ID NO: 896739 - DNA, 570 bp, Homo sapiens
ttggataaggtatatgcaacctattaggttggctcaaaagtaattgcgattttgccattactttcaatagcaaaaccataattacttttgcaccaacctagtggaatagattataccatggtagagactcctagcgctcatctgtatttgggtctcttcttttgagtgcatgggagggttacattttttcacacacacaccctttgaaggtgggatcatacaattagctctagtccattggcagtgagcagaatggatcatatttattctgaatcaatgcatttcattgccagtgagatatcatccagtttctcttcctctgccttggcaatcatggacacatgtgcaatcgaagtgctgcaagacggaaagtacctggagctctaaattgcatggtgattgagaagagaactgcccaagagagtggtttcaatctgcagtaaagaacagacttttgttaagtcacaagatttcagtgctgtttgttattgaagcataacctagcytaactgacacagtagtctaatcaatatcagtaatagctactatcattatataagcactgtttca

SEQ ID NO: 896740 - DNA, 630 bp, Homo sapiens
ctgggaaatctggttgaaagcatgccagatcaatgcaccgttcacactttagacractctaaccatccaccacgatcaatttattgggcactaccaagtatgaatgggagagatggtcaagccagttatgcttaggagccagacagccttttgctgtaatggtgtatgtcactgtgtgatcaatttttttttcctccagaaaacaatagaagcctggagccacacagcaccctctgtaatccatgcagctcatcccccaggagttattatttaatgtctcatgggtgacatactgcctcaatcctgtgaaaacacaccttcctacaaatgtaattaagtagaaatgctaatggtaggttttgaagcaacatggcccatgggggctttcagtagcccacagatgacttcataaaagcaactgttcagtctgcctctgcataaagcatccttatggtcagtgtgtggacatcttattttccaggtccctctcccaggtcttctccagcagtgagtcaccgtcttccccaggtgagattagagggagatgctgccctacccttccattccagctgtctcagatttcctgcaacagctgaggttctataggtccctgaggatcagcccactcca

SEQ ID NO: 896741 - DNA, 617 bp, Homo sapiens
gcaatttggccaacctgagactgccatgttgtgaggaagcccaaactagcctatgcagagtgactgcacagagarcccggagactccatgcagagagagagaggctcaggaacacccagctgccccctgctagcccagcaccagctccatttgactgtaactgtgcaagaggctgtgggccagatccaggtatcagagacctcggcagggccttggacatactaaaagcttgtagagtcctgagaaggatgttagtgccgaattaagaaaaacgttattagaaactggaagaaaggggatctttgttatgtggtggtggaaagtttgtcacctgcggtaacatagaaagaagacatgtatccagtgaactcactgttatagcagaatattaaaagtgttatctggctttttcttgctacctatgataaaatgtaaaaggaaagaaacgaactaaaacaagctattaaatataaaggagccaggatctgctggacttgaaaacaaaattatttttcgttcctagcttctctagatggcaaaaacttctcaaactgagaaaagccctcaggcttttattacctgatttcaagacttactataaagtaagtctacagtaa

SEQ ID NO: 896742 - DNA, 608 bp, Homo sapiens
gaatatggggaaaagatatgaacatatatctgaccaaagaggatatatagacggcaaataagcacatgaaaacatgttcaacaacattagscattaggaaaatgcaaattaaaaccaatgcataagagtctacaacaatctcagtataaatttcaattttaaaaagtatgaacaccacccccattcaacttctttcacccaccagactctgatttaagtggcttggagtgtgacctgggcagtgagagtgtaaaatctcccctatgtgattttaatgtgcagccaaggttaagaacaattctcctaggataaagagtatagcttaatagaaatttttaaaatagagcctgaagccaggtgaggaaaaatgctgatgtggagttttctgattgagagttatcttcacactcagtctccaaataacagaatgaatgcagctcgttctcaggatggtttatgttgcagctacagatctagctatttctagtcaccacaaagaactggagttgggcaaattgaccaggtggatataattattagtgatgcttttctgtgtcctctttttttctccattaacttctctttccaactactagttttcaaatttg

SEQ ID NO: 896743 - DNA, 603 bp, Homo sapiens
agcaaagcctattgatttatttgcctgaaaattttgatttatcaaaaacagtatttaaaaagaaaataagcctttgatcacaaatagctactgtttcttaaatccttactatgtgcaaggtcttgtgccaagtgctttgcatgtcttgtcttatttagtcattacactaaccttattaaagtgaagacaatccccgttttacagatgagaaaactgagggctcagagagattactcaagtcagacagctaagtaaatgacagattccagatctgaacctaggtgtggctgattttgaagccccgtgacttttatactacactgtttctcttaatagctacccaagatagtttccactctgaagacattaatttgatatttaaactgtctaccctactgtcagttatgttccttgctgatccttctttgacttgtcctctgctgagcagagtatttatggctagacccagataagcagacaggctctgctaaccagaaattaaaaaaaatwttttttcattaagcatgtgatgggttatagagttgtaatttttcttacattttgggcaagctttaaatgtagtatgccctatgagagttacag

SEQ ID NO: 896744 - DNA, 648 bp, Homo sapiens
gatgcacaaattttcccagacttgaccagtgggagctgtttctagctggctcctatgtccttttgattwtgaatcacttccttaatttctggaacaaaatacttcaggttcacctggtactttctctgcttcagccctggattcatctctcttagaagcctaatttcctttattggaaaatggtacttatagaacaagatatagaacaaaatggtacttatagaaaaggggataggtatacctttactaccggagtgccattatttctaggccatctcagcaaatagagctaggaaatatatacacgtacatgcacatacacatacatgaacacacatctatctctatttctatatctgttcatctgtatatacagcatattaaaatatcatgatgttataatgatctcaccaattccaataaaacaccacattccagtctttccccttttcttaccggtaactcccttctctaaaattgagaaatttagctcacatgatccacaatatacttagttatttagtcaatccaaatgtgctaacccctagcactgtgaaaaatcagttcaggtaagagtcatcaatggatcataaaagcagtgggtgaaagtttgaggagtaatgaaatatttacataatttctaagtat

SEQ ID NO: 896745 - DNA, 573 bp, Homo sapiens
tccttgcccagcgtgaaagaaattttgtattcaaattctggctcagtcatttatttgacctgtgacctggggcatatcatgtracctctctgaacctcagtttcctcttttgtaaaatgaggagaaggctattgggatgattgctgagtgcctactcttgacatgtggagccctgactgagggaggcagtgttgtcagcaccaccgccttacaggaccctggggatggcgttcactgtattgtctgtgtaagtggcgccccctggtgcaccaacatgaatggcgtttcctggaattgtgcaacatggcagactggatcatgaaacagaggccgggagaggttaaaccacttgcccgagtcacatcgcagaggtgggatttgagatcaggtctgtctgcctccaccgcccaagcctataaccagcatgccctcctgcctactaccaatttaccacatctgcaacagttcagcatccgtgactgcttgaatgtcgggagaccgcttcagctgtgtaacctcctcacgtggctcttcccacaagagtgtgcaacaaatgagctcacgcctgcaaaa

SEQ ID NO: 896746 - DNA, 541 bp, Homo sapiens
actcatataacacagtctgtactacccaatttaaaactcgagtatacactatcacaaattatcttttaattgctttatatacataagctttttctttgccgctagacttaaactttcttttatatacagtgctgagcatatagtaggtacagagaacatacaattcatcttgaagaagaaggaagcaaagctgtggttctggcagtagaagtttcaggaatgaggggtctatgtttgttcaaaatcaaaacaagtggataaagcattaaaaagtccagtcaaataaccattgtgtgttgatttgtttggggaaagctgaggtgaggtcaaggaaccagacaatgcaaaaagataatttggctgatttttctcttcattgattgaccagttgatgtagaaatcacaggtttcacatacaatcccattgactgtgttggctgaaacatccaggtaatgacgaatcayagggtaaataagacaatatcagataattaaagttggctctatagatacaccacattctataagttgatcagttcct

SEQ ID NO: 896747 - DNA, 586 bp, Homo sapiens
aaacactaggaaaaaaaagtgtccagtgggtgtttgaaactagaaaacaagttgccttttgaagaattttgcctcaggttttatcattatgaagtgctgcccaattaattgcctaactgggtatgatgctgtatattgagaacttcacagacctagtcaatttcttttcttttctttcttttttttttttttctagatgaagactcactctgtcgctcaggctggagtgtggttgtgcgatctctgctcactgcaacctctgcctcctgggttcaagtgattctcctgcctcagcctcctgagtagctgcgattataggcaggcaccccaacgcctagctaattttttttttttttttgtatttttggtacagacagggtttcaccatgttggccaggctggtctcaaactcctgacctcaagtcattcacctgcctgggcctcccaaagtgttgggattacaggcgtgagccrccatgcccagccttcacatagtcagtttctgcaatgagcctaaggcaagcacactgtcatagagactgtgttggtgtatggaagtatggtaaggtggcatgaaatatgtggt

SEQ ID NO: 896748 - DNA, 634 bp, Homo sapiens
cctgctttcaattcttttggctatatacctaggagtggaattgtaggatcatataatagttctatgtttaacctttgaaaaactaccaaactttttttcaaagtggttgcaccattttacattctcactagcaagtgtaaggattaatttccccataccctaacccacattaatttaaaaatttaaaattatggccatcctgggagtggaggtaaagtggtattttgttgtggttttgctttctattttcctgatgactaatgatgttgagcgtggtttcatgtaactattgactgtttgtatactttctttggaaagatgtcttcaagttctttgtccactttttaatcagtttttttgttgttgttgatttttaggaattccttatattctggatattaatcccttagcaaatatatgatttgcatatattttctagtaaattagtagatttagttctcttgatagtgtgttttcatggataaaagttttaatttatstatttttttctttttttgcttgtgcttttggtgtcagatctatgaagctgttaccaaatccaatgtcatgaagattttctctaatgttttattctaagaattttataggtttagctgttaagtttgggtctctg

SEQ ID NO: 896749 - DNA, 653 bp, Homo sapiens
tttggtttatctttcataggaaatattagccaaaagggataccctgtatttcaggtaaaaacttagtgatagggaaatttaaaaagtgttagtcaaaaatcgaatgtttgccctatcagggttgccatgcatgactgtgctgattgtgtactgcataattccagggatacctaaaacacagacagaaatgtgaatgacacccctggggttgagcaacgcctggcagccctgattttaagtaaatagtaaagcttttgaaaatgctcattttttttttctgattcactactgaagaccagttgtgagctgcaggagggcttttattatttttcctatttttttgtgtatatgcaaggtccttagttttttcctctccatgttgtttccaaaagacttccttactgactgagcttcagcacactgctctggcattctcccagctctaagttttcatgagtcagggaaaatgtgtgcactctgaaaagaagcttgtcagacatgctcagccagctgacatgaagtccctctctccattcttcttttccatccacattcttacagcctactgcttgtacctttatttagccctgacttcatcctacctgtgttggatgttagttagagtttgttktttacatatctgtgttccttac

SEQ ID NO: 896750 - DNA, 580 bp, Homo sapiens
cattttgggcaaagccattcaacaagtctctagggagttccacactttcccacattttcctgtattcttctgagccctctaaactgttycaacctctgcctgttacccagttccaaagtcgttcccacattttcaggtatcttttcagcaacaacccactctactgttaccaatttactgtattagttcattttcacactgctgataaagacatacctgagactgggcaatttacaaaagaagaggtttataatggactttacagttccatatggctggggaagcctcacaatcatggcggaaagcaaggaggagaaagtcacatcttacgtggttggcagcaggcaaaaagaatggggaagatacaaaagtggagaccactgataaaaccatcaggtctagtgagacttattcattaccatgagaagagtatgggggaaactgcccccatgattcaattatctctcactgggtccctcccacaatatgtgggaattatgagagtacaattcaagatgagatttggatgggaacacagagccaaaccatatcacatgatgtcattcatttgtggaatctt

SEQ ID NO: 896751 - DNA, 567 bp, Homo sapiens
agatcagtcaataaacctgattacatctgcacatctgcaaagagtgtttcaaagtctgaaaattcctttatcctctgtaaaggcaatttaaccccaggaagttccacgtcctaagcaggtaagtttccagttgatcaaagaactgatttctcccaaataaaattttagtctttcctccaaaccactcacttttgactccttacaccttcattccatttttttcttttgggtggaggtggggaagcaaataaactgtagtaatacaaattgttactttaaaaaagacctctactttaaagttccctacagtcccttaaaattttttcagtcagtaggtactctctccaagataatgctcaaagtactaagtctttttattcatacattcaacttttagttgtgacatggcattatcactgatgtgatatatacatgacatatacaacttctctctctaggtaagaaaaagaatacaacatatttctagcatttcctgacagattcaataatcarcaagtaaaagaaatcccatcaacccataagtttgttattagtcaatataggctt

SEQ ID NO: 896752 - DNA, 665 bp, Homo sapiens
gaaaggcacaagaggtggaggaggagctgcaaacgtagatgtcttcaagcaagaaacacacaagtaaagcagcaaatgttattcaataacaagtgaccaaygttttgagaagtggacagtgtgggccaggctgtacctccaggcacttgaattataattttaaactgcatccaaatgaactaatcactcctgctggcctactagttgaggggaagaagagagtctgtagagaagagagacccagaacttcatctgtgtgttctgctgtgcatccttgacagcacctggcacagaatctcagctaagatggatgaaatgcaagtactcaggccctttgaactagaatttttgcctaaactgaaagagttggtgagttcctttggggcagcactgtcacatatatactccttacactccaaagctctctgtcctggatcgaacatataatattgacttttcaatattgttgaaagaagattaattactcagtgattgttgagatgtgcattggcatttgaagctaaaatattagtggtttaaaaagaagcaaaacttgcctcaattccttttttttttttttaaacatttgcaggctgtgtaagttgacacttgccttgttgtattagacttccctagacccctggttctaaaaatgtggttcccag

SEQ ID NO: 896753 - DNA, 604 bp, Homo sapiens
caaaatttgcatttcatacatctatattggtgcataatcctacagttaggtttattattttatgttcttaagcatgagtttcagagaaaatcaaacttaacagaaatggaggtaatcatttatctaatgctgtctatacgaagatgcaaactcctctaccactagaagattagaggatgtcttcttcagccttggctgcaaaaggaagatagctatatttaaggcttgttgtgattcaggtacagttaccctatccacttgtttgcattatcttctttaattttcacaactgtattttgaaatcagtattatcattcctcattacagataaggaaaatgaaatagaaaggttaaatactaaatacttggtaaacagtaggaaaggacatcgttgattcaggagagactggtgagagagaaagagaaagaaagggtggagggaagaaaaagaataaaaggagataaagtaaatttgaaattttaacagaaagaaaaactgcagttcccaagatatcactagaaacttgtgagatgagagttctgactggtacataacastgacagaatctaaatttaaaatgaatggagaaatgaagaaaaacca

SEQ ID NO: 896754 - DNA, 584 bp, Homo sapiens
tcgtttctttttattcttttttctctaaacttcccttctcgcttcgtttcattcatttcatcttccatcactgataccctttcttccagttgatcgcrtcggctcctgaggcttctgcatttttcacgtagttctctagccttggctttcagctccatcagctcctttaagtacttctctgcattggttattctagttatacatttgtctaattttttttcaaaggttttaaattctttgccattggtttgaatttcttcctgtagcttggagtagtttgatcgtctgaagccttcttctctcaactcgtgaaagtcattctccatccagctttgttccagtgctggtgaggaactgcattcctttggaggagaggcactctgctttttagagtttccagtttttctgctctgttttttccccatctttgtggttttatctacttttggtctttgatgatggtgacgtacagatgggtttttggtgtggatgtcctttctgtttgttagttttccttctaacagacaggaccctcagctgcaggtctgttggagtttgctagaggtccactccagaccctgttt

SEQ ID NO: 896755 - DNA, 629 bp, Homo sapiens
attgtagctagtggattaaggcaagaaaataaaaattaagggcatgcagatcagaaagggaaaatgaaagtgttttatttgcagatgacatgattgtcaatgtaaaaatttaaattcaatctaaaaattctagaattaatcagtttagcaaggtcacatgacacgagataaaattcaaaaatcaattatattcctatctactagcaacaaacgtggataccaaaattgaaaatacaatatcttttataacttctaaaaaaatgacttacaagtatatttaacaataatttatagtaactgtatcctgaaaactaaaaatactttattaaaaaaatcaaaaaagaaagagctaagtaaatgaagaggagacataccatatttatgggctagaaggctcaacatagcaagcatgaatttttgccgagttaatatacaggtataaaaaacttcttaccaaaattctatattttttgtagatatagacaagatatatagaatagctaaawcaattttgaaaaagaataataaaatggaaggaatctgtttctctggtttcaagatttaacatataggtatagtaatcagtactatgtgactgtggtagaagaatagttatatagatcaacgga

SEQ ID NO: 896756 - DNA, 647 bp, Homo sapiens
aaggtatttaagactagggtaagattgtcaagggggttaaaaatttaccaattttgaacaattttgaagttagatctaagaaaagtgaaygtggggcttgagaaaacaatccagaaaagctcttaaatttctctaaacagctggatggctggtgctacatgctgaaatcaggagaacttaagggatggcagcaactaagagttctatattaggtctagaattatgaatgccttgtagacatgcagtagaattattacattggcagttggatatacagatccgagagaggttcaggatgaagctgcaaattgaagattcatccatctaccatataggtgatatttaaatctatgagattaagtaaaatcagttatggggtgagagtagacagagaagtgaagtctaagggtttaactttggagcagttagtcagaaatgctaagtgaagaggctgattcatgaaaggagactaagtcatgagtaaaataagaggaaaatcaggatagtgtttttttgttcatattcactttggctgcaggaatcattttggggagtgtgaggtagtgttacctccaataagaagtgaccacagttcatctagtctaagatggcctttgttttccacatttacatcactgatatcagca

SEQ ID NO: 896757 - DNA, 629 bp, Homo sapiens
tttttggttcctgatgttaagcaatctttaaagggcatctgtctktctttagttaataatgtcaaaaagacagcattgacatagttaacttcccaggatcctcagttctttagagatgcactaaatggctggtatcatcacttataaatgtgtattactctgatggagtttatattgaaaaataaagtttacgttttatgcttatcttttattttggagtttatattgaaaaataaagtttatttttatacttatcttttacttttattttgtcatgagctttttgaagccctcttgtatatgcctgtaaaatagaaaattctatatattgttgtaaaaatgtattgcataactcttatatacgaacaggaatataccatcgaagtggggcacagaaatagaaagataaaatgcatagtacttttcaagagcttataatatatggtgggaggcagaaaaagctataaccattcaaatagttactaagttatttattgtgataactttggggatgcatgtgataagcacctactgtaggcagaataaaacatcacactagataatatcaaagaaataatgtgtgtgcaagaataatgcatggcaaaacacgttcaaagtcatgagagttg

SEQ ID NO: 896758 - DNA, 629 bp, Homo sapiens
tttttggttcctgatgttaagcaatctttaaagggcatctgtctttctttagttaataatgtcaaaaagacagcattgacrtagttaacttcccaggatcctcagttctttagagatgcactaaatggctggtatcatcacttataaatgtgtattactctgatggagtttatattgaaaaataaagtttacgttttatgcttatcttttattttggagtttatattgaaaaataaagtttatttttatacttatcttttacttttattttgtcatgagctttttgaagccctcttgtatatgcctgtaaaatagaaaattctatatattgttgtaaaaatgtattgcataactcttatatacgaacaggaatataccatcgaagtggggcacagaaatagaaagataaaatgcatagtacttttcaagagcttataatatatggtgggaggcagaaaaagctataaccattcaaatagttactaagttatttattgtgataactttggggatgcatgtgataagcacctactgtaggcagaataaaacatcacactagataatatcaaagaaataatgtgtgtgcaagaataatgcatggcaaaacacgttcaaagtcatgagagttg

SEQ ID NO: 896759 - DNA, 659 bp, Homo sapiens
gtctagaaggaaggatttttctgatattactttgtagaatttatrtggtttcaggtcttagatttaagtctttgatccatcttgagttgatttttgtataaagtgagagatgaggatccagtttcattcttctacatgtggcttgccaattatcccagcaccatttgtggaatagggtgtcctttccccactttatgttttcacttgctttgttgaagatcatctggctgtaggtatttgactttatttctgggttctctattctgtttcattggtctatgtgcctatttttataccagtcccatgctgtcttggtgcctgtggccttacagtatagtttgaagtcgggtaatgtgatgcctttagatttgttctttttgcttagtcttgcttttgctatgtgaacattttttggttccatgtgaatttcaggatttttttttctagctgtgtgaagaatggttgtggtattttgatgagaattgcattgaatttgtagatttcttttggcagtatggtcattttcacaatattgattctaccaatccatgcacatgagatgtatttcatttgtttgtatcgtttattatttatttcagcagtgtttgtagttttcctagtagaggtcttttaccttcttggttaggtatattcctaag

SEQ ID NO: 896760 - DNA, 659 bp, Homo sapiens
gtctagaaggaaggatttttctgatattactttgtagaatttatgtggtttcaggtcttagatttaagtctttgatccatcttgagttgatttttgtataaagtgagagatgaggatccagtttcattcttctacatgtggcttgccaattatcccagcaccatttgtggaatagggtgtcctttccccactttatgttttcacttgctttgttgaagatcatctggctgtaggtatttgactttatttctgggttctctattctgtttcattggtctatgtgcctatttttataccagtcccatgctgtcttggtgcctgtggccttacagtatagtttgaagtcgggtaatgtgatgcctttagatttgttctttttgcttagtcttgcttttgctatgtgaacattttttggttccatgtgaatttcaggatttttttttctagctgtgtgaagaatggttgtggtattttgatgagaattgcattgaatttgtagatttcttttggcagtatggtcattttcacaatattgattctaccaatccatgcacatgagatgtatttcatttgtttgtatcrtttattatttatttcagcagtgtttgtagttttcctagtagaggtcttttaccttcttggttaggtatattcctaag

SEQ ID NO: 896761 - DNA, 413 bp, Homo sapiens
ctttattcaaatacagttacatataataaaacttacccctttaaagtatacaatggttttttagaaaattaacggatttgtaaaattgycaatattatctaattttagaacattttaattattctaacaagaaaccctatacccactacccagcattcctcattattctcactccctaactctaagcaattactagcctactttctataaagattggtcaattataaaatttccatataagtggaataattggagattcatgtatgttatcacatgtatcagtataatgctgaataaaagtgaagaaagtatatatgcttgtcttgttccagatcttaggggaaagtattcagtctttcttcattaagtttgatgctggctatgggttttctgtagatgccatttaggaggtt

SEQ ID NO: 896762 - DNA, 579 bp, Homo sapiens
gccccatgcaagttcaaaatccagcggggcaatgaaatcttaaagctccaaactgatctcctttgactccatgtctcacatcgaggtcacactgatgcaagaggtgggctcctacagtcttsggtagctccacctctgtggctttgtagggtatagccctgcttctggctgctttcacatgctgacattgagtgtctgcagcttttccaggcacatagttcaagctgtaggtagatctaccattctggggtctggaggactgtggccctcttctcacagctccacggatgccccagtaggttctctgtgtggggtctccaacgccacatttcccttctgcactgccttagcagagggtttctgtgagggccctgcgccagcagcaaacgtctgcctgagcatccaggcatttccaaacatcctttgaaatctaggccaaggttcccaaacctcaattcttgacttctgtgtacccgtaggctcaacaccacatggacgctgccaagacttggcaacagcccaagctataccttggccccttttagtcatggctggagcagctgggatgcaggacactaa

SEQ ID NO: 896763 - DNA, 668 bp, Homo sapiens
attgtgatggagattagtatgtgggacacattaaaccactgcttaatttatgatcaaagtagacttcgactccccagcttttttcggccttattattaatactcagcatagcccaggcaacatagcagggagtaaatagtgtgatttttattttaagttgaaggctcattaattgtttgccaggttcaaatacaagatatctaaggaggtgaaggactggaaaaggttgggtggaaaaggttgggtagaaaagggagacggctgaattcagttaaacaaacagtaaagtgtatcactaacttactaatagctggttattttaaacacaattggttatatggatgtcactttaggtagcattctatactgtttaaagttatttataaaatacctaatatttgttataaaatattgtttccttattaaaaaagtgatgagtaaataaaatcactttttgaacttatacttttatcctttatgtctattttatttgtgaaatatacatattgaaactatgcctagaaagttctttcagttccttacagaaaataattctataactacaaggttctattattattatatagtgggtgttagacaatacgaagcctacatgactcagttatatttkcatagcacttttatttttttagcataattgtctttgt

SEQ ID NO: 896764 - DNA, 606 bp, Homo sapiens
tatttattcttaattgagttgactaaaaacgcagatgtcaattctgcatgttgggggtgttcaattaaaatagcatacaatggccaggcacggtggttcacgtctgtaatcccaggcctttgggaggccaaggcgggcgggtcatgaggtcaggagatcgagaccatcctggctaacacggtgaaactccatctctactagaaatacaataaattagccgggcgtggttgcaggtgcctgtagtcccagctactcgggaggctgaggcaggagaatggcgtgaacccgggaggtggagcttgcagtaagtggaaatcccgccactgcactgtaggctgggcaacagagcaagactccgtctcaaaaaaaataaaataaaataaaataaaaataaacaaataaatagcataaaatgactctgagacccttgaaaacaattttcagagtttcttagcccctgttaatattctacttagtccgcaaaattgccttgacttttttttgacgttttcaaytacttttattagactaagaaaggctaatatgactgtggcttgcatacccagaagtctgtaccacaaaaatgatttctaatgggtaacaaat

SEQ ID NO: 896765 - DNA, 504 bp, Homo sapiens
tttgtttgcagccaaaggatataaaatcttaaaggtttacccaggaggatattagaagctgaattgcatgagcataaaacttacrtcaaagtattgccacaagtatcactagcaagtcatttcaataattcttcattaattcatttatccatttcttagacatatgttaagcaaatacattctgtcagttcctgtatttaaagttggtaatataaatacaaataagattcataaagatagtcacatgataaaataatcattaagtttatatgtgaagtaactcaagaaagaacagaaaaaaaagaatatttatcttgatcctaggtggtaggaaagactgagcaaagtgtaaacattcctaaagttttaaaggatgactaggaattttccataaataatgaatgccaagagctcatctagctctaaaattctgtgatataaatgctttctgagtgaaataatttgttccttagatcactagttcttgttctctaagaaaagcaa

SEQ ID NO: 896766 - DNA, 603 bp, Homo sapiens
tatatagaataaaaatgatggtatatacagtgttcagtactatctgtgatttcaggcatccacttggagtcctggaacrtatctctggggatgaagggggactactctacacatttctccatttttggtttcctattttggaattccattttggaattcagataagattccttgtcctaggttttgtttcagagatgtgactcctaaaataggcctactgagtgaagttcccaatagagcttatctagactcctcataatgcagagaattataaattgagaagtaaatacttgcagatagatgcaattacatttaaacaactgtccaaatctcagcaagatagatatatatgagctgtatatatatggatactgtatgattgggtggaagtctcaggatttagtcaagacagtagtcttacccaaataattttcattcttgtccagagggagaaagatttgattattaatcatgaatcatgccagaattggaaatcagaaaatatcaaatccatgttttagattgtataagtgagagtataaacagaaagtaaagtcttggtttctatttgggcaggagctagtaggatgggacaggagaggg

SEQ ID NO: 896767 - DNA, 667 bp, Homo sapiens
atgatagaatgatgcatgaaggatttctattcctttgggtatatactcagtattgggattgctgggtcgaatggtttttacatctttgaggaattgccatactgttttccataatggttgaacaaatttacacccccaaccaacagtgtaattctttccctttcttatcttcaaagactttccaatgtctaagataatcagattcagccttcattccaaaatttccattttgtccaactcccctttctaacaagagaaaagtaaaaataaagaacaaatgaacaaaaattactcattcactgtagctaatacctacagaataaaaatggatttaaataatttcccaaagagtttgttaaccccaaatattatataatgtctgatatctagtcagccttccctcctcactcaaagctggctactcacacaaataactaccctagacacatgaactcacctagacaacataaaagtagaacaaaagatttagtaaattacctactctgattttcttaacactgaaagaacttgtatgtaaktttatatgtaaatactaacctcttaataaatgacattaaaatacattgttagtgtgggagatattatcggtagactttttaatatgtgcttgggatgcttatggttgagccacaggcacttggcaatt

SEQ ID NO: 896768 - DNA, 609 bp, Homo sapiens
aagtaaatgctgcaaatggctatgtatggattctgatgacatcagtgtattgcattgtattatactttgctgattttaccctcagaaaaaaattctgagacactttaccctttttttttccygagggagagatgaactatctttgaagtggctccactcaaatgtactaagcagacatagatcacacataagagataagagttaaaaaatggtccaggaaaaatagtgaactgcttgtttcattaatatgatacactactggtgagtcaaagacactcacactctagacttcatgttgttattatagagaagtaaagagaatccctcttgatcaggtgagacaatgaagtagtcatgaaatgtctcctgatgagatgttattggaaaataccctactgagacataaagaattgcaatgccatgaaattctttaccttaacagggatgaacctttgaagacttgcaaggcttttgaggtctttttgctttgggaaaggatttagttaaggagcaattctagaaaaaccagtgtcctagcagaattaagattttggaattttaaatacatatctgttattagaaatccacaagtatcattaaaataatttg

SEQ ID NO: 896769 - DNA, 679 bp, Homo sapiens
aacactgatgaaagaaattaaactagacaaataaatrgaaagacattccctgtttatagaaaaggattatattgttaaatgtccatattatgaccagcaatcgacagattcaatgttatccctgtcaaaatcccaatggcattgtttacagaaatagaaaaaacaatactaaaattcatgtggagccacagaagactccgaattgccaaagtgattttgagaaagaacaaggctggagacatcacattccctgattccaaaatatattacaaagctacaataatagaaacagtatactaatataaagataagcacatagaccaagagaatagaatagagaaccaagaaataaacccgtgcatgtgcagccaactgatctttgacaagggtgtcaagatcacacactggagaaaggatagccacttccaaatttgtggtcgacatccacatgcaaaaaaatgaaatggaactccatactttgtgctatacacaaaaaccaactaaaaatgtattaaacactaagtcatgaaactgtaaagctccttgaagaaaatggataaaattttcttgatattgtttttggcaatgatttattggatttgacactaaaggcacaggcagcaaaaccagaaatagacacatgaaactaattttaactaaaaaccttctgcacaatgaa

SEQ ID NO: 896770 - DNA, 649 bp, Homo sapiens
ccgagggcgcgggcttgagaaacacaggtcccttcccaggccacctcccagccaggccagaactggggccgagaggctccccatagcttctcaaattggagcctggacacagtcagagccaccccagaactggggggaggctcaacatcaaaattatgttaacaactgatgtcaaaagtaatcaactcagcttggctcccccactgctgctggctgcaggagggctgtgagtaggaggagagcaagcggccccagagggaccctcggctatgaccccctcagcctgaacactacttcaagaaaagatgtggtggcatctgtctggtatggtcctgtgggctccattccaatgctaatggactcttaaggggcccaggaatcaaaatggtcaacacttgaggaatttccagtaatcagagaaaacgtatagaaatgaggatgatgcttacttaggaaatggcctattacaggaaacagagggccacgtggctaatgtcagtgagctgtgggagagacagagaccccaggtggggcaggcagatcagcaaatcttggaggacctgctatrtggcaggcactggagacatggaggtaaagaacacaatatccatgttctcagggacacactcatatgcccttagcattcacg

SEQ ID NO: 896771 - DNA, 602 bp, Homo sapiens
ccattatttccctcacccagcatatcctgatacctgagccaagagttcacccagagcttttgcccacttcattgatggtctggtgggcttttgttgacacatacccgtgactcccaaatgaacctttcargttggcttaaagccgctgggacctacacatgacaaaacccagacggaaacagtggcttacactcctgtgtccctaaaggtacctgttcctaacagtgggagtgccagagcctggaagctggaagccaaggagacagggacctccctcctgctgaccccctgccaggccacatccacctaagggatttgggatcatactccatcttcaaccactgggatcaaatggaaagccctcaggaattctgagagacagcccctatacctatgtgcactgacacacatacactgacaaatacgcattctgacacatatatgaacatgcacatatgtgtgccccactccctgccaggaggtgggttctgtcccatctttgacatgttacttcttgtccttccctaggcccagtggcactttctttgtgataggtgctgagacccccccgactgggcccagtggctgttcccaggacccag

SEQ ID NO: 896772 - DNA, 700 bp, Homo sapiens
tggcttatgaaacatgtcggttagatgtactaaatccacggtgrtaacttctaacccccaaatgacaaactacgtatagttgtataaattggggtcctggtcactcaagaattttaaagagacacaggtgataaatcaaaattaccctttacaaaggtgcaacttgccatgatttatggccattctaccaaagggctgaggaactgccaacaaaatactcacctacccacccccaacattcactagagatctctatagaaccacaaaccagcatgtttaacctccatattgggaaagtttctaaaacctgtccaaacaacaacaacaacaacaacaacaacaacaacaaaacccagaatcaacagaaacaaacaattgtcataagctactggagaaaagactcataggttttgtaaaggaaaataatccctgactaaaagtatttatttttttttgaggaggtcaatataactaaggaaaataaactagctagagaatcataataaatatttagatcttaaatagttttaaaactgtattctccaggactctaggatacagaggtacttcaggaattctgcaaatacttaatttgaaaatcatttttaaaacactttaaaaaactgtagtgaaagttaagaactatcaatacacacacacctgactatgttagatactaaatatatattgttgaagacca

SEQ ID NO: 896773 - DNA, 618 bp, Homo sapiens
aatgaaggatacaatctttcctaggaacatctgaaagaccaagagttttaattactgatcttgctgagttccaatgacatcwacttttattaatttcatacttcaatcgagtgtgaagggaaatcacctttcctcttctctctcatttctactcagttcaggtggcttaataaatgtattgattagccactaattgttcatcttaaaaattaatttgaaaagtaaatttgtaaaaaaaacactgcttctatttggacatgggctgagtgctcatgatgcttgggccacagtccacacatctgaattatgcacatgctgtaccaagtgtcacaaagtactttatttagccagctggagacacagatttcacactgaggagttcagtgcttcctataggaacaatgccgcgtggatagtcaataaatctttatgaaaagccttcctcgcagagggaaaaagagaaagacaagtgaaccaagaaagggctggttggaagcttctgtgactgttttgggaagaaagacttactggagaacaaagaaaatgtctgcaacttttccagtagaggggaatggggactgagagaagtggtcaccagtcattctggaataaaggagg

SEQ ID NO: 896774 - DNA, 604 bp, Homo sapiens
gactaacaacaatttggattcctattcttcccagaggagggggtggagtgctaaaaataataggtgaaagaaagcgggaaaggttgaattcctgaagaaaacacatcttaagattacataatactgcccagaagtaaccaaactacagcagaaaacattcaaacacattctaacatgcctctaattaagatagttttgggaggttccagaattatagctaccaaacatgaaacctaaagaatttaccaagattaaaaagattaccaactttaactcagaggaaaaacacactggaagaattaggttagttagaatacactcataatgatgtcagtttgctgaccttcatacaattgctgcatcattttaggtacaattgttagtgataaagacctgaatgggttgggcactatacaaaatataaaattagatatgattcctgttcagaaagttcaagttactaagtgactcayaaacttcatttttcaccagggatgtatgctgatgttctataactgtgaacttattttaaaatacagcaagaaatacaggtaggacatatgataatgtcaaacaagcaaaaacttttgtagcatgtagaagc

SEQ ID NO: 896775 - DNA, 678 bp, Homo sapiens
tgcagtgcagcagcacaatcatggctcactgcagccytgactacccaggctcatgtgatcccccaccttagcctcccgagtagctggaactataggtgtgtgccaccatgcccagctaattttttgtatttttttttgtagacacaggggtctcgccatgttgcccagggtggactcgagtgatccacccgccttggactccctaagtgctgatattacaggtgtgagccaccacacctggctgcgtttctattgttaatcagggtggctgatttggatgatggaggtgtaggatttggggttgccaggggcagggtaggatggtgcctgaggtccagttccagtgctgtgttccagcaggagactgggaagggcctggcagcagctaagcttatgcctttcaaacaagggcactgcagagctccctgctacagccagcacaaggcccagaggtgggtttccacgttctccacatgtcctactctccgtgctgcaaccaggaagagacagaaatcacccagggacagagcaggcaggcagacccttgaggtcaactagcctagcccctcagccagcagatgatgcaagtaaggccccaaggtaaatgagggacattgggatggttctagagcctggtgcctcctgcttccaacccaaggctctcttagtttccagctc

SEQ ID NO: 896776 - DNA, 559 bp, Homo sapiens
cctcatgttattttaattggcctattccccatcagtttataatgtgacaaattttccctaccatgggacatgaaactttaagaatgagccttcctaggaatgcaggactaatctgagcaaaaaaaagaagccaaaccatttgtatgtatctgcgaagctttctttaaaagatcttgatgaaaaggggagaatgcgaacttaatggttcaacttacaaaatttaaatgtaaagttgttggaactttaaattatcctgagcctcgaagaaatgtaactatgcaacctgagtcacatgcatgcaactgcaacctcttctgcctctgattttttttttttttgggggaaaaattacaaccaaacagtgccaaagataggacaccctcagatcactaccacttttcacaaagtaatacagtatccaatcttggaatgtagcaatctgtaaccaaycaaattgcaagggcatatgcaccttgaggggcctggccctaaaagggaaactgaaacccggcgggaacttttctgtctcggcctacataagtgaaatcattacttctcc

SEQ ID NO: 896777 - DNA, 559 bp, Homo sapiens
cctcatgttattttaattggcctattccccatcagtttataatgtgacaaattttccctaccatgggacatgaaactttaagaatgagccttcctaggaatgcaggactaatctgagcaaaaaaaagaagccaaaccatttgtatgtatctgcgaagctttctttaaaagatcttgatgaaaaggggagaatgcgaacttaatggttcaacttacaaaatttaaatgtaaagttgttggaactttaaattatcctgagcctcgaagaaatgtaactatgcaacctgagtcacatgcatgcaactgcaacctcttctgcctctgattttttttttttttgggggaaaaattacaaccaaacagtgccaaagataggacaccctcagatcactaccacttttcacaaagtaatacagtatccaatcttggaatgtagcaatctgtaaccaatcaaattgcwagggcatatgcaccttgaggggcctggccctaaaagggaaactgaaacccggcgggaacttttctgtctcggcctacataagtgaaatcattacttctcc

SEQ ID NO: 896778 - DNA, 559 bp, Homo sapiens
cctcatgttattttaattggcctattccccatcagtttataatgtgacaaattttccctaccatgggacatgaaactttaagaatgagccttcctaggaatgcaggactaatctgagcaaaaaaaagaagccaaaccatttgtatgtatctgcgaagctttctttaaaagatcttgatgaaaaggggagaatgcgaacttaatggttcaacttacaaaatttaaatgtaaagttgttggaactttaaattatcctgagcctcgaagaaatgtaactatgcaacctgagtcacatgcatgcaactgcaacctcttctgcctctgattttttttttttttgggggaaaaattacaaccaaacagtgccaaagataggacaccctcagatcactaccacttttcacaaagtaatacagtatccaatcttggaatgtagcaatctgtaaccaatcaaattgcaakggcatatgcaccttgaggggcctggccctaaaagggaaactgaaacccggcgggaacttttctgtctcggcctacataagtgaaatcattacttctcc

SEQ ID NO: 896779 - DNA, 647 bp, Homo sapiens
atgttctatggacttctcgggtgccagtgaccaatttcaggaggataacaagataaaaattattaagaaaataatttattaggtatattaagaaaatattaagcatcataatactacttatacacagtactyataataatacctttaataagagtattataatgttaaaatacaatgctgtcttaaagaaaataattctgacctggttactgttaataatactaagtattggtcttttatcacagtatcagcatttatgcaaatggtacaggaggcagtagtggttaaattggcagagacttggcatgaatcatgatggtggtacctgactttacaagcttctgttcttcaatgatatgcattcatgggaaaatcaggagttttatttaggataataattaaattaaatattttcccccgaaggacatgtctttttagtattgtgtgtgataaaatgggagacactttttagtttcatatttaatttttgattcaagggtacatgtgcagctttgttacaaaggtacatggtgtgatgctgaggtttggggtatgattaaactcatcacccaggtagtaaggatagtacctgataggtagtttttcaactcttaccccttccttcccccgcttttcttgtactctcc

SEQ ID NO: 896780 - DNA, 477 bp, Homo sapiens
ttctagttttgtcaaatggctcagattattttaagcttcctctttagataaaatgcagtttgactcaccggttttttttcttttcataaaggctactgtgagggagtagggcatcctcctgcaacaagcagcggagagagaaatcagtccccagccctgaccctcggatctctggtaaaacactcagtcatgagacacgagacctctggccacatgccctgatccatggactcagacagaaagtcctctcctgcatcttggggtccagaagaggccaggaagcaaaatctatacaaggaatgctggtttcttgccccaggatctaggtaaacattgaataaaattatttratctgccatttaagcaagaagtatttctaaagccacatgctggtgaccaggcagagaagatggctaagctgggaaagaactggtgtgtcagtaccacgtccatctacagttaatactcactggcata

SEQ ID NO: 896781 - DNA, 561 bp, Homo sapiens
agcgtggctcccagtgattcaggttgtaaagtctacagttcaattacttcagattctcctcacaagatcctcattctttctttggtaggttgtgcccacagaaaatgtcctaagaactcaagtttctcttctgagataaagtcctacaggtcaaaacatctgagacttagaatcaatcaccagctcttaattttttaaaagatcaagaagcatttacggatcacccaactgttttactataccctgtggggtggatcctgtcagctggggccaccgataccatcagtgcccactcctatcccctcatcttactactaaagagcaaccttcagacttccgatggccagcacctgcattgctttgcctgcaggcatcctcaggccaaagcccatctgccaggtcgtgagcaggacagagtaacagggatttcaatccccagcagccctcaaccaatgattggtaaaagtgagataggaccagtcyatatttttcaatagatcttgaagtcaatccaccaggattaagagctggctgcccatggtggtagccaaattgacaaat

SEQ ID NO: 896782 - DNA, 701 bp, Homo sapiens
ctactattacctctaaagactagtttaggaattgcatatttctttctccaataacattctatgggttctcccacctccagtctctctcctcaatgatcctttcttcaccaatgtggtgattctgctagttgctcaggatgtctcttctaattatgcattcctgaactggggggaaaaccacagaacaagcttgaggacccgctgtgagatggacctgagctaaaactccattgatcacctaaccaccataagctcctactctgactgatgggccacagtgacgttttcagtctcttggaattagtgtcagttcagagcaagtatcttcaaaaggtctgactattttcctttccccaatgcacagtcacctagtaaaagcccacaggtctctttggggaacactgagagaaagattaatggtataaatttttggcagtgtactggggtccctcctcaaggagattcagcctccctttcattcaagggtttctgggtctgtaaactggctcaagtctgggaattgaccaagaagccatgatgctctgtttctatatttcatgagacttctgttcacttgacctagaagtttactcttatacagatcaagtaagagtttagtagacctcctatttatttcatttctaaaaaygccacaatgaactagccagtaccacaggtctacataggtcagactgttctga

SEQ ID NO: 896783 - DNA, 610 bp, Homo sapiens
taattatggctgaacctttaagacttagatcagaatccacagggataacaaaatgcaggcccctgtctggccaagctggccagaaaaggtggtgtatcagttttattcttgaaaattgckaggaatagaaacggtttgtctcaatagcatctgcttctagggttgttttctctgacagcagaaagattctatcccatatctccttgaagtttcttcctttttcactatcatctattatcgtcttcctttcttccaactcaactcctacctcagtaatgaacaagaaattattacaaaactctttgtatagggcagtaggtaagtaacccttcttccttctggaataagcaaagctggaaggttaagataaggctgtttccttaccagtgtctcatttatgtcacatacagccacaaagttagcttctactctacatgcatttttatgttttgcttttttatgtttaatataaacataaaaatataaacacttttatgttttgcttttttgtgtttaatataaacattaaaaagcagattctggagttcacatagggacctgaatctcaagcttagctatattttctaataagtgactttgggcaagtaca

SEQ ID NO: 896784 - DNA, 622 bp, Homo sapiens
caaagctttgttattggactggagtgctgagtcttaccaaggcatggtggctgccctgccactggctgcttctcaaactcaaactcaaccccatgaacttgtgtctggaacttgttacaggaagagaagcatgctgtcagcaaatactaaaggtgtcatattgataaaacaaaagcaaaccccaaaacatatagcttttttaagaaaatgtaccacaataaaaaggtagagatgtgctcctttatttcaacctatactaccaccgcagctctgacaccctgagagccccagggtgatggtggtggccctcatatatattggcagcagtggattataggaaattataatatagtttcctataggcaacgttactggaaaagtagaggcatgcttggcaggagatggcagacaggtcaagacaaggcggttgtatttaccggacttcatggcacccaatcaactgaaatggatgatgggatgtggcagggaacatgtgrctgaacttgcctgtgagcacatgtgagcccccccttggtactgccaggagtaatgtcagggatttttaaaaagtttatagcaaggtaagaaagagcctgagaaatttagcttatcactgtaacca

SEQ ID NO: 896785 - DNA, 643 bp, Homo sapiens
ccaaattatgtgagcttcaggcgctaaaaaaaaaaaaaaaaaaaaaaaaaaaaaaaaaacagttttctccctggtgctatgtcagcagacaatttagatatggaaggaagggactgcccatcacccagaaagactggatctgagactggatgagactaaggaatgtcagtattttatgcacgtgccaggattgttgaaatgtacatatgagaagatgggtgtgtgtatgtgttgggaaataaaaaagatgattgtggtgaacactatcgcttgctaactcagcacccattgcccctcttttccttccaatattgttcagatgtctagttacccccttgcccggcccccaccaacaagcagtaaactggcttcatcccacaagccctggggtggatgctgatttgttaacaaggatgcatgtggcatttcctaggcaactgctatggttcaaaagggggcacataaattgacgttgtctatctcagagaagggaaggatttttattccatgcttcaggtggagttccctctcctcctagatgtgaacagaaatatttytccagttgtagctggcagtcaccacagcaccatgaaagggaactgcgttaggatgaatctgatactgtgaatagtagtatggacag

SEQ ID NO: 896786 - DNA, 613 bp, Homo sapiens
acatgttaggaatgtagatctcatgttgtgttcttaccatacacaaatataataataaacagagaccacacacataaaataatacaagaaagtttttgaaaattgtgaatatgtttagtaccttcattgtactaaatggtatcgcatgtatacatacgttcaaatttatcaaaatacatagattaagcatgtgcagttttttgtttataaattatacctcaataaacctaaaaaaatcctatgaccttggattagacaatggtttcttagatatgacagctaaagcacaagcagccaaaggaaaaaaatacataataaaacttcattaaaattataaaacttgtgtgcttcaaagaacattattgagaaagtgaaaataaaacccacataatggaataagatatttgctaattatatatctcacaaaggtctagtatccagtatatataaagaattcttacagctcaacaataaaaagataagtagcccrattaaaaaccgggcaaaggatttaaatagacatttctcctaagaagataaataaatggttaacaagcatgagaaaagatgctcaatatccatagtcattggagaaattcaaataaaaacaata

SEQ ID NO: 896787 - DNA, 628 bp, Homo sapiens
aagtcctgtattatatgatgcttctgtatcctcctgaaatcttaaagtataaattgtattatctgtaattgtagtaccatccccgtcctcaagaaattggttttattttttttaaccartaaaatcagctccactagcatttatggagtaattactaatgtagcaatactgctctgagagggaggaacacataggtagatatgagaagccttacagagcttatagtgagaaataacatggcacagtggtgagaatgtacacacaaacatagtctctaaatacagggatatgaaagtgctattttttaaactgccatttacacatcacaatgtattctaattgcttaataggtaaaaatacttataattttttcctaatattccaaactggaaagtgatgaacatatttaattctctctttttattttaattgatttattcaaaatttaagatactgtggggcaaactgagtggaacaagcttgaaaaccaaagtacttacgtaaaatttattgagtgcttactacgtgctaaccactagcatggcagattctggggataaaacagtgagcaaaaaacagcaaggatattgcactgatggagtttacagtgcaatggaacaaacaggta

SEQ ID NO: 896788 - DNA, 605 bp, Homo sapiens
cagtttcaaaagggaaacagaataaaagtttggaaaacttgcagcctgacaatgagatagaaaagaaaatcccatttcctgaagtgaaattcaaatcagctgyagaaatttgcacaagtaataagtagctgagtgttaatccccaagacaatgggggaaaatgtctccagggcatatcagaggtcttcagggcagcccctcccatcacaggctgggaggcctagaaggaaaagtggtttcatgggctggtcctagggtccccatgctgcttgcaccctagggacttagtgccctgtttcccagctgttccagccttggctgaaaggggccaaggtagctagcgcttgggctgtggcttcagaggatgcaagccccaagccttggcagcttccatatggtgttgagcctgcaagtgcacaaaagtcaagaattggggtttgagaacctttgcctagatttcagaggacgtatggaaatgcccagatgcccaggcagaagtttgctgcaggggtggggctctcatggagaatctctgatagagcagtgtggaagggaaatgtggggtcagagcccccacacagaattcctactggggcactgcctag

SEQ ID NO: 896789 - DNA, 600 bp, Homo sapiens
atacatgtagtgggtatcatgttgttgttttaatttgcagttccctaatgacatatgtggagcatctkttcatctacttatttaccatgtgtatatcttcattggtgggatatatctgtttaatcaaattgattgttttgttattgttggcttttaagaatttttaaattactttagataatactcctttatctgatacctcttgtgataggcatatctgaaggatgtgttgccatccttcaagataagaaatataaacaagaggctgggcttggtggctcacacctataatcccagcactttgggagtctgaggcaggtggatcacttgaggtcaagagttccaaaccagcctgaccaatgtggtgataccctgtctctaataaaaatgcaaaattagctgggcgtggtgatgcatgcctgtaattccagctacatgggaggcgaggcaggagaatcgcttgaacctgggaggtggaggttgcagtgagccaagattgtgccattgcactccaccctgggcaacaagagttaaactccatctcaaaagaaataaatacaagcaagaaagcaggctataggagaagatagtttcattata

SEQ ID NO: 896790 - DNA, 618 bp, Homo sapiens
ggaagcagaggtcagttcatgaagcttaaggaaagaagccatctctgtgacataaaagtgcaaggtaggggctggccatggtggctcacacctgtaatcccagcaytttgggaggccaaggtgggcagatcactggaatccaggaattcaagaccagcctgggcaatatgcgagaccccatctctacaaaatatgcaaaagttagctgggcatggtggcacatacctgtagtaccagctccttgggaggctaaggtgggaggattgcttgagcctgggaggcaagggttgcagtgagttgagattgcaccactatgctctggtctgtgcaacagagtgagaccctgtctcaaaaaaaaaaaattttaaggtggactaggggcaatatctcatgactgtaatcccagtgctttgagagtctaaggcaggagcatcacctgaggctaggagttcgagaccagcctaggcaatgtggcaagatcccatctccacaaaataaaattttaaaaaattagttgggtatggtggcacacacttgtagtcctagctactcgagaggctgaggtaggaggattacttaagcccaggagatcgaggccacagtgaactatgtgtggca

SEQ ID NO: 896791 - DNA, 622 bp, Homo sapiens
cctaaagatgtggccctatttatgtgctgacagactggttttaagctaagtctgcaaagctgaaggctggayttggcaccagagtaaaatcaccaagataatgattgcctctctagaaggcatcttggtatgcagccaatctgtctctcttggtgacacctgagttccctgagagcatgggtattcatcacttgtgcatgcattcactcagtcaatcattcattcacttactcatggcaatttattcattcattcattcaagaagtataatgagttttactttaaggctagaatgaactaaggtaactgcactttcttatctatattataatgtgtggactataaatgtttctaagtagaaaacgaatgcatcaaatgtcacattttcttcttttaatatggaagtatgtttttaaatacttatttttaaaggtctgaaaaaagaaagcacttccaaaatggtggagaaagggcctccaataattactcctccataaaagcaatgaaaacattggcaaaaaaaaaaaatcatcaaaatcaattttttgagagctctggaaattaaccaaaggcttacaaaaatgtaagaagcgtttattcaagaaatatcggtaagaacagt

SEQ ID NO: 896792 - DNA, 618 bp, Homo sapiens
acagccaagaagctcaatgacctccaagtaggataaactcagaagtccacaactacgtacattagagtcaaactattgaaagacaaagagaaattttttttaacttttaggttcrgggtacatgtgcaggtttgccatataggtaaattgtgtgtgatgggtttggtgtacagattatttcatcacccagctaataagcatagtacctgataagtagtttttctatcctcctcctcctcccaccttccaccctcaagtaggccccagtgtcttttattcacttctttgtgtccatatgtactcaatgtttagctcccacttataagtgagaacatgtggtatttggtgttcttgtgttagttttcttagcataatggcttccaggtccatccatgttgcttcaaaggacatgatctcactcctttttatggctgcctagtattccatggggtatatgtaccacattttctttatccaatccactgttgataggcacctagattgattccatgtctttgttattgtgaatagtgctacagtgagcatacacatgcatatgtctttatggtataatgatttatattcctttgggtgtatacccaataataggattgctga

SEQ ID NO: 896793 - DNA, 602 bp, Homo sapiens
aaagtccacagctagcattatcctaatagtgaaagacaatactttcctcttaagatcmgaaacaagaatgtctgcttcaattaccactcttcaatatcataccagaggttctagccaaggcaattttgtaagacaaagaaatagaaggcattgagattggaaaggaagaagtaaaactatctgtttgcagatgacatgtccttccatatagaaaaccctaagaaatccacacacatacaaaactattagagcaaataaataagtttagcaaggctacaggatacaaaatcaatatacaacaatcaattgtatttctgtacactagtaatgaccaatatgaaaaggaaattaagaaaacaatcccatttacaatagcatcaaaaataataaaatattcagaaatacattcaatgaaaagtacacaacttgcagaccgaaaactacaagacattgtcaaaataaattaaaagactaaataattggaaaggcaattcatgtgtatagaccagacgacataatatgaagatggcaatgcttccttaaataacctacagactcaatgcaacccctatccaaacctccagtggttcctttgtggaaat

SEQ ID NO: 896794 - DNA, 602 bp, Homo sapiens
aaagtccacagctagcattatcctaatagtgaaagacaatactttcctcttaagatcagaaacaagaatgtctgcttcaattaccactcttcaatatcrtaccagaggttctagccaaggcaattttgtaagacaaagaaatagaaggcattgagattggaaaggaagaagtaaaactatctgtttgcagatgacatgtccttccatatagaaaaccctaagaaatccacacacatacaaaactattagagcaaataaataagtttagcaaggctacaggatacaaaatcaatatacaacaatcaattgtatttctgtacactagtaatgaccaatatgaaaaggaaattaagaaaacaatcccatttacaatagcatcaaaaataataaaatattcagaaatacattcaatgaaaagtacacaacttgcagaccgaaaactacaagacattgtcaaaataaattaaaagactaaataattggaaaggcaattcatgtgtatagaccagacgacataatatgaagatggcaatgcttccttaaataacctacagactcaatgcaacccctatccaaacctccagtggttcctttgtggaaat

SEQ ID NO: 896795 - DNA, 602 bp, Homo sapiens
aaagtccacagctagcattatcctaatagtgaaagacaatactttcctcttaagatcagaaacaagaatgtctgcttcaattaccactcttcaatatcataccagaggttctagccaaggcaattttgtaagacaaagaaatagaaggcattgagattggaaaggaagaagtaaaactatctgtttgcagatgacatgtccttccatatagaaaaccctaagaaatccacacacatacaaaactattagagcaaataaataagtttagcaaggctacaggatacaaaatcaatatacaacaatcaattgtatttctgtacactagtaatgaccaatatgaaaaggaaattaagaaaacaatcccatttacaatagcatcaaaaataataaaatattcagaaatacattcaatgaaaagtacacaacttgcagaccgaaaactacaagacattgtcaaaataaattaaaagactaaataattggaaaggcaattcatgtgtatagaccagacgacataatatgaagatggcaatgcttccttaaataacctacagactcartgcaacccctatccaaacctccagtggttcctttgtggaaat

SEQ ID NO: 896796 - DNA, 578 bp, Homo sapiens
gtaaactatagtacatgattttgttcattagtgaagtatattaataaaagaaaaattgattctgatgacaggtcaaataagratctgtcactcattcacagatttttaaggaataacatagaagatatttctaaacaatgttacatttaacatggttttcaggatttttctaaaaaaattaagtctcattatactaacaaaaaatttaatataaactattgtaagttactttgaaagtttagtctaggccgggcgcagtggctcatgcctgtaatctcagcactttgggaggctgaggtaggtggatcatttgaggtcaggagttcaaaaccagcctggccaacatggtgaaactccatctctactaaaaatacaaaaattagccaggcgtggtggtgggtgcctgtaatcccagctacttgggaggctgaggcaggagaatctcttgagcttgggaggcggaagctgcagtgagccgagattgcaccagtgcactctagtctgggaaacagagcgagaccccatctcaaaaaaaaaaaagaaaaagaaagtttagactttagactattcctctttaa

SEQ ID NO: 896797 - DNA, 683 bp, Homo sapiens
tggaaatcaccatggtgagagccaaaatgtgtcccctaaaagctttctctttcttaccttttcttttatcatttmttgtccttcaaatttttctagctcccaatcccatattccctttcttatttcctagacttctggtttgaggtctagagagctattatgaagctctttatctagaaaaattgctttttattaacatggtagaatattgccctattacaaataaagactatatgaatcttcactacaaatcctaaagtaatgttcttcaaactatggatcaaaacccatttgtgggttgtgaaatcaattttagtaagttgtatccaggattttaaaaaatgaaattgtgtacaatagagtagatctgaatagaaaacatcacagtatttcactcataagtttttaaacaaaatttttttttctcagtaatgtgtaattcatggtcaggtctctttaaactaggtcaagacccaattgagatgcctgattcacatgatttcttctctttcactcacggaaaacaccactttctgccatatcctccacctagcctttggccttactggaagatgcagtaaggcatctacatgatggtacaaaactatgagctgagtccttcaaacttagaagtagatatgccaaagtaggacatgacaaaaaattttttgcaatacaataat

SEQ ID NO: 896798 - DNA, 591 bp, Homo sapiens
cagaactcaattatccaacaatctcattttattgataacaaatgctagaaaaagaaagtatcagaaatggctttgaaacaacgtttgcattgaatctacaaacatttttytggggatagcccataaaggcattaagcaaaaaaaaaaaaaaaaaaaaaaaaaaaaatttacttctatttcataaccaagtacaacagcttttgaaatttacatttcaaatacacagaacttagcaaacaaaacagaagaaaataagagggagcctgtgaacagacaaggaatgatcaatgaaactctacaataaagaggaagagaggggaaccagatggtagccaaagcaactcacattcctattaggagcttgtaggagaagctgtagatgccccactcaaacctcccagggctctgtcatttttatgttccccggcctggctcttgtctgcataaacctctctttgcctcagagctttcttttgtagttcaagcctacactgcaacccaggtgcatgacaggttaaaagtgccagagaattaatgccaccaggaagcagcctgcaatgaatgactggcagaattgatgtgtaaatatcc

SEQ ID NO: 896799 - DNA, 599 bp, Homo sapiens
gtgtagtaaaaaattatggatatgccaygggcaccataaagcagaaggcttgaaactgctgggcttgactttaagttccttgggaataggcattgtgtattagtactttatatctgcagcacccaaaacagtgcctgctacaagtgtgaggtgcgagaatgccaaacagatatccataaggagattgagggaaatttaataaatttaagaaataaaatggcaggtatgaaatgaatgaaagggcacatgtgcactgtagtgtcaagagaattatatgttaagtggcaaaattcgacctactggttcactatgcactacaacatccctaaatacctccctacttatataggataaaataagagaggggaaaagaataaagcttgactttcttattctttggcctgtgaatctctagactaaaatttcttgagtttggtgcaagtttacttcctcagattacattattttttcccaatacaaatttctattctcacttatattatgcatattgacaaaactgtgatcttattctgcaggaatatgtgaacgggagtaatttgaatatctcctaaatttttggctgcttttcttcctgcccc

SEQ ID NO: 896800 - DNA, 552 bp, Homo sapiens
aaattctaacctcagatatcctctccccttctgcccaaaccaaataatccagaagaagatagaagtaaaagtaagcacaaacatctttgtaagtatgaattgtaaagttatgaataatgatatctcagaacctccataaaattttagaatggtgtatatggcatgctgccagattactgacatgaaaaacctctttatctaccaaaatgtaaataataatagtttattgagggtctattatgtgccaagtgtaagcttaggtttggaattcgatgatgaattagatatgatctctttcgtgtaggagctctctgtacagaggtactgataggcactcaaaataagaaatagcaacataatgtagtcctaagatcactcatgggagtaccaatagaggagtcatgtgatggttaattttaggtgtcaacttgactgaattaagggatactcagatagctkgtaaagcattatttctgtgtatgtctgtgagggtgtttctgagagaggttgacatttgaatcagtagactgagtaagaaagatctgccctcac

SEQ ID NO: 896801 - DNA, 589 bp, Homo sapiens
cagagcctccattttctcatctgtcaaatggaagcatgagaattgtggcctcrctgggtggttatggtgctcatttggaatggagcagtgaagtccttagcacctaaatcccaataaacatgagcccttgttctgatcctttgtggaatctgcctttgtgcttctcttgcgcttctgttactttttatcctataatctatactcaggtagtgagaatcattgccatcccaccttgggatgtgtgtcttgccttcctacatcattcctgttgctgggagctgtttcttccacccagacaatccctctagttggagagaggttgtcccccacacattttcatcgctaaggaaaagggttctcaggagaaatggcagggaagtcctttaacaaaacatgtctgtatcaccccttcacccattctggctccccagaccatggctttagatttaggggcactcatgcaatctcaaggatatttgttcctagctgtgccccatcccagaacctgagcatggagatattcaagggcagcagtgacaaaactaacaaatcaaccacatctgctaatgaggggcgggaactgtgcctg

SEQ ID NO: 896802 - DNA, 509 bp, Homo sapiens
gaatttgatgaagtcatcagccagctctgtgctgttcctggatgggctggtgcttccggaccctgctgggcrgaaaggctgaggaaagctctcaatctgtgcaccaaaaagggtgtaatgactcagctaggaaccccaataaccaaagagggaaaacatggcactgcattccttcagtaaaaggcaactcttattctccttcgagtcatcctaggcctgaacaagctcttggaattataaagcctgattcctcaggtcagcataatgcgtctaaagaccacaggagaatttcctgatccaggaagcttggggtgggatggagggagtggtgtgtatgtgtgtgcacatgcgtttatgtgttttagggaggtagggatggaaagggtctgctgttactgagaatccacagtcttttggggaataggcttcttgcatctgtgatgtaatgaggtatatgtcccagaaggcttgagtcaacaggcccctccagggagcaccaggactggtac

SEQ ID NO: 896803 - DNA, 509 bp, Homo sapiens
gaatttgatgaagtcatcagccagctctgtgctgttcctggatgggctggtgcttccggaccctgctgggcggaaakgctgaggaaagctctcaatctgtgcaccaaaaagggtgtaatgactcagctaggaaccccaataaccaaagagggaaaacatggcactgcattccttcagtaaaaggcaactcttattctccttcgagtcatcctaggcctgaacaagctcttggaattataaagcctgattcctcaggtcagcataatgcgtctaaagaccacaggagaatttcctgatccaggaagcttggggtgggatggagggagtggtgtgtatgtgtgtgcacatgcgtttatgtgttttagggaggtagggatggaaagggtctgctgttactgagaatccacagtcttttggggaataggcttcttgcatctgtgatgtaatgaggtatatgtcccagaaggcttgagtcaacaggcccctccagggagcaccaggactggtac

SEQ ID NO: 896804 - DNA, 659 bp, Homo sapiens
aatatgttttccaattttcttgaatgtccttttacctcgaagctctctccatttcaaactagaccttgacattcactgcctcaggacataaaggttatggaagaaatgcagagaaaaaatcaatttaaagtctattttggaactagtggtaaagaaacaatttagagagaaaactttcagaagcctaggcattgagagtcagaacccaaagtcataaaaaattgatttggaagaatgcataatgatgtataagcaaattttcccacaccagaggaaataagagatcctctgaactggaggaaaacagagaatatttaagaagcaagagaggaagctctggttagtacttctcagaagtgattctgagaattcctcttcacaagctgtgtccctgagttggggtgggggaaatagaaactgaaaatagatttggggatctgaaagagagaagcacccatgctttatacttcaggtgaagtccacggtggtcatagaccttgaaaggtctctggtgccaccatagttcagcagcagtaccatggaaatggtggtgtggtgggtctatgatagagggcytgatacagttccagtagttttctgaggcccaagagagggaggggagggtatctaaatattttctatctgctattagtggagaa

SEQ ID NO: 896805 - DNA, 600 bp, Homo sapiens
tttctcctccgggattgttattaagcttgagcctgacctttttgcaccttcagaatgtaaatgttcttctgaatctctgttagytttatgtatatatgcacagcatcatgtttttagaatgatatgcttctgtatgtgtataagactaaagcaaaatagaatttgagatcaagaactgaaagaaattcattagcaatcttaaaacacgaataaatttaaaagatattgtaactcagtaaaggaatatttactagtgtaacagactaagcagacatgatttttaaaagtaaacaaatagttactagaaatatacacagttatgtttaaacctaaaatagaaggtgagttgattttctactcccaagatgcttagaccaaatggataagagaaaactagacagtaaaggatgtgataattatgatttgaaacagtggaggatctagacagaattaggaaaaaagagaagaaataaacctctgtttccaacagatggtgctgcatatcataaatattttgatgaatataatgaccccagggtgttctgggcccgtcaattaacactctaatgggagatttcaacaatccatatgacaggattt

SEQ ID NO: 896806 - DNA, 634 bp, Homo sapiens
aaaagagaagaaataaacctctgtttccaacagatggtgctgcatatcataaatattttgatgaatataatgaccccagggkgttctgggcccgtcaattaacactctaatgggagatttcaacaatccatatgacaggatttacagagagtgaccagtcatgattactaaaaaaaaaatctatgctatagcgagcataaaataggttcaaccacagaataataaatacaaaatatggcaaatatataatacacaatattattaattacaaaatattgctaaagaattcagatatcaagttagagaattagaaaccacatggcaataaatggatatatggatatcatgttccttgacactaccacactaacattaaaaagcaaaggaaggggtggaattcagacaacatacaggtcacagacaaaagatagtcattatttcaatatctgaaaatatcagtgaaatattcagtcattatctgaagtggatgtttgcagggtggaaaattagatggtaaaatccaaacaagagcttaacagctaaactgtggaagggtttcagaaaagtaaaacaatactgataaaactgggagagagagcatgggcgtaatgcacacatataagatgaattgttg

SEQ ID NO: 896807 - DNA, 540 bp, Homo sapiens
atcagcagcagaatggataaataaataatggcatagtcacacagtgaaatactacatagtcatggtagtgaatgaaccacatctacatacaacagcatgaatgcttctgaaacataatgtgaaatgaaagatgtyagccatgaatgcatatgtaccatatgatgacatttgtagaaaatttaataaggggcataactaatctatgatgtagtggttacccttgggggaggagagactgaatatggacttctgggtttctccttatattctgaatcttgatctgaagactggtttcatggtatgttcatgtcaaaaatatcaagttgtacactcctgatttgagtactttcctgcatgcttttacgctttcaaaaaatttacaagcaacaacaaacaaccccagcacaattgttaatgagcagcatactttccaggctctatgaaggaactaggaaaaatatgacaagctttagcctccagaaacttatattcaagtaggagagatgagtataaaaagcaaaaccatatcattttatgtaa

SEQ ID NO: 896808 - DNA, 542 bp, Homo sapiens
aagtagtaattatttttaatgggcaaattctactcatgccacattgtgtgtaatactagsaaactaacatatgtgagacacgggataaagatgaacaaagcaatatcctattctaaaaaaaagtgtaagtatgcactaaattgtgaaacaagttaaagaaatacatagatatcataaaagaaatattaaaatatacctagatatgcctacacatactttcctgagatctaagacaaatgaaagtacctctgtctttttgtcttgccacttttaaatccctttcaagaagtcaggactttggagagcaggtgtgaaaagactaatggggttttgggtgaggattagaagtgctagtgacaggagtttgttggaaccaagaaggatgaggaagggaatatatatttggccccccaaatttaaaaacaattataagttgataaaaagaaaagccaaactgaagataaaatatagaagccagtaaacataaagctagcagaaaggccagatgagataattctgcagtgatccattccagatgaggt

SEQ ID NO: 896809 - DNA, 482 bp, Homo sapiens
gggtccaaatactgttatgaacctgaaatccatcttgtttttcaacaagagtccagtggggcttctttgataaccactgagcatcaacacaaatcattaaacactaatggattaagactcagaaargtccagcagagaaagaaagcaagtctagaagaatgtgtagagccatgtgcccggagaaagtgtgtgtggcagcccctcccaggctttaatcagcactactggcctgtgcttccatgagtaataaaactcagtttaagagaaaaaagaggtgtaatgaaaccaaaacagaagcagacactggagcatgcctacacacacacacacacacacacacacacacacacacacacacacacaactctaccattaaggaagaagaaagctacagtatacccatttttccagtatagatgccagattgtttttatttatcttggaaataaacttactgtgtgcctgagggattttgttttact

SEQ ID NO: 896810 - DNA, 605 bp, Homo sapiens
gacaggcatgtgacacatattaaaatacatcatcttaatcacttgattgtgttataaagctggattaaaatgtgatccaataaccttttattaaaatgttctataaatcattttgcccaaaacctctttttaaattgtaacttcaacagtattccactagatggcactaaaagcctgaagaaaaacagggtaggctttaaaagataagtttatttaaaatgcacacagaaactgatgaaccggctatctttgacggattattattgttgttctagtgggattttaggagaacgtgccatttcctcatgtaatcagacatctggccattcattataaacttacgtggcatgtggttttagggtatctgtgatcttgaaataagttttgaatcctgtttcatttggaaagagataaaatctatttctgttcagtgattaatgacttttgtaatactgactgaatattgaaaacttcatgttttgttcttacttctagctctgtttagattttggtcactaaacgcttctttttttttttgctttcagttagagccctaacgtgrtgttaactttggtaagattatagcttccgttttccctataaca

SEQ ID NO: 896811 - DNA, 588 bp, Homo sapiens
cctaagcattgctttagctgcatttcataagttttggtatgttgtgttttcattttaattcatctaaaagtattttgtttttatttttttgagatagggtcttgctctgtcacccagattggacctcagtggtatgatcacagctcactgaagcctcaaccttttcccaggctcaagtgatcctcctacctcagcctttcgaatagctgggactctaggcatgtaccaccatgcccagctaatttttttttttttttttttttttttttttttttgtagagatgggatctccttatgtgacccaggctggtctcaacctcttgggctcaagtgattctcctgtctcaccctcccaaagtgctgggattacaggtatgagtcatcaggcctggccctcaaagtattttccaattgtctttttggtgtcttctttgacgcattcattatttaagagtatgttgtttaatttccacttatttgkgaaattctcaaatatccttcttttactgatttctaatttcaatccattgtggtcagagatcatattttgtattatttcaatcctttttaatggcctagcacgtgacc

SEQ ID NO: 896812 - DNA, 540 bp, Homo sapiens
ctgacatggggttccaaacagtgggcatccttgcctcaagtgaggaacaactctaccttgtgactttttttgcccaagggctgcccatgattcaggccaagagtgagmtttagctaagacctcatcttttcttggctcttgccgcttatcttccctgagtctgtcactccataggatttttgctgaagagcagtcactcaaaaatcacatgcacctgaacccctttctcagactctaggtttaggaaacaaaaccaaagatattatttcacaaagtagtaataagaactgaggtaaatggtttttaaaatctctctatcactctttccattcctcttgcctgcatccccgactctttcctttgggattgctcctctgttacacatggccctggtggtactgtcaacaagccttacctcacccctctccccacactgctcactggtgctcagataatcatgcagaaataggaaaatggaattctaagtcccttaagcaaggcataaaggtgaaaaacattatgggaggtaaaaccagaaga

SEQ ID NO: 896813 - DNA, 594 bp, Homo sapiens
aatggagacacacgtggtggctcatgcctgtcattccaacacttttggaggcccaggcaggaggaatgcctgaggccagcagtttgagaccaccctgggcaacatagccagatcctatatctacaaattaaaaaaaaaattagctgggtgtggtggtgcatgtctgcagtcctagctactcaggaggctgaggatcactggaacccaggagttcagggttgcagtgagctatgatcgcactactgcactccagcctgggcaacacagcaagacccaacctctaaaaaataaaaataaaaagtaaaaagaagataataaccaaaatttttccaaaactgaggaaggtaaaatggaaagggtaaatatgtggataaatataaatgtgtatttcctaaatacctactgtaaaaaaatatggtaataaaataatgtaagatttaatatatatatatatatacacatatatatrtaagtatgttttaggatgtgggggaataaatggttctaacactattggagaagtagtaaaagttacaatttgcattaagctgtaataaaccaaaggtaactgccaaaagaatagaaatatatata

SEQ ID NO: 896814 - DNA, 450 bp, Homo sapiens
gcgcctgaggctcatgcatttggctaatgagctgcggtttctcttcaggtcggratggatcttgaaggggaccgcaatggaggagcaaagaagaagaacttttttaaactgaacaataaaaggtaactagcttgtttcattttcatagtttacatagttgcgagatttgagtaatttatttctagcctccagctctgaaataaatgacatgttgttgtttttaattatttttaagaaacgcaagctagcctttggaatcaatatccctgcttagagcagaagtttgttggctgagtggagcacagcatatgcattttccctgtcttttttgttctttcttttaatgatacataatattttacatatttatgaaatggggtacatggaagcgttttttacatgcccggaatgtgtaatgatcaagtccgggtatttgaaggatacatcacc

SEQ ID NO: 896815 - DNA, 655 bp, Homo sapiens
gatgtaagattttcgtatagggtatgttaatggagatgcaaaataaattggtttsatttagcttattttcaggagaatgctgatcataacttgctatctatattactaatctacagccaccattcctgacttagatttcaattcttctaatgaattatgttgccagtgatccattacctacacaagcacctctcccatctgcatagaggaaaccaatcacatagaatgctgtctttaatggctctgaaatttggcaggttttttaggtcaaagtcagttgctatcaataaaagttagcaatggattatttattactatgcaaattttaggtcatttaggttagtccattgcaaattttagttcaaaatccattactaacaataaaaggtagcaatggattatttattactatgatttcaaatatgtcatatgccattattcccctgtgttaaacagatgaaaatctagaattcgaaaaccttattgtaactctttatttcattttctggttgcacagtggtttttttagaagcttttctttaatcacacttggaatcagacatgtatcatatatgtgtggttggttgatgacctcagtgctgtgatcttggctcactgcaacctctgcctagttaatgacctcttatttacctgg

SEQ ID NO: 896816 - DNA, 655 bp, Homo sapiens
gatgtaagattttcgtatagggtatgttaatggagatgcaaaataaattggtttgatttagcttattttcaggagaatgctgatcataacttgctatctatattactaatctacagccaccattcctgacttagatttcaattcttctaatgaattatgttgccagtgatccattacctacacaagcacctctcccatctgcatagaggaaaccaatcacatagaatgctgtctttaatggctctgaaatttggcaggttttttaggtcaaagtcagttgctatcaataaaagttagcaatggattatttattactatgcaaattttaggtcatttaggttagtccattgcaaattttagttcaaaatccattactaacaataaaaggtagcaatggattatttattactatgatttcaaatatgtcatatgccattattcccctgtgttaaacagatgaaaatctagaattcgaaaaccttattgtaactctttatttcattttctggttgcacagtggtttttttagaagcttttctttaatcacacttggaatcagacatgtatcatataygtgtggttggttgatgacctcagtgctgtgatcttggctcactgcaacctctgcctagttaatgacctcttatttacctgg

SEQ ID NO: 896817 - DNA, 655 bp, Homo sapiens
gatgtaagattttcgtatagggtatgttaatggagatgcaaaataaattggtttgatttagcttattttcaggagaatgctgatcataacttgctatctatattactaatctacagccaccattcctgacttagatttcaattcttctaatgaattatgttgccagtgatccattacctacacaagcacctctcccatctgcatagaggaaaccaatcacatagaatgctgtctttaatggctctgaaatttggcaggttttttaggtcaaagtcagttgctatcaataaaagttagcaatggattatttattactatgcaaattttaggtcatttaggttagtccattgcaaattttagttcaaaatccattactaacaataaaaggtagcaatggattatttattactatgatttcaaatatgtcatatgccattattcccctgtgttaaacagatgaaaatctagaattcgaaaaccttattgtaactctttatttcattttctggttgcacagtggtttttttagaagcttttctttaatcacacttggaatcagacatgtatcatatatrtgtggttggttgatgacctcagtgctgtgatcttggctcactgcaacctctgcctagttaatgacctcttatttacctgg

SEQ ID NO: 896818 - DNA, 673 bp, Homo sapiens
gacagacaactcttatccataaaatacaattaactcttaaaaacccataagaagaaaacaatttaaaaatgggcttgcaatgggatgatttttaactatagattacatttctttagcaaaaatatcacatatycagatatttccatccttttcgtgttagttttggtgagtaattttttaaaagaaatttcccatttcttctaaattttcaaatttatataatagatgtgaagttattcataatatcctcttttaggatttttaatgtctgtgagatatacacacttggcctcttcttcattcctcatatcggtaatttatattatcttttgatcttcttgaatagtcttgctagaagcttatcaactgcattaatctttttaaaaacacttttagtttggttgattttcttatatatttgtttcaattttattgaatttttactgttatttctttccttctactttgactttaatgtatttcttttttcatagcttcttgagatgaaagttttggtaaccaatttccagcctctattcttttttaaaatacacaaaagcctatttaagcctattcctctaagcacaagtttttatatgttatattttcattatcagtactttccaaatatttttcaatttcaattgtgatttattttttcatccatgggtta

SEQ ID NO: 896819 - DNA, 613 bp, Homo sapiens
ttgttgttggaaccacagcctgcaaagtaagccagtatttgtgtgttaaactaaaatagagtgactgtctcttaaaacagaagatttaagtaggacccagagactcctaacataatagccaaaatgtccagcatgcaatcaaaaattacctattggccaggcatggtggctcacgcctgtctgtaatcctggcactttgagaggccaagacagggagatcgcttgagctcaggagtttgaggccagcctgggcaacatagtgaaacactgtgtgtataaaaaatacaaaaattagctaggcatggtggcatcacctgtagtcccaactacttgggaagctgaggtgggaggtgggaggatggcctgagcccagaagatggaggttgcggtgagctatgatcacaccactgcaccccagtctgggcaacagatgaatactctatttcaaatatatatatatatgtatatatgtatgtatgtatgtgtgtgtgtgtgtatatatatatatatatatakagagagagagagagagagagagagagagagacatcataccaagaaccaggaattcaaaacttgaatgagaaaagacaattatctgatagtaacatgc

SEQ ID NO: 896820 - DNA, 509 bp, Homo sapiens
ccattattctcaccatccaactggcgcacacacacgcgcgcgcacacacacacacacacacacacacactgagagagagtgaaagagaaagagagaggcgctatgtggggttgaataggtcacttgaacctgaagtaaggtcgactttgtatgttctttcacatattgtgtgagtgcttgactggctaatgactgcaccagtttattttggactatactaccacatccctccatggtgaacaacattatagattacaaagaagaggaccggtaaaatatagttgatgcaggaggagggagaaatctaggctggactcattttaaacaaattatcttaattatatctcttaagagtgttattcattctaatattggaaactcataatagaatcccaatatgaacaatttaatttgtttcatatgcttacagtaattgtaaaatggatggtgtwtagtaatttcttggtacagtaggtaaatcacttgtaactaatattttattatcttca

SEQ ID NO: 896821 - DNA, 627 bp, Homo sapiens
gaacagcacaggaaagacctgctttcataattcaataccttccactgcgtccctcccctaatacacygaaattcaagatgagatttgggtggggacacagccaaaccatatcagttttgtacagaccaaaggaaactatggagtttagtgagatagtgaggtaacagaaaagtctcctttagctcatcctacctcccactgaaagacccatatatcccctttttgttaatgctctgcatgcgaatgctaaaaggtgaataatatgttagggaagaaaaaagaaaaatggaaagaactaacattggctgagcacctggtacaggtcacaccaaggaactgtgaagatctgtagcagacctcacaataacctgtaagggagatggtgttatctctatgatagaggaaacgaaaataaacatcatgaagtaaaataacttgtaagttactatgaattgtaagtttacactactgttaggtagtagatacaggattcaaactcgggtctttttgcattctaagtttatatatagatattatctttagtgctgtagattaaataatttatcaattatttgctaaattagcaaatatatggaattactggaattagctacctagcaaaaccca

SEQ ID NO: 896822 - DNA, 670 bp, Homo sapiens
gaatgatttatattttgggggttgtatgcccagtaatgggatttctgggtcaaataatagttctgttttcagttctttaagaaatctccaaactgctttccatagtggctgaactaatttacattcccaccagcagtgtctaagtgttcccttttctctgcaagccagcatctgtaattttttaactttttaatagtagccattctgaatggtgtgggatggtatctcattgcagttttgatttgcatttctctaatggttagtgatgctgagcattttttatatgcttgttggccatatgtcttcttttgagaagtgtcttgaactgtacactttaaataggtgaattatatagaatgtacattgtatctcaataaggtttctaagaaaaacgtggggaaattgggaggtgcatggtcaaatacattgagttatcttaaatactatatccacccttggaaaatttttgaaggctataagatatctgccttaaaaatataacttttaatatttatgtaacttgctatagttggaatatttgtcccttccaaaatgcatgatgaaatttaaccccgagtgtagaaatattgaaaggaagcgcatttaagaggtgatagagtcatgagggctctgcccccrtgagttaatggattaacgagttctcatgcaa

SEQ ID NO: 896823 - DNA, 580 bp, Homo sapiens
aaaatgatctgtattcacattcattrtattttttatttagtaaactatatttttcagattcctaaatatttaataacaataataatgtaaatattttaatgcacacgctcttgtcttgtatggattttcattgacaaattggcactgtgtactaaaaatcccttagatatataaaacataaacttagtgatcagtaaactatcaaaataatacatattttaaataaggatagtgatgaaagaagcttaagctgttattttgttcaaggtagactattaagtaattcttttctcaagtaatatgtctctgtaacaggaattagctcacaggtggctcagtaaacagaaaaatgatgttagtataaagaatagttttcttgtcacattactatttcatgtcacatatagcatcagcaaaaggcaaagtattctaagtgtaactaccagtaaaacagaatatagtgctgtactcaatgcctggccatttggcattctttctctctactcagtttggtcacatgatttgtcttggagaaatttgtatttggatttttcctgattttgcgcactctgcatttgtc

SEQ ID NO: 896824 - DNA, 580 bp, Homo sapiens
aaaatgatctgtattcacattcattatattttttatttagtaaactatatttttcagattcctaaatatttaataacaataataatgtaaatattttaatgcacacgctcttgtcttgtatggattttcattgacaaattggcactgtgtactaaaaatcccttagatatataaaacataaacttagtgatcagtaaactatcaaaataatacatattttaaataaggatagtgatgaaagaagcttaagctgttattttgttcaaggtagactattaagtaattcttttctcaagtaatatgtctctgtaacaggaattagctcacaggtggctcagtaaacagaaaaatgatgttagtataaagaatagttttcttgtcacattactatttcatgtcacatatagcatcagcaaaaggcaaagtattctaagtgtaactaccagyaaaacagaatatagtgctgtactcaatgcctggccatttggcattctttctctctactcagtttggtcacatgatttgtcttggagaaatttgtatttggatttttcctgattttgcgcactctgcatttgtc

SEQ ID NO: 896825 - DNA, 325 bp, Homo sapiens
acttctgacctcaagtgatccaccagctcggcatcccaaagtgctgggcttacaggtgtgagccaccacacccagccccaacttatttattttaaagatgattttatatcatcacwgtaaatagaaaattacaattaaaaacaaattataactttaaaacttattaaattgtaaccagatactgttgtctaccaaaggttctaagccgaagtctactttcagtattataaaggacaagtggcaaatatttaagagaggttagcagaatatgccaaaaatttaagacataaaaaaaaaacaagtattatttatgagttcaatacaa

SEQ ID NO: 896826 - DNA, 616 bp, Homo sapiens
gttgccttttttaaaaaaaatcctactttagctccctggaaaccatttatctattctctatttctataaatgccgtgtcaaacagtatgtgatattttgggactggctcttttcactcaacataatcctctacaggttaatccaggttgttgcatggtatgggtatttaaccattcatttcttgaaggacatctgtgttgtttgtggctgttatgaacaaagctgctgtacacatttgtatacagattttagtgtgaatacacattttcaattctctagaataaatgcccaggagtgcaattggtggatcatatggtagttgtaagtttatatttttaagaaactgccaagctattttccagagtacctctatcattttatattcccatgagcaatgcataggtgatttggtttctacacaccctgggcagcatttggtgttgtcactactttatttttagtcattgtaataggaatgtagtgacacctcattatagtcttaatatgcaactctytaatggctaataatgttgaaaacattttttttcaagacagtgtatcactctttcgtctaggctggagagaattggcatgatcacagctcactgcagccttg

SEQ ID NO: 896827 - DNA, 595 bp, Homo sapiens
tggaatggagtggaagaagcaatagacttacaaaggaatagttgtaaaatcacagggtaagttcagattatggagaattgtaagtcatattgattatattataaaccaattgctagtttttcaaatctaagaatctcactttcaatagaatgtgctcttctcttgttttcctttatgatcagtggtcactgatccagcctcattcttcctagtccccgttgtaaccaacaatatttttcgaaacagaaaaaaaggatggttcgtttttctcatgttgcattctagtaaaactgcttggatttctccaagagatataaactatttgtacctttggtctttctggtcttttacgtgtttgataaattgataaatattcaaagagtaccaactacatgtctgacttgtttgaagcaatagacacaatgattataaaaagactggcactagcttatactccagttgagtaaaaggtgggtaaattaaaaataataagctagtttcagagaagtataagtgctctaawatattaataaataagacagggtactaagttggagaaaaaagtagaatgagattgaaaaggacaaatctggat

SEQ ID NO: 896828 - DNA, 632 bp, Homo sapiens
acctctttgctgatccattatttagggatgtataatgataaggataggctctgaagacagtatacctagatccaaatcctggttctaccacttattaactgtggaccccaggcaaattgcctaacttacctgtgtttcagaatctttgtctataggctggtgataaaaaataatatcacttacttcaaaggattattgcaaaattaatacagaaaaaaagtaccctggacatataatcactcaatagatacggtttattactttgaatattttcttctctttaaatagacttgctttttaataggagtagcctgatcctaagcagtatatctgtaaaattatgggcttgatataacagccccttttagtctttttgtgctgctgtaacaaaataccacagactgggtaattcacaaacaatagaaatttatttcccatagttctggcggctgggaagcccaagataaggtgccaacaggattgctgactgggaaggctgttgtttgctttyaagatggtgccttattgctgcatcctttggatgggataaatgcagtgtcctcacatggaagaagggatggaagggcaggagagtgctcccttcaaccttgagcacttttctaagggtgcta

SEQ ID NO: 896829 - DNA, 552 bp, Homo sapiens
cccagtgattcaggttgtaaagtctacagttcaattacttcagattctcctcacaagatcctcattctttctttggtaggttgtgcccacagaaaatgtcctaagaactcaagtttctcttctgagataaagtcctacaggtcaaaacatctgagacttagaatcaatcaccagctcttaattttttaaaagatcaagaagcatttacggatcacccaactgttttactataccctgtggggtggatcctgtcagctggggccaccgataccatcagtgcccactcctatcccctcatcttactactaaagagcaaccttcagacttccgatggccagcacctgcattgctttgcctgcaggcatcctcaggccaaagcccatctgccaggtcgtgagcaggacagagtaacagggatttcaatccccagcagccctcaaccaatgattggtaaaagtgagataggaccagtcyatatttttcaatagatcttgaagtcaatccaccaggattaagagctggctgcccatggtggtagccaaattgacaaat

SEQ ID NO: 896830 - DNA, 648 bp, Homo sapiens
aatgtcactcagtggtaccacttcttccagtcagtgttgctattgtctgttctctccaggacttatttctacattttacatcaatggttctccaactgtgtttcatggtctaccagcatcccttaggaacatgttaaaaatagaaattccctggccttacccctgacctactgaattagaaactcagtgggtgagacccataatctgcatttttaacaagcgcttcaagtgggggtaggggaaatgaaaagaggttggtaatgggtacaaaaatacagttaggcagaaggaataagttctagtgtttgatacaacagtaagatgactatagttaacaatgatttattacatattttaaaatagctggaagagaagatttggaatgttccaaacccaaagaaataataaatatttggagtgaataccctaattatcctgatttgatcattatacattatatgcatatataaaaaatcacagataccccacagatctatacaattattgtgtgtaaatataaaagatcatracaacaaaaccaaaatcaccttcaggtgattcagatccacactggagcttgggaagcaccattcttgatgataaactcagcttcccttcttctgtgtggatgtccctgatgacctgcgc

SEQ ID NO: 896831 - DNA, 648 bp, Homo sapiens
aatgtcactcagtggtaccacttcttccagtcagtgttgctattgtctgttctctccaggacttatttctacattttacatcaatggttctccaactgtgtttcatggtctaccagcatcccttaggaacatgttaaaaatagaaattccctggccttacccctgacctactgaattagaaactcagtgggtgagacccataatctgcatttttaacaagcgcttcaagtgggggtaggggaaatgaaaagaggttggtaatgggtacaaaaatacagttaggcagaaggaataagttctagtgtttgatacaacagtaagatgactatagttaacaatgatttattacatattttaaaatagctggaagagaagatttggaatgttccaaacccaaagaaataataaatatttggagtgaataccctaattatcctgatttgatcattatacattatatgcatatataaaaaatcacagataccccacagatctatacaattattgtgtgtaaatataaaagatcataacaacaaaaccaaaatcaccttcaggtgattcagatccacactggagcttgggaagcaccatycttgatgataaactcagcttcccttcttctgtgtggatgtccctgatgacctgcgc

SEQ ID NO: 896832 - DNA, 474 bp, Homo sapiens
acattcactttgcatccccaagtctagctcctgggagatgcttaatacaggtgtgctgaacctatttgtcacttaaatgttcattatctcaggatcttacaaagggcttcttttcctgaaatccagcaaggaggagttttagtccgcatgtgtctgattacccaaagaaatgtttccttccgcttgaaggcaaagccacagtctttctttttttcttttttctttttttgagacggagtctcaggatctcagctcactgcaagctccccctcccaggttcctgccattctcctgtctcaacctcccaagtggctatgactacaggcgcctgccaccgcgcccagctaatcttttatatttttagtagacacgcggtttcaccgtgttagccaggatggtcttgatctcctgacctcatgatccgcccrcctcggcctcccaaagtgctgggattacaggcgtgagccactgtgc

SEQ ID NO: 896833 - DNA, 516 bp, Homo sapiens
ccaaggcaggagaactgcttgagcccaggaggtgcgggttgcagtgagccaagatcgcaccattgtactccagcctgggggcaagagctagacttcatctcaaaaaaaaaaaaagaaaaaagttacacacaactctccccacttccttttttcttacaaagaggtggtgatgaaccaggtttgctcatgcaggtgacaatactcttgaaaatggtggcagagagccagcgtggtggctcacacctgtaatcccagcactttgggaggctgaggcaggtggatcaccagaggtcaggagttcaagaccagcctgaccaacatggagaaaccccatctctaccaaaaatacaaaattagctgggcatggtggcacatgcctgtaatcccagctactagggaggctgaggcgggagaatcacttgaacccaggaggcagaggttgcggtgagccgagatcgccccatcgcactccagcctsggcaacaagagtgaaactctgtctcaaaaaaaaaaaag

SEQ ID NO: 896834 - DNA, 613 bp, Homo sapiens
tttgaaaaagtcagagactatcacaacaaaaaagaaacaagatacacaaatagtcaccccctaagttttgttaagaataagacaatcctgcccctcacgcctggctcagtcaccagcaggaggagggcaccctccacagattgcaggagaaggggaaggactcctcctttccctaggtgcacctccactgctgccaccaaggcctggtacagtacccgcaggttcctccccatccccaggtcgggctgggccctgcagcgctcctactcccccttcccagcccccagacttaatgctgataccaccactagcaccgatgccaatacaaccgctgtcgccctcaatgcagcagcccaccctacaaggctcctaccaccttgcccccgcgggcaccctcctaccactccagtcgagctgcagtctccgtcgctgccaccaatctcgtgagaccagctgcagagccatatgcaggctccagtttaccacaggtgactcttccttgtcctcctcctccatcctggcttggagcagctgggagggcaaarccagaaaagcctagaatgggatgcagagagtggtagccttagagcctcaccttgtcacgctggccact

SEQ ID NO: 896835 - DNA, 592 bp, Homo sapiens
gtctagtgatgatttaatgctttaagcctctgagatcagggccaaaaataaaatggtggggaaatcagacacagcgctagataccagcaatatatttagggaacaggagcatttgttctgcccattttcaagtttccattttcttttctttatgaccttctggcacgtggttgagacatggaagcttccagtagattacagggtggaataaaggtgtttccataagtaacactgcaaatataattcattttactattgatcactgggaagatggcagtgaacagaacagacaaaacatccctgccctcttgaagctggcattccagtggggtggagggtttgggccaaagaatgacagaagatgaaagggcatttgtcctctccatgtttttctctaataagaggccctaggcgaagttctgctgatgattgtgtaaactgagcctcttgcacaatccyagtgcaaatcacactgtggacgatgtcagtggccctccctagagtcatccatcacctaacctgtttgaccataagctgcagtcctgaagatacagggcaggagctagtgttgggttacattgagatgaatacc

SEQ ID NO: 896836 - DNA, 602 bp, Homo sapiens
caaagccaactttctcccttggagttacaattgtggggggcaggatttgcgcatttaagcaaagtagcatcatgccaagagctgtaatttatttcaaaactatgaagactccattacycttggtgaattttagaaatttcctttaaggggatcatttgtttgctattatactgcatgacaccttttgtgtgtgtgtgtgtgtgtgtgtgtgtgtatttagtcttatagtttctcatcctattttttagtatattttcatatgtattaaaagagatttgcaaagtgagtcaaatccatttttattttttaggacgtttttcagaattaaatatgtattcttaatgaattttttaaacatacacatacatataactagatactgtattaataatttaaagggaagagtaattataagagaagtttatttggattccattaaaatcatgtgtgtgagatgtgctatatcccaccaactcttcatacaagaatgctatggaataaagtagtagggaaagcctacctgtggtccagtgagatttctactggatttctcacaatcttagaatagtgctagcattcttgcaaattttgagagtggccag

SEQ ID NO: 896837 - DNA, 532 bp, Homo sapiens
cttgtgctgtggttttcagctccagcaggtcatttaaggtcttctccacattgtttattctagttagccatttgtytaaccttttttcaaggtttttaacttccttgctataggttggaacatgatcctttagcttggagaagtttgttattaccaaccttctgaagcctacttctgtcaactcatcaatctcattctctatccagttttgttcctttgctggccagtagctgtgatcctttggaggaaaagaggcactctggcttttggaattttcagcttttcttctctggtttctccccatctttgtggtttcatctacctttggtctttgatgatggtgacctacagatggggttttggtgtagatgtgctttttgttgacgctgatgctattcctttctgtttgttagttttccttctaacagtcgggcctctcagctgcaggtctgttggagttagctggaggtccactccagaccctgtttgcctgggtgtcaccagcagaggatgcagaacagcaaatatttct

SEQ ID NO: 896838 - DNA, 598 bp, Homo sapiens
catccaatagtcaagtcctagaatcagggagtccaagagcctgcttgctgctctaagcacctgtggctgagctggtacctaaggtgcaagacaaagtcccctttacttttccctctgcttttctcaagcagaaggagtcttgccctatagctcccccaactggtaatgtactgagtctcacctgaagccagcaagtccaaggctcacccaaggccctcaacatagtacctgggtatggctgttggttatccagggcccaaaggctcttcagttagcaggtgatgaatactgcaaggactgagttcttctcttcaaggcagtgggttccctcctggcccagagtgtgtctagaaatgttgtccagtagctagggcctggaaaaggggcctcatgactctgcctggtaccctattctgctctagctgagctggtatccaagatgcaagacaaagtcctccccactcttccctctcctcccctcaagcaaaatgaaggggtctcttttcgagtgggtgagctgtgcagccagcagttaggggaggggtgatgccagcacttcctyagccaccccagctgttgtctcagtagcttatgtgtc

SEQ ID NO: 896839 - DNA, 650 bp, Homo sapiens
ttttttttttttttgagaccaggtttcactcttgttgcccaggctggagtgtaatggtgcgatctcagctcactgcaacatcygcctcccaggttcaagtgattctcctgtctcagtctccctagtagctgggattacaggcgcccacgaccacgcccggctaatttttgtatttttagtagggacggggtttcatcatattggtcaggctggtctcaaactcctgaccttgggtgatccgcccacctcagcctcccaaagtggtgggactacaagcatgagccaccgcgcctggcctccttgaagattttaatatcttcctgagtgtcctgaaatttcacaatgctatgttgggtgtgggtctattttcttgcattgtggtcggcattcagcaccacattcagtttccaatttcagtcaggaaactcatgtcttctagttctgggaaatgtgcttgaattactttgttgatgatttcctcctttcagttttctctgtttcctcttttgaatactcgtattcaaatactgtacttcctgtactgatcctctaattattttatcttacttattttcccctgttttctgtctcttttctttctcttctaatttctgagatgtttcctcaacattaccttccagccattctat

SEQ ID NO: 896840 - DNA, 600 bp, Homo sapiens
tccgtggagctgcttttaaactcactcatgttgtttgcagaattcattaccttgtgtctgtaggactgaggagcctatgcttaagggagagggaggcagggaagactcacaaagsaggtagcattgaggctgtaccactcttcccaggtagataggaagagggcacttcaggaaaagtaaacagtagcacaagggcatagcatacaacgtattagtatcagacatacgaatgtctgatagttcagcattactaacactcaaagtttcaagacacagtggccaggtggtaagtctgatcaagtaggcagaggccagattatgaaaggattgcatgccagattaacagcttgaaatggggaaccactgaagcaatttgaggtttttgttttgttttgttcaattaatttcttcttaattgacaaaaattgtatatatttattatgtataacatgatgctttgaaatatgtatacaatgtggaatggctaaattgagctaattaacatatgcattaactcacatatttttgtggggagaacatttaaaatcgactctcttagagatttttaagaacctatgttaatgactatagccaccatgt

SEQ ID NO: 896841 - DNA, 672 bp, Homo sapiens
atcctcaggtgccaagggaagaacctggtaggaggtgattggatcttgggggtggtttcccccatgctattctcatgatagttgtcacaagagctgatggttttaaagtgtggtacttcctgaygctcgctctcgctctctcgctttctgtctctctctctctctctcttgcagtctctctctctctgtttcctgccacatgtaagatgtgccttgcttccccttcaccttctaccatgattgtaagtttcctgaggcctccccagccatgcagaactatgagtcaattaaacctcctttctttataaatactcagtctctggtggtattcttcatagcagtgtgaaaacggactaatacagagaattggtaccacggtagtgtagtactgctataaagataacttgagaatgtggaagcaactttggaactggataacaggcagaggttggaacagtttgtaaggctcagatgaagacaagaggatgaatgaaagtttggaacttcctagagacttgttgaattgttttgaccaaaatgctaatagtgatatagacaatgaagtccaggctgagatggtctcagatggaaatgaggaacctattggcagctggagtaaaggtcactcttactatgctttagcaaagagactggcagcatttttcacctgct

SEQ ID NO: 896842 - DNA, 647 bp, Homo sapiens
ttaaaagtgatcatgggtcttaaatggtcagacaaaacgatatgcttttattgtttaacatttggtagaacaaaggtcattctctttttcacaatatattttccatatgaaaagggcaaagagttattattgtgttaacataataatatatattgatatgaatatggctatatagcaagctgcacttaaaactgcttttccttttctaattaaaacatttaaaatcaaaccccaaatatttttgttttataattagactttggcaattttatttctgcacttcttataaaagttttttttgcccaatattttagtgtggagaataaatagagtatgttccaaagtgaaatgattaaaagtgtgagatttatcaattagtttgtagatattataaaagcaacacaatattcgattaagaaaaacatgttactaaaaagcttttattgagtcgccagcagttagtatcacagatgaactagctgcagtttttgcatacaaataacctgtaatttgaggtatgagataaagaaaaaaaatttttstggggggggcgggtaatacaatgccagagcatctcagaatgctgagtcagcctctttagcacatacttttaaaaacaagtgtggcttgtggaaagccacattatg

SEQ ID NO: 896843 - DNA, 628 bp, Homo sapiens
cggcacattcccagatatgatagctacaagaacaggcccccttgcttgagaaaaacagagagaggagtaaagaggactttgtcttgaacttagcagctcaactacagtagagaagagcaccaartgggcattggggtcccccgttccaggccttggctcttgtacagcatctctggacctaccttgggccagaggggagcccactgccctaaagagtgagtcccaggcctggcagcattcaccacaagctgaccaaagagcccttaggccttaagtgaacattggaggtaccctggcagtactccttatggacctgtggtggtggtggtgaacatgaggagagactcctctacatagggaaggggaaggaaaggatggaaaaaacttcattttgtggcttgggtgccagctcagccacagtggaacagagcaacaggtatattactaaggtttctgactccagaccctggctcctggacagtatctctggacctgcctaaggcctggaagaatttgctgcccttaagggaaggacataagcctggttggttttaccacatgctaattgtagagccctagggccttgagtgaacatagccagtagtcagctagtggttccagttggtgc

SEQ ID NO: 896844 - DNA, 655 bp, Homo sapiens
taaatagccctatttggttatgtsagccatccatctggagtatttcaggagagcagagttgggaatctgggctccagaaacataccatcttgggttcaaatcctcactccacctctaatcaagcagctgtgtgttcttgaacaagttactgcagatgcctacccactagtaaaatagggctgatgatagggttagagtaatgattaaacaaaaacaacctcttggcctaaggcctaacaaatggtaaataccccataaataatgttattcaatagttgctggaggagaacagctgtgaagtaatcccctcaattaaccagtaaaatctttctcttcagaatacctcagagccatcttgagctttgtcacatagtactaggtaagccagagtagcggacatttcccaaattcttcaacatctcctctcttctagatagttttatttcttgtttactttttgagtctcaactacctcccatatttattttatcatttgatttttatttggtatgatcacagctgtctttatcttttacccttgctctgcctatgctgaataattaaatattgaaaggtataagattccatttctcagcctgttttcaacatctaagtacagatactttatttgtactcttttgcttatttgaaatct

SEQ ID NO: 896845 - DNA, 477 bp, Homo sapiens
ctggggtcaccctcagataaggatgcgacagaaagcagttgaatccactgtgtgtgtttgtgggggcactgacttgcttcctggatgtttaccctgctgctgctggtgggacaygggatttaaagagggggaactggcacagatgacgatggtggcatcccccaagaagctgcgccaagtggaggccgaggggcaatttcaaggtgacttctgcagagggcggggctgacctctaacctcctccagtctggaaggatgctctgcttggagtctggttgtcgccatggagggacagcttctatccagggccctaactgtagcgtgggttggggggactctttcgagagggtggggcgaggacgctggccccactgctgcggcgctttaaggggacgtgacaaattgcgcaacaggaaaagtcctgtgtatctggcagcaataaaacccagtaatatggttgtagagttcaacatgcaa

SEQ ID NO: 896846 - DNA, 690 bp, Homo sapiens
aaaatcaaatgctgaatctcatcttatcactggctgaataacaaagtaagtttaaytcccagcctggcagggtgtctactgttaaatgaggacattaattgggaaacaatgggaacctgtaaatctcattatgggaagaccttgaagaagctgtgagctatttagaaaaaaaatcactactctctgtaaattggaatttacagtagtaaataagtcactgaattgataaacctaaatgcagtgagagtaattggattctagcgtggtaggagtcaggtgaagggacagctttcagtaaccaaaggcaaggtgtgtgtggttactataatgggacagcagagtcaaagcagcaatcagaatagtctgactcaaacagatgtacagcattgccatatggatacagatagaaagcctatcacatattacttcatttgtataagcaaaaacttctaggtcaaatgaaaaaaagtctaacttgaatcaataaaacaaagtcatggcccctcaatcaatttctagcctcgagtctgaagacttagtactcagaatcccttgaaaaacagaaaggcagtctccaactccccagtgtgggtaggcctcattcgataagtttaagatttcaatacaaccgaaaggctgaataaggagaattcactttttctgcctgtcttcaagctgtgtcgttgatct

SEQ ID NO: 896847 - DNA, 690 bp, Homo sapiens
aaaatcaaatgctgaatctcatcttatcactggctgaataacaaagtaagtttaattcccagcctggcagggtgtctactgttaaatgaggacattaattgggaaacaatgggaacctgtaaatctcattatgggaagaccttgaagaagctgtgagctatttagaaaaaaaatcactactctctgtaaattggaatttacagtagtaaataagtcactgaattgataaacctaaatgcagtgagagtaattggattctagcgtggtaggagtcaggtgaagggacagctttcagtaaccaaaggcaaggtgtgtgtggttactataatgggacagcagagtcaaagcagcaatcagaatagtctgactcaaacagatgtacagcattgccatatggatacagatagaaagcctatcacatattacttcatttgtataagcaaaaacttctaggtcaaatgaaaaaaagtctaacttgaatcaataaaacaaagtcatggcccctcaatcaatttctagcctcgagtctgaagacttagtactcagaatcccttgaaaaacagaaaggcagtctccaactccccagtgtgggtaggcctcattcrataagtttaagatttcaatacaaccgaaaggctgaataaggagaattcactttttctgcctgtcttcaagctgtgtcgttgatct

SEQ ID NO: 896848 - DNA, 601 bp, Homo sapiens
agaagaaggggcaggcggtgagggatcaaagaaatgcatttcaaagaatccaacagggyctgtccttgaaacctcagcccccataccataaaactggcttaaagaagggaactgacttagaaaatgggaagaactttgagggcttgagataataacctgtataggattacactggtttagctgacagttggtggagcgggggggctgtccctctagtaaaatgaatgtatggttttaggaaattacaaaaaccagttggggaagtccatccttgctcgttagtggtccacagaatgttggaccaactatggcataaaagctctacatgggggagcaagactcctggttaacactgtggtctttattgaaatctccctgggttaaatggtcccaattcactaatgcccagtctgaggaaagtcaggaaggacagaggtacttttctgaagtagagagccatctttgacttggcaaatccccacagggtataacaaggcaagcattaaatgcaatagtttgaggcaaaattgatttggttatgtaaataactagatggtcagcaatagagtgaggaaagaagaaagagtaatagaatagatga

SEQ ID NO: 896849 - DNA, 693 bp, Homo sapiens
tttctttctgcattgctgagagctcaagttatatcttgcactgggtgggtcctgatttctcacccctgaggctgycacaagggggcggagcaagcctgcttgcaagagaggaccagagatcaccctcggaggggaatgtaatcctggatgagcccccaaattgttataaataaagttttggtgccacaaaagaaatatcactccaatataaaattttctttgtaattctcgcaaggcaatgtacttctatagaagcatgtgcccttgcatatggagcaatggtgagcacacacttggacaagggaggggaagaggttcttatccctgacacatgtggctcctgctgctgtgtcattcccctattggctagggttagactgcacaggctaaactaattctgattggctaatttaaagagagtgatggggtgagtggtttggtgggaaaaatgtttatggcagagcaggaaatctgaatgagtcagggtggagaatgagcaggtaattggaatgagtcagggtggagcagataattggaatgagttggggtagagtaggtaattggaatgagtcagggcagagaaggtaattgaaagattgctttacgaggaagttaagtttatcgccaagtagaaggcaaataattgaacatactgacatattgattctttgaagagaaatttagaactcatat

SEQ ID NO: 896850 - DNA, 676 bp, Homo sapiens
gtcaggagatcaagaacatcctggctaacacggtgaaaccccgtctctactaaaaatacaaaaaaaaaaaaaaaaaaaaaaaaaagccgggmgtgatggcacatgcctgtagtcccagctattcaggaggctgaggcaggagaattgcttgaatccgggaggcagaggttgcagtgagctgagatcgcaccactgcactccagcctgggcaacagagtgagactccatctcaaaaaatatatatatatattatatatatatatgataaaattattattgaggcatcttcgtgtgcattttgaatgtttgaattaactttattttatagttctggagatgtcactgtaattatgttcaattactggtatgtatgtcttgtattttctaagaagtcactgaaataagcacatttattgagaatttacaacactttacgtgtttatatgacatgaagagggggcagctattctattagtagaaaagcattatttcctcctcccttcaatatatagtacctaaaaagaaatcagtgggaattttattgaataaggcattagcttaatgtagaagcctgagtcttaattgctgcttgaacatttgttttacatgtaaagttaaagctgaattccatataaatttggaagcagaattccatgacaaacttggagatggcagg

SEQ ID NO: 896851 - DNA, 619 bp, Homo sapiens
ctgcattcaaaacttcagaatgaatttcagaatgttgcagtgtgttttgcttgaaaaacacattgtcaattgctatgtatatatgccccaggataagtaataataaaaaagttaacctactatttagttcacgtaaaattattgaaaacaaaaattgaaaataaaagtagtaaagaaaaacacgtataaaaataaactttaaatcaatctcaacgtcacattaacaatctataacacaaaggtttcaccccttttaactataaaagaaaattaaggagttattagaatatcatgtttttcttttttaatcattcattattgaatgaaaattatttgagaacaattttatacaaaatactcaatttaaagatcatagaaaagataaaagacaattttgactataatatagatggcaccaatgtacacaattaaattacaaactataatgtaataccttgaaagaattagtgacaaagattctctccttgactaaactcttcttgggttcctctgaactatcttctcaagtcggctatgacttttcggctttcatgttcacctctgcattgtccartgtaaatcagtttaacacgagtttctcatctcccatatccaatca

SEQ ID NO: 896852 - DNA, 608 bp, Homo sapiens
actaccagaatccatttccttggttggatgcaacaagctgtcagcagaataaagttgctaaaagaggagaacataactagaaaatggagaaaccagtaaacagtggacaatatgagtctgtaggtccaacrgtgttgaaagttgatgtccctctatattcatccaagtgcatgaactaataaatcccatcttttttttcttcagctagtttaggttgatcttttgccttttaaaaaggaaagagtcctgtagaatgcacatccttagctgtggttatgggaattttcatgtgttaataattgtccagtttcactcatgctgggtcagtctttataaaggttgcaaaatattagtccagaatacctaaatttcttcgtatctcaagttcccagcctacctgctctattagtagagctctgtttacagttcagtgtctccactcttttatttcctattgggcatgtatacatcttctaggttcctctgtaggtgctgcaaagtagaccttatgtgaattcttgccgtcccttcttgaaaaccttgaggttgaggactgattagcgtctcaaagagcaaatgtgcattttaggcatttggtttcctttcca

SEQ ID NO: 896853 - DNA, 620 bp, Homo sapiens
ggtcaagagattgagaccatcctagccaacatggtgaaaccccgtctctactaaaaatacaaaaaaattagctgggtgtagtggcgcatgcctgtagtcccagctacttgggaggctgaggcaggagaattgcttgaacctggggggcggaggttgcagtgagccaagattgcaccactgcactccagcctgggtggctgagcgagactcctcaaaaaaaaaaaaaaaaaaaatggatcacgtaatcagaagtagaacactcctcagcaaatgcaaaagaactgagatcataacaaaagtctattggaccacagtgcaaccaaattagaaatcaagactaaaaagttcactcaaaactatataattacatggaaattgaacaacctgctcctgaatgacttctgggtaaaaaacaaaattaaggcatatatcgagaagttctttgaaacgaatgagagtaaagacacagcatcccagaatccctggaaagcatctaaggcagtgttaagagggaaatttatagcactaaatgcccacatcaaaatgttagaaagatctcaatttaayaatctaacatcacaattaaaagaattacagcaccaagagcaaacaaatctcaa

SEQ ID NO: 896854 - DNA, 643 bp, Homo sapiens
cagttttttattcaaaatgacaatcactatattttaattgggatatttaggccatttacaattagtgtaacttttgatatagtttgactkaagtctaccttttaaatagttttctgtttgtcctatatattctttttttgtttatttttcatttctcactttttttgataaatgtatttttttatgattgcattttatttctagtattggcttatgagtttttctttaactttaattttaggttcagaagtacatgtggagacttattgttatatataggtaagctgtgtgtcatggggggtttggagtacagattttttaatcacccaggtaataagcatagtgtctgataggtagtttttgatcttctccctcctcctgcccttcactctcaagaaggctctggtgtctgttattcccttctttatgtttatatgttctcattgtttcgttcccacttattagtgagaacatgtggtatttggttttctgtttctgcattagtttgtttatgataattgcctccagctccatccatgttgctgcaaaggacataatctcattcctttttatgtctgcatagtattccatggtgtatatgtgccatatttttttttatccattctatcattgatgggtactt

SEQ ID NO: 896855 - DNA, 601 bp, Homo sapiens
cttggaaaccacacattgaaaacagaaaaacagtaaattgaatggaggctggatcttgaattaatgctcagaggagaactggcagcagatcaggaacactcatttttctttatatgcatgagaggtacatttattatatggtaagccactgagatttcaggatttctcacgagcagctgatgttatcttaaataaccactgtacattttgataactatggtagagggtttagccacagaccactacttgagaaataagcagtaagtgtatagttttctgacataagtcaataggataaatgtctcctgtagacggcggtgaatttcatagatggtgtgctgggaaataaagcaacgaatgaagccagtgttgttctctgagccagtggtggagctaggtcttatttctacagactcctctccctagcataatcaggatagtttggaacacttaatataagacttaggcytaagagaggggagaggtctctcctgtcagcacattgtgcttttagcattcccatttagaaaatggggatgactctttcttcctgtgtcctaggtatgtgttttgggaatcaaaagaaagaaaggttcaatgc

SEQ ID NO: 896856 - DNA, 676 bp, Homo sapiens
cagggttagagtttcatctctcgcatttatgatttcttctgcattaccttttccagttccctttgcccttggtaggggttgtttgcccagtgataygctccaaatattcattctttaaatatctgaaaccctactggtccttctttagtttttactacatgtttgtttttaaccatatgttttaagcatagttgtaaaagaaggagtccagggaattacctgaattccagccattctccctgatcctatataatggcggcagctccttcaacatagtggtcaacactgtaacacctccttttgcctattttcccagtggtataaagatctctaaacagtcaagtagtactcatagctttcatttcagcagataattggggtgctctgttggagaaattccttccactcctgtgtgtgtttcaaaactcccaaacaactcagatatatagatttgggagataaagtgcatcataagtagaaaattgtgttattgggaagaagttgaattgagctcaacttttgaaaggccatgaaatattttaagcaatggggtgacatggttcagttttgtattcagaaaatagtactgcattaaatttactttctgaattattctttgtttaattagttgatgatcaatacacctcaaagtaagatttgcatttactctgccagt

SEQ ID NO: 896857 - DNA, 586 bp, Homo sapiens
aatagactgaaattgtgatgggttcctgcatcttgcaccaagtatggggatatctgggcaatgttcattccttgtgtggtttcgttgagatcaattttttcctcataatactcacattatgggctaaatggcaaggttaataaccatcactaaacgccattttcaatattggtggagggcaatgtgaaagagaaaggaaattactaaaagaaaaatgactcagcaatgaagggaatatgaacagggttagagtttcatctctcgcatttatgatttcttctgcattaccttttccagttccctttgcccttggtaggggttgtttgcccagtgatacgctccaaatattcattctttaaatatctgaaaccctactggtccttctttagtttttactacatgtttgtttttaaccatatgttttaagcatagttgtaaaagaaggagtccagggaattacytgaattccagccattctccctgatcctatataatggcggcagctccttcaacatagtggtcaacactgtaacacctccttttgcctattttcccagtggtataaagatctctaaacagtcaagta

SEQ ID NO: 896858 - DNA, 586 bp, Homo sapiens
aatagactgaaattgtgatgggttcctgcatcttgcaccaagtatggggatatctgggcaatgttcattccttgtgtggtttcgttgagatcaattttttcctcataatactcacattatgggctaaatggcaaggttaataaccatcactaaacgccattttcaatattggtggagggcaatgtgaaagagaaaggaaattactaaaagaaaaatgactcagcaatgaagggaatatgaacagggttagagtttcatctctcgcatttatgatttcttctgcattaccttttccagttccctttgcccttggtaggggttgtttgcccagtgatacgctccaaatattcattctttaaatatctgaaaccctactggtccttctttagtttttactacatgtttgtttttaaccatatgttttaagcatagttgtaaaagaaggagtccagggaattacctgaattccagccattctccctgatcytatataatggcggcagctccttcaacatagtggtcaacactgtaacacctccttttgcctattttcccagtggtataaagatctctaaacagtcaagta

SEQ ID NO: 896859 - DNA, 631 bp, Homo sapiens
gcaatgacctgttctgaaggagcgaaacaaggcatttattgcagcatcatttaattaggaaaaaaatctggaaagaccctgaatgtccaactaaagggaaatagttgatatttatgatacttccatacaatagaatgttatggggcatcgataatagacatgaagcacagtaacatgaggtggcacatattataatgtaaaatggagaaataaagcaaaatgataatcatgcaaattaaatgcatgaaactaaaaaagaaatacaaaatagtagctgtctctagatggtaggtgagtcagttcaggtcctctgagtagcagaaggcaaaacagaattaattgtacaaggtcccagtctccactgatttcaaatccacttttcaacttctgtatgaagttctcattctcttactaatttttttttttttttgaggcggagtctcactctgttgccaggcttgagtgtagtggcgcgatctcggctcaccgtaacctgcgcctccygggttcaagtgatttcctgcctcagcctcccaggtagctgggattacaggcgcatgccaccatgtccagctaatttttgtatttttagtagagacggggtttcaccatgttagccaggatggtctcg

SEQ ID NO: 896860 - DNA, 615 bp, Homo sapiens
ctgttgaattttgtcaaaggccttttctgcatctattgagaaaatcatgtggyttttgtctttggttctgtttatgtgatggattatgtttattgatttgtatatgttcaaccaaccttgcatccctgggatgaagccagcttgatcatggtggataagctttttgatgtgcttctggatttggtttgccagtattttattgagaattttcacagcaatattcatcagggatattggtctaaaattctctttttttgttgtgtctctggcaggctttggtatcaggataatgctggcctcataaaatgagttagggaggattccctctttttctattgattggaatagtttcagaaggaatggtaccagctcttctttgtacctgtggtaaaattcagctgtgaatccatctggttatggacttttttggttggtaggctattaattactgcctcaatttcagagccagttattggtctattcagagattcaacttcttcctggtttagtcttgggagggtgtatgtgtccaggaatttatccatttcttctatattttctagtttatctgcatagaggtgtttatagtattctctgatggtagcttgtatttct

SEQ ID NO: 896861 - DNA, 605 bp, Homo sapiens
ctgttgaattttgtcaaaggccttttctgcatctattgagaaaatcatgtggyttttgtctttggttctgtttatgtgatggattatgtttattgatttgtatatgttcaaccaaccttgcatccctgggatgaagccagcttgatcatggtggataagctttttgatgtgcttctggatttggtttgccagtattttattgagaattttcacagcaatattcatcagggatattggtctaaaattctctttttttgttgtgtctctggcaggctttggtatcaggataatgctggcctcataaaatgagttagggaggattccctctttttctattgattggaatagtttcagaaggaatggtaccagctcttctttgtacctgtggtaaaattcagctgtgaatccatctggttatggacttttttggttggtaggctattaattactgcctcaatttcagagccagttattggtctattcagagattcaacttcttcctggtttagtcttgggagggtgtatgtgtccaggaatttatccatttcttctatattttctagtttatctgcatagaggtgtttatagtattctctgatggtagc

SEQ ID NO: 896862 - DNA, 524 bp, Homo sapiens
tgtggtatctccagctgggcgcggtggctcatacctgtaatcccagcacttcgagaggctgaggtgggtggatcacttgaggtcaggagtttgagaccaacctggccgacatgatgaaaccctgtytctacttaaaatacaaaaattagtcaggtgtgttggcacacccttgtaatcccagctacttgggaggctgagttgagaggctcacttgaacccaggaggtggaggttgcagtgaaccaagatggcatcactgcactccagcttgggcaacagagcgagactctgtctaaaaaaaaaaaaaaaaaaaaaaaaaaaaaagtgtgtggcatctcccctccatcctcttgctcctgctgttgccatgtgatgtgcaaacttgtgcttcaccttctgccatgagtaaaagcttcctgaagcctcaccagaagccatgtttcttgtacagcctgcagaactgtgagccagttaatcctctgtgctttataaattactcagtctcaggtacttctttacagcaaa

SEQ ID NO: 896863 - DNA, 524 bp, Homo sapiens
tgtggtatctccagctgggcgcggtggctcatacctgtaatcccagcacttcgagaggctgaggtgggtggatcacttgaggtcaggagtttgagaccaacctggccgacatgatgaaaccctgtctytacttaaaatacaaaaattagtcaggtgtgttggcacacccttgtaatcccagctacttgggaggctgagttgagaggctcacttgaacccaggaggtggaggttgcagtgaaccaagatggcatcactgcactccagcttgggcaacagagcgagactctgtctaaaaaaaaaaaaaaaaaaaaaaaaaaaaaagtgtgtggcatctcccctccatcctcttgctcctgctgttgccatgtgatgtgcaaacttgtgcttcaccttctgccatgagtaaaagcttcctgaagcctcaccagaagccatgtttcttgtacagcctgcagaactgtgagccagttaatcctctgtgctttataaattactcagtctcaggtacttctttacagcaaa

SEQ ID NO: 896864 - DNA, 618 bp, Homo sapiens
caactgacaacacacaaagaataataagagactactatgaacaattatatgacaacaaattggataacttagaagaaacagattcttagaaatgaatgactcacsaagattaaatcacaaagaaacagaaacactgaacagaccaataataagaaaggagattgaagcagttataaaaaaatccaatgagaaaaagcccatgaccaaatgaattcatgggtgaattgtatcacacatttaaagatgaattaatgtccatccttctcaaattcttccaaaaaattgaagggaaaaaacactgccccttagtttgcatgtaatgaaaagtgggtatataagtacatgactgcagaactgctcctctcagcacactgcctacagggtagcctcgctccacaggagcagtcatagagctgcaacactgccagctcaataaagctgttttcttctaccactatcttgcacttgaattcttcctgagtgaagccgtgaaccttcccaggataagccccaatctgggggctcacctgccctgcaacaagagcaattaggtaaaaaaaagaaataaaaggcactcatatcagcaacgaagaattgtaattttctctgcttgcagat

SEQ ID NO: 896865 - DNA, 718 bp, Homo sapiens
atctccatactctcaccagcacttgtgattttctgcttttcaataccatcctaaccggtgtgaggtggcatctcgttatagtttggatttgcatttctctaatgatgagtcatagtgagcattttttcatgtgcttagtggacatttttatatcttctctggagaaatgtctattcaaatcctttgcccacttttgaatcaggttgttcggtttttgttttgttgcagtcatctgtgtttgtaaataaagttccattggaatgcagtgtcccaccattcatttatgtattgtctatgactgcttttacactatgataataacgctgagtcattatgacagagcccattggcctgcaaagcctaaaatgttcactaccagccctttgcaaaaagtgtttgctgacatctgttctagatctatgtctattttactcgtctaatattttcatactgtctacttatcttttatcatagtattaactcctaacttctattactttttcctttttatttttatcccttctgtattgaagttaagcattcataaatatttggctcaactaatttttcttaccagtttcataagattctaactttgctcaaattttttttttttttttttttttgaracaagggctcactgtcgcccaggctggagtgcagtggtgcgatcttggctcactgcagccttgacttcccggggtcaagcgatcctcct

SEQ ID NO: 896866 - DNA, 658 bp, Homo sapiens
cacttggggccaaaccatgtggcaagacctttgggaaacaggtcatcagaaaaatgtaactatctatcatgtgtcaggccatatgcctttggccgcccccagtaatgatgaggcagatgcctcggccaagatccagtggttagagtcggcatgagatgtggacttgcggctacacaggaaacttggacatgcgggggataagctgatgcaacaggtcaattggtgctgggatctgtctttgccccagcaggacatttgcaaggcctaccagaagtgaccagtgtgtgatcaggcataccatagacagagacaactgcctagtgtaacactacaagtggacagtagagtggatgtccttgaccagatggcaaatagattacattggaccactgccaaaattgcagggctacacacatgcaccgactgctgtagacatggccaccagcctgttgttcacctacccttgcagggtggccaaccagcaacacactattcaagccctgcaacacttatgtgccttatacagccatcccctgaccactgaaagtgataggggaactcatttcactggacagcaggcacaayagtgggcacagcagatggtcatacagttggggtttcatgttccttataactcacaagccgctggcatgattga

SEQ ID NO: 896867 - DNA, 659 bp, Homo sapiens
aagaatatttccaccagaaaatagtggtaatggttctcattgtcaggagattagctgagytgggagagccagctgagctgccaggtgtcattgtagccaattaaagtaacaagttacaaatgagttaagcctctaatcacttactaagatggtattagcaagagtctaaaccagagtgccaactccttattttatttcctcctatggaatggcacacaagttgagggtccagtggatcagtgcagatgtgggagtcatctcactattgaaggagccctaaataaaaggctccagtagttttatgggccctggaatggggaatgggagaaagaagagagctcagagtgaaaaagtactaggtcctgagtcagggtgtgaagtgtcttcaaggttttcccctcttcctcctataagaaggtctcagcagagatgcctgagaaaggcctctgcccaaggcctcagatagagagtccgggagttaagctgtccaggctaggaaaataaatacgtaaagatcatgactggctagaaggatctaaggccttgacttcaactctgtttctgtgcaccaagtctacagtgaacagggaagatttttatctgccaagtaaactctttgtaatcacctatggtcaggcctgaaatatcacacgtaggtt

SEQ ID NO: 896868 - DNA, 684 bp, Homo sapiens
actggagtgggttttcacaagatctcatggttttataaggggcttttccccctttgcttggcacttctctctcctgctgccttgtgaagaaggacgtgtttgcttctccttctgccatgaytgtgagtttcctgaggtcttcccagctacatggaactgtgagtcaaacctctttcctttataaattacccagtcttgggtatttcttcatagcactgtgagaaggaactaatacagcctccaaagtcttcagtgattatgttttattgtactgaccccttcattggcctgtcagctcctataaacagagtctagttcttattcacctccagatctactgaaatttttgctgtatatttacaaataatttctccaataaaatacctttacccagaatatataaagaactcccaaactcagtaagaggtaaacataaatcccaatataaaatgggcaaaagattgaacagactcttcatcaaagaagatatacaggtaacaactaagcaataaacagatgctcaatatcattgatcatcaaggacacaaaaattaaaaccacactgaaatactaccatgcacttattcaaagatctaaagtaacaaagactgaacataccaagtattggcaaggatgtgaatggagagcaatttcacaatttcttaacaagttaaacagaaacct

SEQ ID NO: 896869 - DNA, 601 bp, Homo sapiens
tgaatgtcttatgtacaaatacctggagcatagtacatcttcataaatggttatttgtatgtgtctgggggtygggtagcaggaaccacttggattagtttcaggcagcatgcttaaactctctgaaagggaaagagggaggagggtgtgattgagattgaaggttgacctgaaggaatgatcatctgtgctggcctagaaactccattcatcttctttcctaacctattcctagtgccttttcacacactttccttctgcacgtcttctctaaggccagcaaaaggctcatttttttttcttcctttaagtcttggctccaaagttagttccttactgaagccttccttctccaacctttataacagcgttctccagctgtcactctctatccctttaccctgctttaatttgctttatgaaaatcttaacctgaaaattatgtatgtatttgtttactcgttcattacccccactggaatttgagatccatctgggcagagacctcttgtattcccagtatcctcagtgcctggcagtgagtagatgtacaaccagtattttttcaatgagtgaatgaaaataataccatactaaatac

SEQ ID NO: 896870 - DNA, 678 bp, Homo sapiens
tgcaaagctgctaagaaaatttctagcaaatgagcgaaagtgaaaatttaaaggccttaaaacttggatacaaactttgctttttttacagcatggttttgggtcttctttcttttctttctaaaggaataaaaacagaatggacatttttcttccatccaaattagctagaaacttgagaatataaagccagccctctcaaaaccatcttcctccttcccttttggaatatgttttctaatctcacttggatttttcaattttactgaatcatgagaaattataggtgtgtcttcacaacaaagctcagaagattatctcaatgtccatcagtgtgagtgatctgaaattcaaagttctatataattcttttagctgttttctcttttgttcagcaaatatccaaatttaagtatcaagggcagaggaaacacatctccaaaatgttatggaagagactttacttagtttatcatctacttgccataatgtaacatgtttcttctaccacatgcaccccaggactcagctaatagttttttgctgtggtagttttaaaaaaaaatcaatcatcatgataccrttttggttaattcgttttcaatttgagataataaaagataatctctgctattaaatcagttaatgtcaggaacaatcctttaagactgatgattt

SEQ ID NO: 896871 - DNA, 643 bp, Homo sapiens
ccccagaagctgagcagatgccagcctcatgcttcctgtacagcctgcagaaccaggaaccaattaaatctctctcactctctctctctctttttttttttttttwaataaattacagcaatgcaagaacagactaacatactcagctaccgatgcacttgtttctggttggtggaaggcattgttcccattgtcccctgatcctgagcagtctttagttccagttacagtgaaagcccaggagttcttcccagggcccttcagtgggagaaggaggctgctgctctgcaagtggattcctcacaggctgagatccccagatctcatgtcaaggaatcaggagccactcttcaggagtgggagtcagtgagatgattattatatctgagctacaagataaggagttgtctagtctcattagtagggccttaatctttcctgagagacaacatgcagaatctccttcacttggttaggcagacaccaagagattgttggattcttgacttcaaaacacagtggggtttctctttcttaacccaatacttggattgaggcttttagagtgttcctgactattttttaaatttgttttgttttgctttgttttgcccagagcatcatcccccaggacattactatt

SEQ ID NO: 896872 - DNA, 667 bp, Homo sapiens
ctaacttgttacagataggtagtatgactggaaaaacaaaacaaaataaaaaacaagcaaaaacattctgtgttaagccctaaatttggggggctctttattattacagcataactttccctatcttgactgttatccctaccctatgtgtcttggtgggaggcaaatcctcttttatgtcatggaaatacaaaagacaagctagttgcttttacaaccttccttgtaggcacttgatctaaagctgaccaagcagtagattcatctaggtggataaattggaagccagaaatgcaaagaagtaggaacaatgaataactcatttccttttattatgatggcaacagcaatggaggatatatatatttctgggaagacgaggagcaggggttacaacagtgacatctggggtctgggactattattgaatgcttttgctaacagttgggcctaattttcaggacatctacagaagagtccctattggataacactagccctgatcaagttgttgtctagtctcctttgtcctgcctatttttcaaccttctgagcaactcaactgtgcaagcagctgatataatttcarttcattcattttgattgaatcagccagaatgtgatgcttgcaaataagattcctgaataacaatatataagttaattt

SEQ ID NO: 896873 - DNA, 560 bp, Homo sapiens
tcaagacttcatttcttttttttgttcgatagtgctccattgtatgcatatatcacattttgttcatttatttgccatttaatgcasatttggatgctttgcaattttgggctatcatggatgatactgctataaacattcacttacaaatctttgtgtggacatgtatttttgttgcttttgggtggattccaagaaataaaattgctgggccaaatgttaagtgtatatttaatttcatgagaaactatattttgcaaaatggctgtattatttaccttcccaccagcagtaaatgaagaccctgggtccttcacatcttttcctacactttgaaacacctttctttttgattatagtcattctagtgagtacataatggtatcttatcgtagttttaatttgtgttttcctaatggctaatgatgctaaacatgtttttatatgcatagtgatcgtttgtgtgtgtgtgtgtgtgtgtgtgtgtgaggtctattcaaatcttgtttctagaaattgtccatttcatctcatttgtcttattttttggcatagttgtt

SEQ ID NO: 896874 - DNA, 545 bp, Homo sapiens
ttgaatgtctggtagaattctgctrtgaatctttctggtcctggacttttttgtcggtaatttaaaaaattaccatttcaatctcactgcttgtttttggcctgttcaaggtatctaaatcttcatgatttaagctaggagggttgtgtatttccaggaatttatccatctcttctgggttttctagtttatatgcataaaggtgttgatagtaggcttgaatgatcttttgtatttctgggacgtcagttgtaatatctcctattttgtttcttattaagcttatttgtattttctcccttcttttcttggttaatcttgctaatggtctatcaattttatttatctttccaaaaagccagctttttgtttcatttatcttttgtatttttgtttgttttaatttcctttagttcttctctgatcttggttatttcctttcttctgctgggtttgggtttggtttgttcttgtttttctagttccttgaggtatgatcttagaatggaagcttgtgctctttcagactttttgatgtgggtgtt

SEQ ID NO: 896875 - DNA, 545 bp, Homo sapiens
ttgaatgtctggtagaattctgctgtgaatctttctggtcctggacttttttgtcggtaatttaaaaaattaccatttcaatctcactgcttgttwttggcctgttcaaggtatctaaatcttcatgatttaagctaggagggttgtgtatttccaggaatttatccatctcttctgggttttctagtttatatgcataaaggtgttgatagtaggcttgaatgatcttttgtatttctgggacgtcagttgtaatatctcctattttgtttcttattaagcttatttgtattttctcccttcttttcttggttaatcttgctaatggtctatcaattttatttatctttccaaaaagccagctttttgtttcatttatcttttgtatttttgtttgttttaatttcctttagttcttctctgatcttggttatttcctttcttctgctgggtttgggtttggtttgttcttgtttttctagttccttgaggtatgatcttagaatggaagcttgtgctctttcagactttttgatgtgggtgtt

SEQ ID NO: 896876 - DNA, 609 bp, Homo sapiens
ctttattcacctctccttcagagctgaaaactgactgtagcacatctgtaatagtctttcttttgaatcacrtagttctaacagtttcaaacaaggctactcatttgctgctctccagggaattttacaatagcggaaagttcagatctcccaaatttctgacctgctattgacttacacatttccataacctttattactggagtaccctccttctgagagtggcttctaatagtcttgttaattagaaccaaaatacatcagaggccttctagatatccaaccagagtgcagtgaaagtgttcagtcactgtataagcacagaaaaaaagaatgacaaggttcacttttgatgatacggggtgttattaataagacatgtttcctttttggtactagggtgctcctggtgctgtaggtgcccctggtcctgctggagccacaggtgaccgggtaagcatgcattttcactaagccaacagcaatatctaaaatttcccgccttccctagtcccaaagagccccagcaattcatttttatggcttggtataaagcctacttatttaaaaacctagctattgtgatagagcagcaggaaacaaatgctg

SEQ ID NO: 896877 - DNA, 576 bp, Homo sapiens
tcacatgcattaataagctgtcctgtacctatccctatgctttgctctgtagggactgtaaaaactatgtactttccttctctccctttttttcatttcttcccctctttttctctgttttgctttcctcamttttatgagtatggaataatataatctatggggagatctttttctccaagattatttttaaagataccattatgtttggctaggtattcacagttgatttgacaatttaactcattcttagacaaataatttgtacttggccattgtcatgggatgcatgtttgtgccttcccttccaaattcatatattgaaacccaaaccccaatatgatggtaattggagatggggcctttgggaggtgattaggccatgagggtggaacttccataaatgggattagtgccttataaaagatatatgagagaattttcttgttctttcacaacatgagaagatacaagaagtcagcaatctgtatccctcctgtacaaccccccacccctatcctggcaccccattcttggacttccagcctctcaaactgtgagaaataaatttctgct

SEQ ID NO: 896878 - DNA, 654 bp, Homo sapiens
tcattgctacctgggtgttactgcttttagaacctttcagcagacaaagctaggaaatatacatatgtatactgacccatgtatacactataacaatttgtatttacctgtatatatttttgtctctctctmtatatatagaagaatatatatgtagaggaaatacatcacacagatatttggagaagactatttcaggtaatggaagaacaggtcctgtgctctcagatgagagcctgtttcatgttttcaaagaacagcaagaagattgaggtacatggagttcagttaaaaaataaataaataaacaggaagagtgataggagataaatattgagagatataaaaagagaaatctcagatcagatcatttatgtcctaatagctttttaaagtaatttggcttttactgtgagagacactcaaatacattggaggcatttcaacagatgggtgacatgatgtgagttatttcttttaaatgaacctcaccatctgccatgttgagaagagagagtaggggtacaggaggctgttactaagattactgcctagtaatccacataagaaatggtggatccttgactggaaaggccaagaataaccaatgactgaggcaaaactagatagaatggatagagaactaaaaagttt

SEQ ID NO: 896879 - DNA, 616 bp, Homo sapiens
cccacactctagtaaccatgattttatttactaccttcatgwgattaattttttgtagctcccatttatatgtgagaacatgtgacatttttctttctatgcctggcttatttcacttaacctaatgtcctctggttcagtctgtgttattacaaatgacaggattttattcttatggtggaataatattccatcatgtatctataacacgttttctttatctatgcatcccttgatgggcatttcccacagctagcatcatactgaatggagaaaatctgagtctttcctctaaaatctggaacaagacaaggatgcccacttttaccacttttattcaatgtcgtactggaaatattatccagagcaattagacatgagaaagaaataaaagacatctaaataagaaagaaagaagtcaaaatgtccttgttttcagacaatatgatcttatatttagaaaaatctaaagattaatgaatgattggcactgataaatgaattaagtaaagctacaggatacaaaatcaacacacaaaacttggaagaatttctatatgcaaacagcgaacaatctgaaaaagaaatgaagaaagcaatgcacttacaaaaaata

SEQ ID NO: 896880 - DNA, 668 bp, Homo sapiens
actgatcaaagatttaagaatataataaactaacacatgctccacagcacatggatcactcttaaagatagaccatatgttagatgacaaaacaagtcctaaaattaaaaaaaattgaaatcatatcaagtaccttgtcagataacaatggaataaaactagaaatcaataataagaagaactttggaaactatacaaacacgtggaaattaaagaaaatgcactgaatgaccagtgggtcaatgaagaaattaagaaggaagtttaaaaatttattgaaacaaatgaaaatggaaataaaagatacaaaaaccctataaggtacaacaaaaacagtagtaagaggagagttcattgcaataagtgactacatccaaaaagtagaaaacttcaaattaacaacctaacaatgtatcttaaagaactagaaaagcaagagcaaaccaaatccaaattagtagaagaaaaaataataaacatcatagcagaaataactactaaaaatacaaaaagtcaaatgatagtgttttgaaaagataaacaaagtcaacaaacytttagcaaaactaagaaaaaaggaagtagattcaaataaataaaagcagagatgaaaaaatagacattataactggcactgcagaaactcaaaggatcattggagactacta

SEQ ID NO: 896881 - DNA, 605 bp, Homo sapiens
agcccattaagacttgactgacgtctgctcttgaggctaggaagagagatatataataaaaagctatgtgtattgaaaaagcaaagaagggagaatgtacaatatgttaagatagtggagatgaaagaatagaaaattcttaagagaagttaaaaagatagagaaaacatcaggatgaagataatatttgaattgaaacttaaagaatctatgtaatttcattggtatagttcatctcccaattgttggaaacacattctcacctcctgctgttcaatcatacagtttttcatggagcctatgtactgtaatagctcctaaaaagtctgaacaaatttaattaaaatgccatttcaagatagaatatctcctggaattacttatctttaaccattctatttagaatattttataatggaggtataattagcatacatggaaagcaaagaaataaatcctcattgttagtaacttatgttgaaatcartaactacaacatcatgtcattaaaaaaaattaggtctaatttaactggctacttgccattttgtgacacatatctatttggcactgcctccatgaaagttatattttctgattcgttt

SEQ ID NO: 896882 - DNA, 650 bp, Homo sapiens
atctatttgggctctttctccaatatgctgatacttaattgaacctggcaaaataagtcatcccaaattcaaatgaccctctccacattggaggcactcatagatggaatagcagcttatgttcatttctggamtataactgggcaaaaccattccagttagactttgatgtaagaaaataaaatgaactgtacataaagagaaagcaggatttaacataaagtgagtgtccatagtgctataggatcttcttacaagtatgtaagtgaaagtatctgggcctttaaggtagcaccagaaaagattttaatgtccagattttatgtcgcagactgaaatatgtcagatggtagcaatggggcttctacaccattgaatcagctaaaatgtcatcagcattttaaatgaccaaaagcaagatacaaaataaataaaattgtgtaagtataaagattttattgaggagagacaaacactactcaagtaatgctctaaaattattttcttttttttttgaaaaaataagattttatttaacataatttttttctttattattattatactttaagttttagggtacatgtgcacaatgtgcagcttagttacatatgtatacatgtgccatgctggtgcgctgcacccattaa

SEQ ID NO: 896883 - DNA, 612 bp, Homo sapiens
tatcatatatgcatatcagtatatttatgtatatatatgtrgttttctatacatacacacacacaccagaaaaaaaattaaaatggtacactagaagatatctatttaatacaaattacaaaagtaaagaaggaaaagaggaacaaacagatatgagacacacagaagacaaatagtacttttgcaaacatagagcaaatcatatcaaaaattacactgaatataattaattaaaagggagagaatatgaggctgtacttaagccaaaataagatccatgtgcataccatattcaagagatacattttaggttgaaagacaaaaacaggttgaaagtaaaagtccattcttgtgttgctataaatacctgactgggtaatttataaagaaaggttttatttggctcatggctctgcaggctttaaagaaaacatggttctggcatctgcttctggtgaggcctcagagagctaacaaccacggtggaaggcaaaggggagcaccaaattacatggtgagagtgggaacaagagagggagaagggggagttctcagactcttttaaacagccagaccttgtgtcaaatagctgagagaaaattcagttatcac

SEQ ID NO: 896884 - DNA, 642 bp, Homo sapiens
ttatcctccaatttctttctaaaattactgcagatcctcttcacctagattttccatggtggtaatcatggagtgaagggatagcatagtaaggkgaagggacaatggtctcatcttacttattactttcagggttatggagtcttactcaaagtttcaggtagtgattaaatgtagggaaaaggaacccagaagggaactagcagagttcccaggcttttcatagagagtggtattttatgtttttttgttttgttttattttgttttgttttaatcacacagcaaatacttttagacttgttatgtgccaagtactctgagtgctagggatagagccaaaaggaaaatttacaacagtagatgacctcatggaattaatatactagaagagagagaactaaaaatagtcaaaatcaagagaaaaatacataatgcatcacctgaaaattgatatgggaagaaataaaacagcagcaaggaataagaaatgctgataaagtaagagaacatgaggtcagagagggagcagggtgccagatcacttagcaaataactatgggttttattctgagtgagtcgtaaattcactgggaagtttcaggaaggaaggtgtcatgatctgaattttgtttctaaaatg

SEQ ID NO: 896885 - DNA, 523 bp, Homo sapiens
gcatcaaggaagctaagggaagcatcagaatggacagtctgtaccaagtggtgctgatagacaagtgagatgagggctgagaatttgcatcagtagtagcagcayggagtgcactaacaccctggctgagaacattgttagtagcatggtgggtatcagagataatgggaggagaacattgaaaatcattgttatatacaacggttttaaagggttttgctatggggtagtacctggagaggaaagtggggctaaaaagaatgttatggctttatttgttcttttttgtttgctttttatggtaggagaaataacatatttttatgccgatctgatggtcccatgtagaagagaaagttgaagatttgcagagtagggtggagggggaattgcctgagtcctatgtaggttagaagagatgaaacctactgccaaagtagaatttagtaaacaataggaattacaagctcatatatttaagccactatttgagccctgaaaagggagagaagaaatttaaata

SEQ ID NO: 896886 - DNA, 568 bp, Homo sapiens
ctatcaagtttagacttgatctatgatgtgaaagattaggaggatttaggcattcaaaaagaatgaagaggtgatgagatgaagtgcagaagtaacagcaggtgcaaatatgatctatctctattgtccatatggatgggtaaacaattagcacataggtcagttacagcccctattactctatactagtactagctgtatgtaagtctgccatcctcactgctttgtgactgcaatgatggcagagaccataatgtccttatctacctagtgattttaagtgtgcctggcctatagtacatgctcagtaaacatatgtttaaatttttaaaggaaaattggtttgaatgaaaaagcaagttaatatgcggaacagtgagtgaattcagattattgaggcctctgaaaggcacctgggcaattccagcttccttggatgggagccgctggagtcctgcatrggagtgacaagataatgggatatttggggaatttatctggccatagtgttcagaatgaattaaaagaggagaaagggagaaatgaaggaataaaggcattgtctaat

SEQ ID NO: 896887 - DNA, 578 bp, Homo sapiens
tgaggccagatatattcatataggttttaggtcattttactcccatatcttaccctaaggttctaataagaaatcaagggttcaggaggtgactgcaagagaaaaaagaaagggcaaactaaaaagtctaaaccttttgggaatagatgaataacaccttgaagaaataagaaattaaattcagatagcacaatattactgattacaggagatttatcagatgctttgaaatctaaggcatgtaaaggaatttgtgtggatgggcatgtatttggtgagtttttatgtgtgtatgcttgaaattcagtaaatatatactgagggtttattgtcaggagcagaaaaaaataatagttaccatttattgcatatttacactgtgccaggcatcgtgttaagttcttaagcacgaattatctcattaaatgctcacaataaagctatgagctaggtattattattttttccatccaaagatgaggccataaaggcttataaaatataaataactyatccaagatcttacaacattagtagaagagctaggatatgagctcatgtctgtctctgaaaagttc

SEQ ID NO: 896888 - DNA, 618 bp, Homo sapiens
tgttaatataagatgagagtgaatgtttgggtcaataaaattatctgctatttccatatccaaaaagcagayggggctcactagtggaaaaatgtagaggttaacagtgagcttttaaataaacaatttggccttatgtcattctatgcataagtctttcactaccagcaaagagtggctccttcaaaaagttactgagcctttgagtttttccaggacagaggaggctgaatttctcacaggttcaaatgtcagccaccacttgcagaaagggtatttgaaggatgagtgttgtataaccacaggctgaggctcaaaagccaattccagttaagcctgataatagtttttgacatttagtgacactttatccttcaaaagtcttgggtagctaaactgcttgcctgcattttctgtttctatggcaactggagattttaaaatgttaatcttagttgacctcttttattcttttttattttgtctcttccctaaaaattcagcccagggctaaatgattatctgttctctagcctcaattaaattttcatcttacagtattgcagtggtctcccaagtgggctacttatactccagatttccaagacaattcattgt

SEQ ID NO: 896889 - DNA, 651 bp, Homo sapiens
acacctgtaatcccaactacacaagaggctgagatgggagaatctcttgagcctgggaagtcaaggcagcagtgagcgaagatcgtgccactgcactccagcctaggcaacaactctgtctctctctctctctctcacacacacacacacacacacacacacacactctctctctctctctctctctctctctctatatatatatatatatatatatatacatatgcggtctgttttaaatattttaattaagacaaattatttccttcacttcaaatttgccttaaaaaagaaagaagaatatattaaaataaaccaatataacaaaggaagtccattttaaagctgtatgttacatttctgttttcaccatgaaggaataactggcaccagattgatcttcccatcacagaaaactagaatgtagaaaaaatgtatttgtaaaatggctttcaaacatttggcagctggctgggaaggactgtggtcttcaagaaaagagaaacaaatgaaatgatttctctgatcatcctggctttctatcttgctatcttgaaggctttactgaaaaccagcacatagctcagatacccagaaagrgcatgacattctccataagctggagagaaatgatgagagggaagggaggga

SEQ ID NO: 896890 - DNA, 588 bp, Homo sapiens
agttagtttgactgggtcacctattccaccttaagaaaatttgcccacctattatgataaggagtcactgaattataaggaatagaataatatgccccaattttacaatacagagttaacgacagtattttrgaagatgaaggttaagtccatgaaagcacagggaaggagatcattggaatagtttaagggagatatgtggcattcgtaacccaagaaactagagaagtaggaagagacattaaagagaaaagaagcaggagaatttagtcattgggtggaaatgtttatgacaacattgtaggaacatgaagtacaatatgtatcacttgtgggagattaaattgttattcaggaatggtcattccattctttctcatctctcagagaggaataggcattagcaatacttgggcatgtaacttacaataatgggatgggaatggcctacattccaggcctaggccttaagtggcatttttttttctctcatcacctttgggacctttcatcccacatcatgagaacattccccatccagcctactactctcaaaagctgagaacacttggagcaaaactgatccaa

SEQ ID NO: 896891 - DNA, 594 bp, Homo sapiens
aactgagggttccaaagagaaaagtaatgcaaggagtttaaagaaggaaaataaaaacattatttttacacataatcatctagtatcatatgaatgatctctaagtrttttcccactagggaaaataaaagcccaaattcctcacttcgagctcgggttcctggaagagctaaaggcttgaccaggtctagactacattttatatgcagacctttgccagctcctctggcataagtggctgggttccagtgactgctgttgctctctccacattggcttggtgtgtgcggatttctccatctggttcaacaggaagtatgtactgtttgcaggatgctattgagctatttttaacagctaagctacatacaggtatttatgactctagatctgatttggagaaacaaaatatttgccaatgtgagtgcaacgaatatttttaacagccaaccatatggccttgagatggaaatggtcagggtgaacaattggaacaaggctctttccttagcactgcaaaagccatcgtttccttttgccaggctggagtgtcagagactgagaaatggtcattggctggcagaagtggggctc

SEQ ID NO: 896892 - DNA, 635 bp, Homo sapiens
aaaagcaagagattttttttttttacttagaattatgcatccagaatagaaaactcccatttctaaagtcattcggtttttgttcctggctgaattttaaaaaacaccgtctagcttgttycaacataatcaactataccatatagcagtatataatatgtcatcaaaagttccattgtagaacaaaccatttaggattgccaaatttatagaatgctgattgatgaaaccataaagaacccttctcagtgtgatcagctaaacccatccaccaggcactcacagagtactttctaggtctaggatgctatgcatacaaatgtggtatattttccccctggaatgcaatgttagattcatattatgccaaaatagcattacataacgctcttattttgttttgcttgaaagttcaatattttctttttctttaaggaaaaagttccttacctcaccagaaatgaaggttttggtcaacactttctcatacagtaaaaataaacacacaatcttaagtacaattgatagataatgtaacattaaattaagatcgtatgcaaattcaaggagatttgtctgaaataaaaggtgtagttgtttttttttttccttttttacatgccatgacattcagg

SEQ ID NO: 896893 - DNA, 635 bp, Homo sapiens
aaaagcaagagattttttttttttacttagaattatgcatccagaatagaaaactcccatttctaaagtcattcggtttttgttcctggctgaattttaaaaaacaccgtctagcttgttccwacataatcaactataccatatagcagtatataatatgtcatcaaaagttccattgtagaacaaaccatttaggattgccaaatttatagaatgctgattgatgaaaccataaagaacccttctcagtgtgatcagctaaacccatccaccaggcactcacagagtactttctaggtctaggatgctatgcatacaaatgtggtatattttccccctggaatgcaatgttagattcatattatgccaaaatagcattacataacgctcttattttgttttgcttgaaagttcaatattttctttttctttaaggaaaaagttccttacctcaccagaaatgaaggttttggtcaacactttctcatacagtaaaaataaacacacaatcttaagtacaattgatagataatgtaacattaaattaagatcgtatgcaaattcaaggagatttgtctgaaataaaaggtgtagttgtttttttttttccttttttacatgccatgacattcagg

SEQ ID NO: 896894 - DNA, 674 bp, Homo sapiens
atttatccttcctcttattttaaggattctatggataaaatcttccccaaactcagaggcagtgttcatgtctgatatggcagcagcagcacccacagtgtcatttcctcagggamtacctaccttttgtttgttggcacaggtcaagagccgtggaaagacatttccccggggccccaattgggttaatcataaaatggatgcttgagatataattgctcaatgccatcccttagtaccagatccagaatgataagtgccctgaaattcttaataaatttattaattggacttctgatatgtgaggccaagggcaggggcacttattttccctaaggtaccatagaaaatataattcagtaatatatccattctaagcaacagttaaaaagagatatctctgtgtactaacacagaacattcatcaagatattttgttaggtgaaaaaaaattgttacaaaatatatgtataataccatttatacacattttaaataaaaatgacatatttctatgtattctgcatatgtacataaacaatagaattatagatgcatatgaagcagattattatcctagagaaggtgaggaaaactggctaggaataaaacaggaaacttaactttatctacaatatttaagttttcataagaaaaatgcattaattattcac

SEQ ID NO: 896895 - DNA, 605 bp, Homo sapiens
gtgcaagtgttaggagggctaaatgagatgagaaagctgtgagaaaaatgccgaacacatgatagtcctcagcaaatcttagcttgtgagactactgaatcccacactaagcgatagtggaattggggtttatcttggaccaggactcggaaacttattttaaaggactagagagtaaatatgttaggctttgcaggttacatagtctgtcttaagtactcaacttcaatcctgtatcaggaaagcagccattgacaaaatgtaaaaaaaagaaaaaaaaagaaagaaagaaaatccgtgtggatatatccccataaacttcatttatggtgagaaatttatgcattgatgtactcttcttaggagttactagccccttaaagccatgagtttgtaattatccttctttttataatcatgcaatttattacctatttcctgctaggtattacaaaattctgagctagccacaggcactttgcttaatcaaatattcataaactaaaaaaaactttatttatggacactaaaatttgaatttcatataayattcacatcattaaatgttgccatgattttttaaatcattaaataatacaaaaaaa

SEQ ID NO: 896896 - DNA, 619 bp, Homo sapiens
caagtatgacgttccaggggcacgcgccactggaaaaaggaaaaaaaagcctcagatgggcatacctgtaactccctaaatacacacgtgctgaattccaaagggtaaagaaagcactgyccatgcgggaagcccaccctaagggaagaatcatgggaaagaggcggcctataaagtcttaggatcaaggttaaaggctctctttttctttgcccttttttgctatcttttttctctctttgatcttcagggcgcccacttggacctcttataagagctcttttctttctttcctgttctgaagtattttttaataaacttccactcctgctctgaaacttgcctctgtctgaaacttgcctcagtctctttttctgcagaatgttcctcagttgaattatttcttcttgaggaggcaagaactgaagttgctacagactcatacaaataggccaccagtaactctgggtaacttggatctcttccaccagcaataattttaccaagatctttacatgcattaaatttttcaatccttgcaataatctgatgaagtagatactgttatgattcccatcttacaaatgagaaaaacaaggagcagaggtgtaactacaaa

SEQ ID NO: 896897 - DNA, 667 bp, Homo sapiens
atagcacaaaacaaataaactgattaataaatggacaaagaacttggatagacatttctccaaagaagwcatacaaatggccaacaggtatatgaaaaggtaatcaacatcaccaatcaattttcagagaattgcaaattaaagccataatgacatactaccccatacttgttattatgactatttttttaagaaaaaagtaagtgttggtgaggatgttgtgaaattggccccttgcacattgctggtggtagtgtaaaatagagcagccaatatggaaaattgtatggatgtttttcaaaaaattcaaaccagatataccatataatccagcaatttcacttctagatataaattaaaaataattgaaatcagaatcttgaaaagatatctgcactcccatatttattacatcatcattcgcaatagccaaaatatcaaaacaatgtaaaacatccactgacaggtaagtaaagaaaatgtgatataaacatacaatagagtattattcagccttaaaaaaataaggaaatcctgtcatatggaacaacttgatgaacctacaggacattatactaagtgaagtaagcctttcacaaaggacaaatacaggtatatctcattttatttgtgcttcactttttttcatttcacaaatattgcattt

SEQ ID NO: 896898 - DNA, 570 bp, Homo sapiens
agatatatttggacatatgtatctcaacgccctacccttggttcataggcctccccttggtttaaaccatcatctctcacttggagtatactaacagccttcccttttaactggtctttctgcttctactcttaattctatctccacatagcagagaatgaagccattgaaagcatatgtaagataatgttacatttgacttccaactctccagggacctctcatctcactcagagtttaaactctaaaagtggcctacaaggctgtccacagcccagctgctgtgttcactatgctccagccatgctggccttcttgcatttgttgaatacaccactcattcccacctcagaaactttacactgctggaagctttccccagcatgcttctcttccagacattctcatgacttgctctgttaccagtttctgtttatgtgtcaccttgcaatcctaccttccctgattgctrtatttaaaaatcacatctgcctgtgctgtaccaacattcacgaacccatttccctgctttacttattctcctcaaaatttatcatgatctgacagtct

SEQ ID NO: 896899 - DNA, 593 bp, Homo sapiens
acattttatccattcttcagttaatggacatttctgtgttctactttttgctgctgtgaacatttgtgtactattttttgtgtagctttttaaatttmtttttggtatatacataggagtggaattgctgggtcatttggtaactatgtttaaccttttgaagaactgccagactgttttccatcttatagtttcaccagcagtgtataagagtttcagtttttctgtatctttttccaaaatgtgtccttttgatgatagccatcctagtcagtatgaagtagtgtcttattgtggtttttatttacattttcttgatgctaatgattttgagcatcttttcttgtgcttatgatcatttgtatatcttttggggggaaatacctattcagatcctttgctcatttcctaattgattattcacatttgtattactgagttgtacttgttcatatattctggatacaagtccagtgtatcacatacatgatttcagatattttcatccttctctgtgttgtcttttcactttcttgatgatattgtttgcaaaacagaagattttggttttgatttttttcttttgtcatttg

SEQ ID NO: 896900 - DNA, 603 bp, Homo sapiens
tattttgcttataagctcctgtatcattttattgtaattcttagcttccttggattgaattttgatgttctcctggatctcaatggacttaatttctatccatattctgaattctatttctgtcatttcagccatttcagtccagttaagaactcttactgggaaacaagtttagtcatttggaggaaagaagacactgtggctttttgaattgccagagttcttgctctggttgtttctcatctgtgtgagctggtggcctttaactgtggtataaatcgaatacagtcagtagacttatttcctggatgttttcagaggatcgaaaatttgtgtagagtctttatttgaagctgaattattgtccttggtttcacagaggggtatattagcaaagcatttttggtgttgaagtttggggctgtgattcagtaggtggcacttaaacataatggaagtaggtaggcttttgctcagtcacgtggctcctctgtattttctcctaattgcagccatctacctttcagtgctctgaaagtgtaggttyctctcccacttgattgctggctacagatctcagcttggcacccacaggttgcacat

SEQ ID NO: 896901 - DNA, 555 bp, Homo sapiens
acctaatttcagaaaggtcagggcagaagaggagaattggaatatttgtgaatagcagtaatgacagcatagattaagttttaaattcactaaagtgtagcgatcacctggaaggtagatayaatgcaaaactagattcgaagaggaattggacatatgtaatatacatactaaattgggtctaaaaatttagaagatagaaaagctacttctgcctaggggtatggtaaacatcagttggggtcaagctcataccagagagcacaacatagggaaaaataacaggaaagtgggaacaagcaggcagtgagttttgtgtaaaaagaattcagttaaatagttgagtgtctactctatatttggtacttttacaataagagatgcaaaggtgaattgtgctgtttaacagctgactgtcagggtttttccatctcatcaatgttgacagtttgggccagatattgttgggcaggtggacatgctgtgcgttgtagggtgtttagcaacatccttagcccacatgatatgccactaccataacccaggcttaccaat

SEQ ID NO: 896902 - DNA, 630 bp, Homo sapiens
cctcaccaatttggccttctgcctctgaccttttgcttttcgtctcagtcattattatcatrtaatcttaaacccttaaagatgggagaaatctgagatcattcttaatctggtttaaactgagaatgagcccgtggttggcatctctcttctcagagctaaaattaaatctgcaaagccctgtatcaaatttctaattttttttctccctaccctttctgccactttaatctcttaaccccaaatcacaattggtgcaacagcttggggccaagccacttcaatcaaattcctactggtgataggttttgcaatataccaagactgcaagggcaattaactttggcaaaataagggtcacacctaatttcctgagaaactcataaacttcatgtaatcctgagtaactggacatctatcaaagggttcatacagtaattctcttgagagatcattgtaatctgccagtttgattaattccccagaaatataaagctgaagttgataagcttagccctcatcctgctgcacggagaaaaacttgagctgtggcaaccttctaagacactgcttaggccctcctttcccgtgggaaattgttttcacacttttgtaatattttccattgac

SEQ ID NO: 896903 - DNA, 611 bp, Homo sapiens
cccaaactcaaaccccttccacatttattaagccccaactgtgaacagggtactgtcatgggcaggtagacaaacagatgaaaaaaaagtgagagaaagcrttgacaacataaactgtggcaatgagaccaacataatcatactaattaacaactatttttttttctggtttttttttttttttttccagacagggtcttgctctgtcgcacaggctgaagtgcaacggtgtgatctcgactcactgcagcctctgcctcctgggctccagccatcctcctacctcagcctccccagtaactgggactacaggagtgcaccatcatccctggctaatttttgtattttttgtagagatggggtttcaccgtgttgcccaagctggtcccaaactcctgagctcaagcgatctgcctgactcggcctcctaaagttctgggattacaggcgtgagccaccgcattgggccaacacttattttctaagcctgttacgtattttggtctatgaatccacttatctcaattgttttggggagagacattaaatatggggcttgaggaaaagccacctgatgtccgttctgatagagaaaccttccagaaagggtc

SEQ ID NO: 896904 - DNA, 656 bp, Homo sapiens
tcaatatagtagaacgtgcaagaaaaataacaccgtttatgtttcttttccatcttatgtctcttaaaataaaaaaccattttttaatataaagggaagaaatcaagagaaaagagaattaatgcatatggagcaactacagagtgcctggccttatgctggatgttttctgatgtaatatgttgtttataacaactatacaatgtgtatgtgtgtggcagattgtatttcccaagtatgactatactggtgcacacacacatacacagtcacgcatgtataccttacatcccacatgctcttgatataataggactgaaactcctccaatcaaaagatgaggcctatatgccctaattttgcctctaggcagggacttgggatttttccaatcactagagtatggtggaagtgacgctatgtgactttcaagattgggtcataaaagggtagagcttccaccaggcatgcattctctctctctatatatatatatattctccctctctctatctctcccctctccccaaacctcttttgacatcccttaacsttcaggaaagtcatgttaaaaccctctggccttgtcacaagataaaatcacataattacatgccataggaacttaactcttgtttatgtcacttaccctatag

SEQ ID NO: 896905 - DNA, 582 bp, Homo sapiens
attgtagctccatccatccttccattctctatcctgattctattgcaatcactctctggtttttgttatagcttcatcacctaagtgtggcttcattggttatctgcatctagcccagaaaagggcaaagagaaagttaaaagggaacaatgtagccctggaatagcatccatcatctctaaaatagtcacatgccacacggcactgcaggagacactgggaaatgtgtgttctggaagaacagtgaacagcaacaatctctgacacactgggctaatcatattggtgcctaccaattatcaatggttggttatgtgtctttttgagtcttgacttgatgacattttgctggctcctttctttcccatacccctacttctattttacagaatgaggtgttgccccattctagaatggcaaataaaagccaattagagctttaaatcaaatgtgttataattttatcttttgacaaaactaatgtacattcactgtggattatgtgtttaatcaaagcttaayggataatgcagaataattacagtactttacagaatggcatacaaattcggaataaaatgc

SEQ ID NO: 896906 - DNA, 619 bp, Homo sapiens
gtggtcatctttaggcctattttctcaaaggaaaaataatccaacatcctattatttcaaaaacattgtcagctaatgtttccttcaaattgttattaatctcccagcagtaatttgagggttttgtatcttaaaattcataaggtagtagtatatgaaagccaataaaaatcggtatgaccattttgttcctgggccatcaagacctgtggttttaatctttctttaatatcaaataacttaagctttcatcccatccagagaaattttttatctccataatttttctagagccttccagaaaagggaggagagtcataggaaggggatttcattcattcatcatttttctttctagattccttctttctaacttgagtttcaattacccctcactatactagctcctaaagttatggtcctctctctatatggcttaccacaaatgtaccataactcttctaacatttgcccgaacacttttaatgtattgtcattgcagatggtaaattttatcaaagatttaatgaacagtgtacaacaattacagtgctctacaggamagatacaaattcagattgcagtgtggtatccgaagcatctttgatagttccttaca

SEQ ID NO: 896907 - DNA, 666 bp, Homo sapiens
tcactttacatagagtcaaattttgactctctggaagcaatttaaccagttaggagactaaycatggtaaacgaaaatatattcataaaaaaatgtaagatctcatgaaaagctctttgtattacaaattgtctcgggtttgtaattgcacagcaaatcactgagccatccagcatatcttccaacatgaagatctaatcgccaaagccttaacttagattgttacttatgtttctaaatctgtggaagcacatttccttttcttcttcttttcttttactgttaatatccttattctctattttaccagtggagaatgtttagtattaatttccatttagctcaagattcaagaaatgcaaagtgctatttttatcaaatttctgaaagcctactgtcttctgctttggaagtcccacaacagctctttaatttccttaagccccactttcctcatcagcaagttggtgtggcaatggatcataataggttgctgggaggatgaagtgagatccaggcatgtgaaacactgtacacaattcctaacacagactaaggatgcaaatgttaggaacttgcagatttaaaaaaaattgcattctcaaaaagatgctctattttaacaaatgaacaagaagacaattttgcatatctttttgatacagc

SEQ ID NO: 896908 - DNA, 254 bp, Homo sapiens
aggtgctgcacacttttaaacaaacagatctcatgagaactcactcactatcatgaggacagcaccaggagatggtgctaaaccattcatgaaggaccaccccatgatccaatcaccttccacatgccccatctccaacactgggattacatgtcaacatgagatttggtggggacatagawtgaaatcatatcatatatgaataacactttaacctttccaaagcacgtttacgtaccatttgactctttcaa

SEQ ID NO: 896909 - DNA, 564 bp, Homo sapiens
agggtgcctcatatggatgtcttataggatgggatacctaaggagagaagaattatgagattaaatactagacctgtgtgtgttttgttttgttttaaggaattagcaggtattccatgcaaacattgtttcttacagggctgagaaccgggttttatagttaccctaaagagcaaaacccaaagactccacataagtattatgcaatgcccctttatctgcaggtggtcttcctcaatgtgaccttactttattcaaacatattaaactgttttagaattgtttttgtccataacttatataatatatcctctcagaaaaaaaaaatcctacattgagtagacaaaaaatagcatctcactttcattccaagaaaataggagtagacaaatccgggttagtaattaacaaaaataaaagcttccctcaacagctgttcacacccctgccccattctaragagcacaggcagaacaggcccaagaggaaagataaaacagcttaagctggatttaaaatagtgtgcagcaatgtttaaggctttttctctctccagccagaaag

SEQ ID NO: 896910 - DNA, 586 bp, Homo sapiens
caaagatgaataatttacaatcctggcttccaataagtcagaggctgtagaggaaaaagtaatcataacaaataattaatttaatgaagtgttgttactgagtgctagtgccatggagaaggaagcaacaccaactttcagcaaatatttattgaatgaatgaactaactctattaatggaaggtatatttgtggtgaattttttacagattagcaggtcttcgcctgaagaaaggatgaaggaacatttcgggtaaaaggaataacatacaactagaaaagatccagagtatatgatcagtctagaaaatcaacgattctcaaattgggtagtacattggagttaccttggaaatgtaaaaaaaaaaaaaaaaagtgtggcctggatcacaccccccaaaattttgacttaattggtatggggagaggcctgagtacttgtgtattttatacttccccaggtgcttttaatatgcagcaaagttkaggaaccactagtggaccatcctgcaaatttccttaattctggtttgttgactttcctgccacaatactcattaaatctttaagtaagtcacaaaattag

SEQ ID NO: 896911 - DNA, 622 bp, Homo sapiens
tgctttttattttttgtgtatttataatatgtcttratttgaggttaccatgcggcttgcaattactatcttataacccattattttaagctaagaacaacttaacactatttgcataaacaaacaaacaagcaaaaagaaaactaataaaaactctacccctcaactttatccccccgcttcttaactttttgttgtttctatttatatcttattgtagtgtctacatcttgaaaagtttttgtggttattattttcgattggttcatcttttagtatttctacttgagtagtttacacaccacagttacagtgtataactgtatgaactactcttatcttacccaccaaagtctatggtgtgtaaacacagactttataatagtctgtggggttttttctgtacttactattaccagtgacttttgtaccttcagatgattttttattgctcattaatgtccttttctttctgattgaagtactccctttagcatttcttgaaggacacgtctggtgttcatgaaatccctcagcttttgtttgtctaggaaagtctttattttctccttcgtgtttgaaggatattttcaccagatatagtattttagggtaaaaggtc

SEQ ID NO: 896912 - DNA, 682 bp, Homo sapiens
aattggacccagataccacaggctttttacacccactaatttgcatcttttaatcttcattttcctttcttgtaacacagattttactgtcatttcagcctttatctagaaatctatttccagcaataggtaggatcttagcatttgtgatttcatgtaaaattaatagaacctagattatgggcagtgcagtcagcgtaggagactaacttgcaaagggcaggtgagaaaaacagccctttcaaagaagggctaggatcagcagaacatgctgataatcgggaggctgcagcttctctgactgcccaccaggggtagaactgaggccactgagagcagttgctagtcctcgcaccccgagacctcgagcaatggtggcaaataggacaggaagccattctctgagtcagcagctcccaaatataagccaggagtagcagcacatatgttcccaaactgtgattatgctccacaatcccctcccttcctctcccagagcaaatcacagccattctcagtgtgctactgctgaggaaagagaactggaaaataaatcctctgtgttttccaatgaaaatrctgttcaatgtttaaataaatgttatagaagcaacagctttcagacatgactgcacgttgtgatcacctggggaattttgaacactcctaaagcccaggcccc

SEQ ID NO: 896913 - DNA, 577 bp, Homo sapiens
taaaatgaagcatagacagagtgaaaagaggaagtgaatattctaaatggacttcagtatgagggaggttcttctgtctaaacaaaggcatggcgttgagaattagcctgggatgcaaaaggggatttaactatttggtggtgttaggaaacaaggcagaattttaacctgaaataatatgtaatagcaagccctgaagattatgagatagggtatgacatgaaggggcatttaagaaaaatggtttagacgtagacttcagaataaatgggaaccaagcaaaactaggctcaaagatgttggttaggaggctgcttcagtaattcaattctaatgaaggattggaaaaatatcttcttggtagtttggatttggaagaagaaggagttcaaggttgaaaggaaagtacaaattgtcatatttcctaacatgcaagtattagtcactyactgctgtggtaatgctgtgtaacaaatccctcccaaatttagtggcttacaataatatgcatttacttatcttgcttataagtctttgggctggccagggtggctttgtttctggctgcaacttggtg

SEQ ID NO: 896914 - DNA, 588 bp, Homo sapiens
taaaaacctcttcacagaatgattatgaacatctgtgcatgctgctgatggctctgtctgtctttgggagcccatcagcgatattcaaaacgtagtatagacgagcctttccttgtcaccacatcaagcacaccatgaaaagattttctgtgctttgcattctctcctactctttgacgaaaagaactcaacttgacatttaaaaagcccatgcttcagaattaagcttgaggtgataaaatgatatgccttctcagatttattacttttttaattataccaaatcacacatcctaatgatatttttaaaaacccactttattgtattttacccacttgaactcttttaccatctctgttctaccccctctcagctcctaccacatgaaatattttctgtaggttttcatacaagcttggattaatttgccccaattaattttggcatagagtagagctgtgaaaaaatctgtgaagattttgttacatggagataaagtggtacataagccaaagaagcatatctgtatttcaactcttmttttaaaatatccctacaacagtgattggaattatgcaggagaaaca

SEQ ID NO: 896915 - DNA, 568 bp, Homo sapiens
tgactcagagttgcctgtacttaaattatggttccagtatcttctgcttcaaccagggatgccagtggtattcttcccctttagggttttgcaaacagatgttttgacaactaaccactgcttcttgtgattcayttccttggaattactgaaccccaaaccccacggggtttctgaaaagcctgcttctcagttggattgctgctgtgttaaaaaatcaaagaagttttggttcacattgcatcaaaatgagatccgtccttccatttctaagagctgactcttcattcacttcactgaaatgaagagcttcgattttccaccatattctgatatgtaaaggttacctttgcgtgctcttagcagacaaaaatgctagagtggtagaagaatacttacaggattattcagcccttagaatcattgcttcatcgatagtccagggtacagtggcctgctatgaaaccactgtggattctaggatgagcccattaattttcttgagctttatggtgttcattccttgaaattggagtaagactgagattatttttaaggatatattttc

SEQ ID NO: 896916 - DNA, 568 bp, Homo sapiens
tgactcagagttgcctgtacttaaattatggttccagtatcttctgcttcaaccagggatgccagtggtattcttcccctttagggttttgcaaacagatgttttgacaactaaccactgcttcttgtgattcacttccttggaattactgaaccccaaaccccacggggtttctgaaaagcctgcttctcagttggattgctgctgtgttaaaaaatcaaagaagttttggttcacattgcatcaaaatgagatccgtccttccatttctaagagctgactcttcattcacttcactgaaatgaagagcttcgattttccaccatattctgatatgtaaaggttacctttgcgtgctcttagcagacaaaaatgctagagtggtagaagaatacttacaggattattcagcccttagaatcattgcttcatcgatagtccagggtacagtggcctgcyatgaaaccactgtggattctaggatgagcccattaattttcttgagctttatggtgttcattccttgaaattggagtaagactgagattatttttaaggatatattttc

SEQ ID NO: 896917 - DNA, 562 bp, Homo sapiens
ttcaactgagttaagtcactaatactttggagttgttttgttatgtcaratggcttatcctgctaatagggattcaaagccagattgggaaaaaaaaaaaaaaacaactctccaacttgcagtgtgatcggaatgccatctgcatgcaacttaaatgaatggcacaaactttgttgtgatgcaatcaaacacaaaaccgcaagaaaatataatttaggaagatttttagatgctcctgtttgaatcaggggaaacattttattagataataagttagtttaagtttctgaaaattatttttgtacccttttgagatttttagagggtcttaaagacactgaccctttttttttttttttttttttgagacagagtctcactctgtcacccaggctggagtgcagtggtgtgatctccgctcactgccagctccgcctcctgggttcacgccattctccttcctcagcctcctgagtagctgggactacaggcgcccaccaccacgcctggctaattttttgtatttttagtagagacggggtttcaccaggttagccaggat

SEQ ID NO: 896918 - DNA, 562 bp, Homo sapiens
ttcaactgagttaagtcactaatactttggagttgttttgttatgtcagatggcttatcctgctaatagggattcaaagccagattggraaaaaaaaaaaaaaacaactctccaacttgcagtgtgatcggaatgccatctgcatgcaacttaaatgaatggcacaaactttgttgtgatgcaatcaaacacaaaaccgcaagaaaatataatttaggaagatttttagatgctcctgtttgaatcaggggaaacattttattagataataagttagtttaagtttctgaaaattatttttgtacccttttgagatttttagagggtcttaaagacactgaccctttttttttttttttttttttgagacagagtctcactctgtcacccaggctggagtgcagtggtgtgatctccgctcactgccagctccgcctcctgggttcacgccattctccttcctcagcctcctgagtagctgggactacaggcgcccaccaccacgcctggctaattttttgtatttttagtagagacggggtttcaccaggttagccaggat

SEQ ID NO: 896919 - DNA, 648 bp, Homo sapiens
accactatacatctattagaatggccaagatccagaacactgacaacaccaagtattgatgaggatgtggagcaacaggaactttcgttcactayttgtgggaatgcagaatgatacagccactttagaagacattttggcattttcttacaaaactaaacattctcttaccatacgatccagcaattgcacaccttggtatttatccaaaagagttgaaaacatgtgtccaaacaaaagcccgcacacgaatgtttatagaaacattatttataattgccaaaacttggaagcaaccaagttgttcttcattagatgaatgaataaattgtgttatatccagacagtggaatattattcagagctaaaaggaaatgagctgtcaaaccatgaatagacatggaagaatcttacaatgtattactaaatgaaataagccaatgtgagaaggctataatactgtgtgatttcaactgtatgccattctggaaaaggcaaaactattgggagagtaagaggatcagtggttgcccggggttgtagagagggagagatgaataggtggaacccagagggtttttagggcagtgaaactactctgtattatactacagtggtggatacttgttatcctacatttgtccaagc

SEQ ID NO: 896920 - DNA, 551 bp, Homo sapiens
attgtcatttccattggataaatacctagtgggatccctgagtcgcattctatttttaactttttgaggaacgtacatactgttttccataatggctayactaatttacattccatgaacaatgtataagatttcccctttctccatatcgttgtcagcatttgttatttttcctgtcttttgataatagccctgttagctgggatgacgtggtatctcattgtggattcaatttgcatttccctgataattcgtgactttgagcacttttcatggaccattgtatacttgtatgtcttcttttgaaaaaagtgtcctcaggtcgttgcctatttattaatcagattattttttcccactattgagttttaaaatacattctagataaccatttttcagatgtttagtttggaaatattgtctctcattgtacagcttttctcttggatctgtcaattatctcctttgctgtgcagaagattttttagtttgatgtcatcccattcatctatttttacttttgtaatctatgcttttgaagttttattttg

SEQ ID NO: 896921 - DNA, 551 bp, Homo sapiens
attgtcatttccattggataaatacctagtgggatccctgagtcgcattctatttttaactttttgaggaacgtacatactgttttccataatggctatactaatttacattccatgaacaatgtataagatttcccctttctccatatcgttgtcagcatttgttatttttcctgtcttttgataatagccctgttagctgggatgacgtggtatctcattgtggattcaatttgcatttccctgataattcgtgactttgagcacttttcatggaccattgtatacttgtatgtcttcttttgaaaaaagtgtcctcaggtcgttgcctatttattaatcagattattttttcccactattgagttttaaaatacattctagataaccatttttcagatgtttagtttggaaatattgtctmtcattgtacagcttttctcttggatctgtcaattatctcctttgctgtgcagaagattttttagtttgatgtcatcccattcatctatttttacttttgtaatctatgcttttgaagttttattttg

SEQ ID NO: 896922 - DNA, 551 bp, Homo sapiens
attgtcatttccattggataaatacctagtgggatccctgagtcgcattctatttttaactttttgaggaacgtacatactgttttccataatggctatactaatttacattccatgaacaatgtataagatttcccctttctccatatcgttgtcagcatttgttatttttcctgtcttttgataatagccctgttagctgggatgacgtggtatctcattgtggattcaatttgcatttccctgataattcgtgactttgagcacttttcatggaccattgtatacttgtatgtcttcttttgaaaaaagtgtcctcaggtcgttgcctatttattaatcagattattttttcccactattgagttttaaaatacattctagataaccatttttcagatgtttagtttggaaatattgtctctcattstacagcttttctcttggatctgtcaattatctcctttgctgtgcagaagattttttagtttgatgtcatcccattcatctatttttacttttgtaatctatgcttttgaagttttattttg

SEQ ID NO: 896923 - DNA, 635 bp, Homo sapiens
cttcattaccactttaaaggccctacaaagaattttgaaaagcaaacaaacaaacaaacaraaaacagtttagcccacaacactgatctgaatcattttctgaagaatttcttctaatattttttttttttaaatttttgagacgaagtctaactgtcacccaggctggagtgcagtggcacgatctcggctcactgcaacctccgcctcatggattcaagcgattctcctgcctcagcctcccaagtagctgggattacaggcacacaccaccatgcccagctaatttttgtattttagtagagacagggtttcaccatgttggccaggctggtctcaaactcctgacctcacgtgatccacccgcctcggcctcccaaagtgctgggattataggcatgagccacctcgcctggccaatatttcttggaaagtaggtctactagtggcaaattttctcaatttttgtttgtctgagaaaatctttatttctccttcacaagaagcataacttagctggatacagaattctgggttggtggttttttttctttcaatactttaaatatttcacttcactgtctttttgcttgcatgttttctgagaagtgcagtgtaattcttatccatgcttc

SEQ ID NO: 896924 - DNA, 635 bp, Homo sapiens
cttcattaccactttaaaggccctacaaagaattttgaaaagcaaacaaacaaacaaacaaaaaacagtttagcccacaacactgatctgaatcattttctgaagaatttcttctaatatttttttttttwaaatttttgagacgaagtctaactgtcacccaggctggagtgcagtggcacgatctcggctcactgcaacctccgcctcatggattcaagcgattctcctgcctcagcctcccaagtagctgggattacaggcacacaccaccatgcccagctaatttttgtattttagtagagacagggtttcaccatgttggccaggctggtctcaaactcctgacctcacgtgatccacccgcctcggcctcccaaagtgctgggattataggcatgagccacctcgcctggccaatatttcttggaaagtaggtctactagtggcaaattttctcaatttttgtttgtctgagaaaatctttatttctccttcacaagaagcataacttagctggatacagaattctgggttggtggttttttttctttcaatactttaaatatttcacttcactgtctttttgcttgcatgttttctgagaagtgcagtgtaattcttatccatgcttc

SEQ ID NO: 896925 - DNA, 611 bp, Homo sapiens
tttaaatatacaattcagtggcatttagtaaattctcagtggtgtgcaaccatcacctctatctaattccagttctggaattatggaattccataattggaatgttccatatggaacattcccatcacccaaaggagaccctgtatccattaaacagtcactccatatttcccccacctcccagatcctagcaatcactcatctactttctatctctatggatttacctattctggatattttatcaatggaactgtacaatatgtgattttttgtgtctggcttctttcacttttttgaggtttgtctacattgtatcaatgcttcattgtttttatgaatgaataacctaccattgcatagataggtgatgttttgtttatctatctgttgatggacatttaggctgcttccacttttgtctattgtgaatagtgctgctatgaacatctgcgtacaagttttcatgtggacatgtttcctrttctcttaggtatacacctaggaatggaactgctgggtcatacaccaacctgtttaccaaagcagctgcaccagttttcattaccaccagcagtatacagcgttcttgtttaccacatcctggccaa

SEQ ID NO: 896926 - DNA, 594 bp, Homo sapiens
atttaaagtgtgtatattatagcaaaaaccattcaaacatgacttttaayggaacggaacagattccattccatctgcatgttgcttcttccatgacagcaaaggatattactgtgaaagcagctgtagtcagggatctgttcagctcagtggtggaattattgtcttctctaagtgcggtagctaaaataaattacttttgcaataaggtgacagctagaagacaccttgcattctcaaaagccacattataaaaacagaggcttagaaagggccagtggaggcaatggtattaagactgaagagtttcagactcaccacgatgggagagtcagtatgataaaatcattaagggtttaggagtcaaatgatgtggcttacaaatgatgtggctttagggaagttacttaaccactatgtgcctcaatttctcaatctcaaaaactgacataataacagtattcatcttgataagttgtttaaacaaatattaaattagataatgtacatgaatccctttgtaaactgtaaaatgatctaaaaatgaattataattctgccatctctattcacctgtatatgggctatgggctc

SEQ ID NO: 896927 - DNA, 494 bp, Homo sapiens
cccagacctcttcgccgtccaagagcctggggccgtggggggcggggcggcctgctatcggccccgccccgccgacaggacccgcctctctccgcaggcacggcggggccgaccccgcctctcgctcccagcatgccgtgcgacagcggcggcgcggcgagcggagccgggaggcggggaagcagtggccgtgtgagcgtgaggagctgccgccaccgcctgttcctcgtcgtcctcctcctcgggggccccggcgacgtgggccgcgcagggccctggaagagacgtcgcctccccttcatccgcctctctctcaccgcgccgctcccgcctcctcgtcctgtgctgcgggctcaggcggaacccgraacggtcgtcctcttcccccgcccgccgccgcctcctcctcctcctccttctcggcttccttctcagccccgggccggagcggggtgttggcggcggccggttcgggtggcgactcgcgcttctct

SEQ ID NO: 896928 - DNA, 538 bp, Homo sapiens
gtgaagctgagagtagtcctgaggctgtggcagagaagggcatggtctttaatgctctggacccatttgctaagctgatttttgcttttgtcctataacaacaatgattaattttatccaaattatcctttctctccttgttaatccaccgtgtttttctgaacactttcttatggattagtattgatgctggggtttcttggaggacccagccaatgtaacaaaagcttctcaagatgtttactgatgctcttctcctattgatctaattaaagatcatgatgcctaatataattagtcagcctttctgtcaggatgcttcttacacttttaaacatacaagcaccagagatcaattgctttaggataatgaactacaattctgaaagaaatggctttcaggatacaaatatgtgaatcaactaggactttaattayaggatttctcacttttttgtaaagcagttgatgattattttcctcccagaccaagtccttctccatctagaggccagaatcccagcatcacttcatggaa

SEQ ID NO: 896929 - DNA, 654 bp, Homo sapiens
gtcatgtgtcccggacatagtgacgaagtcattcagattcacaagaaattggcaaagaggagtcactagccagatttcaattccatttgattttcttcttagcagtccttacatctaaartgattttgtttagtgtatgtctctcctaggacaatggagaacagcatttgtttgtctttctcaagacacctgccaggtcctgagagtccttagcccaaggtagccacgttttatctcctcattaagtgagtctgattccaattccaggccacaagaaatatctctaaactttctacttacggggcttaggtttctccagctaaatcttagagaaaaactcacagtcatcaacagagtggctagctccatatcaacttcccttcatttcttcaaacaggagaatgatgcattgtactgggggagggaggctgcggttagggtggttcacttgcccttttagatccactaaaaagctgaggggtaattgcagatgcaaacctggcaccgttaactgcaaaactccacaccgaattaataaagaattgggcacttagcttcatgtttttgcatcttaacacatgaaggcactttgtaaagggttgaatgaacataattatcaatttccacatgcatattaggattcagccggggcca

SEQ ID NO: 896930 - DNA, 623 bp, Homo sapiens
ataatggaagaagagcaggctgggatgggttgcggagggttgaaatggtcagacagataatttggtcttgattgctttasctcagaacttcctaaccagtgtgccaggattacagaaaaacccccagcctgcaagcaacctattcatctgtttctcacagtgtgctataccagcattaccatttgctatgcctgccatgccctgcaaagggaagcactactttagatttcccagaagccacattgttgggatgggattttgaagcatgccctgtagccaaaggtaaagattaggacatggagagttgcctaatccctgagtcatactggggaagatccaaatccagggttgctctgcttttttcccccactacccatctatggcaaagagccactgccaactctcactctctgtaagcccaacatcattattgacaagagaaaggaaaaagttcaatgcccactcacacaacccagtcctggaaggaaaacctttgaaaataggatcatagttcgtgcatgtggagcgaactggaaggctctatattttgctgaacatactttcttttctcctggccctatgtaacaggaccccagggtttcatgtcagtggttttataaatt

SEQ ID NO: 896931 - DNA, 646 bp, Homo sapiens
cagaactgtaaataaaatatctgaaataatagacattcctcctgtcttctggggaatttcagtggtggtaatagaatactttctataacaaagccacctatcaatttagttttgtgacactatatctccttggtgcatcttttgtagtaagctttacagtaaatattttcaaaaccagaatttaaaaaattctattacaattgtgtttctcaatcttgattgtgcatcaggatcacctaaagggctctctaaaatattatattttggggccccactcccagttcactgatttagtaagtctgaggtgctacctcagaatttgtattttagcaagttccatattatattaatgtttatagtgctacactttgagaaccactgtctaacagaaatagcattcacatatgaaaaaaaaaaatcaggaatcaggcggtatgtgtgtgtgtgtgttagcacttccagcacctggatgagccaaagtctaaacgaaaaaataatgaaaatccttaccaccaataagcttctcttcaccacatcctaacatctggtcagaagaaatacatgcctttggtatttgctttccttctagtyataagaatagatgcagcatataaaaggactattaaatatctaggaacaaattaaa

SEQ ID NO: 896932 - DNA, 578 bp, Homo sapiens
ctactcttcctagggtaagaaactgggagtggcttgggtggttctagttcaaggtctctcatgaggttgttgtcaagttgtctaccggggctgctgctgtctcaaggctcaatgggggctggaagttgcacttgacagatcactcacttggttgttggtaggcttttagttccttggtggctgttgcccagaggccccaggactctctgtggggctgcttacaacataacgtctagctttccagagtgaataatacaagagagaaagaaaaaataagagcaaggatttaccatggcaaacctcttgtatacactcctctaagtactgaggctctcaaatgctaagattttgaaacaaaggtttatacttaggagaagactatatgtgaagccctgttattataatcagtgttaccatgagtacaaactaaaactgaactgttgaaaaaaaacaaaattatttatattattgttgaccttttatgaaaggaaaatattaattaaggccaggtcaaagaaaaaaaatgcctccctgatctctgaataaragaccctaaaattataggtaatataatggaa

SEQ ID NO: 896933 - DNA, 611 bp, Homo sapiens
aaaatctgcaactggattaaatttgaattcctacaagattccaratagatctggttttcatagttctccacatttctgagtgccctttgtcagaattacatatggatgaacagaggtagagataagtttgacacttacattatcagaagatctaagaatatttgaactaatcagagtttctcatcataagtggttaaatggtaaatatatgtaaaagcaactcagtggaaacaatagaatcctcttgcttcctctctacctatgattggcccaagccctttcaattttttcttctacatatctccaaatctgcatttacttatctaactgcactagcatggcttagttcaagttctcattgtatctcacttgagtgattggtatggttttcttactgtgttcttgcttctagtgtccctacttgtgtgatcttctgaaaacgtaaatatgatggcatcatttgcctacataaaaccattctgtgactctgtgacatgtaggcttgacaggacaaaacccaagaccccaatatggcatatatggctaaccatcacgtaggtctcattcaggacaagctatataattttcccagagcaatgaaaattatatat

SEQ ID NO: 896934 - DNA, 657 bp, Homo sapiens
tacaaaatgcatgtaaaggctggagaaatccacattataaaagttaggtctgccactggcttcgggttgactgcaaaagaatcagagatttgatgcttcacagattttccacagtcagcctattgccttagaaaggctatttttttcagccttccacaactcctgtgaatgtatctcatcggtgtggcctaaattgcatgtacaaccctggtgttacagacattcagtccctaatactgaggaaatcattgatgggttgtaaaggttataagtgccaacagagaatgtccaggaaacccttgcacaacatttgaatgttggaagataaaaagtgggtgtgagtcatcaattctgcattaagatttgacttcttagagtgtaacttttatgaaatcaaatttattgattaaagtaaagactagcattgcataattgacctcttgttgtctctcccacttatgtactccaagatgactattcaccacatgcatccaccttgaaacacattcgttttattggaaataactcaaaaattaytctaagccactctgtcagcattgaatgcaatcaaactgccagtgaaaaaaatgtatgctccatgattataatgggaaatgcacgtgtagagagaaaaccaatttgtttgtctctgtgact

SEQ ID NO: 896935 - DNA, 595 bp, Homo sapiens
atgctctacattatatgtcataagggaaatgcaaaatgttcttaggcctatgcctaagttacaacagtgacatacmactacacttcaattcaaatggctaaattcagaatactgacaataccaaatgctttcaacagtttggagcaatcaaaactctaatttattgctggtgagaatgcaaatggtatagctactttggaagatcatttgatttttacagaactaaacatactcttaccatacaatccaccaattgagttccttggtatctacccaaaggagttgaaaagttatgtccacacaaaaatctgcacatggatgtttataacagctttattcacaactgacaaaacttgcaagaaaccaagatgtccttcagtaggtaaactgatgaataaactggtataaaatagaatattatccagtgctttaaaaaaagcagctatcaagccatgtgaaagatatggaggaaatttcaatgcattttcaatgcattttactaagttaaagaggacaatctgaaaagactacatcatacatcatatatcatactgtataattatacaccatactatataattttgtcttttccaga

SEQ ID NO: 896936 - DNA, 621 bp, Homo sapiens
ttagaagtgataggcatttaacaatatgcaagtctatataagactttctaaatcatctataatcatgtattgcatgtactctgtaagcaatatgagctgctcttatatatctcactatatgtaacccagacccatgggtaataattttttcatctataaagtaaatcattaatttattgatttaaaaacatttactatgtattttattatgtgccatatacaggaataacagaactaaacatgtaaaaccgtactctcagagagtttatagtctggtgacagtaggggaaaatatgcaaattaaaacatcccaataaatatttgcatcatatgatgtagatgatgtagaagcaaatggggaaggtgatcagtggtcagtaacttcaaggctcagcaaagtctcactaatgccagtgacactggagcttattctaaaggataagtctatgtcacaagttatgaaatgaaaaaagaatattcatggccaagggcagtggctcatgccygtaatcccagcactttgggaggatgaggtgggtggattgcttgagcccaagaatttgaaaccagcctgggcaaggtgataaaaccccatctttataaaaaatacaaaaaaaatat

SEQ ID NO: 896937 - DNA, 503 bp, Homo sapiens
ctcaggtacacagatttgaattggtcaccttgcgcagtacatggtatactcttatcatctgtccatccatggccctctttctaaattattttccactttatttctcactccaatcccattctctccctctcataagcaccttcaccctcatgtttgcatgcttctcatatacacatatgtttattcaattacctttgtatctatggaaaatgcatagtatggcttgtgggtgaactttttttttttttttttgagacagagtctcactctgctgcccaggctggagtgcagtggcacaatgtcggctcactgcaacctccacctgctgggttcaagcaattctcctgcctcagcctcccgagtagctgggattacaagcacatgccaccatgcctggctaattttcatatttttttagtagagatggggtttcaccatgttggtcaggctggtctcgaactcctgacsttgtgacccacctgcctcggtctcccaaagcgctg

SEQ ID NO: 896938 - DNA, 650 bp, Homo sapiens
agcccatgactcttcttaagaagacttagtaataataacaacaatagtaataataatattgatcattcatcaagcacttgccaagagtcaggtgctgagcaactgacaaagcaaacgcmcatattaatcctacttaaggttcacaattaccctttggttcaggcactattattttttccattttccaaaggagcaaattaagactcagagatattaaatgacagagccgggttctaacacaggccaagctgcatgcaacacctatgctttcagtttctatactccatcaatttgcttgtcttggcttctggaccttcacaaagccactctctcagtctgtacttgttagggtcctccagagaaatagaaccaatatatacatatatgtactccgcaacttaggatggggttacatcccgataaatgtatcacaatgtcaaaaaaattgtaagttgaaccattataagtcaagaatcctctgtacacacacacacacacacacatacagagaatgagagagagagcgagagagagacagagagagagagagagagagagagagagagattggctcaaagaattatgtagtttgagaattcccaagatctacagcttggaagctgaagacccaggaaagccaatgtgtatat

SEQ ID NO: 896939 - DNA, 627 bp, Homo sapiens
gaaagaaaaatactgggtctcrgtcagttaaaagtgcctagtgtggctgccagacttacaacacggaggacaggcttgctggggaggatgctgtcaatcccccatcatcctcagatgttgggaatgttggctttgttccaatccagtttcccttcatggcggtctagccctcaggtgggaccggaaggaggtcctgggtcaactgagggtatctggccgaggctacacctgtgttatccaaaggcccatggacctggtccctgaccacctgttaaggtgtccagtcttttctattgttttttctttcatgattgtcatagttcgtatctcttctttatgtacaatgttaaatgttaagcatgttgcaaaccacagagataatattactgggtagaatgagcatttggcttagtggtcaaacgtataaaattgaaggctaagattagcacagatgaaacaaaatgtgccttagtatctgtacgtaaatttgtggcagaaatgttcttgtcatttccttcattgccaacttagtgccaagcacccgaggcacagaaaagaagaatggcctcacgagggaagcattaatttcaataccatcctacagctggtccttttctttaaacacag

SEQ ID NO: 896940 - DNA, 627 bp, Homo sapiens
gaaagaaaaatactgggtctcagtcagttaaaagtgcctagtgtggctgccagacttacaacacggaggacaggcttgctggggaggatgctgtcaatcccccatcatcctcagatgttgggaatgttggctttgttccaatccagtttcccttcatggcggtctagccctcaggtgggaccggaaggaggtcctgggtcaactgagggtatctggccgaggctacacctgtgttatccaaaggcccatggacctggtccctgaccacctgttaaggtgtccagtcttttctattgttttttctttcatgattgtcatagttcgtatctcttctttatgtacaatgttaaatgttaagcatgttgcaaaccacagagataatattactgggtagaatgagcatttggcttagtggtcaaacgtataaaattgaaggctaagattagcacagatgaaacaaaatgtgccttagtatctgtacgtaaatttgtggcagaaatgttcttgtcatttccttcattgccaacttagtgccaagcacccgaggcacagaaaagaagwatggcctcacgagggaagcattaatttcaataccatcctacagctggtccttttctttaaacacag

SEQ ID NO: 896941 - DNA, 546 bp, Homo sapiens
tttcaggttatattttagtgaataatgttaatatgtgttctaaaatagtatgggatttctaaaattctgatgtctgagtatgtgttattaatcataattagggttattttgttgggttattgtagaccacagaggtgactaaatttctttgtcaatcgtgtttttgactgtaactaccctaggacattttgacattcacagacaattgtcttattttgatcctcttcaaaagatggattatagtcctcaagggcaggtttttgataactttagagaccgcgaacaagagttgactgggtggactgaactaatggaagactgaagtaatatttttgacctcttgcttagaacattgctaatccgttgttttgcttttcagagtcaaagaagctgttcttttgagttatttgcagcttttgacaattgagtaaagyatattcttgtgaaccaaccagtgatttatgactgcagctgagaagagacaagagggatggcccatcaaactccaagcggtaatgcaactggagcctcacacaatagctccct

SEQ ID NO: 896942 - DNA, 643 bp, Homo sapiens
tgagaagcctgaggctctcaaaggcaaagtaamctgcctaagatcacagagcaagtgagcagtagagccaggatttgaactcaaacatgctgactacatcgtccacactcctaagcctgcctcttagcttcctcactcctccctccatctttaattctccatctatgctctaacataataaacaggacatctgtccctagaagtaaaaacagagcaaatcaaaaaggatgaaatgaagatgtgactgagaaaaagagttccacagaaatgttaataaggtagtccaggactggctcaaaagaccacacctcaggctcactggctttcagtgacccaaagagtctacagaattttgaaatgacataatttctctagtgtttggaatttctgttatacaccatggaatactatgcagccatagaaaagaatgacttcctggcctttgcagggacatggatggagctggaggccattatccttagcaaactaattcagaatcagaaaaccaaataccacatgttctcacttgtaagtgtgagctaaatgatgagaccacatggatgcataaagggaaataatatacacgagggactatggagggtagagggtgagagaagggagaggatcaggaaaaagtaaataa

SEQ ID NO: 896943 - DNA, 592 bp, Homo sapiens
tcaaaatgttttccatactggcttactgatttaaattcctaccaacagtatattcttatacactttaagttkttcccttttctccaatcctctccaatgcttattatttctcatcttttttataatagccattctaacaggtgtgaggtaatagctcagtgtaagtttatttacatttctctgatgattaccgattttgagcattttaaatatacctgttggccatttgtttgtcctcttttgtgaaatgtctattcagatcttttgcccattttacaatcagattatttgttttctcactattgagttgtttgagttctttatatatattggatattaactcttcacctgatgtatggtttgcaaatatatcctctaattccgtagattgcctctttgttctgttgattgttttcatggctgtacagaaacttttcagtttgatgaaatttcattcatccatttttgctttttctgcctgtgcttttggtttcatattcaagaaatcattgctcagaccaagcttatggagattttctcctatgttttcttctaatacttttacagtttcagatatcacgtttgtaatcca

SEQ ID NO: 896944 - DNA, 550 bp, Homo sapiens
agggagctattgtgtgaggctccagttgcattaccgcttggagtttgatgggccatccctcttgtctcttctcagctgcagtcataaatcactggttggttcacaagaatatrctttactcaattgtcaaaagctgcaaataactcaaaagaacagcttctttgactctgaaaagcaaaacaacggattagcaatgttctaagcaagaggtcaaaaatattacttcagtcttccattagttcagtccacccagtcaactcttgttcgcggtctctaaagttatcaaaaacctgcccttgaggactataatccatcttttgaagaggatcaaaataagacaattgtctgtgaatgtcaaaatgtcctagggtagttacagtcaaaaacacgattgacaaagaaatttagtcacctctgtggtctacaataacccaacaaaataaccctaattatgattaataacacatactcagacatcagaattttagaaatcccatactattttagaacacatattaacattattcactaaaatataacctgaaaatta

SEQ ID NO: 896945 - DNA, 607 bp, Homo sapiens
aaaaaaaaggatacacatagttgaaggggaaaaagagatagatacattgtaatctgttcccacrgagctggatagagtggcttcctgggctcctgatggttttttgtttgtttgtttttgcttttttttttttttttttttttggttttctaacaagtagctggttatgcccttatgagagctggttgattgccatattcctcaatcctgtgaaattatccacgggtccttgaaatagaatactttttgctagtctgaataggtttatacatcttgcaacttaatgaagcttatttaagacaacatttatgacagacgatgggccaggatttactcccaaatctcacttgcttacttaaaagtttccattcttactaacgacacctttatgtgatcctcacatgatatgctcaccaatgtataatcctaataaatactaggagcctatgtagtctagtctttgcataatttggcagtagtagaaactagagttcaaatcctcaaaactcaataatgtttgcttaaacagaaaccagtgaagtttatttagacaaaatggtaatggtttgggggttcacactgattttaattggaaatcttcctttaa

SEQ ID NO: 896946 - DNA, 736 bp, Homo sapiens
caagaggccagccgtgttctgaaacagcgaaggaagcacgagctgatgaagggggcgtgtattgtaggaagggcagcgcacagagctcctctgacatcactggaggggaagctttatctttcagccatttgccctgttatgtaaacatcttaaagatcttctaaagcagcccttggtttctgaaggcacctgagaaagtgagtgtcattagttaggctgctattagtcaggctgttggcgtctgtgctggaagaatccattgcttggagggatggcctggacaaggctcaggtctttggggcttgtctccatgcagactggaccgagccagggtcactggaagatctgcttgaactgacctcagcctctaaagggcacctctttctccaagttgcttcatggaaacgagcaaactctgcccatttggaggcagcggctcttttctctgctcagatgtaaactgagtttattttcatttcacaatcagtaaccagcttaagacagaattttaaatgtatgtataaagtttacatataaatcccaatacaccttttctaacatctgcctggggagcagcttatttgggggctgacacaggcttgttttaccactttgcacatcttttcatcctatgtaattgtaaagaagacaatgtgtggttctcgaaacaatctcattgkccagtgacagcacgatgaaataaattgcagtgaacacatatgggaactatcaggcc

SEQ ID NO: 896947 - DNA, 617 bp, Homo sapiens
aaaggaatatcctgtgcagatgcacaatgacaaatgtgcaggataaagttctacaggggtacctcgaaggtctttcatcagcttgggtcctcttttggagagggtaggtcatgactggaaattargcaccttcataaagacctgggagatgtgcattccatgccatggttaacagaagtcctcctatttgctgaaattttcactagctgcatttctctgaatggatctctacatggcctctagagcaatggtttttcagtccatttgcttgcaagattttcttactgatttctggccatgtggtctcatgaaggcaagcaggagggctggatggagaaaatgtcagcagcaggcaggatggctgggttctgtcctcgttctgccactggtgcctggcccatgtcgcttcatttggctgggcctgcatttcctcctctgtgatatagggataaaaagtaccttgaggtgctgatgagacacatagatgggacagcagccagacccccaacacatttgatggagaggagaccacagtgagtggaaaggttgctgtcccagctttccttgttggaacaataaggatgtcagatgaaatggctgctaggatatttgctagt

SEQ ID NO: 896948 - DNA, 558 bp, Homo sapiens
ttgctaagagcaaaaaatgaaaagataaaccaataaaaccattacaaagatattttataataaaattcaggctctgttatctgcttggagatgtattttagaaacaaaatggataaaatttagtgctatcaaatatataaaaattgaaaaaccaaacttaacattcgaatgtatttccccaccctcaacagaaatctgatagagagttttaagattggttaagatcttttcatgaactgggaattacaatttgttaaatataattaaaacaatatatttatgtactttttacaattaaaaaaacaggctattgatagactaggaggaatatatttgccagccctctaactggcagggtggattcaggtgatctgagtgagcatgtagttgtcaccttcctttgactctactgcaagtgtgactttcatgaagctacctactcaaatgaagggagatgaacatcctagacmcagcagcctcacaccaggtgattctgagatacaccaaagactgaaaaccattaatttacagaagaacgtgactatccaacacgcagtt

SEQ ID NO: 896949 - DNA, 599 bp, Homo sapiens
acatttcatttactatagggttagaaacgaatattcctatttagcatatttgtcctcttaaaatagttgagtcacaggctgaggtattttattgtaccttgttacaaattaaatcayagcctcacacactcatttgctaccgattatttacaagtgaaacaaaaattcataaaaccacataagaaagaatacaggagatcaaacagttggttaaaaataacgttgggttcttttctaaatagcaatttgctatggaaccactttacatgttatatcttgcatctgcaacaaaagggtctgctgtttttaactcattttaaggatgaaacataaatctgctaaaatgtggaggtttatataagcagagaaccaaagcaggcctcccatacactccccctatctcttatcctctctgacaactgttcagccctaggagatataaatgacaataataagtaagtcgcagtcactgttctccctgaaacattacgacatcattttggtgagtaaaaaagctcttcattccttgccaagtgaatattttcttttgagggtttttctcataatgggagagatctgaatttgagagtgtctactgg

SEQ ID NO: 896950 - DNA, 576 bp, Homo sapiens
tgaattttagtggaaaagagtacaaaaatatcatcaatatggtttcagattccacattacaagtagtctttaagaaaccactagctgctgaattttggtgtagtatcaaggaagaatttcataattatctgcaaaggccattaaaacactcctccattctccaagcacatacctgtgagaaatttgagttttcttcatatacttcaaccaaagcaagataccccaagatgcctctgaatgaatgcagaggcagatgtaagagtccagctgtctactgttaagccagatattaaagagatttgcaaaaatgtaaaacagtcctattcctcacactaaaatattattttctttttgaaaatcgttatctttcctaaacattacttaggttgacatataatggatttgctattattttaaatgactaagtttattattaagtaataaacttmtcagttctaatttcttttctttttttttttttttttttaagatggagtctcgctccatcttaaaaaactcaaaggctggagtgcagtggcacgatctcagttcagtgcaacctctgcctcccgggtt

SEQ ID NO: 896951 - DNA, 661 bp, Homo sapiens
cttttcctttataaattactcaatctcaggtatgtctttatcagcagcatgaaaacagactaataacactgtctctaccaaaaataattcttttaaaaacyagccaggcatggtgacacgtgcctgtatttccagctactcaggaggctgagacaggaggattggttgagcctgggaggtcaaagctgcagtgagctgtcatgatgccactgcactccagcctgggtgacatagagaggctctaggatctgcagcagcagcagtgacatcctgcaatggaggcaccaggttcctcacccgcaaaccctcaccagccagtgtgcagctgcaaatgaagcatcagaaggggtgaggacatctaagactcttaggaagcggaacgatccccttgcaggcccagccttacaagcacaagttgagtgctcagcctgtaactgggactgcacagagtggggaaccagctgacctgggccaggagcacaccagtcatcttggggttttatacttctcaaaataattgctagaggacagtacacagtgtaatcaggaccaaacaaacttcatacccattattctctcacctccacaggctagcacagcttgctctaaacacattcctaagcaactttaagaaaagtttagcagagttcatagtatcatt

SEQ ID NO: 896952 - DNA, 665 bp, Homo sapiens
tcagaattatcaaggtttaagtcttggttaaggaagcataggcagaaatgtagtcaggggcagaggctaacatagtgaccttagccactgccaatgcattgacttgggtaaggtcaagtgctgatccctgacccagtccttggaaataaactcactttctcactgtagtgcattataggagctcctagtagctccatgtatgcccaacttaaatgtggatcagtcttccagccatttgcctgcatcatcttctccaatttaacctctaccggttatcctaacaactcagttagctttctacccaaacctgcccctacctcttaattaaaaacacatgtaaactcacatttttcacacttcattattctccttgaaattggacttagatatttgcccacttggccttggcactgtgatggcaaataattgcatcttccagtaaatttgaaaagaatggcagaaatgagtgcataaatggacctccatggagcttaccaagggcctgatacatagcaaatcttcagagtgtctgttgtcttaaatgatgtactagagagagtggatrgatagttggatggatgggtggatggatggatggctagaaggatggatggacgggtggatgggtggatggacgggatggatggatggatggcatatggatg

SEQ ID NO: 896953 - DNA, 628 bp, Homo sapiens
gatgtatttcatgtatgcatgcctgcatttttatatgtatgtataatatatgagatcacaataatctccccaaaataaataatcacactaattgatcatagttggatgatgcttactacctcattattttgaaaactaaaaaatacatagaaaaaaattcagcatttattattttcctatagaaactgtaccatttggaagaagagttgtaaatgaggcatttctctttatagaagttcctagctaatgcatgaaaaaaaatgttagaattagactataagaatttttcaaaccccaatgaattcacctaggatgtaggttgctaacaacagcatctacaaacatcataaaaagaaaataagtctccctccagaagaaactaaagctacccacaagcctccccctgcccacaaccataccaccaattaattttcagatttatttgatgaagtctttacacataactatcgatttataggaagctcagaggacagagccgtgtgaaatactatctgcaaaatccagactacagacagratagcccagtttattaaatgaataaattgcaaagagagagagaaagaagcagagagagagagcaagagagggagcctataaattaaaagtt

SEQ ID NO: 896954 - DNA, 618 bp, Homo sapiens
tgaaatttgaaaaagtcagagactatcacaacaaaaaagaaacaagatacacaaatagtcaccccctaagttttgttaagaataagacaatcctgcccctcacgcctggctcagtcaccagcaggaggagggcaccctccacagattgcaggagaaggggaaggactcctcctttccctaggtgcacctccactgctgccaccaaggcctggtacagtacccgcaggttcctccccatccccaggtcgggctgggccctgcagcgctcctactcccccttcccagcccccagacttaatgctgataccaccactagcaccgatgccaatacaaccgctgtcgccctcaatgcagcagcccaccctacaaggctcctaccaccttgcccccgcgggcaccctcctaccactccagtcgagctgcagtctccgtcgctgccaccaatctcgtgagaccagctgcagagccatatgcaggctccagtttaccacaggtgactcttccttgtcctcctcctccatcctggcttggagcagctgggagggcaaarccagaaaagcctagaatgggatgcagagagtggtagccttagagcctcaccttgtcacgctggccact

SEQ ID NO: 896955 - DNA, 593 bp, Homo sapiens
aggagtttctgatgtatacatattcatatacacacatttacatatattgcaagcacctatatccatttaggtgtatcaaactttggctctttcatgcatacatataccgtgctcatttatttaaaagagaaaaattactaaaaaaaatatttttttttaacaagaatctctgtttgctaaagttataaagatacctcaagcatgaccgtgatataaatattcatgttcagcattacagaaaagtgtgccttctagtatttaagtctcacaattcctataaactcttagggtctgtgtcactttttaaatcaggaaaaaatagtaagaagaaatgatcacttgaataatgagaaacaacctaaagtagtctattgcttccaagttgagataattgataaataaaataatttgagccaatttgtattagttcttctttttaaatttacagaaaactgttttgacttagtttcaaaaatatgcaaatattagactaactattattttttsttggcattattctagatacacctatacaggtagagcaaaacacagagcaagcactcagctggagaatttaatcaatgcagacaagc

SEQ ID NO: 896956 - DNA, 593 bp, Homo sapiens
aggagtttctgatgtatacatattcatatacacacatttacatatattgcaagcacctatatccatttaggtgtatcaaactttggctctttcatgcatacatataccgtgctcatttatttaaaagagaaaaattactaaaaaaaatatttttttttaacaagaatctctgtttgctaaagttataaagatacctcaagcatgaccgtgatataaatattcatgttcagcattacagaaaagtgtgccttctagtatttaagtctcacaattcctataaactcttagggtctgtgtcactttttaaatcaggaaaaaatagtaagaagaaatgatcacttgaataatgagaaacaacctaaagtagtctattgcttccaagttgagataattgataaataaaataatttgagccaatttgtattagttcttctttttaaatttacagaaaactgttttgacttagtttcaaaaatatgcaaatattagactaactattattttttcttggcattattctagatacacctatacaggtagagcaaaacrcagagcaagcactcagctggagaatttaatcaatgcagacaagc

SEQ ID NO: 896957 - DNA, 617 bp, Homo sapiens
gtggtttgaaagtagaaatcaataataggagaaaaaatggaaaaggtaaaattatgtggaatttaaataacacactaytgaacaatcaatttgtcaaagaagatcaaaatggaaaatatcaaaaaatttctgaatgaacgaaaatggagatacaacataccaaagctatggtatgcatcgaaagcatttctaagatgatatttgtggcaataaatacctacatgaagacaaataaatatctcaaatattctaattttacaccccatggaactagaaaaagaagaacaaactatacccaaagttagcagaaggaaggatataatgaagatcagaacagaagtaaatgaaatagagactagaaaaacaatacagagatcaagaaaacagttggttttttgaaaagaaaaacaaaattcaaaaacctttagctagatggattaaaaaagagaaaagaatcaaagaaatgaaatcgaaaatgaaaaagaagacagacaactgataccacagaaatacaaaggattgtaagtgactactatgaacagttatgtcaaccaattctataacctagatgaaatggatatttagaaatgtactacctatgaagattgaatcatgac

SEQ ID NO: 896958 - DNA, 622 bp, Homo sapiens
caatctacagaatgggagaaaatttttgcaatctacctaactgacaaaggtctaatatccaaaatttacaaggaatttaaacaaatttacaagaagaaagcaaacaaccccatcaaaaagtgggmaaaggatatggacacttctcaaaagaagacatttacacagccaacaaacatgaaataaagctcaacatcactgatcattacagaaatgtaaatcaaaaccacagtgagataccatgtcacaccggtcagaatggtgattattaaaaagtcaagaaaccatagatgctggtgaggctgtggagaatgaggaatgcttttatactgttggtgggaatgtaaattagttcaatcattgtagaagatagtatggcaattcctcaaggatctagaaccagaaataccatttgacccagcaatcccattactgggtatatacccaaaggaatgcaaatcattcaactataaagacacatgcacacgtatgtttattgcagcactatttacaataacaatgtcatggaaccaacccaaatgcccatcaaagatagaccgtataaagaaaatgtggtacatatacacaatggaatactatgcagccataaaaaggaatgagctca

SEQ ID NO: 896959 - DNA, 541 bp, Homo sapiens
tatagtatcggaactctaatagcagccatgataaaggggagatagaaactctttgattcaaatcaatttaattaaaaatacatcatgcatttattagatgtgtttcaatgytttcttaagatgaagccaaacttcgatatgtgagagattgggagaaaaataatccaatctaaaggataagcatgaagatactggaatcactaagcatactgaagaaatcttaagtgggctaattccaaaatctgtgttcttagtcactacatatagactgtcatatatgaagaataaagtaaactcagttttggacaaatggaaattgaattatcagaagggtcttctattttgagaaactgattgtaattagcatgttcaaggtttccttgtaacttttcaacttctgttaagatcaactatggcaaatattagaagaaaagtcagtatggcataatggaaaaaaaaatagtgggcaaaggaataagagatccatattgtaatcccagaagaacttcaaactcaccacatgactcttaagcatgttact

SEQ ID NO: 896960 - DNA, 683 bp, Homo sapiens
atacaattccttttccagtgtgaggcaggggacatagggttaagaaatttataattkttaattaaaagagtttaaaaaaatactatcatcaactatcaccatcattagataaaaaggagggatatttttgatccagaagggaaaggatataatcccagaacaaagtgtgattctttaaattgaacatacttaatggtaagaaaaactcttaaaattatcttctatctttttattttgctgccagacagtgaaaccctgaaaccctgtcgtggatcagcatggatcattagaccagatttgagaaacactgttttagattaaaagctgtgtgagaccctgaaaaatcacaggctgttcagcaaacaggccctgggtaaaaatgtgtgctctgccttcagtaggagtacaggacggtgattcagaccgtgagctctgtagttaggtattttaggtttaaatcctgcctctgcttctggttatacgatctctatgtctctaagcctcatcatttcctggagttaaaatgggtataacaataaatcatgtaagtctcataataatatgattattatgagaattaaatggaatgattcatccaagaatctttatattaagccttcaataaatgttagttttaaatttaacttaacactattattagtaataatagtaattatttttat

SEQ ID NO: 896961 - DNA, 638 bp, Homo sapiens
atattaaataatctacccagtttgtgtgaaaatttayaaggaacagattagcagattctgccaaagtcaaacacattctactttattccaacttttctatttttggcgggctgcaatacaggctactttacagtaaaagaggtggctgactgttgatttacttttcaaattcgcatggacaaaactgaggcaaaatgaagagcctgaagagtatcttctctgtttctttagttactagagggccaaataaatatgtttggaaacttacagcaaacaactaaaaccacattacccactatacaaacatattaataaataaaatatttaaaaattatttcgaaatggtctaaatagtaccaactccacaatactttgcactgaatcaaagctgccaattttatttctgccaagttttgtttcaaaacagaaataaacttttctatatgttcagcatgatctctaatgattaaagatagttatttacatttccctgaagcttctaaaaatgttttcttatcagtttgctttagcacagagggaagagtgtgaagtgatgtttacttgaacaggtgaagaagaatcaataagtcaatttctaaatattttacctgaaggaaaagacattttaagagagactg

SEQ ID NO: 896962 - DNA, 567 bp, Homo sapiens
cccattgatgtgctatattcaggagatccatttcatgtgcaaagacacacataggttcaaaacaaagggatggaggaaaatttaccaagcaaatggaaagaaaaaaaaaaaaaaaaaaagcatgggttgcaatcctagtctctgacaaaacagactttaaaccaacaagataaaaaaaaagacaaagaaggccttgcatgatggtaaagggaacagttcaacaagagctaactactctaaatatatatgcaccctatacaggagcacccagattcataaaataagttcttagagacttacaaagatactcagactcccacacaataatagtgggagactttaacattctactaccaatattagagagatcaatgagacagaaaattagcaaggatattcagggcttgaactcagctctgtatcaagtggacctaatagacatctacagaactctccaacccaaatcaacagaatatacattcttctcagtrccacatggaacttattctaaaatcgaccacataattggaagtaaaacattcctcagcaaaagcaaaagaactaaaa

SEQ ID NO: 896963 - DNA, 600 bp, Homo sapiens
ccaaaaaaccctccaaaaaaatcaataaaaccaggagctggttttttaaaaaaatttaaaaaatagataagccactagctagactaataaagaagaaaagagagaagcaccaaatagacacaataaaatatgaaaaagggggtatcatcactgaccccacagaaatacaaattaccatcagagaatactgtaaacacctctacacaaataaactagaaaatctagaagaaattgataaattcctggtaacctcccaagactaaaccaggaagaagttggagccctgaatagaccaatagcaagttctgaaattgaggcagtaattaatggcctaccaaccaaaaaatgtccaggaccaaatggatccacagctgaattctaccagagttacaaagaggagctggtaccatttcttctgaaactattctgaagaattgaaaaggagggactcctccctaattcattttatgaagccagcatcatcctgataccaaatcygggcagagacacaacaaaagaagaacacttcaggccaatatccctgatgagcattgatgcaaaaatcctcaataaaatactggcaaactgaatccaggagga

SEQ ID NO: 896964 - DNA, 582 bp, Homo sapiens
gcagctatgagcagtgaaatttacccttgaggtacacaaaaaaatgmcccattatccctttgctgtgggagcagtgctgatgctagtggctcgctctttggtcctggctctgactccaccagcagtaacaaccagcagtggtggaggctgtgggtgcaatagacttttatcatggccactcttctggaagatgtcactgccagcaactcctgactcagctttggcagcagctgccgcatcgaagactgttgtgagtggggaaaggtaatggggctgcaggaatgtgaggatgtagggactttgggacctccaaggcaggatgcagtctagacctccaaggcttggctttcaaaatggcaccttgttgtagctgcttaggactctgggggtgtgttggatccagaataagctcactctctaaagcagtaccttctcacagtctccgggcagtttccagtgatggtcttaggtcctgtaagggtcaaaggaccctcccatggctaggattgaaggagtccctaatgggaatgtgtactactggggatctctcacttattctttttccaaactggatagtctctc

SEQ ID NO: 896965 - DNA, 640 bp, Homo sapiens
tgtattatagtgtattatattaaaatgaaaataatggttgtattaaggaaaatataccagcatgttaattaattttcagaattataaaataatactgttttatggaaaatcttattaaaatttttgaaaaactattttcagttcccctttgaggtaataaaatatgtctggtcactgataaatctctgattgaataaaatacagaagacaaagagtaaatgcattgtcactgtataatttgtgaccaaaagagagacagcagcaaaaaacgtaagtagagtctgagcaggtttatccatacatttaactgctcttgtcctattctctggctccctgaaaacagacattacttcttgtgccaataagaaagtcactgtacataaatgaagttagtgatagcagcagactgagaatctgcaattaagaagtcacctttggaaaggcctggagagaaatttaagtgttcatgctgcaaagtactagatcatgaaaggaaaaaaatcagatataatataaaaggcattaaactgatcctaagtgattggtcactcsttactgctgcatatatctattgtttcttcctctaggttggacatagtcaatgtcaacatcttgattgttcacaaatctacgaggcctg

SEQ ID NO: 896966 - DNA, 588 bp, Homo sapiens
ttattaaatagggaatcctttccccattgcttgtttttgtcaggtttgtcaaaaatcagatggttgtagatgtgtggtgttatttctgaggcctctgttctgttccattggtctatatgtctgttttggtaccagtacaatgctgttttggttactgcagccttgtagtatagtttgaagtcaggtagcatgatgcctccagctttattccttttgcttaggattgtcttggctgtacaggctcttttttggttccatatgaaatttaaagtagctttttccaattccatgaagaaagtcaatggtagcttgatggggatagcattgaatctataaattattttgggcaatatggccattttcacaatactctttcttcctatccatgagcatggaatatttttctatttttttgtgtcctctattatttccttgagcagtggtttgtaattctccttgaagaggtccttcamatcccttgtaagttggattcctaggtattttattctctttgtagtaattgtgaatgggagttcacccatgatttggctctctgtttgttgattattggtgtataggaatgcttgt

SEQ ID NO: 896967 - DNA, 614 bp, Homo sapiens
cctgtctctccacttattccaggcttcttttatgtcctctaataaagktttatatttttctattttcagttttgttcgcatgttgtcaaattcaattctcaatattttatatttttgcttttattttggaatgtgagctatccttctcttatctcatcctatagcatttaagactagactggatattacttatacaaaggaaggtaattcaatttctgccaactggtattcttgtgactttatccccacaaatttctctctctgcagctgaaaaacacaaactcaataacctctgtaattaaaaaaaattaaatataaaaatatttacattattcctattgtactgactagacaattgagtctcaaagacgataatttatccaacataattgtgtgaataatgacaaaaaaacacccagttttgggaaaattacaaatgcaatttctagcagacactgcttggttatctagtgttttgaaataaacaactccaaaacttcgtggcttgaaataagcattatttatcttattacagttgtttgggttgataatttagacagagcttagctgggatggcttgtctttgctccatgttatgctgacttgactcactc

SEQ ID NO: 896968 - DNA, 583 bp, Homo sapiens
ggaaaccattattctcagcaaactatcgcaagaacaaaaaaaccaaacaccrcatgttgttacttgtaggtgggaattgaacaatgagaacacatggacacaggaaggggaacaccataccctggggcctgttgccgggtggggggaggggggagggatagcattaggagatatatctaatgtaaatgacaagctaatgggtacagcacaccaacatggcacatgtatacatatgtaacaaacctgcacattgtgcacatgtaccctaaaacttaaagtattaaaaaaaaaaaaaaagaaaccagtttacagttaaactaaggggaactttaaggccatcttggtcatgtttgacaaatgtcttaagaattgtttgtgtttgtcaccagtgatgtgaatcccattagttatatgcattctaaaatcatttatggctaaaagcaattaatactttgacctttctatatagacatactaagcatataaatggtgactaccgattgttgttatcttgggaatatttttatagtagtctacctaaatctatgttcctacaaagctgtgtgcataaaaaaattgtatt

SEQ ID NO: 896969 - DNA, 623 bp, Homo sapiens
tttcttgccactcattgcccaaacaaaatgccaataacatattgttaggttytatgtttttgtagcacaaaaattctggtaccattttttatatcagtcatgattgcctagataatgctatagtaacaaacaaaaacaaactctttgtagattttagtaataaaagttaatttctcattcacaccagatgtctagcatgggtcttaaatattgtgctctatatagattccaggtcaaaaagaataaaacatctggaattgtactagttttattgtctggtgaattaaaaaaggaggaggaggagaggacaaataagaaaaatgaaagaggaggaggggaacagaagtaaggaagaatatggcaaaacatttactctcttaaaatttctaccataagtgaattttagcactatcattcatagttcattggtcaaaattagatatgtggccaggtctttttcacaaggacagagtagaatgatgctcaggaattggaaatgaatatagtgaacataacaaagtctacctaccacaaataaatgttcatccataggcaactttaattaattatgctaaatctgtataaagcagtatcaaaaagctatttaagaaaaagaatgaaga

SEQ ID NO: 896970 - DNA, 623 bp, Homo sapiens
tttcttgccactcattgcccaaacaaaatgccaataacatattgttaggttctatgtttttgtagcacaaaaattctggtaccattttttatatcagtcatgattgcctagataatgctatagtaacaaacaaaaacaaactctttgtagattttagtaataaaagttaatttctcattcacaccagatgtctagcatgggtcttaaatattgtgctctatatagattccaggtcaaaaagaataaaacatctggaattgtactagttttattgtctggtgaattaaaaaaggaggaggaggagaggacaaataagaaaaatgaaagaggaggaggggaacagaagtaaggaagaatatggcaaaacatttactctcttaaaatttctaccataagtgaattttagcactatcattcatagttcattggtcaaaattagatatgtggccaggtctttttcacaaggacagagtagaatgatgctcaggaattggaaatgaatatrgtgaacataacaaagtctacctaccacaaataaatgttcatccataggcaactttaattaattatgctaaatctgtataaagcagtatcaaaaagctatttaagaaaaagaatgaaga

SEQ ID NO: 896971 - DNA, 596 bp, Homo sapiens
attctcatgtgttattttttaaaggtatttagctagctttaagtagctggaatactargttagtagttaattttatttattacaccatcttccagattcctttgtgtctaatatgaagtcagatgtttgttaatcttttgaaagtaacccatctttaatatgtatttaccttaaaattctctctcaatttgatttcctgtagttttactatgaggtagaaatttatttaattatattgcttgatatttattacatctgtgaaactattaatatttattatggtctaaatatgttctccaaaattcatatgttaaaacttatataccaatattatagtattaacaggtaggatttttaggaggtaagtaagaagggctccactctggtgaatgggaataatgatattaaagaggtttcacattgcattcacccattcttccccttccatcctcctgccatgtgaggacacagctttcaaagtgccatcttagtggtcaaaagcaggcctcataagacataaaacatgccaatgccttgatctttgccaatctagcccacagaacagtgagaaatcaatttatgttattaattaccca

SEQ ID NO: 896972 - DNA, 662 bp, Homo sapiens
tgcaagaagaaaaatatggctgtattctgcccaaccccacaggcagtcagaccttatggttgtcttcccttgttccctgaaaattgctgttattctgttttttcaaggtgcactgatttcataktgttcaaagacacatgttttacaatcaatttgtacagttaacacaatagtggtcctgaggtgacatacattctcagcttatgaagataacaggattaagagattaaagatttttataagaaattataaaagtattaattttgggaactgataaatgtccatattaaaatgaaatcttcacaatttatgttcctctgccgtggctccagccaatccctccattcaaggtccctgacttcctgcaacatctagctatctttgcttgtgggacagaaattttgttatattcttccagataatatttttcttttgtttctgccagatgcctggggacactagttatctaagaccctcttcatacaatttctgagacagttttttcctgaacttcaaatataactctaaactgggctataagctgtataaaagctggtagacttctagttcatttgttcaatcttttttttcccattttaaaatgccagtggttttatagcaccactttaacaggctctgactataacctttccaccatgccc

SEQ ID NO: 896973 - DNA, 598 bp, Homo sapiens
aaatgtgcacgtgctcaattctcacaattggctctatggaacccatgaatacaagaagtcaactttccatatctgaaggttttgcatcctgaaaacactgtatttttgatatgtgtttggttgcaaccacgcatgcaaaatccaaggatatgaaggagctggctgtatttatttttaagtagacccataaattcaaacccaggttgaacccaattgtcaactgtactagcaagtaagagcttgggctacctttgggagctgaggtcttcaaaggagctgcttcccaacagcagctggaaccacagagatgcagactctgctggagatgctttctaaagctgagagaagaaaactctccttcctcccctttacttgctcttcaatctcctacctgtgacttcccttggctgaacctaataggaagccagttggtatggaatcctgggatgcataatctgcagggtttagcatcctgtaatayattgcagagctgaaagcaagcaagcaaatgactgggactaggattctgagccagatttgtcccagattctggctgtagatacattccgttcttgctggtaagtatatgtaggataaa

SEQ ID NO: 896974 - DNA, 618 bp, Homo sapiens
gattccattttcagtttaagttttcttatcttcagattttaaagtcttctcctgcataaaattctgtttgaacttgaacgtrttaatacattgtgtggtcaattttgccccacataattttactcttcattcttcaacattctttcattaaacttctttattgtttaaacctcattttcatagtagttcaggggattcagccttagtgtagcatctttctcttaaggactgtgaagttttcaaaccctgaatcttttctaaccagcttgatgaccaagaaacaattcagaccaatctgtatatcaattatttacagcagagtggtaaaccaaagagctgttggaagtcattgatacatactacaccaagagatattgaaaaatctattagacattactagacactgttaaacaaatgaattatttcaaaatgaccaccctttcagaaccatggacaggtatactgaccccctccaccccccaccccagccttgtgctgatctcaaaagttgggattataaaataaaaaatttaaataaaatctcttggttacatagtcttgcttagtgctttaacattttaaatgtcctagttatcctttcaggaggactatacagga

SEQ ID NO: 896975 - DNA, 645 bp, Homo sapiens
acattttacatccttttttcatactgtctttaaaatcgagtgatattttacgtatacagaacaatttaatttgaactagtcatatttcaagtgctcagtagctgcttgtagccattggctacgatattaaacagcatagtattaaagcatattagggtggctcttagaactgaaagaattcctgaagaaccacccctgcttctgtgagatggtttcattactgtacacttctgatttctcactgtgcctgggcacatgactgctagcctgtctagaatcacattctcagctttatcagagaggagagagctcttcatcttcccaacaagctctgcctgtctactccagctccagttcaaaaaactatttggagaaaactctgactgcccattttcaggtcaatcagatggcccattaatgaggcgaggtaacataattggtctagtgtaggacagagtggggttctgtgactgacagcttaaaaaaaatccttatgactagagtggagaatgargagctctccaaaagaagaaaggtttctgtaacaagaagaggaaaagaggtactgggaactctgaaacaataaatgtatacattctcctatgcccaaggaagaattactgtacacttgaataaaatgtaaac

SEQ ID NO: 896976 - DNA, 570 bp, Homo sapiens
acctctaaatacaaaatttctcctttggaattaatgttgctttcatctcttgaatttagattcaatgatcaacaaacctaaattagatctagccataatctttaaaatgattgcataaaaatagggaagtagtttaaagctctcagaaacataagttataataatagatatactttatcaggctacaggaaatgtaatatcattttaaataccagaaccctactcttgtaccaacatctggattagcatctcaccagagaaacaaaaccagtaggagattatacatatatatatacacatatataatgtatatgtataacgatatagatgtatatgtatatagataagggagggaagaaacatatatacatatacatatatacatacatatatgtatatataatacatatattaatatatcttatgttatatatatrtgtgtgtgtgtatatatatgtatatatgtttcttccctcccttatcatctaacataagatatattaataagttaactttatatctctgtatttaagtaacaggatatcaaagagaaagtgagtatcacccaag

SEQ ID NO: 896977 - DNA, 570 bp, Homo sapiens
acctctaaatacaaaatttctcctttggaattaatgttgctttcatctcttgaatttagattcaatgatcaacaaacctaaattagatctagccataatctttaaaatgattgcataaaaatagggaagtagtttaaagctctcagaaacataagttataataatagatatactttatcaggctacaggaaatgtaatatcattttaaataccagaaccctactcttgtaccaacatctggattagcatctcaccagagaaacaaaaccagtaggagattatacatatatatatacacatatataatgtatatgtataacgatatagatgtatatgtatatagataagggagggaagaaacatatatacatatacatatatacatacatatatgtatatataatacatatattaatatatcttatgttatatatatatgtgtgtgtgtatatatatgtatatatgtttcttccctcccttatcatctaacataagatatattaataagttaactttayatctctgtatttaagtaacaggatatcaaagagaaagtgagtatcacccaag

SEQ ID NO: 896978 - DNA, 647 bp, Homo sapiens
ggccaatgtatagctcaggctgtggcttcagagggtggaagccccaagccttggcagcttccgtgtgctgttgagcatgtgggtgcacagaagtcaagaattgaggtttgagaacctctgcctaggtttcagaagatgtatggaaattcctggatgcccaggcaaaagtttactgaaggggcagggccctcatggagaaactttgctagggcagtgcagaagggaaatgtggggtcagagccctcacacagggtccctactggggcaccacttagtggagctgtgagaagagggccactgccctccagatcccagaatggtagatccactgacagcttgcactatgcatctggaaaagccacagatactcaacaccagcctgtgaaagcagtgaggagtgagtctgtaccctgtaaagccacaggggtggagctgcccaagacaatgtgaaccccgctttcgcatcagcatgacctggatgtgagacctggagtcaaaggagatcattttaaaggagctttaakatttgactgccctgctggatttcagacttgcatgggccctgtaacccctttgttttggccaatttatcccatttggaacggctgtatttacctaatacctgtaccctaattgtatctaggaag

SEQ ID NO: 896979 - DNA, 569 bp, Homo sapiens
aaatggagtcttatcattaagccatcatggataagtcaatccgtgcccagtagtcaccagcatctgctgacctctgctgaggtgttgtttgctcttgttttgtgttgatgtttatggctgaggccgccaggccctatttatcaggtttgtgagacccaactgaaggcagtcttctgtctacaggcccctttctgcctttctgagctctttttttttttttgcaggattctggaactcatggctgttttctcttcactgtgctggggtttataagactcactgagacttctcctagcctcatccagccagataacatttttggctatttcttctctgctactcaggatccatgttagtaaagaggcttctctttgagtttgcgatctcccagcagtgctttttccctgtgactttactaaaacttacctaggtattctcctcattgcctccccactggagtccattccagaggggaggataagtagayggatgataggattctgagacctacatcttaagccttattcacaacttttgaattcccctcccccatctaatcaggcactcca

SEQ ID NO: 896980 - DNA, 609 bp, Homo sapiens
caccattcagccgggtgcggtggctcacgcctgtaatcccagcactttgggaggccaaggcaggcggatcacgaggtcaggagatcaagaccatcctggctaacatggtgaaaccccatctctactaaaaatacaaaaaattagccaggtatggtggtgggcacctgtagccccagctactctggaggctgaggcaggagaatggcatgaacccaggaggcagagcttgcagtgagccaagatcatgccactgcactccagcctgggcgacagagcgagactctgtctcaaaaaaaaaaattttttttaataaaaataaataaataaaaagaagtcacaccattcaaatttctaaggaaatcacaaagactcatcacaggttcacggtgatgagaaataggctccacctcttaatgaaaaagtagcatggttggataaaaaatattattgcagccatttttagaaattataatttgtgatatccttcttcaaccccgccccaaatcaggcttcttaactaaaagtgaacttcttttaatgacctatagtgaagtaaatcacatgctgaaatayattaataacaaaaagtgcagtttgacatattctgct

SEQ ID NO: 896981 - DNA, 592 bp, Homo sapiens
gaaatttggaacttactacagacttgttayaataaattgtcgtgaccaagatgctgatagtgatatggacaatgaagtccaggctgaggaggtcacagatgaaaaaacaatagattttggaggggacagggcagaataatacggtttggatctgtgtccccactcaaatctcatgttaaattgtagtccccaatgttggaggtgggcctggtggaaggtgactgtatcatgggggtggatccttcatgaatagtttagcaccatcttcttggtgctgttcttgtgacagtgagtgagttttccaagatctggttgtttaaaagtgtgtggcacttccaaccctgccccccttcctcctgctctggccatgtgagatgctcactcctcccttgctttctgccatgaatgtaagtttcctgaggcctctccagactctgagcagatgccaccatcatgcttcctgtacagtctgcagaaccatgagactattaaacttcttctctttataaatcacccagtctcaggtatttctttagagcagtgcaagaacagactaatacacatacattgtctctcttgccatgctcactgc

SEQ ID NO: 896982 - DNA, 592 bp, Homo sapiens
gaaatttggaacttactacagacttgttataataaattgtcrtgaccaagatgctgatagtgatatggacaatgaagtccaggctgaggaggtcacagatgaaaaaacaatagattttggaggggacagggcagaataatacggtttggatctgtgtccccactcaaatctcatgttaaattgtagtccccaatgttggaggtgggcctggtggaaggtgactgtatcatgggggtggatccttcatgaatagtttagcaccatcttcttggtgctgttcttgtgacagtgagtgagttttccaagatctggttgtttaaaagtgtgtggcacttccaaccctgccccccttcctcctgctctggccatgtgagatgctcactcctcccttgctttctgccatgaatgtaagtttcctgaggcctctccagactctgagcagatgccaccatcatgcttcctgtacagtctgcagaaccatgagactattaaacttcttctctttataaatcacccagtctcaggtatttctttagagcagtgcaagaacagactaatacacatacattgtctctcttgccatgctcactgc

SEQ ID NO: 896983 - DNA, 604 bp, Homo sapiens
aagggcttattaaaacacagattgttggctctacccctcaccctgagattcttacttagtaggtctgcagtggagccaaaaatttgcatttctaacaacttcccaggtgatgctgaagcggctgatacaggaaccacattttgtttattctctcaacataaaatctcaaggctagtacagaggctccagaatgatgaccagctccttctaacttgctgttccgccaacctagctcatggcttgcatcctcaaaatcacctcatgatccaagggagctcctccaattctagccatcgtgttagcttcagggtagtagtaaaggagtgaaggcaaagggaacatctcccagcctcgtcacctcctttttaggagccttatttgcaaaaacttagtcaaaaggcctcattacagagaaaatggcaaagatactcttgctgagtacatcaacagtccaaataatactagggatctataactaaggaagactggatattgaataggyaacaaaaaaactctgccatactacttaagtctacatatactccaattaccaagtcctactgattttgcctcccaattattttgtaagtttgtcctgtaggtt

SEQ ID NO: 896984 - DNA, 655 bp, Homo sapiens
acataagactgaatgcttttaacaacacccaggtcacatcttgaatgctttgctacttagaaatttcttccaccagatgccctaaatctctctctctcaagttcaaagttgcacaaatctctagggcaaaaatgctcccagtctctttcctaaaacattgcaagagtcacctttattccagtttccaacaagttcctcatctccatctgaaaccacctcaacctggacttcattggccatatcactatcagcattttggtcaaagccattcaacaagtctctaggacgttccacactttcccacatcttcctgtcctcttctgagccctccaaactgttccaacctccgcctgttacccagttccaaagtcacttccacatttttgggtatctttacagcagcaccccactcatagtaccaatttactttattagtctgttctcatgctgctaacagacaaacgtgagactggataatttataaagggaagaggtttaatggactcaccgttgctcacatggctggggaggcctcacaattgtggtggawggtgaaggaagagtaacagcatgtcttactggtaacaggcaaaaagcttgtgtagggcaattcccctttataaaaccatcagatctcatgagacttgctcactac

SEQ ID NO: 896985 - DNA, 587 bp, Homo sapiens
caagatctgagatactgcaaacaggctgtgcctggagggggagaggaagatggtcagtaagacatagggtaatattgatgacttgctcattggtggaaatgcctctactgaaggacccaagggtgaaggtactgaaagcacagtaatcactggtattgatattgtcatgaaccatcacttgcagcaagctggcttcataaaagaagcctacaagatgtatatgaaagattacattaaatcaatcaaaggcaaacttgaagaatgaagaccagaaagagtaaaaccttttatggcagaagctgcagaacaaatcaagcacatacttgctaatttcaaaaactaccagtcctttactggtgaaaacatcaatctagatggcacagttgctctgctaaactactgtaaggatgatgtgaccctatatgtgattttctttatggatgatttagaaatggaaaaaaattaacraatctggcaattactttggatctatcacctgtcatcataaatggcaggtgcttatcatctacacaacacccggcctttagacaaatgggaataatgtcatcttgagtttttcatttatt

SEQ ID NO: 896986 - DNA, 639 bp, Homo sapiens
ttgaatactgtcaaagccacatggagcaccactttatttagaccttaataatctataaagtcaacccagaaaagctgactgctttgktccaataagccatctgtatagagaggtgttgcgagccaggagaccagcctctgtgacatccttagttaatacagatgtcaccagtcccttcccagaaaatccatcttgttttcgtttggggattgctgggtctttctggcagagaggcactcagtcaatgtgcacaattacaacaggtatacccaccattttcaccacagctgtcccctcatgtggaagctcaccctggcctgcacatagggtgtggctggatatgagatgagacctttcattttaaacagccaccattcctttctctctctgagcagcctccagttctttagtatgatggccaggtataattacactgatcaagctcagtgtaaaatgtggtttcccaaccaatggccataaaagtagcctcagcatgtggtcccagatctctcgctagaagtggtggaagagtagaccagccatccccatgcagtgggggtcacctggctggtcctcctcacccacttcaactattaatcctcccaccatcacaagaatcaaatggagttaaaatctttc

SEQ ID NO: 896987 - DNA, 611 bp, Homo sapiens
gcaagtgtgtgacacagaagcatcttgaaatcctagcattttttcctgttcatttaacagctagggaggtttcaaacatctttcaaaaaatactttcttagaactaaaatcaccataatattgtgacataaagaaaaattcaatcttgtctcatgctctcattttctttgaaacacaaaatccatacttggctgcgaccacaaaggttacgcattctatctagtaggatgcagatgaaggaaggcacaggcacggttatcatggaggaacacaaatctttatcaggtctgtttcttcagtaactgttggggaaaaaatagtgggaataaaagtttggtttctaagctcctcccagcatcaatcagtcacgagagctggaaactcactttccataatactcccattgctggagccatggcccagggcctcattacgtcttgctttggaaactgtgatggtttcctaatgggctctgttgctccaggctgtagcctctccattttatcctgcacaactccgtccctgtgaggcttstaaaggcaaaccccagcattttactgaccttccagcaaccctccattgcactccatcacgggactttgctccagaac

SEQ ID NO: 896988 - DNA, 566 bp, Homo sapiens
attttgaatcaagacccacaataaaaaccttagatccacccatgccacactcacaagtctgactctttcctaaaatgccaaacaaaacccaatttttccttactatggttattataatttattccatcctattcaatcccctaaatactggtgaaaacgctctgaactgattttacaactccatcgtaggtggtccccaggtggaaaacaaaattgtgctaatccaatcaggtcatggactcctgaactgcagtacaactatgccataaaaatatcatcatcaaattctcatttgcactacttagactcaaggggcaaagggcgactttactaaaatatattagggcaaagtatctacttttataattcagagaaagacattagaattttatccacgagtatataaaattaatgatatattagagtaggggtcaaaatctggcccatggkacaaatctggaccacctccttttattgtacaacctgtaagctaaaaggtttctacagttgcacatttataatctgtctgatgacagggaacactaactttgaagaccagctaggca

SEQ ID NO: 896989 - DNA, 624 bp, Homo sapiens
tgtgaatcccaggcttgattcaacctctgtcctggtgatctcatcagggttccatgtttctcccatgtctgtgctgtgcctgtctcagcttagcttcagcctcagtcagggccccttattgttgcaagatggtgggcagcatacaaaatctaaaaagctgtattttctggtgtttctgtccttagaggaaacctttcccagatgtccccagttggcgtgtgggcctatctcatagtcagaaaggggtcacatattcacccctgattaatggtccttgaagggattgcagccaccattgctggcttttaaaatcaagatttgcccttagagttggaatagggatctctctccatgtctcatggggttctgctagcaaatgaatatcataggcaaacagtaattgatgctaccagaacctactggaaagagaaagaccaaattagagcagatggtgttggtaaacaaggtggagtgcatgagagtgtgtcactagcgactagaggttaaaggcaaagggctttggagtaaggaaacctaatttagagtaatagtattacctgggccattgtttcagttatttgttactgtgtaatgygcaccccaaactttggtagcttaaaacaa

SEQ ID NO: 896990 - DNA, 624 bp, Homo sapiens
ctgattggtgtttccacccagtagtcagggtgctcccctgttctccttccataatgtttcgtaccctttcacccctgctcagcttctcccagacccctccctcacgactttttaaactggctttcagaatcttttacctttaattcccttgtaaaatgctccctctcctttatttgaactataagctctttgaggacaggaaccaagcatggatgacacagagtagacaatgaaaatatgctttgctttgtcaaggaaggatgagaaagaagagaaaatagcttatcttcttgaatatgggagtttaggaaactgaaaaaagctttggcgcaccgacagagcaggaaattttaccatagaaggctgaaaaagttcaatcctgggtttcccctcctggaactatctgataccagtgaatccttatcttctttttttgccccagcacacatgacagttgatagtcacatgaataacagattgttgtgagcaaagtcaatttatctggaattctcacatgattgactttcaagccacctttctgtcctacttgytatacaagtgattaaaagtgacgctaataaagagataatattgaatccattctaatctatgggggaaaagtaa

SEQ ID NO: 896991 - DNA, 594 bp, Homo sapiens
tcatcttcatcttatattaggwaataaaaattaattatcctcacaatgccccaggatccttcactctcccttcattatacacaaacatacaatcttctgagtgaagaaagctctctgtctttacaaagttataaaatgacaaaaatcaacccaaagtcaaatgttattttatttcatggggttctgggcttcttgtgagctaataatgtcttgttttttccagaaaaaaaaaataatgtctttagctaatatcccaggtcaggacatgcttgactgaagatgaagtgtgtgttaattttgttaaaaatggggttttgagaagaggcaaaaagcaaaaggtacttgtacacagggagggatcacactgatccattttcagtgcttaattacaaatctgctccaactaatttccttattgtgcccacagctgctattcttttgtcaccagtttatttttctttgaaaatctgaaaagcatcaaggctcaccctgaaaggcatcagaagcagaactgaggtcccagatgccccattactggtctcgtttgcaggcctgtttggttgtttatgtcttgcattcaaatcatttattttg

SEQ ID NO: 896992 - DNA, 549 bp, Homo sapiens
attactctgatacaaaagccagaaaaacacactacaagaacagaaaactgtaaaccartatttctgttgcatattaatgcaaaaatgctcaacaaaatacagtcagctcaccttatccatggattccacacctacggattcaacaaaccatgggttgaaaatattcagaaaagaaatattccgcagatttccaaaagaactaaacttgtatttgccacatgctgggtactacactgaattcacacgaatgaaatgatgttcaggcattgaattaggtattgtaaataatatagagatgatttaaattatatgggaggatatgcatagatcatatgcaaacactatacagcattttatttaaggcatttgagtatctgcaaatttttggtgtctacagaatttctggaaacagtctcccatatataccaagggactactgtgctagcaaattaaattcaacagaacattaaaaggattatatgccacaactaagtggaatgtattcccagatttcaacatacgaaaatcaaccaatgtaatataccgcat

SEQ ID NO: 896993 - DNA, 592 bp, Homo sapiens
atttcactggttccacctgatgttttgtttctactttactagtgcaatgtatgacatggaaagattttatactttaaggaattgcaaaaaacaaacaaaaaaaagcttgaatatctatgctacaaatttgtaccctatttcttagaatcagacatttatttcagaggagtgccttttaccctcttttcttcactcccatgatcattctaccttttctattttagtattcctgtgaccatgaattatcagatatcagatagttagaagacaaagggattcatgctattacacacacagctattgtacaacttggcttgtatgtattttgagtacaaatagttctgttctagatggttgggggaaaacaatgattgcttacaagttacaggtaaactagaatttaaacattgagaaatatgaaaatactatctaaagaaatccttaaaactttaggtagatctaattgtaaaagcctataatgggctgtgtttaataattaggacaaaactagcacaaaagttatgaggtcaaagtggacattgtgctagaacacagttayacagttatgaaacctgaataaattaatctaaga

SEQ ID NO: 896994 - DNA, 512 bp, Homo sapiens
aatgtgttaccattttgtacgtgaataagaacttatattaataatctcttggtctgaaaatagtactgataggtcaaaaaaaaaaaaggacaaaatayccaggaaagatacacccaaaagaaatataacctagaaaaatgaggaagtttaatgcatgctttcttgtgtttttcaattctttcttgctaaaaaagaattatcattatcacttacagaattcaaaagactctcctcagttttttacaatatgctgtgtcaaagcaagaccctgataccccaactgcagagtgtactccagagtctggctcctagagcatttctgatacctagaaaagcagacaggaaagcacataactataaaactaaagcattgcaaaccagtcagtgtggctgtttaaaaaacataaagtcctacactggaaacctctaatagtcagaggtgggagagggtctataatctccagccctgtacctcacttccaagaagtcaactgcagtaaaacagattgcag

SEQ ID NO: 896995 - DNA, 546 bp, Homo sapiens
aaagcaaagtgaggcattatacatgagtcatgacatttttgacatttgcttaaaagytcctgcttggcctaacagaataaactcagaagacttctggctaagggtcatccactgttatgggctaattatctctcccccaaatgtatatgctgaatccctcatcccccacattacctcagaatgtgactgtatttggagataaagtctttaaagaggtagctaaagttaaatgaggtcactagggtgggctttagtttgagatgactactggttcttgcaagagattaggatatagaccctcagacaggaaaacatggggagaagatggccatccacaaactaagagagagacctcagcagaaattgaccctagtgacaccttgatctcagactgacttctagcctccagaactataagaaaatgaatatctgttgttcaagcaaccaagtctgtggttctttttcatggaagccttagcaaattaatacacctgtgtttactaaaattctacacctcagtgttttagaacacatggtcttccaact

SEQ ID NO: 896996 - DNA, 614 bp, Homo sapiens
ccctgaacttaaaataatgtttttttttaaagtgagacattttaacatgcatttataaaccacagcagtgtttcccaaagtggttctcttggaacacactagaagggttccgtaatcaaatggattagaaaaatactgcactctctatcaccccaggactcacaattttcatagatatgtaaaaggccccaaaaaatcttccagttatacataaaattttgaaacctttaattctcttaaatccagaatttctcaaaccgatctgaccatgaaaccattattagaattattagcaagcatcccatggtaccacggtttgggaatataatttagaacaagagtcataaagaaataatcatagtgatgaaactgtctatacaggtgactatagtcatgcaccaccatacctggctaattatactagagttagaatgtaaaaggaattgaaattcccttcctttaataataataataatatttatttgttttcaggaaagcaatgcatttggtcattmaaatatacgatctcttatttctttgaatgcttatttgattatatatttccttaacttcatgtaccatgttaagtgcttaagcacacgtacaagctcaca

SEQ ID NO: 896997 - DNA, 627 bp, Homo sapiens
aaagaaatgcactaccaactgctaaatttcatggcacctactrtaggttaaaaaaaaaaacaaacagaaaacaaaacaaaaaaccagcccttgaaggagagaaatggaggaagggaattttgtttaattagaaactctccagaagtaaaggcaatgaacacatagtacttcaaaagatctgttaatgaatgtttaattcagatattcagatggaaacttctctatcaataagaagtgactaaatggaatagataagttttcgttcacatttcatttttcaagaaaacctgctttgagattctcttcatacttcatggttagttgctcggcagtccaagctatggagtggtacaatggctttagagttgacagcgggcctaaatgagaaaccaaagttcaaatcaagacgtctaagtattatctgaatcattacaaaagtctgcaattaattctctgcactgctgatgtctgtctttcatctagtgaacagagaaaaaggaaattcaataggatgtactctttatgtcaattggatgagaaaatttcccactgcctgaaaagcatgctgatactaaaatataccacagaatacatttcattaagagttattatcactgtgatcacaat

SEQ ID NO: 896998 - DNA, 613 bp, Homo sapiens
taaagaatatttgaatgactcctttgtttcccaaaagtcccaagcaagaagcccactcagctattgttaaactagaagcccccaaaccaggtgacaattcagtcatgatgaggtctgagaaggggttggctatctctgactgacagaacaatattattcaagtaacttttatacaattcacacatctgtagtgaccattccagacttattttcagaagccatgcatgacaattgcaatataaaaatatactcctatccaaaactaaatagaagaaagaggctactgttttatttagagctgaagggttctattttagagaagaattgaatttttttgtttttcaaatggcacattataaacatcacttagagcatttccttattcagttgtgtgcaactaatagtttcttcaagttagttaggtgattgctagcaattaattagtagggttaacattgtttttattgatcagcctggcagtaatgattgacaacattaatataattgctttacttctcaraaaacctttgtgtaagaacctaatagtactgaggaaacagttgtgagataaagaaaaatagattgtatgctttagagtgggccaattgtgtta

SEQ ID NO: 896999 - DNA, 578 bp, Homo sapiens
ccttttcacttatctatcattttctatttatttccccactttcaatctgtttaagtacagccctcctctggacaattcctgagcatattcactgtcttatmcaccacacacattttacagtattgagttcatatataatatacagcttttagcattgtgtactggaaaaaataattaacaattaactataatttatttacatgtcctacattgttttcaaaattttcctatactgccacaaaagaaaatttttcttgttcatgtaccttacatatttgtgaggaggacttgtagacacaataacctaaattcaatctttaaaacaaaggactattttataaccgtgtttaattctatgatgtaaaggcagagttagaatctcagctgaaagcaaaatcccaggacatttggctagacatatgccttttttatgaaacatatctatattaacataatttgcacacttgtacatgtctatcttatatcagcttaatccttatggacatcattctcatattctcccttaggaggtagtagtaatggtttcacatgttagaaaactcaacttgctaacagca

SEQ ID NO: 897000 - DNA, 589 bp, Homo sapiens
tcccccttcctccctcctgcagccccgggcgaccaccattctgctttctttctctgtgaactggattcctctggcgatctcgcagaagtggaatcatgtaatattcgtccttttggggctgacttatttcactcaacataatgctgtcaaggtgcatacatactgcagcacagtgatttatgttttaaaagggtctctctggctgctgtatggaggacagaccttaggggagtaagaggccaggaggggccattgccctggtctaggtgacagaggtgcagctgggaccaaggagctcaggcattgcttgcctgctggcataaaggtgaaggcgaaaaatctctcaaatgccctgtgctctggggccctggctctgccacagcccttccagggtcagagctcagagagtcactggagttacctttataaaattcactttgcagtagcaggaatcatcatgcaggttcttgatgacaatctctccatagtgctcaatccacctctgcccrcttaagatgttatggatgcaagaggtcactttgttccactcaaaatgatccccaaaactaaaaagaaggaaaaagtagaa

SEQ ID NO: 897001 - DNA, 591 bp, Homo sapiens
aatttacactcccaccaacagtgtaaaagcgttcctatttctccacatcctctccagcatctgttgtttcctgattttttaatgatcgccattcaaatgggcatgagatgttatttttaacatttaaaaaattattatgggccaggcacagtggctcacacctgtcatcccagcaacttgggaggccaaagcggggtgatcacctgaggtcaggggttcaagaccagcctgaccaacgttgtgaaaccccgtctctactaaaaatacaaaaattagccaggcgtggtggtgggcacctataatcccagctactcaggaggctgaggcagaagtatcgcttgaacctgggaggcagaggttgcagtgagccaagattgcaccactgcactccggcctgggtgacaaagttagactccatctcaacaaaaaatattatcatgaaataatatttgtctcmtataagggtatataagaataacataatgagcacatgtacccactacccagttaaaaaataaaactatcaatagaagtttctgtatatgtatgcccagtctcattctcctccctcccccgccatcactgcaaaag

SEQ ID NO: 897002 - DNA, 607 bp, Homo sapiens
tatgtgcatatatgtgtatgtatgtgtatctatatgtgtatatatgtgtgtgtttatatatatatatatatatatatgtgtgtgtgtgtgtgtgtgttaaggttttagactttaagatggaataaggaataagatggaataaggaaaacgctctgcaagcatccaagctttaaagcaaatcatttacaaggcaaagaaatcaggttggcctcaaatgtttccacagcaatattttatgctaggagacaatacagcactagctataaaattctgagggaaagtttgacacaagaatattatacttagcttaaatggtgtttatgtatgaaggcaataagtaggcaatcattctcttgaatttgttgctctttgaaatttatattttaattccaaaaacattttgtttttaccctcaatattttatatttgaatttcctttctacgctattctaatgctttattatttgtttttaagcttttatgatctagaatttatgttattacctcaytgtaaaaatataaaacaagatggagaatacacaatccatgagcctttcaaaaaactacttgacaaatatatctactcaaaacaaatctcaaaataagg

SEQ ID NO: 897003 - DNA, 637 bp, Homo sapiens
aaaatatacagtcagaggaaaaagagaaaaataaaaggaatgaagatcacctacaagatatagaaaattacctcaaaagactaaatctaagcattattagtgttcaagagagagttgaacaagaataagaggtagagagctaagttaaagaaataataacagaaaacttttcaaaacttgaaagagagaaatattcagatacaggagcttcagagaataccaaacaaatttagtacaagtaagactaattcaaggcgtataataatcaaacactcagagattaagggcaaagagaggatcctaaatgcagcaagaaaagagagggaaataacaaataaagggtctttgatgtatctggcaacaaacttctcaacagaaaccatacaggtcagtagaaagtggatcaacattttcaaagtagtgaaagaaaaaactaaactgccattcaagaaaactgtatccagcacagctatccttttatggaggagagctaaagtatttcccagataaacaaaagctgacagaattcaccaccaccaggctcattttgcaagaaatgctgaaaagrgttcttcaatctgaaataaaaaaatcactaatatagaaaaagaaaacatttgaaggtgtaaaacacact

SEQ ID NO: 897004 - DNA, 640 bp, Homo sapiens
tgacatactgatttcttttcttttgtttgtatacctagtagatgaattgttggatcatatgatagttttaaattctttgaggaacctccataccrttgtccataatgattgttctattaatacttacagtcccaaccgggcacagtggctcacagctgtaatcccagcactgtgggaggccgaggtgggcggatcatgaggtcaggagtttgagaccagtctggccaatatggtgaaaccctttctctactaaagatacaaaaaattagccaggcgtggtggcatgtgcctgtaatcccagctactcgggaggctgaggcaggagaatcgcttgattccgggaggtggaggttgcagtgagccaagatcgtgctattgcactccagcctgggcgacagggtgagactccatctcaaaaaaagaaaaaaaaggttacagtcccattaacagtgtataagagttcccttttctccacatccttgccagcatttgttattttctgtctctttgatgatagccattcttattagggtgaggtggtatctcattgtggttttgatttgtgtttccctgatgattagtgatgttgaacattttttcatatacctcttggccatttgtgtgttgtctttggagaaac

SEQ ID NO: 897005 - DNA, 509 bp, Homo sapiens
cacacgtagcagggagtggcatagcaaagatttgaacagagatctgtttatccccatttctacaggatggttaagagcttggactttaaasccaattgtcgggttttttttgttttttttttttttgacagaggctcactctgtcgcccaggctaaagtgcaggggtgcaatctctgctcactgcaacctccgcctcccagttcaagcaattctcctgcctcagcctcccacgtagctgggattacaggcatatactaccacacccggctaatttttgtatttttagtacagagagcgtttcaccatgttggccaggctggtctcgaactcttgacctcaggtgatccgcccacctcagcctcctaaagtgctgagattacaggtatgagccaccgggatttgactctgaactcttctgctgcctgccagctgtgcgactttaagcaagttacataacgtttccgtgcttcagaatcttcatcggtaaaaaggcaacagaaattgtacc

SEQ ID NO: 897006 - DNA, 593 bp, Homo sapiens
cagagaatagattcaggttggtctgacccactactagttgcttataataatccagcaactggactgtatcatttacctaacctttcctcctcatgttaaacatttagattacatcctccttttcamcattataaataacaccaccacagagtttttaatacagaacactttggctgcatttacgattgctgtcttggaggtagaattgttgaattaagaagcacggatctttttaaggctgttgatatacattgccaagttgctttccaaaagggctgtacaaactcacactacctccagcagtgcatgacagtatcaatttcaccacacccccatcagtttgggtagtctcattttttggaaatgttatacatttgccagctgaaaatagtattgccattttaatttgcatttctttgattactattaaggttgaatatgttcccatatgtttttaaagccattttgattcctccttgtgatttttattttcctatctaatttagctttcaggatcttagtgatttttgtaataattctataggctcttgatgttaaaattagcaagtcttggtttgtcatcttagaatatg

SEQ ID NO: 897007 - DNA, 514 bp, Homo sapiens
acagaaagtgtttatgatgatgtaccctcagcacatggcatttggtagacaagtgccaccattaatctaccagcttcttcctacctgaagttataaaattttgtaaacagtgggtctggattataagaaagggtaaagtgaatttaatcgcactgcaaggatttggatgccccaaattttattcctagtcaacttcagaataaattctggtgtttcatcagcttggaaagagctggtgggggtgctgtggaattaggaagaacctcagtttgcattggaccctgatacttaccagctttgtggccttgctcaagacacttaatgtcagtgtctggcacaaaatgtgagtgctgtcaacatcatcatcaacagcatcaaaatcatgatatccatcatcaccatcaccaccactacaaccaccaccrctatcaggatcattatcattatcatctataaacctacagatcttgactggacggactagagtcttctcccatggactcctaaaataccc

SEQ ID NO: 897008 - DNA, 615 bp, Homo sapiens
acattatacaagccattagggtttgcctcrccatctgcagcagctgccatggacttcacagtaaaatggctgaatgggttccagccaacagagtctgcttccagggccccaaatatagatctttctcaaacccaaagctaatcatccccagaatcctggaatacagaaaataagtgtattgttgttatatatataagcacctggtgggtgccattcccagagtaagacacaatggggttggggtgataagaaatttatgaaggcagagttcctgaccaagagcgtcagaggagtcctaaaaaaatcactgaatgcaacctctatatcatatggataagggaatcaatgtccaagataatacagctagtttcagagctagaattaaaatgaagaatttctggctcctatcctaatgctcttaggagtctacccatgtgccaaatagcagggaaaatcacctctgaccctctccccccaatgcaattaatcataaattctatttgccactcctcaggactgcccactcaggactgctaattgtacctcctgcccccactcctccacccctaagctttaagtaaagctgtagatggttttctcctatctccaagtctc

SEQ ID NO: 897009 - DNA, 612 bp, Homo sapiens
aataaacaggcgccagacaagagcttcctgaaccttggacatttgtctttctcctctgggaggggtgaagaaatggggacatccatggtgatctactccaaagtcggtctagcctcattccagggagaagtgaggacatttaatactatcagttttaaaaaatgacacagcacacacgataggccagagcttaaggttgaatcagagagaaccaggtttcaatcagctctgccactgacttcctgggttactttgtgcaatttttacctctttgagcctgtttcttcttctatgagtggcgaaaaataaaacacaattttgtgaggttataggaatcatctgaaagaataattctcataacaaaagctaatgctgaaatgtttactaggtgttaagcattaagctactgtctttttatctattattttatctctcataacagccaatgatagagatactattgttatccctattttaaaaaaatagaagcatgaagagaataggtaagtagctctaagtctcactastacacagtgcttcacctgggacccacacacctgcagagggatttgtgggtagaattcagtgggtttatgaaagtaggtgggagaa

SEQ ID NO: 897010 - DNA, 621 bp, Homo sapiens
aagttacgttaattcataaatttctatccaatagaaaagataacatcaaatactgtggttttattgctttgaaggatattaaccagttttaaatgtagcctcaaaatcttattcaacacttttttttccctcaaaatgtctataaataccagattcctcaaaatgctcttggaattagtttaattttgtaatggttccaatcattaatgagttaaatgactgtttggaatgttttcattccgtatgtatatgacattcatgtttttaacttgttaaaaattatactttaaccgtacctatatcatcaggttgttacgataattaaataaaaattaatataaagtaattaataaggccctaacacattttaatcaatgaatgttagctattgttattatctattattaaatgaagtttggttcacaagaaataaaaaatatattatatgccaaacttcacctatagatacccatgaggttaaaacaaaataaataaaacaaagagaataytgatttcctttgggacttttgagtcttccagtgtctagcccaaggaatcaagcttttgaatcagtagccattttcatggatgatgctgggacttatatttattgggatacat

SEQ ID NO: 897011 - DNA, 645 bp, Homo sapiens
gcatcaatgtgctggattcggtgaggttctccagaggagctcagcagccwagaataaccagatggtgggttccacaattgatccaggcaggactgactgaaataaaaatgggcaacccctggttcaaaaacaattaagaatttcaagatggcaacagcagagcattaaactaagcctagcacccctctgtgtatggaccctgtgtgtctgcacaggttgcatgcccgtgaagccaatcttggatccaagctgagggttttgccagacaggatggatgaatggataaaaatatgaatcacgtgatggtccaagcagggtagagaaagggggatactgtaaagaagagatgagaatgaaaggagaatattttacacataagtgaaataaatgtaagcaataaaatgtggcagttagcccacttatttattctttatttgcaataaaacagttaactctagcttttaatttcaatgattctttatatttctatagttaccaaatttagttgaagttctagttttgcacagaccttcttaagggagttttgctttacagattttttgaagggagttcaatgtttaaatgagaaagaaaacttgtatcaactagtgtcctttttgtgttgttttgtttactggggtagac

SEQ ID NO: 897012 - DNA, 453 bp, Homo sapiens
agtcaaatctcatgacctatagtctggcattgatacttattttatttagatacagggtctcactctgtcacccaggctgaagtgtaatactgtgatcagacctcactgtagcctcgatsttctgggttcaggcgatcctcccaactcagccatccgagtagctgggactacaagcgcgcaccaccatgtctagataatttgtgtgtgtgtgtggagacaggttctcactgtgttgcccaggctggtcttgaactcctgggttcaagccatcctcctgcctcagactcccaagtagctgggactacaggtgtaagccactgttcctggcttgggctccattttttacaagctgttctttattcggaataaaaagaattagcatctctttttctaagtaatactaagtacaaccactcactgttactagattagtgttctggtttttcttttgaa

SEQ ID NO: 897013 - DNA, 453 bp, Homo sapiens
agtcaaatctcatgacctatagtctggcattgatacttattttatttagatacagggtctcactctgtcacccaggctgaagtgtaatactgtgatcagacctcactgtagcctcgatcttctgggttcargcgatcctcccaactcagccatccgagtagctgggactacaagcgcgcaccaccatgtctagataatttgtgtgtgtgtgtggagacaggttctcactgtgttgcccaggctggtcttgaactcctgggttcaagccatcctcctgcctcagactcccaagtagctgggactacaggtgtaagccactgttcctggcttgggctccattttttacaagctgttctttattcggaataaaaagaattagcatctctttttctaagtaatactaagtacaaccactcactgttactagattagtgttctggtttttcttttgaa

SEQ ID NO: 897014 - DNA, 577 bp, Homo sapiens
caagaaaaccaaaaatttatctcattttattacaatgaatcagatcttttaggtatgtctgtatgtccatttatacttttggtctcatactaactcattcatgatgtgtgcatgggtcttcattttttccctcatgggtcggggtgggggagcaaaaataggctgaaacaaaaggactatttaccccaaagatgaattatgtcactggccgagaaagcagacacagctgcagtcaggttttgtttaaatagcattttttttccttaacagtacacatggaaaaagttccttcagccccctgaaaataaagggctttgcacatttaaaagctctttctgtttgtacagtgcccacttctgcctccttgggagatcagaatttccttctgtgcaagcagtgcgatctcaaagagagctgtcctcaccccaaacacacaaaaccagaccctccaaagtgagacccacggcattcttgcattggtgcctggggctggataaaatgagctgttacgtctttttgatctttaactcctaagattctgactcatctgcwcttgcggggagaacctggagcaagc

SEQ ID NO: 897015 - DNA, 584 bp, Homo sapiens
ctttgtctccttttattaactccaatggaaatcttctgcttttgcctgactgggtctcttacccatttctcaaaagactattcattaccaattttaggctttgactctcacacttcttttttttttctttttggcctagaatgtcccatctcccttgaccttttctaagacaactgtaggccagtgctatttctggatcaaggtagagaggtctagtcttgcctctagaaaacagatgaaggtggcatcgggtgtcatttcatttaaatgcacaaatgcacacataaaagcaaatgcatgcacacacacatatgtgcatatatgcacagatatatacagtaacttaatatgaaaacccttctataaatgactttatatgtataaatttatgtgtaaataatgttatttaatggagataaataaagatgaaaagataccagaaaccatttagaagragagaggaggaatgttagtagcatttattaagtgcctcctaggcattagtctcatgactttaacctcatttaattttgaaagtaaccataagatgtaggagtcatgagcctcatataaccagtttaatg

SEQ ID NO: 897016 - DNA, 644 bp, Homo sapiens
atcctggacaagttgccagggtcaatgaagcagcagagggcagatgaaggaaaggggctgccagcaacaacaaaactagygttggcttccttcctgcaaaccctgtctccaccagtaactctgactctgtgagattccttattttgctcttgtgacagttcctggacacactcagacctacaaccaacagctttggcagtttatgttctcagatgtccatggaatggtcctgcttcctgacacctaagcagaagggtaggctgaggcagccgtgaagtgaggggctgtgaggacccgtggggcccaagagatgattcattctgggctgcagagaagggtccccagtcaaaaaaggcaccaaatgactcatcagatcctaagtggacttaggttttatagtaaataatgcagcagaggattccttttgatagctgtaaatcaggagttaaccaggggtgggaatagggagatggaggtcagaggatacgaaggagcaggtatgtaggatgaacaaatctggagatctaacacaccacctgaggactacatggcataaaattatactgaatttgggattcataagaaatgagtagattttagctgctcttgccacaaaaataaaaacgaaaaaaggcaacgatgtg

SEQ ID NO: 897017 - DNA, 596 bp, Homo sapiens
gcctgaggcaaaaaacaacagcatcttttactaagaattttacattgttccctaacaaccaccctaaaaaataatattactatcycattctaaccagtacagaaagaggtgagtaaaggttcaaagacaaagagctgtgggtggagggataagtactctttcaggatgtcagattcttagcccagctcatcccctgccacttggtcatgttacaaaagggtaaagttgacaacactgactttgcctgacttttcattgccccagcttgaagagttaactattctaaaatatttgcactgatttgggatggctggactgaagacttttaagggcactcactgaatgtttatgaaaaggaaggagggaaggagggagggagggagaaaagacaagagaaggaaggaaagaagggaagaaaaaagatgaggaaaagagagaaaggaggaggaggagaaaaggaaggagggaagtgaggggaataaaggaaggaaaagaaggaaggaataccctgttgagggcccaaattgaacaaaaaggtggagaaagggcaaattctttcactctcatcttgaactgggtactatgtgatggatgag

SEQ ID NO: 897018 - DNA, 618 bp, Homo sapiens
aggatcttgagatgtggaaattatccttattatctgggtgacccaatataatcacaagggtccttataccaggaaagcagagcaggagagtaagaggagatgtgatgatggagastttggagcaatgccttttctggctagaagagggccatgagccaaggaagctggaaaagacaataaagagattgtcctctacagcctccagaaggaaccagttctgccgacgccttgcttttagtcctgtttagtcccattttcagacttctgacctccaaaactataagataatggatttgtgttgtttcatgccactaagtttgtggtgatctgttacagcagtggtaggaaaccaatacaccagaaataatagcagccttcttatctcagtcaagagtccccagaccacaggggccaaaaccagcccctgatagagtcccgtgttagaaacttgtatctcattgagatgtgctacatgctgcaggttacatgcagaccacagtccactgggcctgaagatgttctccctcagagaacacccaccaaagggaagggtacctttctcccccgccacccacaactatttcttttatttctataacaacactgccacattcaaaa

SEQ ID NO: 897019 - DNA, 627 bp, Homo sapiens
gtcagaaattcatgacttacgcaaatgacacacctagtcctgaccggtttttcgtgccttatgtaaatgaatcacccctctccaccagctcatttataaaaacccttgcatttcactgtaaaacagcaacccatttttccaggacccctctgtgcaccagagagctttggtccttttgcttattaaacttctgctctaacctcacccttggagtgtcctcatccttgatatcttgggctgtgagactaagaacttcgggtgatgacaccccagacaacgaggccagtttcacttccaaatcttggttattctgaacagtgctgcaacaaacatgggagtacagatacctcttcgatatactgatttcctttcttttgggtatatattctgcagtgaaattactggatcttatggtagctctatttttagttttttgaggaacctccaaactgttctctatggttgttgtactaatttacattcctgccaacagtgtagaagggttctcttttctcygtatcctcaccagcagttgttattgcctgtcttttggctataagccattttaactggggtgagatgatatctcattgtagttttgatttgcatttctctgatgatcaatta

SEQ ID NO: 897020 - DNA, 601 bp, Homo sapiens
gctgactcagtctgggctagytgcacaagaatcacatggagaacataaagaaaaggataaggaactctagtttctatggtaggttctaggcatttacattttaaaaaatgctctagataattttgagagtaaagccagattaggaaaccatgggttcacattgtcacagaatagtgttcattctatttttattctgcctattgtgtataaaatcaggatattccttaggaaaaaggtatcagatttatataatttacaactcaagtatgtgtatatgttcattgtccattctttgaaagcacaggaatttctcaattctctcatactctgaaaagcatagctggcaatataccttagaaagtgttttattccctcacgccactgcactccagcctggcgacagagagagactcagtctcaaaaaaaaaaaaaaaaaaagttttattccctcctgttttatgctctgtcttcatactgacaaggctgggtttagcccccatcctcctctttaaccctttccttgggcagtgaccaatagaaatatcctgcttagctgctcctcctcctcctcaagaacctaacgaagagctagtattaatcc

SEQ ID NO: 897021 - DNA, 653 bp, Homo sapiens
gacaagagctttcatccttggcagccctgactttcctcttggaatattcttcataggtctaatctctagcccttactcaaaatggtaaaatgtaggaaaacttagaagtcacctagaagaaaaccaaagattcctaaatgccagcccatttaaaaattagatgtgcagactccaccccaacatcagaatttagtagtggggacttaagcatttgtatttctgaaaagctcctcaaatcattctctggagcagttaggcttggaaacccctgaggtaagccaatgcctcattttacagattagaaagttgagtgtcaagctatacaatctaaaacttattgattctcacatataatttttttccttttgcagctggtttgctggtaacatctccagatcacaatctgaacagttactcagacaaaaggtaaatagtcttgtctttaaaacagcctcacagaatctctttgcattttggggtccagaggttgatgcatttctcatagaaaccttcctgctaattatatagtcaagtcattgtagtgttgcttgtccagtctgtgggttgcccgactcttcatgtctagccactrcttctgtgtccattatgtattgctgcataataaaccactcctaaattgggtggcttgaaac

SEQ ID NO: 897022 - DNA, 626 bp, Homo sapiens
ttttgcctaatcaactggtggaaatacatctagaaataccctctgttttctagaatagtgcsacttaagagcagtggctggatgaatttccaacagtgagtaaaaataagccataagctcagcacttaatttgtgttactttatatgacttgattgcatgcatgtaggtgaattgacctcacttctggctttcattttggctcttactgatgtttttcctttgccccaatttcctcaattgtttattttaacctgtagtacctcagaagtaccttttgtaaaaggtattgcacaaagagatgcacaggaaacttcacaggatatcagaaggaaatattaagatgtttatttatatttggatttttatctcattctcttacattttctgtttgtgagtttatttttataattcacaccaaatatatattttatagaaatgtactaatttttacattttaattaattaatttagttgattaaaggtaaaggattttaaaagtttggagaccactcatataaaaaccagacaaatatatagaaaaaggaaggaggggaaaagtacatgtgtgatagataggtcccttgacttggagagcattccacatttaaagcaaaaaacatatata

SEQ ID NO: 897023 - DNA, 611 bp, Homo sapiens
aaagtctaacagaccaattatgatagaagaaataaagaacatagttgaagcgcaccctcacaatgaaggcatcaaactcagatggagtgacaggaattctaccartcagataaattccaaaactacttataaagcttgtgggtatggagaaagaagaaaaaaaccttatagttttgtgaagcaagtattacatcaaaactaaaactgacaaataattgtagtaaatatatgatataatcactatattaattgaaatatattacttcaaaaaaattagataaaatattagcaagcagaatttaacagcactttaaaaataatatgtcattatcaagctgagtttattccaggaatgtaaaggttattcaatattaggtaattcattaatacaatccatcatatttatagagataagaagaaaaacattccaatctccatagatacataaaagtatttgaaaaaaatccttaaaaatggaaataaaatataaatatatggatatattcttaacacgaatacacacacaagcatgcatttgtgcatgtaccagcccaaaagttgaattttgcttaatgggaaaactagagactgtgtcactaatgtgggatgcc

SEQ ID NO: 897024 - DNA, 601 bp, Homo sapiens
gcacctgctcccccttttccttctgccaggctctcatcagcagcagatgccagccccatgcttcttgtacagccagcagaactgtgagccaattaagcctcttttctttataaattacccagcctcagttatttctttacagcaatgcaagaatatcctaatacagtaatatattcatgtaacaaaattgtacttgtaccccttaaatttatacaagaaaatatcagtttatagagtgagtatatacacacatgcatacaagtatgtgtatatatttgtatacacatatatgcattttatatattaaattgtattatattcatataaatatatattctaatatttattaatatacacatatgaataagtatttattctgtacttgatcttagcctaaggctaagcctaaaggctgagaaacaaatatatatatatatttatatatgtatatatatttatatatatatggtwctatgcacacatacacacacatatgtgaagatataatggaagagaagaacccatttacaaaaatagacgtaacaaaaatataaagacataaatgtagcaagaaatgatcaaaatccatatgaggaaaact

SEQ ID NO: 897025 - DNA, 601 bp, Homo sapiens
gcacctgctcccccttttccttctgccaggctctcatcagcagcagatgccagccccatgcttcttgtacagccagcagaactgtgagccaattaagcctcttttctttataaattacccagcctcagttatttctttacagcaatgcaagaatatcctaatacagtaatatattcatgtaacaaaattgtacttgtaccccttaaatttatacaagaaaatatcagtttatagagtgagtatatacacacatgcatacaagtatgtgtatatatttgtatacacatatatgcattttatatattaaattgtattatattcatataaatatatattctaatatttattaatatacacatatgaataagtatttattctgtacttgatcttagcctaaggctaagcctaaaggctgagaaacaaatatatatatatatttatatatgtatatatatttatatatatatggttctatgcacacatacacacacatatgtgaagatataatggaagagaagaacccatttacaaaaatagaygtaacaaaaatataaagacataaatgtagcaagaaatgatcaaaatccatatgaggaaaact

SEQ ID NO: 897026 - DNA, 616 bp, Homo sapiens
tatttgcaacttatattgcagagaaagggtttatattcttaatatccaaagagcttctaatactacagaagaaaataacctagagccctatggaaagatcagagtaatgtttcattcacagaaaaataagtgcaaatgattctacaccacatgaaaagatgctcatagctgctgatataaaagaaatccatatgaaaactacatgaagattccatttttaacctaccagattggcaaagtcctaattttaacagtatattcttttggccaggctatggggagataggcactgctgtatatggttagtagcaataatctgatgtgtaccacttcaaatcagtgaggaaaagttaaaatagaatccattttttcagaccagacatcaggagtggaattcagcaatgcctagaaaaattatacataccttcatccttctccgcagcaattggaattacatgaatgtatcccacagttacactgacagaagttctaagagacatagatggctgggcatggatttccatagatrgaaatactggctcattccagtaattccagcattttgggaggacacagtgggtggtccacttgagctcaggaatttgagaccagcctg

SEQ ID NO: 897027 - DNA, 658 bp, Homo sapiens
tggaataactctttcactgcagacagctataaaatctggattaaaaataaaatgaagcgtatgaaggcattggagccagagcaaggcaggcaggacttgagggaccgcactccaagaaagcaggaaagtgcatgtaaatgccttgctactcacctcggggcacctgctgattcacagtatgggaggtagggttgggtccacagcagcccagggcttatgcagactctgaggcagcacagtggcgtggattaagaaggtaagatcttggagaggtaggaaacacaggattgaggcagaactcctgcttgcaacttccctttgagggattggctaccttccaagctgtatgttcttgcaacaaggcactgagagtccaagatgaaaggagcagcacggagatgaatatctgagcagagattcccacaggctcatggtgctgggaacagggagtgtggaggggccctggtgaacacagaaggctcccactgggaccagggaagactatgccctgggagtgagaattatgccttaggagtaaggctaactgggaaggcaaccrtgcccaaaacacagcttcaacacggtcagagtgatctgccagagacgacctgccatctatctctcagaagaaggagacatcctctctgggggaagacag

SEQ ID NO: 897028 - DNA, 671 bp, Homo sapiens
aagaacagacatttctcaaaagaggatatacaaatagccaacaaacatgaaaaaaatgctcaaaatcactaatcatcaggaaaatgcaaattaaaactacaatgacataccaccttacttttacaagaatggccattaataaaatgtcaagaaacaatagatgttggcatggatgtggtaaaaaggaaatgattatacactgctggtgggaatgtaaattagtacaacctctatggaaaacagtatggagattggttaaagaatttaaagtagatctaccattcaatccagcaatcccactgctgggtatctacccaaaggaaaagaagtcagtatatcaaaaagacacttgcatgtgtgtgtttaatgcagcacaattcacaattgcaaagatatggaaccaacctaagcacccatcgaccaatgagtggattaaaaaaatgtggtttatatacaccatgtaatactactcagccacaaaaaaaataatgtcttttgcagcaacttagatggagctggaggcccttatgttaagtgaaatcactcaggaatggaaaattaaatactgtgtktcttcatttataagtgagaactaagctatgggtatgcaaaggcaaacagagtgatataatggactacggagacttagggggaagttgggggtgaggaat

SEQ ID NO: 897029 - DNA, 670 bp, Homo sapiens
ctgccaaacagatgggagccctgtgaagataaaaggctgccaatatcccaaaggcacaagccatggctccgcctccatatcttggacacaaaagttagagcataacctgcgcactctgagcccacttcccaggaaacacatcagtccattaaaggaatcccaccatgaggaatgcagagccaatcaatactttgaatgaagaagcccctcttacagactatttccttttctcattttccattctctactctcctaaccaaaccatgtccaaaatgctacctggagaaccccacgctcagcccagctgacctttgatcatcataaagctagccacaaaactgtctatttctccaaaggaaaaatgtacatgcatctaactcgaggctttctgctggaagttcagggtcgatgcaggaagacaaggactcaaaggctttggcatattccatgtcttctatctggtccaacagtgtagagatgatgctgccagcttcaaacaaggcccaggtccaggagcgttattgttaagtacctgggatgtgctcattagaatactgctaagcctaaggccaggcacrgtggctcatgcctgtaatcccagccctttgggaggccaaggcaggcagatcacttgaggtcacaagttcaagaccagcctggccaacatggt

SEQ ID NO: 897030 - DNA, 599 bp, Homo sapiens
atgtcaccatatctgcagatatcaacataagggcacaagaaacatgaaaaagaaaggaaacacaatactgccaaaagaaccaccacaactctccaccaacagattccaatcaaaaagaaatttatgaaatcccagctaaagaattcaaaataatgttactaaagaagttcagtgagatacaagataattcagaaaaataaggtatgaaagagaaatttaccaaaaagctagatatcacaaaaaaagaaccaaatagaaattctggaactgaaggattcactaaatgaaatacaaaatacatttgaaagctttgataacagattagatcaaacagaagaaagaaactcagaacatgaagacaggtgttttaaaataatccagtcaaacaaaaattttaaaagaaaaagaattttaaaagaatgaggaacaaagtgtttgtgacacataaaacatcataaagtgaccaaatattcatagttttggtgtcccagaaggtgaaaagaaaacaaaagagttataaaatttgttaaataaagcaaaagatgaaaatatctcaagtmtagccagagatttagtcatccagatacaggaagttcaga

SEQ ID NO: 897031 - DNA, 620 bp, Homo sapiens
tgggtgagacagcttgacctgctagctggtcaagaaaccagaaaggctggcctgcttgatactcccttttcacacctgagactcagaaaagttaagggactctccaaagccacagagctttataagtggcaaagctaagactcaaattcaggtctactgccctgaaatctgggatgacttgaaaaacttatctacaaaggcttctacaacgatttactaagaaactcccagttaattgatctctaaattgcagggacatcattccagtcatcacgggaaggtctgcaaagtacctatgcgtgtttatgggtaagaaattgctctctgctaggcttgaactcaccatcatggagaacagagacctctaattctggaaagaagttaatgactggggcttcaacctcaagcacagcatgctgcctcctcagcataggaggggagcagggacttgcattgccatctcatccctcagcctcgggcaccattgcccaggraacacagactctgagacatacctagaacagtgcactcacctctgtgcatgaggctgttcattgagaactcagagtctccctgctgggtggctttttgctagctgtgaggcacattcttggacagca

SEQ ID NO: 897032 - DNA, 608 bp, Homo sapiens
tatagtaacttgctgtacaggtttgtagcctaggagcaataggctataccatttagtagttgaacaatgaatgtctgaacagtagttcccccttatcctcagaggatacctttcaagaaccccagcggaggcttgaaactgcagatagtacccaacctatatatactatgtttcttcctagactacatacctgtaataaaatccagtttataaatgaggcagtataggagatgaacaataataactggaaataatatagaacagttatactttataagttaataaaagttaagtaactgcagttgagacaataaaaaagcaaaagttaaattataaaaaacatgtgaatgtggtatctctctaaatatcttactgtactattcacccttgtgatgaagaagggactaaactcgatagagtgagatttcctcacactacttacaatggtgcactgttggccagcgcagtggctcacacctgtaatcccagcactttgggaggctgaggcaggcagatcacaaggtcaggagatcgagaccatcctggctaacatggtgaaaccccgtctctactraaaatacaaaaaattagccaggtgtggtagtggg

SEQ ID NO: 897033 - DNA, 605 bp, Homo sapiens
tagagtcccatgataggctgtctgcaagttgaggaacaaggaagccagtggtggatcagtctgagtcccaaaacctcaaaagtacggaagccgacagtgcagcctttagcctgtggccaaaggcccaagagcccctggcaaaccactggtgtgagcccaagagtccagaagctgaagacttggagtctgatgttcgaaggcaggaaacatctagcacaggagaaagatgaagaccggaagactcagcaagttggctcttccatcttctcctgcctgctttattctagccgtgctggcagctgattagatgatgtgcctagccagattgagggtgggtctgcctctcccagtccactgactcaaatgttaatctcttttggcaacaccctcatagacatacccaggaacaatactttgcatccttcaatccaatcaagttgacactcaatattaaccattacagatcttatgcttgtttggaggaaaggagagacttgatcaatgaaatacatggcagctagcatgaccacttgtccttaactgtttacrtgactggactagcaatagcaaccagtaggttttcttccatttagaggtaaccttac

SEQ ID NO: 897034 - DNA, 691 bp, Homo sapiens
agtacttgaaacacatttctcttcctagctttgcatyttaatagtcaaagaagcctttagctaaatgtgtatttatttattatatatagcagctaagagttggaaggtgtttgagcaaggatatattgggacctttgtggaactcccaacaatttatacaccattaatttttcaaactttgattaggtggaaagtcttcccaggtgccaagctcagggctggagtaggcaggactctctctatgcattacatgatgtaagttcaaagtagccatttaatcacagagctttcagaaatggtaagttaaaaaatttcattccttgcctgcctaaccagacttggaccaattccttttgttttctgtgaataaagatcctcatgtgggtacctcaggttcaattcaggagcatcaagtcatgcttctctgatagaccaaaagggccctctaaggatccaggtatgtaagaatagataacctgctctacccgatcactgtgagtgcttatctgggccccaagggagtaattaaaggtcctttacttgattctgttcacgtgtgtctgattcacatcatcaaaagtattgtctaagtgggagagttggaaacaacttcgaaaagttcaataataaattgaaactattaggatacatatctgcaattctgatattaagttgtgatctccttcaagag

SEQ ID NO: 897035 - DNA, 599 bp, Homo sapiens
acttgcccccaggctaatttcacttaaggtctaggtgggttaagatgacactcttgtttgatacttgatgcatcctgtcaaatctccctgacactagaatgtcacatggttcagaaatttcaaggtacaactgggaggaaagattcaacggatcaacatggtacaggaaggccttccttatgttctcagtgaaagagtgaatagtgttctaggatgttggatgacaaagccctatggaagcaataaatgtctcacctatctgcccagattgccaagaagttcctattttaagaagtgttacttgcacttaaagttttcatcatattcaagagggtaaatttacctataagaggaaatccttcaagctggttgccttcacttatagtttataatcacagagatgttgagcaggatggggatgtttgctgggggaggcccagagatttagtcaagatcaaatagctctttatgggtaagccaggtctatcacccaggtttctgggttgccgggagaggctggaggagtttttaaaacaacaagccatgagrattctgggtgtctgaggaaaaatgaaaggggtatccctgagcaggtacaa

SEQ ID NO: 897036 - DNA, 623 bp, Homo sapiens
tttctgtgtatctgtgttggtttaactcttttcattggtaagcccctaatgagtagagatcaacaacatctattaattgaaactaatgccgaaaagtacaaaaaaatgtggatagaaaaaaataaacatcttagggatgaaaagagccattgaaatttcaaacatgatagacagaatctactttaagctggctgaacacagccaagaaaagaaatcatgattagaaggctgaatcaaaaaatcttcccaaaacagacagacaaagagttacaaattggtttaatcaaagaaatattgaggaactccaatccatatcaacctaaagttccaatagaagagaatgaaaatagtctgggcgcagtggctcactcctgtaatcccagcactttgggaggctgggacagatggatcacttgaggtcaagagttcaagaccatcctggccaacatggtgaaatcccatctctaaaaaaaaaaagaaaagaaaaaaaaattagctggaccttgtggtgtgtgcctctratcccagctacgctggaggctgaggcaggagaatcgcttgaatgggggaggcagaggttgcaatgagccaagatcgtgccactgcactccagcctgggcaac

SEQ ID NO: 897037 - DNA, 623 bp, Homo sapiens
tttctgtgtatctgtgttggtttaactcttttcattggtaagcccctaatgagtagagatcaacaacatctattaattgaaactaatgccgaaaagtacaaaaaaatgtggatagaaaaaaataaacatcttagggatgaaaagagccattgaaatttcaaacatgatagacagaatctactttaagctggctgaacacagccaagaaaagaaatcatgattagaaggctgaatcaaaaaatcttcccaaaacagacagacaaagagttacaaattggtttaatcaaagaaatattgaggaactccaatccatatcaacctaaagttccaatagaagagaatgaaaatagtctgggcgcagtggctcactcctgtaatcccagcactttgggaggctgggacagatggatcacttgaggtcaagagttcaagaccatcctggccaacatggtgaaatcccatctctaaaaaaaaaaagaaaagaaaaaaaaattagctggaccttgtggtgtgtgcctctgatcccagctacgctggaggctgaggyaggagaatcgcttgaatgggggaggcagaggttgcaatgagccaagatcgtgccactgcactccagcctgggcaac

SEQ ID NO: 897038 - DNA, 617 bp, Homo sapiens
aattcccctacaaagtgagaatgctagaatgtcagaatcaccctgagggctttaaaacatcttggtgcccagggcacacccaaaaccataagatcacaatgtttagtcaggcaaggagkgggagccaggctcccctagatgattccgggctggccaagaaactggggcagtaatgaaataacgtgaggtaataagtggaaaagagctgatgaattttcaggtgattttcatttacactgaggaaatgtaaccaagttgggaggaaaaaaatcaatgatctctatgtcctaatgatactgaaaattttaaattttcaatatagtattatacacacctagaactcagggaaaaaagaagaggcttcgtccaattatgatattcttctctccctttctgtttcagttctggccctagagcaaaaatgtctgcgagggcgttctgccctttgtgatttgtaaaaggcaccgaggcgcagcccggaggagacagcgcaccctgaccctccccgccgcctccgccacttccccggggatgttggtatctttggaactagctgattttgaactttatcttccctttgaatgactgtgctatcgctattatttttccaaagagaa

SEQ ID NO: 897039 - DNA, 378 bp, Homo sapiens
ttttaaaacatagaattaagggcgtggcaaaatggctcacacctgtaaccccaacactttgggaggatgaggtaggaagatcacttgagcctgggtgctcaagaccagcctaggcaacacagcgacatcccgtctctacaaaaataaaactagccatgcgtggtggcatgtctataggtatatagtcccagctattcaggaggctgagacaggaggatcacttgagcccaggaatgcaaggctacagtgagctatgatcatgccactgcactccagcctgatggagcaagaccccccgccycccccccccaaaaatagtagaattaaggaatcttcctgcctggtcaattttttccagatgtctcctgctttttcctc

SEQ ID NO: 897040 - DNA, 378 bp, Homo sapiens
ttttaaaacatagaattaagggcgtggcaaaatggctcacacctgtaaccccaacactttgggaggatgaggtaggaagatcacttgagcctgggtgctcaagaccagcctaggcaacacagcgacatcccgtctctacaaaaataaaactagccatgcgtggtggcatgtctataggtatatagtcccagctattcaggaggctgagacaggaggatcacttgagcccaggaatgcaaggctacagtgagctatgatcatgccactgcactccagcctgatggagcaagaccccccgcctsccccccccaaaaatagtagaattaaggaatcttcctgcctggtcaattttttccagatgtctcctgctttttcctc

SEQ ID NO: 897041 - DNA, 621 bp, Homo sapiens
tactgaatagcctcctgaaatttcaaatattctctgtagtatgcaaagggtttacctcaatctatgtatttacctataacgagtacccaatacattctgtrtcctttctcatttattttctcttttccctagtttttgccacatgtataatccttgcttttctatttgatacatgtttttaaattctggccataacaaaataaagccttaataaagcctgttctaagttctatctaattaaggagaaaggttagctcagtggttccaactttaaattgatgactgtagcatgctgtactctgtgaaggaaatgtgcacctttagaaagactcattcttcacatgtaaatgtttttcagataaaaataatgaaatacaaacaaacatttacaccaagataaatttcttaccaagatactgaaggtcttcctatttgttaaatcatccaaaatcctatcaaaagaatttttattttattttttaaagtttcaacctctgggagcacagaacaaggaatttttattttagaaaatttaaagtagaaactcttcaaagtgataggatatgacaggcagctactattatttttcctccaaatttataagtgtaaggtacctgttta

SEQ ID NO: 897042 - DNA, 621 bp, Homo sapiens
tactgaatagcctcctgaaatttcaaatattctctgtagtatgcaaagggtttacctcaatctatgtatttacctataacgagtacccaatacattctgtgtcctttctcattyattttctcttttccctagtttttgccacatgtataatccttgcttttctatttgatacatgtttttaaattctggccataacaaaataaagccttaataaagcctgttctaagttctatctaattaaggagaaaggttagctcagtggttccaactttaaattgatgactgtagcatgctgtactctgtgaaggaaatgtgcacctttagaaagactcattcttcacatgtaaatgtttttcagataaaaataatgaaatacaaacaaacatttacaccaagataaatttcttaccaagatactgaaggtcttcctatttgttaaatcatccaaaatcctatcaaaagaatttttattttattttttaaagtttcaacctctgggagcacagaacaaggaatttttattttagaaaatttaaagtagaaactcttcaaagtgataggatatgacaggcagctactattatttttcctccaaatttataagtgtaaggtacctgttta

SEQ ID NO: 897043 - DNA, 590 bp, Homo sapiens
gaggctgtaaggcagacccctgaattccaaagttgctgggagtattgggacaatcaggcttgacaagagacacttacagacaagaagacagaaggagacagaggcacccacatgataaagagagtcaagcarcagctacccacttctggttccttaaacgttctaaataaacagtggaagcttagtcttctcttggttaatctttcatctctccagagaatgtggctttagttactacccagttttcttatcagaggaaaccaatgtatacaaaggcaatggagttagtccagaagcctttatctaattatattatcagaagtcaatggttggccttaaacagtgcccacttctctagagtctaagacagggaggtgagaacaagccaggccagagctcaggatagagttgagtagggggcaaaatttcagctccagtctggactcagtggctcacgcctgtaatcccagcaatttgggaggccgaggtgggtggatcacttgaagtcagaagtttgagaccagcctggccaacatggtgaaaccccatctctgctgaaaatacaaaaattagccaggcatggtggcggg

SEQ ID NO: 897044 - DNA, 615 bp, Homo sapiens
ttccagtctaattacgaaaacaggttctgaaagggaggtaaaaagacaaaaataggatgactctggatgtttactgtggaggcctcaaatagaaaagtcaaagtgactttgtatacattccccattcacagcttgacaggacgggaaagttcaccacttaacgtttttaagagttgatggaagccaccaatccaataaggtgtcccctggagcccatccagaatccatcctttagtccatgagagttgagctccagcttccctctcctgactccatatcccagctgtggttctgtggtttggtgtacattgtgcaggttggaagtggcctgttttcctggaaagaatgaaatgtgcccaaatggaaagacaaaccaggtcccaatcttggatttgggaatatgggttcctggttccccagaatccagctgaggaattttctgacttcagttagacagagaaaatgacatgggaacagatgtgcaactccaaacatgcttgacagcataggctacgaacctgggcagcccctataccrggcccctctcccaagagcaagctggctctgagaatctgagaagtgaagaactcaagcttttcctacaggcttatgaca

SEQ ID NO: 897045 - DNA, 672 bp, Homo sapiens
ggctttgattttaaaaatacactggataagatgaacagcaaattaaacattgcagaggaaaagattagttaacttgaggagattgaaatgaaatagaaaaacaaggatttttaaaatgaagaatgtagcaatgagacaacttccagtggcctaacatactggtatttagagtgtttcaagaagtatggggcaggtgggagggcagaaacaaaaattttataaaatgatggccaaatcctttccaaattttatgaaaattataaatccacataaaaaagttcaaagaaccccaagcacaagaaacatgaagaaaactacagcaaagtcataccgaaattgctcaaagccagttataaaagaaaatgttaaaagcgtccagagaaaaataactcattacctacagaggaataaagataaggaagacagtagattcctcaccagaaacaatgcaacagagaagacagtggagcaatatctgtcaagtattggaagaaaaaaaaaagctgtcaatctaaaaatctatatctagtaaaaatgcctccaaaaattaagcaaaataagtcttctcagacatataaaagcagaagagccagcrgatccttactccagcatatctatcaccagcagatctgtattccaagagatttttcttcaaggaaaaggaaattgaca

SEQ ID NO: 897046 - DNA, 341 bp, Homo sapiens
tagtcacgtggcattgttggcaggaggactgtggtgtgtaaagccacttattcctacactagtctaacaccactgtattcattcagtgttgtgtctcctttattattctatcttatcctgtgtgatggttaattttatgtgtccacttgactgggtcacaggatatttggtcaaacattttactgggtgtttctattctgggtgctttggatgagattaacattttaattggtagattgagaaagcggrttgccctccctaatgtgggtgggccacatccaatctgtttgaagtcctgaatagaagaaaaggctcacttttcccaagttaagagagaattc

SEQ ID NO: 897047 - DNA, 449 bp, Homo sapiens
gatggtgggtacaggtttctcactgttggagtgggartttacagatgagcaagagaaggaaactagaatgatctatgtggtgatggactaaagttggagacatcagtaagaacaaatgtttaatgtaatataggtacagatggttacacatagaaatatttgtagatatgtgtatatgcagaggttagtatgcatacatgtatttctttgctctgttggctgagagggtctagaatcaatgatacctcagcagcaaaaagtacacttactgtccaggtcttggtttctaagatcactttccaataaaaggaaccaaggtttcttggagtattggttggttctaggactagaaccaggaaatatacaagagaggaaatatacaagatgagtctggagcatcttatagtgccaaaatgtaaaaagtgcttaaaatcaaacaaaattcttga

SEQ ID NO: 897048 - DNA, 617 bp, Homo sapiens
ccaaaaaaaaaaaaaaaaaaaaaaaaaaaagaagaagaattggggggtcggagggagargggaaaatatcaaaaacactaacatgtgcttaaaaggaatacaaacctgagtgccagactacataaatttagaagatttaaatcaacaaatcaaaatttagaaggcaaatttgggaaacctcgtctattttcagagcgcccaagcgctcacccaggacctccatgtattttcatttaaaggtacagagtgtagtaccttaacagcttaacagcattcgcctttttcaaggactagatccttggaattttctgcagtcttgtttccaaggaaaagcatttatgcatttatcttttcaaatcaactagtggtataacctacatagagaacctccagttctagagctctccaactagggaggactgttaactacagctttacaaattgctcttttcaacttcatttctgaaataaaacctaacgttctttaaaacattttctatatcaacaacctttaaagacattctcatacaaagacgggctagaatctcttgcattaaaatctgacgaattcctttgtatgactggattttttttttcttgtaccactttaaatttgc

SEQ ID NO: 897049 - DNA, 630 bp, Homo sapiens
aaatctgacgaattcctttgtatgactggattttttttttcttgtaccactttaaatttgcttccacgcagaatagcagccaggcaaacagatgctccatcctaaggtgtaggaatttcttgtaggcggaaatgatttgttaggcgaaagcttccgaaacggttttccatttcacagtctcttccggtgccaaagtccagcaccaacgcctggttctggggtccgaccctcatgcagccgccgccgcgctcctcgtggctggacgagccggaactagcttcctccaggagctgctgctgctgctgccgtcactgggcgccgccgcacagccaaacggcgttcctccctctccgcttccctgagaactcgcggcccttctccaccaccaccagcatccgcggggaccgagaccggacgaaagtggcggggacccaaggcccctgaggagggggcgccgggcccgggagggggcgcgggacgggcatgggaccgggtgggcgcggcggcagcccactggcgccacttcgagctcgaggagacccagactgatagagcgcggaggcgtttccagaccgcagygacaggcgtttccagaccgcagtgacaggcgtttcaagtccgcagcgcgga

SEQ ID NO: 897050 - DNA, 593 bp, Homo sapiens
agctagaaggcctgtattgtggaagaatccccagcatcatccttcaaaagtgaagctgggccaggcgtggtggcctgctgcaaatcccagcgctttgggagggtcacttgagtgcaggagttcaagaccagacygggcagtatagcgagacctcatctctacaacatcaacaaaaaaggaaaaaagtgaagcaggctcctttttaggaatttgtcataggaagtccctctgaggtcaggcttgcagcagggtcggctggctgtgtttgggtgtgctgtgagccgtggcctcctgcaaagtacgaaccctctgctttgctgcatcccaggttatgggcgtcactgtacaaagatgaatactggcttggagtggagtcagccttcatgtccacattaaacttgttcctttcttgccttcccaggtctgactttgtcaccctgccgtttcagggagcagaagtccttctggacagtgtgatgcccctgtcaggtaacagctgaggcctttggcttgggggattgttggggacagttgttgagagtaggtctttctcagagcctccgttctcacctggaggatttatgctaacataa

SEQ ID NO: 897051 - DNA, 600 bp, Homo sapiens
atgccattatgatgccttatcctttctttgttgcctgctttatttatctctctgaaagtttctagtgtatgtatttttatctcttatgtggagaaatttcatgatgatacacttttgtttcagcgtgagtctttttctgtctattgtgttaaccactcccaatttggaaatttaactttatcaattctgaaacattttgtgcatgatttatttgataatttcctttatttcctttcctctcctttatttcctgtctctctttctggaactcttgttacttggatggtagacatcctggactcattgttaaattttctttttttctccttcccattttctatttttttatttgctctactttctggagatttctttaaccacttcttctaattcttcttgacatttcttctatcttatttttaattcccaagagttttttcttgatctttgagtgtttctttaaaatttgccwttctttttttcatatatatagtatttttttcttcatctttaaagacaataagtaaaatatcaggctccctttaagacatctgtttctgactttccagttcattttggtctttgtttcatgtaggaggc

SEQ ID NO: 897052 - DNA, 637 bp, Homo sapiens
tagagagacagatagaaagtgctttgaacagggaggcagatagaaagtacagcagtgcccacctgcccgrggactccaagagggagacagagccagcatggtggctccagagatctggcagcctaggaaaaggtgaaagggtcactttgtgccacagagtggtccctggtcaacagagctcccggagagtacccatcaccagacatgacagccacatctttcttgcaggaccattaacagggggaggcgggtagtataacagagaggaaggccaccagtgtcctttccctagatgaggaggcagaattgtgtgaactgcagcagaaatgacagacttacttttacatgaccatccccctaatatttgggcatttatacctcttgcatgatgaaaatgtaaagagatacaattttaactaaggtgtctatttagataaaatatacatttcatgtgagatgaggcttgtcaaaaccagagcttataaaataaggagtacagtgaaacaaggaatgtgtgggcctcatgaatttgcttgtggtaaagtctattaagcagaaataaataacatgaatttttatttcaaactcaaatgtatgaatgactgtcaatttaggagttatttgaccaacacaaaca

SEQ ID NO: 897053 - DNA, 652 bp, Homo sapiens
atgctgccccttttttgtagaaacatcagtcacacccactctaagatcagtcaccacagatactttatcagtctcctttgctcattggtactggaacatgaggagccccaaaggccagctggcagcctcagcatccaggtcaatggattattttgtgcccttgttaagcatttgtcccttggaaaccaagaattctaatcagccaaaagcataactagagaaaaatgaaagcaaaatcttttcaagagtgttcctaagagaaatagtactgtgctctaagttgctatattctgactttggaaaaaagaaaaaccagataatgttgttgatttggagctcataaagcatcctgtagaatagctcttcaaatttgcaagttgttgtcacccagccagtgtcacacctaagatttattgacagttgcaccacgttgtaatgatttcctaagtaatcagcctgttttctcactttttcaccataaacattctttgttaaaggcaaagtaaaagggataaaatgatggcaaataaggcatttggggctgtcacattgtccaaaaaagagaaatccacatttgggataaatatttattcctgtgggggmaaatttttgtcccatccataatgacatgactgtctgtcatgctccccta

SEQ ID NO: 897054 - DNA, 398 bp, Homo sapiens
tatatattatctaaaatgttatcattgagaaaattgacagattttgattagaataaataagcaaattctattgatattaccttttccttccagttgtttcttcaactcattgcatgtcatagtaattacagagttgttcctcatttttggcattttttgaaaaaatcaaatcaaagctaaacaaaaacatattatggacctgggaatatctcccagtgggatgtttcattgaggagaaatgtttattgtgtggacattcattatattttatctatttatcactctttgaggtttyacaattaagaacgtctataagatgaaactcctttgaagaattaaaaaaaaaaaaaaaaaaagctaggcattggagctcacttttggaatcccagagctttgga

SEQ ID NO: 897055 - DNA, 578 bp, Homo sapiens
cttagtgaccatccatctagaagtgtgattcaaacagcccagtattctattggaaaagagagagaaggtaagagagagcacagcaggcaaaaacacagccttatgccagtaatcctgagactctctagggaaaggagtgtcctttcatttcctacataataactgttacttccattttatcacatgtggggtttaacttagctgtgaattcctgctctaatccaatctgttactaaattaccaatgtaacaggagagatggaaggggttagcataaacttagactgctataagtttacaacaatcctccataacacaagtttaccaatataacaaacctgcacatgtacccctaaacttaaaataaaagtaagattaaaaaaataacatgataaatatcaaagaggaatttatgtttctttttctctaaggagaggcatgcattatttgttgactttgatatttgtttaaataacatgtaytttgcctacattttgatattatgtactaaatgaagataaatgttacatctatgtataattatattatattctctctactactctacaagtgacattg

SEQ ID NO: 897056 - DNA, 648 bp, Homo sapiens
tctgatgacactgttgagccaccctaccgacctggcctacctacctctggacttctttgtataagataaataaacttctgcctagtgtaaactgctctgattttgctctttttccttttataaygtagctgactgatccctgatgcatacagggggcagaggctactatagtagttcaggtaaaagataaggaagtttggatgagggtggtgacagtgaaggtgatgagaagtaggaggagtaaggatgtatacttttttttttttttttttttgaagcagggttttgctcttgttgcctagactggagtgcaatggtgtgatctctgctcactgcaacctccgcctcctgggttcaagctattctcctgtctcagcctcccaagtagctggcattataggcacctgccaccacgcccaactaattttttgtatttttagtagagatggggtttcactatgttggccaggctggtcccgaactcctgacctcaggcgatccacccacctcagcctcccaaagcgctgagattacaggcatgagccactgtgcccagccggatgtatacttttattgtacagctgccaggatttactgatggatcgatgatacgagaaagaaatgcacctagtttgaactgtaggattt

SEQ ID NO: 897057 - DNA, 653 bp, Homo sapiens
taattttctccttatttttggttttcttcaccctcactaggatgagtctagatacgactttttcccccatttatctagtttgagactttttgagcttcttgaatcttcattttggttgttctcaacacttcggtaaattatcagttgttatttgttagatgttgcctctgactcattatctctcttctcttacttcactcaagccttcagtgatatcagatctttgttctccatgtttcttaacttgtttactttttttgtctttttgtccctccatgtactgtcctgcataatccttctgatctattttctactttagtaatttttctcttcagccatttaaaatatactatttacttacatggaatatctaaattccattattttatcttttattgctggatgttatatttgaatccttttcaaatcttctatacaacttacccctataacattttgtttaaacgatttcatacctaaagaaaacttgaaataatagtacaatgaaaacccatataccctttaattagagtcawtccttgttaacattctgccacatttgctcgtggttctctttctctttcttgaatcatttgaaagtaagtttatgacttaggtaagggagatatcatgacacttatcccttatataca

SEQ ID NO: 897058 - DNA, 663 bp, Homo sapiens
ccagtgttagggttttgctggttataacagccttttcttaaatttttcaattttttttttaagttctggggtacatgtccaggatacacaggtttgttacctaggtaaacgcaaacrcgcgcattttttcctgtagtattttaaagtatatctcagacaatatttatttttacctgtaaataattcactaaatatcagataataacttttacaaaaaatcagacccataatgctgttatccttctcaacaaaacaaacgatgattttaaaaactattttatgtttattgacatacttagcaaataacaacaacaatagcaacactaattttttggaatgggtatagtttgataggagtattagttaatgaatttaaaataaaaatgtttaatctgatgagcagtaattattttatatcatccattattcagtttttaaaatcataatccaaacaaggtctactcttgtatttggttggtgtaagactcttttaattcgtaacttctctctctccttcccttcttttctccttctcacccttctctcctgctcctctctctttcatgctatgtttattgtgaataaactgagtcattttcctataacatttttcacatcctggatttagattaattgtattcttacagaacatacatgttcctc

SEQ ID NO: 897059 - DNA, 347 bp, Homo sapiens
caagcacctctcaggttattccctttccttaggtgagataggatggctagcatgggctgaaattgagtatttcccttacctcaggtaggttargtgctcataaaaccctaacaggttaggttctggtaaatagtttatgttgagagaaggacttattaagaagaacagaatgttctggcatatttcaaaatgttacttgccccctattcctgcttgaagcagacaatttgtctctgatatttactgtgagaacatggtagaacaaaactttgcatttgaagtgtagtttgacaagcaggactctttcagaatgaacccaggagcgtactctattacctgaacaatga

SEQ ID NO: 897060 - DNA, 347 bp, Homo sapiens
caagcacctctcaggttattccctttccttaggtgagataggatggctagcatgggctgaaattgagtatttcccttacctcaggtaggttaggtgctcataaaaccctaacaggttaggttctggtaaatagtttatgttgagagaaggacttattaagaagaacagaatgttctggcatatttcaaaatgttacttgccccctattcctgcttgaagcagacaatttgtctctgatatttactgtgagaacatggtagaacaaaactttgcatttgaagtgtagtttgacaagcargactctttcagaatgaacccaggagcgtactctattacctgaacaatga

SEQ ID NO: 897061 - DNA, 599 bp, Homo sapiens
tacaggacaaaaagccagggttattgctacagtgtgaggcctgcagacagggcatcagtgagggtctgtctcaggcggctccagaggcagggccaaggggccaggaagttgccgctgctggtctgagctstaagctgccctctcccagcacccatgcagtccccagcgctgattcccttccttgcagagctgacccatttctggttttgagggtgaaggggtgaaagctactcagagtcagcccaggatcctaggaggctggctcttgcgactcagcttggctgccattaaggccaaggagaaaggccagactcactaaggacctgctggcagtaccatccttggagcccaaaccagagtaaccttcctccacccctcagggaccttaagctgctggtgagtgtgaagcccacagaactgagggcttagcgccacctgctggccacagagaagacttacttcggcagagaaaaatcaggaccactggtcctaggttttccaccaactctgagggagacccccagccttaaggcataacccagggaggggctggaaagctccaggcatagagaggcagttcgaccaagcctccctcctcc

SEQ ID NO: 897062 - DNA, 439 bp, Homo sapiens
gatggtgggtacaggtttctcactgttggagtgggartttacagatgagcaagagaaggaaactagaatgatctatgtggtgatggactaaagttggagacatcagtaagaacaaatgtttaatgtaatataggtacagatggttacacatagaaatatttgtagatatgtgtatatgcagaggttagtatgcatacatgtatttctttgctctgttggctgagagggtctagaatcaatgatacctcagcagcaaaaagtacacttactgtccaggtcttggtttctaagatcactttccaataaaaggaaccaaggtttcttggagtattggttggttctaggactagaaccaggaaatatacaagagaggaaatatacaagatgagtctggagcatcttatagtgccaaaatgtaaaaagtgcttaaaatcaaaca

SEQ ID NO: 897063 - DNA, 615 bp, Homo sapiens
aaaaaaaaaaaaaaaaaaaaaaaaaaaagaagaagaattggggggtcggagggagargggaaaatatcaaaaacactaacatgtgcttaaaaggaatacaaacctgagtgccagactacataaatttagaagatttaaatcaacaaatcaaaatttagaaggcaaatttgggaaacctcgtctattttcagagcgcccaagcgctcacccaggacctccatgtattttcatttaaaggtacagagtgtagtaccttaacagcttaacagcattcgcctttttcaaggactagatccttggaattttctgcagtcttgtttccaaggaaaagcatttatgcatttatcttttcaaatcaactagtggtataacctacatagagaacctccagttctagagctctccaactagggaggactgttaactacagctttacaaattgctcttttcaacttcatttctgaaataaaacctaacgttctttaaaacattttctatatcaacaacctttaaagacattctcatacaaagacgggctagaatctcttgcattaaaatctgacgaattcctttgtatgactggattttttttttcttgtaccactttaaatttgc

SEQ ID NO: 897064 - DNA, 628 bp, Homo sapiens
atctgacgaattcctttgtatgactggattttttttttcttgtaccactttaaatttgcttccacgcagaatagcagccaggcaaacagatgctccatcctaaggtgtaggaatttcttgtaggcggaaatgatttgttaggcgaaagcttccgaaacggttttccatttcacagtctcttccggtgccaaagtccagcaccaacgcctggttctggggtccgaccctcatgcagccgccgccgcgctcctcgtggctggacgagccggaactagcttcctccaggagctgctgctgctgctgccgtcactgggcgccgccgcacagccaaacggcgttcctccctctccgcttccctgagaactcgcggcccttctccaccaccaccagcatccgcggggaccgagaccggacgaaagtggcggggacccaaggcccctgaggagggggcgccgggcccgggagggggcgcgggacgggcatgggaccgggtgggcgcggcggcagcccactggcgccacttcgagctcgaggagacccagactgatagagcgcggaggcgtttccagaccgcagygacaggcgtttccagaccgcagtgacaggcgtttcaagtccgcagcgcgga

SEQ ID NO: 897065 - DNA, 612 bp, Homo sapiens
tgacaggaagactgcttgagtccaggagttcgagaccagcctgggcaacatagtgagaccccccccgccctttctacaaaaaattaaaaattagctgagcatggtgatgtgcgcctgtagtcccagctactcaggaggctgaggcgggaggatcacttgagcctaggagatcaaggctgtagtgagccgtgatcgtggcactgcactccagcagaggcaacagagcaagaccctgtctcagtaaaaaggtgtggtgggggaggtaccagcataggaccaggctgaatgagttggacgtttagtttgtgtgtaccagccttggggatcctcatgtgtaggtgtcaccctcaccatggacccaatgcccaagcacctttctggggttcatgcaccctcttcctcctccaagtgggcaggcatcctgcctctgactgtctctccctgcaggatggggaagtcagagctccaaggtgcacatccaccacagcacatggcttcatttcccygggcacaacctgcggtggatcctgaccttcatgctgctcttcgtcctggtgtgtgagattgcagagggcatcctgtctgatgggtgagtgactgtctgaggactca

SEQ ID NO: 897066 - DNA, 635 bp, Homo sapiens
gtccaatccgaacactattcttggtcaaagaaaaattttttattacatcgacatgctgaagaatttcttgcctaaaataaaaagaaattcatgaaaagcattccattcagaagaaytgattttccatcttatgacttatgctgacatttcattcagagggaatcttaggctcattgaatccaaaaaagattatacatacataattgtggtccttgaagggaggactgcttcagaatctccgcatattctaatctttcagtcaatttctgggtgtattctttgaggcttgtaaatgcaacttacagttttagctgccataccttggttttctgctctacgtgaagagtgtatcttatttgatcagcagggaggtatagggcaaattgtgtcagaaaatacagggagacaatttacacaggcctgaaagagctcacattaatgcacaaacattagtaacacatagtttgtaactagggtctacttgtttgctactggactgaagtgctcaaagaatatcaaatatcagtggtgtccaaataagagccaaatagatatgagtcagtacagcactatctattattaaaatatgaagatggtaatagcagtgggtgtagctgaatatttaatagaaatga

SEQ ID NO: 897067 - DNA, 696 bp, Homo sapiens
ttaagaaagctttgttgtgctttcattaaatgcttaattttaaggaacaccatatgatattcctttgaatttagttaatatttttacacagagtattcttttgcaaaattaattttttggtatttcaaaaatttgcttaaaactttcactttatttaatttaagacaatcttttactcctaggaaaaatgtagatttttatgccttcttataattttttattataaaattttactgtttttacacacgttgcatacacattcattttcagtagcctcaattacatgttataatggtaactttttgtaattttaactttaatgtaaaacctggtaagtggttttaattatgtgctaggagcagataaagtctgacttcttccagtatagttaggggcatggttactttaatatgtcactaggccttactaattgtgaagctggcaggttgacagtactcaagggccaaagaagcagtttacattaaaacatttagcaaacctaatatttgacctgcataatttagaccacctatttacatgtttaagatgtttgtattctacaagaatgtttttatttcttaaatattgaagttgcatgaaccaagaggcactacagcctttaattttgacttaayattttatctaagtgcttatttgtacaccaattaattagaggttttttatagacatcacaca

SEQ ID NO: 897068 - DNA, 588 bp, Homo sapiens
acaaaaaacaacttgggctttatttgagccactttctttatattgtggtttctgatgtctacacctgaacttataaacggaagagtcattattattatttgtatttcttttaccctgctaagaatacttatttttcttctaaaaaaattattctagaaaaccttaagggatttttttttgaattgcttattagtatgtaatataaaatttacagggcagtggctaaaaaagattaaaattatacaaactcggatttaagtttacttaagtaagcttaaaaaaaagaactgacagtaccccccagtggcatagagaacagaattgtacatcggctctacactctgccccagccctgttcatattcacccttttttggaggccttatttatgtctggccctaccctggagtcttgcctgaaagaaccgattagaagagatcagagttttgggtcatgaatcctgttgcctttttagagctggtgttcaacattttctgaaacttaaaagcagataaatgggaaatataaagtatgtattayaggatcttacttttcaaattttttattaaaaccagtgcttgaagagact

SEQ ID NO: 897069 - DNA, 640 bp, Homo sapiens
ttattatttttgattgtgtctatttgattcttctctcctttcttctttattagactggctagcagtctrttttgttaatcttttcaaaaaaccagctcctggattcattgatttttttgaaggattttttgtgtctatctccttcagttctgctcttttcttagttatttcttgtcttctgctagggtttgaatttgtttattcttgcttctctagttcttttcattgtgatgttagggtgtcaattttagatctgtcttgctttcttttgtgggcatttagtgctatatattttctagacactgctttgtctgtgtcccggagattctggtgtgttgtgtctttgttcctgttggtttcaaagaacttttttatttctgccttcattttattatttaccctataatcattcaggagcaggttgttcagtttccatgtagttgtacagttttgagtgagtttcttaatcctgagttcaaatttgattgcactgtgctctgagagactgtttgttatgatttccattttttaaaatttgctgaggagtattttacttccaagtatgttgtcaatttaagagtgatgtggtgccgagaagaatgtatattctgttgatttgtggcagagtcctgtagatgtc

SEQ ID NO: 897070 - DNA, 640 bp, Homo sapiens
ttattatttttgattgtgtctatttgattcttctctcctttcttctttattagactggctagcagtctattttgttaatcttttcaaaaaaccagctcctggattcattgatttttttgaaggattttttgtgtctatctccttcagttctgctcttttcttagttatttcttgtcttctgctagggtttgaatttgtttattcttgcttctctagttcttttcattgtgatgttagggtgtcaattttagatctgtcttgctttcttttgtgggcatttagtgctatatattttctagacactgctttgtctgtgtcccggagattctggtgtgttgtgtctttgttcctgttggtttcaaagaacttttttatttctgccttcattttattatttaccctataatcattcaggagcaggttgttcagtttccatgtagttgtacagttttgagtgagtttcttaatcctgagttcaaatttgattgcactgtgctctgagagactgtttgttatgatttccattttttaaaatttgctgaggagtattttacttccaagtatgttgtcaatttwagagtgatgtggtgccgagaagaatgtatattctgttgatttgtggcagagtcctgtagatgtc

SEQ ID NO: 897071 - DNA, 645 bp, Homo sapiens
gtgcttgcagccagaatttcaagccagtggatcttagccggctgggctccctggttgtgggaactgccaagccagaccactttgctccctggcttcagccctctttccaggggagtgaacrgttctgtcttactggacttctgggcactactggggtatgggggaaaaaaagcctcctgcagctagtttggtgtctgctcaaatggccacccagttttgtgcttgaaacccagggccctggtgtcataggcaccagagggaatctcctggtctgcaggctgcgaagaccatgggaaaagcacagtatctgggctggagagcacggttcttcatggtacagtccctaaacccttaccttggctaggagagggagttccccaacccgttgcacttcccaggggagacgacatcccaccctgctttggcttgccctcagggagccgcacccactgttcaaccagttggaatgagatgaaaccagtacctcagttggaaacgcagaaatcacccaccttctgtgtcgatcgcgctgggagctgtagaccagagctgttcctatttggccatcttggcagcctcctctattttgatttttattacagaaagtgtggtgtaataatatcctactataattgtattgctctc

SEQ ID NO: 897072 - DNA, 323 bp, Homo sapiens
ggagagaaattctacaaatgtgaagcatgtggcaaagcctataagtcatcctcaacccttarttatcataagaaaattcatactgaagagaaaccttacaaatatgaagaatgtggcaaaggctttagtacattctcaatccttactaaacataaggtaattcatactggagagaaaccctacaaatgtgaagaatgtggcaaagctttcaactggtcatcaaaccttatggaacataagaaaattcacactggagagacaccctacaaatgtgaagaatgtgacaaagccttcagctggccctcaagccttactgaacataa

SEQ ID NO: 897073 - DNA, 565 bp, Homo sapiens
cttctaactgcactggagagtttacagaaaacataagctcagggctttcaatccttagttgaagacaaggtcagagaaacagctaacatgtattctgccctaaggaagtctgcttccattttatctgagatgagaaccaaatttgacaggttgactatgaattacaaagcaagttgaatctcagctttgccaggtctctcatatttaaactaaggcatgaagaggggaaagtagggccttacagattgcaatgattctgacaaatatgagcaccttaacttcccagagctgcgctgactctctctaccagcagtcacagccccagctcccctgaggaagctgccacccccttgcctgaagtttctataataatttctactgaatgtcttggagagctatagtccattgcctctcattgcctcagaatactgggaggacaagagtcataatccagctgcactccaaaggtgaagtccaaaatctgacctgggaggagatagaatacatgctcaaatactaaaatattttgccaagttatatsagcactaatctaaggaatatgtgt

SEQ ID NO: 897074 - DNA, 391 bp, Homo sapiens
tcattttctccagcctaggtgacaagggcaaaactctgwctcaaaaaaaaaaaaaaaaaaaaaaaaaaaacaagaagaagaagaaatctttgcctatcccaagatcatgaaactatttctacaatatcttctaaaagctttattgtttcttctttcacattaagtccatgatccatttggaagagatttctgtgtgtggtgtggggtaggagtcaaggttcctttttgtttacatgaataagccaatcaagccagctacctttactgaaaaagcattctttccctctttgaactacagcggctcctttgtcataagttatgagatggtgtgtttttgttacactgatctatttggtatcttgcactgctgttccatttactgccacattat

SEQ ID NO: 897075 - DNA, 535 bp, Homo sapiens
acttctatcaacctacaaatctacctactttatccttttaaaggactatgtcatactccattaaatgaatttactataatctatttaaccaacattcctttagtgaacattttaatggtttgcaattttttgtccttgcatataatgctgaaatgaactggatcatatgcaagtatttttgtacacctctagaagtgattttttaaaattcctaagagtgagatgataaaattagtcacaaacatttactaacacatattaccaaatcaggcagcataataaaagatcatcaaatttttattcattcacttagcaaatacttatgtcatgcttgtgctgtgctaggtactgctcccagagcttgactcctcatgacatcctgagatgagaactttaatgattctgttttatacataagaagactgtggctcagagagrcaaagtaacttggcagaagttagacagaaaatagctggtttggaaaccagggtctgcagcacccaggcacttgatgactacgttgtccttcctgatt

SEQ ID NO: 897076 - DNA, 656 bp, Homo sapiens
agaggttgcagtgagccaggatggctcaactgcactccakcctgggagtcatagtgagacactgtctcaaaaaaaaaaaaaaaaaaaaaaaaaatgttgggccaaagaccttaacagacagctgaccaaagaaactatgcaggtaaaaaattagcatataaaaagcagctttacatcatttgtgtgtagggaaatgtaaacgtaagccacatgaattatcaccacacacctattccaatggcccaaatccagaacaccgacataaaatgctaaagatgcacaaaatgctaatgatatggaggaagaagaactctcactcattgctggtgggaatgcaaaatgttacaacacatcttctactttggaagacagtttggcagtttcatagagacctaaacgtactattaccatgcaatccagaaagtgcactccttgatattgacccaaaggagttgaaaatatgtccacaccaaaacctgcacacagatgtttataaaagctcagttcatcattaccaaaacttagaaaaaaaacaagatgtgcttccgtaggttcatggataaataaattgtggtacatccagacaatggaatattattcagagccaaaaagaagtgagttatcaagccatgaaaagatactcagaaaccttaaat

SEQ ID NO: 897077 - DNA, 565 bp, Homo sapiens
gagtaaggtcagtcaaaaattcagggaaacttgaatgcaaaagactcatttgagtgcatggatttatattcaacataagactcgagaaaagtcactctgtatgaagctctgattccacgtcaaaatcgtattccaacttccttctcctggacaagtggtatttttttccagttgctgaaaaattacattctacagctttctttctccagtattgacaaatggttaaatggaaagggaggtcaaaaaagaaaatcgatgcaattttacacagtcctcattactaggtcaaccatgtcttctctgtgcatactcaagttggtttccttgctctgagtaaggcttttaaaaggttgcttgctggctgaactgtcagcccagggaaagaagaattagttttcaaaatctatctacagtacagaaaaaaaaaaagacagtaaaacytcatgtaccacatctatgattctatttttaattatcattaatgctaaaccaaacaggaaacgcttactgtctagtcatttccatttgaaataaaaaactgtacagatttatagctggaagggtc

SEQ ID NO: 897078 - DNA, 563 bp, Homo sapiens
ataatagggacagtcagagaagatatgtaagagaagggttacrgtgatgttgccttgacagagaaggaaaggtgcaatgaagaagtgtggagaaaataactgatacaattatgctctgtgtccccatgccgttctcctattcacttataatccctataatcttcataatccccaggtgtcaaagtcagaccaggtggaggtaattggatcatgggtgcggtttccctcatgctgttctgatgatagtaagtgagttctcatgagatctgatggttttataaggggctctttcaccctcgctccggactcttctctttcctgtcgccacgtaagaaggtccaagttttcttcccctgtgaagatgtgccttctgccacggttgtaagttttctgaggactccccagccatgcggaactatgagtcaattacacctcttttctttattaaattacccagtctcaggcagttctttatagctgtgtgagaatggactaatacaataaccaaggctgagaaaatgcatgtactggtacacacaggtgagcaagcccgtgccagattg

SEQ ID NO: 897079 - DNA, 609 bp, Homo sapiens
tgttttgtatctccttgaacttccttgcaaatcatgctttgaattatttctctgtcatttctgaatttctgttttgcttaggaaccattgctggagagctactatgacccttttgtggtatcacaccattcagatttttcatggtgccagaagttttgcactggttcctcgtcagctggaaatgctgacacacttctaatttattaaattgctttttgtgcaggtagatttttttttcctttttctcccttttcctgtaatatttttttttctttcccactccctagagggtgcaactctagagaatgctaagtagggtcttttggttttgcttctatagcactatgcaattcttttagcagatattatattgggctgggaagttcaatgcatgagccaataaaaagcatgtacaggtaatagctggctgcagcttatatggttgagtgtacacttgatccctgcttactggaataagctctctgttgtctcagagaatgggcttawtcatataatgcacagtggtctgagccgtctgctcagctctgagggtgtggggggccatgatgggtagagccagatctggcaggtcctcctaaaggtctccca

SEQ ID NO: 897080 - DNA, 607 bp, Homo sapiens
tgctaattagaatgataactttcaaaatgcaatggagtcttattgaagttttctaaggaattcagtgggtttttagagatcatatttggaatcttagaaataatgataagaactkgagaacacaaataagggaacaacagacactgggatctacttgaggtgggaggatgggaggagggagaggagcagaaaggataactattgggtactgagcttaatacctgggtgatgtaataatatgtacaacaacccccaagacatgtgtttatgtatgtaacaagccttcacatgtacccccaaacctaaaataaaattgtttaaaagtacatgaaaaaagaaataatgtgacaaatttaaaaattcaggctcaggaagattgggatttttccacaaacacatacctagtgagtagaaaagctagaaatcaaatccagaaaggtgaggtggatcagatctgaagcgttttatactcatggttttatgccagtcagtcacagatgcttgaggttttcatataaagcctcatggcctcatgtctgtcagagggttctcaccctgctttcctttgtaataaatacccttaaaaaagatcaaagcatttttggta

SEQ ID NO: 897081 - DNA, 582 bp, Homo sapiens
attacagcattttatatatgtctatatatttacctttaccaattagttttatactttcatatactgttatgttatggtttagcatcctttcatttcaacttgaaaaaaaatccctttagtacttcttctaaggcagatatagtggtaataaaattattcagattttgtttgcctgggaaaatctttgtttctttcaattttgaaagatagttttagtgagtataatattcttggttgtcagttttttcatttctttcagcactttgaatatatcatccttctaactactggcctgaaaggtaaaaatctgctgttagtcttacagagattctttgtatatgaaagtttcctttctctttctgattttgggattttctttgaatttgacaatttgattttaatgtgtcttggcatgtttttctttctttttcttttttggtgcatcttatttagaatcctttgagctttctgcatttggatttccagtttcttccacagrttttggaagttttcagccattatttctttgagtaaactttatggttctttctctctctctcttgtcttttgaaatttccataa

SEQ ID NO: 897082 - DNA, 659 bp, Homo sapiens
tttgtttaatcgtgattccaactgtgcctctaaatccttttgattctgaaaagatcagctcaaatcccgtgtcttgtttgattccatccctaacaaccaaatccatgatgccttctcctcttgccttattgcctctgacttagttaagcattgttaatggttgctagtgttaactctatctaggttgtatcctctcccctcaccagaataaaatagaaagcttataaactttgatatcataagcatcaggatttgaatctaggctctgcccctttttagccaatgaccctcatgtcaccatgaacttcaggttacttgtacgtaaaggggataatgattctggcatttcccagtgcacttgcaaaatgcctagcattaagcttagcatatagtggctgctcaataaatacagttaccttcctctccttcccctttttcccccaaattccatgtatttgtatcctgggcatattttaccttatggacaatgacgaattcttactgtgtttgataataaatctgaaaacagtatatcagaagcagagatgaggaagtcttgtggcaatagaagatcaacagactaattttctttctcctcctcctctgtgatcttcacaycagaataccccatggtagaagccactgtacaaacctcctga

SEQ ID NO: 897083 - DNA, 602 bp, Homo sapiens
aaacctcaccaccagctttctaccctcagctcagttaacctcacatagacaccatctcctttccctgataccaaatcccctaggagcttagcttggctccagctcagccctggccacaaaactgattctggcaaggccagccctagaacagggtattcaaaccatgctccatggaaccctctgggctcagaacacctgaggggtccctggaggcagggctaatcaggctcccctctgctttcaaccatggtagctccgtgtctgccagtttaacatatctggctttttccaaaaagtatttgtttgcttaaaggatctgttctgtgatgagttaatgggtgcagcacaccaacatggcacctgtatacatatgtaacaaacctgcactttgtgcacatgtaccctagaacttaaagtataattttaaaaaaaaaggatccgttctcctgctaaaaatataaactgaaaaaatttgaaaattgctgacttagccttgtgaggcctgacaagcaattttcaaactttttcagtgtctgctgttgtctgtcccaaaagtactaytgtctgtcccaacggcgggagcgatctctggggaaccagat

SEQ ID NO: 897084 - DNA, 645 bp, Homo sapiens
ttttccaatttcttattgccctattaccaggtcctcaagggctgctcactctcctcccagcgccttcttgtaagatgacaagaggataaagtgagagtcaaagaacttctttctcttctggaaaattttgggtgatttactctgctcttttgccaaatatttatggatccaaatatttacggaacgcctactaagtgatgagccttgtaaatgcaatggtcatcaaggccaaattgctgcctcaggcaaggaggtgacaatcctgctgaagtaggatttgagggcataccaagtgccttgacatatattaacccccacaatgttcgcagcaacccaagaagtagttaggcactattattattttcattttgcaactagggaaactgaggaacttgtccacagctgcagagcaagttcgtgacagagctagggttcaggctcaagtatgaggctccagagtcagtcttccatgccctgaacgataatctataccaactcctgcctattatctactgatgcagaaaaaacactgcagacaatacaarttgcatttgttcacaattctgcatgtgagaaattggagcaggaaatagcagagatagctcatctctgttccacatctgtagttcagctgggataactcaa

SEQ ID NO: 897085 - DNA, 566 bp, Homo sapiens
tgtctatctgtgatactgagatgaaaagcaggaggaaacaggaaatggtgtgtagtttctgaatgtttaaagattggactgtgtttgaaacttactactgcagtgatctattggccaaagaagmcaagaaagaaaaagagacacatatgtttgcaactgaggataaggttaatgagtctgaaagtgattaagagtaatgagagattgttagagcgctaaagagtgttttttttcccagaaactctttcgtcgtccccacagagaacatttagcatttctctgagggactatacagacttgggaaattattattttgtaattgaatctacactcctatctatttggaactgtggatatgttatcagagtatatgaaaatttatctctgaatatttgtatattttccacgttctatctttgagtcctggatctgtacttacgagacttgtaatctccagcaaacaacctagatcactgaccttcagtattttaatctgtaaatgaagataatgactgaaaccaattcagaagtctttattgtgaagaacacatgaaagacggcatgaa

SEQ ID NO: 897086 - DNA, 642 bp, Homo sapiens
acaaataaatcatattagagcaggtctagagtatcctttattctacatttagcttagttttactattaacacaytgtattttattacttaatattgaatgccccagatgttcaacaattcttccctctgactagttggaacacaaatatctgccatttgcaggtgagctctaagaatttttcaacttacagctccctagtagttctgagactgacctcatgttccagcctataaatgcatagtttagtaatcagtcacagactcaggtcacctctatgcaaactcgaatgctccttttctagtcacctttctcctctgagggattttgtgagttcagttggctttgcctcccagaacaataatctctttttttacccagcaagaccatcgtgctttcattgggtcccatccctgtcttatggtcgggaaaattcctttaggcagaaagatgatgcaatcataaagctcactttgtttatttctcttctctcaaagatcacagtcctgtactgcctactgtccaatttgtaaaaatgattgcttcatatattttcgtcctgttctctagttgtttatagcagtaaggcaaaactggaactgattactttttcatggtagaagctgaagtctttgaattttcta

SEQ ID NO: 897087 - DNA, 600 bp, Homo sapiens
ctccctgccagtacagcagtctgaagtcaacctgggatgcttgagcttggtgggggaagtggcatccgccattactgaggcttragtaggcagttttcccctcacagtgtaatcaaagctactgggaagttcaaactgggcagagcccatgacagctcagcaatgctgctgtagccagactgcctcagggcatctatgaaagaaaagcagcagccccagttagggccttatagataaaactcccatctccctgggacagagcacctggggaaaggggtggctgtgggcacagcttcagcagacttaaatgttcctgcctgccagctctaaagagagcagcagatctcccagcacagcactcgagctctgctaagggacagactgcctcctcaagttgggtccctgacccccatgtctcatgactgggagacacctcccagcaggggtcaacagacacctcatacaggagagctccggctggcatctgacaggtgcccatctgggatgaagcattctgtgctgttctgcagcctccgctggtgataaccaggcaaacagcgtctggagtggacctccagcaaactccagtagacctgcagc

SEQ ID NO: 897088 - DNA, 616 bp, Homo sapiens
agggggaatgctttcaacttttccccattcrgtataaggttagctgtgggtttgtcatacatagcttttattaccttaagatatgtcccttctatgctgattttgctgaggattttaatcacaatgggatgctggattttgttaaatgtcttttctgcacctattgagatgatcatgtgatttttgtttttgactctgtttatgtggtgtatcacatttattgacttatggatgttaaaccatccttgcatccctggtatgaaacccacttgatcatggtggattatctttttgacatgctgttggattcggttaactagtattttgttgaggattttgcatctgtgttcatcagggatattggtcaatagttttctttttgtaatgtccttcccaggttttggtattggtgtgatactggcttcatagaatgatttagggaggattccatctttctctatcttttggaatagtgtccatctttctctatcttttgaaatagtgtcagtaggattggtaccaattcttctttgaatgtctgacaaaattcagttgtgtatctgtctgatcatggacttttttgttggcatttttttttattaccattttaatcttg

SEQ ID NO: 897089 - DNA, 551 bp, Homo sapiens
tgcccagggacatttttctcaattatttcctcaaatacgttttccaaacttttagatttctcttcttccttgagmacaccaattattcttaagtttggtcgcttaacataatcccaaaattcttggagactttgttcatttttttaaaattcttttttctttgtcttgttggattgggttaatttgaaagccttgtctttgatctctgaatttctttcttctacttgttcaattatattcctgagactttccagtgtattttgcatttctcgaaatgtgtcctgaatttatagatgttgtgatcgttttttatttatggtctctatttctccagagattttttcatctatatcctgtaacatttttaaactaatttctttaagttggtattcatctttctctggtgcctccttgagaagcttaataatcaaccctctgaattctctttctggcaatttagagactgctttgtttggatccattgctggtgaactagtgtgatcttttgggggtgttaataagccttgttttgtcatattaccagcgttgtt

SEQ ID NO: 897090 - DNA, 588 bp, Homo sapiens
taaaataaccgtttcaggtccatcccttacatggcaaagtaaaaagctggagtcagtacacagtgttggggtgggggcagcgtttgggggcgacgagttttgtgcaccgcgctggagtaccctgcacataaggtccgctcatgggcttctcagtacggactcgccggcgggaacaattaattgagcaaagcgcccctttctgggctggagcaaggttcgcggctgcagatatctcaagctgaaggcaagagcccaggcgaggcgcaggcaggccacgtggctgttccctgctgagactcgcagctttggtcttggaaacctcagggtgtggagctgcttgggccgactgaagggttcagctttttgggagaagtgagggcgagtgttatttctccagcgaggtgtaaacaagactgtgctttcatgggagggacaaattgcagagttgatcccttaccatttttacagaaatactcagaaagtgactacagcttgtcaactggcctgtttaktgagccgctgccttactgtaaaattgtctgaaaatcagattcgacttgacctccacttaatttcagtagcactcta

SEQ ID NO: 897091 - DNA, 641 bp, Homo sapiens
ctgcctggaaatcaaaagaaggaataaattctggcaacaatcagttatcttggtagaggacccttagcctcagtggagacctgcagamccgtccagcactttgacttcagcctgcttagaggctgagcaaagaatccaaacatgctgtgacctatagagcttctgacctatagaaactatgagataataaatttgcattgtttaaaggtgctgagtttgtgtgaatttgttattgcagcaatagaaaactactactagtagtactactaatattacaagaattaaaggaattgacacatgttggagtttagggagtaaataaatcacatctctttcttctctcaaataaaggaccaagtgagaaagaagacagaaaggataaatggaaaatttactaataaagactgaattgcatgacacgacctcaatgtgtggccatcataggctttctaatatttttctctggaaataaatgtacacttctagtcatgatcagagtcaaatacgtcaggcatcctctgtagaagtagattatttactacgtggttgaggagagactaaatagcagcatgaaatagtatgagagagaccatgtgcttgggctgagcaaggttatttcctgctcacaaactcactaattg

SEQ ID NO: 897092 - DNA, 581 bp, Homo sapiens
aggtagttatgataacatactacttcataaaaaaggtatattataaaatctatgagagagaggttaactaagacataacgtgggatcacaaacaagctgtgtatatttaacatagatgggtcttgaaagtgtttgaatgctgtacaaaggggaaaccataggctgatgatgaatcatagtttttgaggaatgaaaataaataaaatccaaagaacaggaggaagaattagacttaacctggagacgagaaacattttctaccaaggctaagtaggaaagtgtacaaattaaattatgtttatgtggggaagagaaggattaagtacctgggagaatgaaggggacagtggtggggtgagagtactcaggaagaagataaaaacttgatgttatggtccaaatgcttgtgttctctcccaaatttacatgttaaaatccgaatccccaaggcaatgatattaagaagttcgaactttggggaggtgattaggtcttgagggtgaagccctcatgactggggattagtgctgttataaaagaggtcctctctrccttgccccttataccatatgaagatacag

SEQ ID NO: 897093 - DNA, 427 bp, Homo sapiens
aaaataataatccaaaagaaaaattaattaaaacaactatcaacccagaattccataaccagcaaatgtattcttcaaaaataaagatgaaataaagacattttcaaataaatgaaatctagaaaatttgtcaccaggaaaactgatctataagaaatgctaaaggaagtcctcctgggtgaagtgaattaaaactaaatgatacacatgaagggatgaacagagcatgaaacataatgtattggtaaatgtaaaacaaaatatctttttcccattaattttttaaaaatacaattattgaaagcaatatgtatatatatatatatatatatatakagagagagagagagagagagagagagagagcatgttgtgaagtatataacaaatgtaaatttcaattatatgtcaaaaatagcatttcctg

SEQ ID NO: 897094 - DNA, 575 bp, Homo sapiens
ctcacaccagtcagaatggctattaataaaaagtcaaaaattaatagatgctggagagggtgaggagtaaaaggaatgcttttacgctgctgctgggagtgtaaattagttcaactattgtggaagacagtgtgacgattcttcaaagacctagaggcagaaataccatttgacctagcaatctcattactgagtatatacgtaaagaaatataaatcattttatcataaagatacgtgtatgcatttgtttggtgcggcactattcacaatagcaaagacatggaatcaatccaaacgcccatcaataatagactggataaataaaatgtggtacataaacaccatggaatatactatgaagccataagaggaacaaggccatgccctttgcagggacacagatggagttggaagccattatccttagcaaactaatgcaggaatagaaaaccaaacaccatatgttctcactaggaagtgggggcagaatgrtaacacatggacacattggggagggacaacacacattgaggtatgtcagggagggccaggggagagacagcatcaggaaga

SEQ ID NO: 897095 - DNA, 599 bp, Homo sapiens
cacccagtacctcagttggaaatgcagaaatcattcgtcttctgcattgctcacactgggagctgtagactggagctattcctattyggccatcttggctccaccaccccatgttaactcttttgtgagttgagatacaaccctatttctctaaacgtgggtggcaagttatccacaaactgtttgttaccctttgtttaaagacagttctctatagacctcttgtgtttctgcacatcttctgacagcttttgatgcacactatatttttaaggttatattataatcccataattgggctgtataaattactcatatctacggtagaaatactaaaagatgaacccatcaaaaataaatacagtaatttttaaatacataaacagtataataagatataaacagaaacaacaaaatgtaataaagtggggggacaaagttaaaatgcagttttattagttttctctttccttgtttgttagtcagttagtcaatatgtttatgcaatcagtgttatcatcagtttaaatactgggttataagatactatttgcaagcctcagggtacctcaaatcaaaaacaacaacagatagacaca

SEQ ID NO: 897096 - DNA, 599 bp, Homo sapiens
cacccagtacctcagttggaaatgcagaaatcattcgtcttctgcattgctcacactgggagctgtagactggagctattcctatttggccatcttggctccaccaccccatgttaactcttttgtgagttgagatacaaccctatttctctaaacgtgggtggcaagttatccacaaactgtttgttaccctttgtttaaagacagttctctatagacctcttgtgtttctgcacatcttctgacagcttttgatgcacactatatttttaaggttatattataatcccataattgggctgtataaattactcatatctacggtagaaatactaaaagatgaacccatcaaaaataaatacagtaatttttaaatacataaacagtataataagatataaacagaaacaacaaaatgtaataaagtggggggacaaagttaaaatgcagttttattagttttctctttccttgtttgttagtcagttagtcaatatgttyatgcaatcagtgttatcatcagtttaaatactgggttataagatactatttgcaagcctcagggtacctcaaatcaaaaacaacaacagatagacaca

SEQ ID NO: 897097 - DNA, 608 bp, Homo sapiens
attaaaaacactttttttgtacttacaattcaaggggaaacctctcctttgacaaaataaagtgcagttttaatgccaaataaaattgagtggttttcatttgcattcttagcaaaatcagagaacaaagaaattaccactcaaccaatcaggtttgtttctatgtgtgacagaataccaatcaaaatagaagatgttttcatttatttttatgttttctttcccacttaggaaaataaaacttaacataagaaattaatgtaagcatttcatttactggaggaggaacagttcagtaaatgtactatataaacttaacatataaaagctagtgccatagaccaaaatgcatagtaaattcttctaaaggtaggagtatacactaattaacaaaaacttttaagagtctcttaaaaaattcattttctctctcaacaactgagttcaatgaacactaatgatgaaatttttcaacacataaaamtaaactaaatcattggcctaatatgttatttactgtttttgaatacaagataaatttttcacaatgagaaaacattattggattaatattcctatataataattaagaatttcagctgataaaa

SEQ ID NO: 897098 - DNA, 608 bp, Homo sapiens
attaaaaacactttttttgtacttacaattcaaggggaaacctctcctttgacaaaataaagtgcagttttaatgccaaataaaattgagtggttttcatttgcattcttagcaaaatcagagaacaaagaaattaccactcaaccaatcaggtttgtttctatgtgtgacagaataccaatcaaaatagaagatgttttcatttatttttatgttttctttcccacttaggaaaataaaacttaacataagaaattaatgtaagcatttcatttactggaggaggaacagttcagtaaatgtactatataaacttaacatataaaagctagtgccatagaccaaaatgcatagtaaattcttctaaaggtaggagtatacactaattaacaaaaacttttaagagtctcttaaaaaattcattttctctctcaacaactgagttcaatgaacactaatgatgaaatttttcaacacataaaactaaamtaaatcattggcctaatatgttatttactgtttttgaatacaagataaatttttcacaatgagaaaacattattggattaatattcctatataataattaagaatttcagctgataaaa

SEQ ID NO: 897099 - DNA, 617 bp, Homo sapiens
tttaaacactactatctcagtaaagccaattaaagacatggaactggctggggttgtcctgagagcytaatttatggagcacctgcttggtgctggtgctgagctcaggatgagaggcagtggaggagtaaagagaacatggaaaacgtggtccatgcactctaaaacctttaaatatggcaggatcccatatgtccttttaaatagagccaggcagtaaaccgatagctaaggactgtagctgtggataaacaatagacaggtgacaaatactgatactggctacttttcatagagaacagagtgtgtgttcctggcactctgctgggtgctttatagatggcatttctaattaattttttgaaaatccccaaagcaggttttattatctctgttgtacaggtgaggaaaatgagactcagaaagcttgtcattggaagaactggggttgcagtacaggtttgttatgtgccaagtcctgtcttccttctgtggaatcatgtgtcacttctaaatcaagcccacagaagctggtggagatactagagtgcagagatggtagcgtttgtgaggctggagtttggaggcctttgaactggtattagaaagtaagaatt

SEQ ID NO: 897100 - DNA, 696 bp, Homo sapiens
tgcataactagtacaatgccaaaaccaggaaagtggcattggtacaatccacagaccttattcagatttccagttttatttgtacgtgtgtgtgtgtgtgtgtgtgtgtgtgtatgttttatgcagttttatcacatgtaggtctgggtactcactaacacagtcaagacacagaaaacttccatctacagaaagatcccatgttgccattttataaccacacctacgttaccccccacttcttccccacctcctgaatcctagttcctggccatcactaatctattctccatttctatagttttgtcatttcaaaaatgctatacaaatatgtaaccattgggtattggttttcttcattcagcataattcccctgagatccaaccgaggtattgggtgtatccataatttgtccttttttattgttgagcagtattccacagaatgaaggtagcacaatttaaccattcaaccactgaagggcatctgggttatttctgggttttggcaattataaataaagctgttatgaatacccgtgtacaggtttttttttttgtaggcataaatccacaaacraccaaaaatgaaattactgaattgtgtggtacttggatgtttacatttatagaaaacaggcaaattctttccataatggctgtgacataatacattactaccagcagtgtatgaga

SEQ ID NO: 897101 - DNA, 659 bp, Homo sapiens
gacatcctaagttcctttgcacaactgaggagttgatggagttccagtgaactgaatactttccattaatccatcccagagagataggtcatctctttgtagcaytggtctgtagaaaaaaaatgaagtgcctgagcaagatactgaattttagcattgcttatgtgggggtggggggcatggattgctccatgggcaaatatatttctggtgtcctgccattcttcctggggtgtaaattcactcttacctaagtgtggggcaaagtctctctcagttgaagcccagtagatgcagttgataaaaccgatgttgaatcccacagttcacagaattctgagatgtaaatactggatttatcaagtcaaattgcatctaatgatgagttgtgtttggcttctgagaatccacagaaaattatcatgtgtttacctagggttactttctcatgactttgttctcttcttttcttgtctgtcttctctctctgccacatgaccaatttgttgcattcaactctgattttaaaggtttccattccactaaccgaaggcctggacttgatatccatgttgacggatgatgctacaattgccgcctggaataacgaaggactgcccagtgacagaatgtccaccgaaaatgccgctatcctaaca

SEQ ID NO: 897102 - DNA, 659 bp, Homo sapiens
gacatcctaagttcctttgcacaactgaggagttgatggagttccagtgaactgaatactttccattaatccatcccagagagataggtcatctctttgtagcactggtctgtagaaaaaaaatgaagtgcctgagcaagatactgaattttagcattgcttatgtgggggtggggggcatggattgctccatgggcaaatatatttctggtgtcctgccattcttcctggggtgtaaattcactcttacctaagtgtggggcaaagtctctctcagttgaagcccagtagatgcagttgataaaaccgatgttgaatcccacagttcacagaattctgagatgtaaatactggatttatcaagtcaaattgcatctaatgatgagttgtgtttggcttctgagaatccacagaaaattatcatgtgtttacctagggttactttctcatgactttgttctcttcttttcttgtctgtcttctctctctgccacatgaccaatttgttgcattcaactctgattttaaaggtttccattccactaaccgaaggcctggacttgatatccatgttgacggatgatgctacaattgccrcctggaataacgaaggactgcccagtgacagaatgtccaccgaaaatgccgctatcctaaca

SEQ ID NO: 897103 - DNA, 628 bp, Homo sapiens
aagtctaaaaacaatccaaaggactgacacattaatagtcatgcagattttgcatgttcccacagtgggctawtactcaaaacataaaggtatgaattgttggtacacacaacaacgtggatatgtcaccaaacgattatgttgaaaagaagcagccagataccgaggagtatataccatatgatgctatttatgtgaaattatagaaaaggcaaaattattctacagtgacagaggcaggtcagtaattgactggggctggcgatggtggtgggaataggctgtaaataggcacatgagaactttttctggtaatgtaagtagaaaggttctttatcttgattgctacggttattgttagaatatatctatttgtcaagactcatcaaactgtgcatataataggcacattttatagtatgtaaacgaaaaactgattttaagaaagtgtaaatatcaggttagtacagattgagcctcctaatccaaaaaccagaatgctccaaaatctgaaactttttgaatgctgacaagatgccccaagtggaaaattctacacctgacctcatgcactttatgcacaaaattgtttaaaatattgtataaaattaacttcaggctatgtgta

SEQ ID NO: 897104 - DNA, 749 bp, Homo sapiens
cagaattttgaagctacattttaaactgtgatttttattcttctctcataattgtggtgaaaataaacttgaggccccacggtgattaatatttttcaaattaaggaaatttaatgatttgctttaagaaacttttacatcctttaagaaattttaaagcatctcttcttatcctatcaatttataatataatagttaaggatttttatcatatgtgacttggaaatgcagagggaaacagtggttcctaacattttagctttaggtttctcaacctgttcaaccttttagcttttgatatctatatatctttttagataaatagacaaactcttaatcacactggggatatttctatttaaagaatccctaatatttgtatatgtgtgaattttttatacaacaaatcaatgggtttgataagatcatattttcatatttcagatgcatattacttataatctcataatgcagtaataagcataacacattgttattgacactggttatttaaccagaataaaaggaagatgattatttacacaggtttaggagatggggacattcacctcatgtataagttactcttatctcttttaatatactaatgaatgcaaaagcagactctctaagtttgctctgaacacattttatagtcctttaaatggctttttgccatctttaataaataayttgttaatgaatcattttaggaatgaatgctatatctctaccagaaaactatatat

SEQ ID NO: 897105 - DNA, 656 bp, Homo sapiens
gccacccaccttggcctcccaaagtactgggattacaggtgtgagccactgcacctggctataatataaatgtttcttaactgcatgagcaaatatgtagatagtttcccttagattaacatgataaagttacaattagagaaagcatctgaaattagataaaattaaaaccacattttttcagtggcttggaataactgccctactttatgaaatggccagattactaactagaagcaaagacaagattttggctttgctcaattattaagtccttgaccttttaaaatctaaaatcatgactaatggatttgaatggactattttttaggtgtcttcctaggatttccaaggcaatacaaaaagaattttaataggcaaaaaaaatgcactcaacacacacacattgtttttttctgatttcctgtattattgaaaagttgaagattgcaaatctagtctattaatttagagttaataacaaaagatttttcagtcaagcaaataattgtgtaaaactaatgggtaatggatgctcttagctgccaaataatagtatgactagattcagtaagtatcyagccatgcaaatgacagcccaattaaattaagaccctaataggtgcatgtggaaagcactgatgtgcaatatggtg

SEQ ID NO: 897106 - DNA, 697 bp, Homo sapiens
ataatttttaatttttgtgggtacatagtaggtgtatatatttataggatacattagatgttttgatacyggcatgcaatgtgaaataagcacatcacagaaaatggaatatccatctcctcaaaaaatttatttgactccactactttttctgttcttctaaattccttggttaagctgtggaaaaagatgttgagtaccttttcatatgtctgtttgccattttgtatgtcttcttttgagaaatgtctatttaaatctttgcctgatttttaattggtttattagattttcttcctcattagcatcattttatacttaagaaaactgaaatacagagaggttaagtaatctgtctagggtcatgcagcaggtaagtgtcagagccagcactcaatgtccttttgataccgctacctacgtaatatacctttaatatttatggtttagaattaactgtgcatcggatgggctcttttgattgttacctggagagacttgctcaggtttcctaaactacataagaaaactgcataagaaaacaggaattatattatgcagccaggtctcattgagtcccagaaaagctgcacacgcaactttcagtgaagagacaagaattgctaaaaccatacttcataaggtactgcaacaccattctgaattcagtgcaactgtggttctcatgtgatcttat

SEQ ID NO: 897107 - DNA, 625 bp, Homo sapiens
taactataaattctgtgcattgagctgctgtaatcttggcttgtagcaattagctatacaagacataagcactttgtttaggcatctgtctgcctgtccttgatttggagggtctggattgtttcccttgaaacccagtctttgcagtctcacacgcacacctcttctgagatagtccccaagcctggaagaattgagttgttataaattctggaggtaaaacatgaagaatcagcaatgttactaacaaaaaggccataagccttccctagttttgagaatgacagggaaggagtctcacaggtatctaaacatttaagctattcagtatcaagacatataataagttatattaattcagttagaggcaaaatcattaaatggatacaagcttgtctctgtgtctcatgaaagcactttactttgattttcccctttgcccaggtttaaagacaaggttttggttaacttgagtttggtgttagatgctggaaggaattkgtgctttctccagatgagctatgtgtacccaggagtcaaagtccggtaacttaatagcacatggattagttacctaataagattacctgataagttacctaatttgattacctgataaggaact

SEQ ID NO: 897108 - DNA, 607 bp, Homo sapiens
catattgactgttttaaactgaagcatttgagaaaccacatgtgcagaaataactttctgaccttcccctgaagtgggtcataagacccttatgtgaaaggtatcctccttccacctgaaggaatggagcaaccttgtcttcaaagaggaagagacaccagtagaaatctgaacacacaggcctggctgtttcccctggtttactatagctcataccttgtcctatcacatttctccacaactctccactcttgatcaaatctagcatttaaaacacttattcttcacttccttatgaaggccgcgtgtcaagtgaagctatattataaatttatatgattttctcttataaatctgttttttgttacaggggcccagctgagaacttagaagagtaaatgagaaagatattatattagtctgttttcaccctgctaataacaacatacccaagactgggtaatttataaaggaaagargtttaattaactcacagttctacatggctggggaggcctcatagtcatggcggaaggtgaatgaggagcaaagtcacgtcttgcatagtggtaggcaagaggtgtgtgcaggagaactcccctttata

SEQ ID NO: 897109 - DNA, 638 bp, Homo sapiens
agcattgtactcatccttagattttcttgtgaggctttgccaacagtgttaggttttttctcatgcacktctattgcttggtgtcaactagagttgtcaaagccttgccaaatttcctttcttggtatatatcttacaaaccaaagagatttgtgcattatgaagagagctcttatgtccacaacatttacgcctcaagcaagcacataggcttaatgtttaaaaaggactccacaagcctaactcatatacagggtctgaaacctccccctaccacttactagctctgtgcacattctttaccctagctctgcctattttctttaatggaaaatggtgaccagtatgaatagctcctccatcaggctgttgtgaggattaaatgaagtacatagcaatcactcaatagaggcggttgccattagtattgttgaacttttgcctttaggatgttcccatgacatcctcttattctggtttgcttatagataaccaaaatatgatcctctcctttaagagcatatgtgctaattgaaaaataaataattattgactcaaaaacactcaaaaacctgtagaataggtttactgcttataaacaagaaaaaaaattaagcaatcagtgttccctcttggtt

SEQ ID NO: 897110 - DNA, 627 bp, Homo sapiens
cccttacacaaagcaggcaatctatatttaataaaggaattggtgaatttttgaacaatccttgtcaagaattatactaacagttgtaaaagaatgcttacaaggtgttcatatgcaactaaatactttgattcatttttcagataaaagtgaaggaggaagaagatgagtagggctgtacagggtggagagggtggcaactctgctttagacaagtgtttttcccactttccataggcagtagatgtggcaaaaagatggctctttaagaggagacttagcctctgaccattcataggctgtatgattatggtcaagacactagcaactttctgggccttgctccgccaccccttcataaaagaagttgatgaagtgataaacaatagttcctcctcacttgtaatcatatcagaagactgacactattagggatcttaaagttcatctagccccagaatggcaattcagcattatcttacatgctgatcttggcctatcagtggcagcttctygcagtgttgagaacgattctgaggctctatttggacttagcggataaggcagccttgactgccataatgatgtctgctacaaggcgggaggaaagtggcagcaaataagtca

SEQ ID NO: 897111 - DNA, 627 bp, Homo sapiens
cccttacacaaagcaggcaatctatatttaataaaggaattggtgaatttttgaacaatccttgtcaagaattatactaacagttgtaaaagaatgcttacaaggtgttcatatgcaactaaatactttgattcatttttcagataaaagtgaaggaggaagaagatgagtagggctgtacagggtggagagggtggcaactctgctttagacaagtgtttttcccactttccataggcagtagatgtggcaaaaagatggctctttaagaggagacttagcctctgaccattcataggctgtatgattatggtcaagacactagcaactttctgggccttgctccgccaccccttcataaaagaagttgatgaagtgataaacaatagttcctcctcacttgtaatcatatcagaagactgacactattagggatcttaaagttcatctagccccagaatggcaattcagcattatcttacatgctgatcttggcctatcagtggcagcttctcgcagtgttgagaacgattctgaggctctatttggacttagcggawaaggcagccttgactgccataatgatgtctgctacaaggcgggaggaaagtggcagcaaataagtca

SEQ ID NO: 897112 - DNA, 617 bp, Homo sapiens
agtgaagccctctccactccacgtgtaggcagatctccagatatgtggagcaactgcttgcatggactagcagtctcagtctcccacccttcctgtgcagggatcctgtgtgggttatgggggaatgggaggagggggagttctacttcacacccaggcagatctcctggcatttggagcactcactcacctggaacagcagcttcactccctgcattcttcctgtgcatagaccatagtgcaactgggccatctcgactctacacccaggcagaccttcaggcatccaaagcacctgcttgcctagactggcaggctgagccactccacccttcctgtgcaattatctgggtgcataggggccctctttgtttcaagcccaggcagatctctaggcatcaggagcacccaatcttctggattaggactttagcccaccccatccccatgcagagaacttggggccaaggagatttctcagcttcctgcctaaacacacttctgggcacttggtggctgcccactggattccccattggcmctggtacttgtccctgccatcaagggacttgtaaatggacctgccaggtccagccttacacatcttgccccccacc

SEQ ID NO: 897113 - DNA, 583 bp, Homo sapiens
taacacaaaggataaatgcttgaggggatgtatacctgatttccatgatgtgattatcatgcacagcatgcgtatattaaaatatctcatgtacctcacaagtatgtacatctrctactacatatccacaaaaatgaaaattagaaattattatttttaattctgcttgaaaattttgtcctgtgagaaaacattttaaatggttcattttcaaggcatgatcaaagtactggcagccagcctgtggatgtaacaaaccacatggctcatgcacctagaaggtcacaataaactgacagaatgtagaggaggagtcagcccataaaagggaagaaagtttcgttattgggaaatcaaaatttaagcgggaaaggggaccggggtatgggcttataaggggataatgaaactaaggttatgtctgggaagattgtaaccccatagtactcaactgatgaggaactggaagagggatttgcgtgctgggagataaattacctgctataactgccctgggtgtgcctgcctacctgacaccctatctggaaagactgccattaaaagtctcacttccgctattctt

SEQ ID NO: 897114 - DNA, 520 bp, Homo sapiens
cttctctcctgataccttgtgaagaaggatgtatttgtccaccatgattgtaagtttcctgaggcctccccmagccatgtggaattgtaggtcaattgaacctctttcctttataaattacccagccttgggtatttcttcacagtagcatgagaatggactagtacagtaaattggtaccacagagagtgggatgctgctgtaaagatacctcaaaatgtgaaagcaactttggaactgggtaacaggaagaggttggaacagtttggagggctcagaagaagacaggaaaatatgggaaagtttggaacttcctagcaacttggagggctcagaagacaggaaaatatgggaaagtttggaacttcttagacacttagtgaatggctttgaccaaaatgctgatagtgatatggacaatgaagtccaggctgaggtggcctcaggtggagatgaggaacttgggaactgaaataaaggtgattcttgctatgcaaagagactggcagcattttgccct

SEQ ID NO: 897115 - DNA, 692 bp, Homo sapiens
taacaacctaacatcacaactaaaagaactagagaaccaagagcaaacaaaccctaaaagtagcagatgacaagaaataaccaagatcagagctgaactgaaggagatagaaacaagcaaaattgttcagaaaatccgtaaatccaggagctggttttctgaaaaaaataataaaatagaccgctagctagactaataaagaagaaatgagagaagaatcaaatacaatcagaaatgataaggggatgtcaccactgacacaacagaaatacaaacaaccatcagagaatactgtaaatacccctatgcacataaacaagaaaatctagaagaaatggataaattcctggacacatacaccctcccagtactgaaccaggaagaaattgaatctctgaagagaccaataacgagttctaaaattgagacagtaataaataacctaccaagcaaaaaaagcacagcgccagatgaattcacagctgaattctacaagaggtacgaagagctggtacaatttctactgaaggtgtttcaaaaaattgaaaaggagggactcctccttaactcattttatgaggccagcaacatcttgataccaaaagctgccagagatgcaacaacaacaacaamaaagaaaacttcaggccaatatctttgataacatcaatgcaacaattctctgttaaata

SEQ ID NO: 897116 - DNA, 616 bp, Homo sapiens
acaggagggctgtatcaatcctacactgtcagcaaaggtctgggttgcccggcaaggtaaagaaagcctgcacaggtggggcctcagaccatctgmcttcacgtttccaaaaaaggtccaactgctggatggtatcaaaatgaacagtgcctccctgaagccaagctagtccttcttgtaaatcataatttggccaaacctttgtgtagaggcctataaggtgtttttccttcagagtccaagaatcaaagcagtcccagggtttaggatacactctagaggagtataagctggggttggtgaagatagctggttgcccattctgaaagacagggaaatagaggtgtccctcatttcccttctttctttcagtgataacctagggtgtgatggagagaaagtgggcatcccccctttctcttccatctttttgtccccaagtcccagtaaccttggcaggtgccacccatgggtgcaaaagtggctttcatccacattaacgggaggtctgggggtggaagtgtccacccttatgcttgtatgccctatctccctggctgtcgacaacatttgagttccctgggccttgtctatgtcaaggagcatggcctgcttt

SEQ ID NO: 897117 - DNA, 630 bp, Homo sapiens
cctacagctctagaaatcaacaaaaccaagacaagcaaggatattgactggttattagaaacttattataatctccaaaagggcattttttggtgatataatgggaacagaaaacaaattgtaaaaaactgaagaattagagaaaaatagaaaactaatgacaatgaagctgtgcagactattcttacaaagaattggcttaagggtagagaaaaagaaatggacaaatatgcaaagtgttgacatgaacaagaaaagatatctctgcagataggaaagatctaaggatgtttatactgaggactaagatctggtttttcatctcacccaaactcctacctaaggggtctagggagtcatagcctacaaactataaattctcattcttttcaccaaaatctttatacaacacttgtgagtctagccatttcagctggaactgtgttgtgtaaatgtatgtgtgtgtgtgcatgtgcatgtgcgtgtgtgtcttagatggattttatttgaccctatatatcgtgacttacttttcagtcygactctggcataacattatgaaacgaggaaaaaaatacttaatcccaaaatgtatttatttgccataccttgaaattgccctgcaaaatc

SEQ ID NO: 897118 - DNA, 633 bp, Homo sapiens
tgatggttggcacagggacacaataggtacaaaatccgtggtttttattattcttgatgataatgttacttactgataacactstccaccatgtctttaaacaatactgaaaatatgttcccatgtgtttactcaataccaaacttagctttatctttaccattttgattaagaactttctaaaatttcttctttcatgttgtaatcatataatttggatgtattagatacacagcataacattatgttgctgtctgaagcattaaaataatatctgtaaacttttagatatcagtaccattgtctctaggctaaataatgagattaaggataataatagcacaaatgtatttggtgttttttatttgtcttgctctataccatatattttacatatgttgtgttatttaatcctcagaacagccatatgaggcacatgtcatttcaaggtatacatttctgtgttactttaaaatatgaagaaaatgtgattcattaagagataataacttacccattatcacaaggctgttgcgtagaactttcgggattcaaatcttggtctatcatattcagagctggtgttccaaactgattattctgcttcatgctacaactgtatggctaaaaaaa

SEQ ID NO: 897119 - DNA, 606 bp, Homo sapiens
aatcgaatttggtctgttcatctatgcaggagaaaagtaaggataaatactgatattaaaaagtctgcaaaaatcattttcttttaaaaattatttgttctttctctcagggagaaatgctgtagatttctttccaatgtgcctaaacatttttccccttagcttcaaatactgcattcctaagtacatccacaagttcaggtagagcaaatcttagatgtgtataaaaagttgaatgattttaattttcaaataataccttcttttatggcacaatggctgtgacaagattagccagaatcacagcactcattttatgaagaaaaatatgaagtcagtgacagtcattttatttatgcgtctgtctgcacattcacgtctaaatccttctggcatttgaatatacagcttccaaattcaggatcttgtcgggaggcatgagtcattcagaatccagcagaaatgacaagcgctggaaaatctttttgtgggtccttaatttcagtcttttatagagttagcctttttataagctgatgtcactgtggaaccaarcaaacaccagtaaacaggcaaacagcttcttggctctctaacatgcaaagg

SEQ ID NO: 897120 - DNA, 618 bp, Homo sapiens
aaaacaggccaggcgctgtggctcatacctgtaatcccagcactttgggaggccaaggcrggcagatcatgaggtcaggagattgagaccatcctggccaacatagtgaaacctcgtctctactaaaaatacaaaaattagccggacatggtggcatgcctgtaatcctagctattcaggaggctgaggcacgagaatcgcttgaaccaaggaggcagaggttgtagtcagccgagatcgtgccactgcactccagccataaaaaaaaaaaagggaacacattttcccaaagtaattaaaaggaatttccttccagggataggtgcaagaattaagcttaaactggacaagacacttttctctcaagcaattaataagtaaacagaagtggttgaagaatgagaacaagcttgatgtttaaaccttagccaaaaaataaagaaaaaaatataaattattagtatctaataatcacttggatactaatcatttgattattggacactagtaaaagttaattaaaagtaaattaactaataaatgttaatcaaaatatttctcctctcaacctgaataaatgttcaagaaaatatttaacttacttccaatatgttttac

SEQ ID NO: 897121 - DNA, 520 bp, Homo sapiens
tgtttgtagagcccacctgactaaggatatggttgcttctgaaaggccaacactgagaaagcctgcacragggacctaggttcctttcacataaggccagggttaagagagtctggtgttagcccatatacttttcacagtgctggctgggtgcatctaccattgccttcatgagactggtaatgagctttcctgttaccttgtattgcatttcacttgccccatgggagctcatgttcacgttctctgagctgtgttccatacaaaagtcacttaagaaataacaaagttgtcctggaagacagtgattgctcctaatacagttgagaattctatgctttgtagccttagaccctttacaagcaaatagtagaaataaacgtcatggctaatgcacttcggtaatataaaaggtttctacaaggaaaatactgctaacagtaaactgtttatatatagaaaagataaatcataatggagtggtaatttcagtttattttgtatctcattgtgtctctcc

SEQ ID NO: 897122 - DNA, 596 bp, Homo sapiens
tctatgcaattgtcttctctgcatgatcacctactaagtctgctccatgactcctccttcacatctactgatmgtcagattttcttctgtttgtatcaagatttcatgtgatttatcacatttttttactttaaaacattataattgagtaatatttgttttagcttatgtagctatttcctatcactttacaaaggtctttgttaggttgtaaatttttttaactacacaagccattagatgtgtacatactcttacatctttcttgttctttccataaaacgtgtcctatctgatgcacaaggatgatattaaggtgaaagctttttatcatctaattttcattttactttcacagtcagactggattttcaatatatttttgttataaaaaactattacatatctcttgtctactttaggcatcattccacctattcctgtataacaggaaatgcgaataggcctctcactagcttagatgatgttctataagagagaagacaagatcagttatttttatatttctaaacacatttgagactggttaaaagaatataaagctatcttttggcttaatattctttattgataga

SEQ ID NO: 897123 - DNA, 680 bp, Homo sapiens
ataaaagttatgtttacactatgctgtagtctattcaatgtgcaatagcatcatatctgaaaacaatgtaaatatcttttgaatactttattgcttaaaattgctaataattatatcagcattcagtaagtcataatctttttgctggttgcggctcttgccttgatattgatagctgctcattcatcagggtggtgggtgttaaaggttgtggtggctgtgtaaatttcttaaaataaaacaatgatgatctttgtcacatcagctgactcctcctttcacaaaagatttctctgtaacctgcaatgctgtttgatagcatttcatccacagcagaacacctttaaaaatggaatcaaccctttcaaaacctgccaccgccttattaactaaattgaggtaatattccaaatcctctgctgtcatttcatcaatgttcacagcatcttcaccaggaatagattacatctcaaaaaaaagaaaaaaaacactttctttgctcatccataaaaaaacactcctcatccattcaagttttgtcatgtgattgcagcaattcagtcatctcttcaggctccrcttgtagttctaattctcttgctgtgtccaccacatctgcagttacttcctctactgaaatcttgaactgctcaaagtcatccatgatggttagaatcaac

SEQ ID NO: 897124 - DNA, 680 bp, Homo sapiens
ataaaagttatgtttacactatgctgtagtctattcaatgtgcaatagcatcatatctgaaaacaatgtaaatatcttttgaatactttattgcttaaaattgctaataattatatcagcattcagtaagtcataatctttttgctggttgcggctcttgccttgatattgatagctgctcattcatcagggtggtgggtgttaaaggttgtggtggctgtgtaaatttcttaaaataaaacaatgatgatctttgtcacatcagctgactcctcctttcacaaaagatttctctgtaacctgcaatgctgtttgatagcatttcatccacagcagaacacctttaaaaatggaatcaaccctttcaaaacctgccaccgccttattaactaaattgaggtaatattccaaatcctctgctgtcatttcatcaatgttcacagcatcttcaccaggaatagattacatctcaaaaaaaagaaaaaaaacactttctttgctcatccataaaaaaacactcctcatccattcaagttttgtcatgtgattgcagcaattcagtcatctcttcaggctccgcttgtagttctaattctcttgctrtgtccaccacatctgcagttacttcctctactgaaatcttgaactgctcaaagtcatccatgatggttagaatcaac

SEQ ID NO: 897125 - DNA, 601 bp, Homo sapiens
cagtaccccatacagctgtacatacaacagagtattattcagctgtaaaaaactaaagaaatcttacaatgggcaataacatggatgactctggaagacattacgctaggtgaaataagccagtcacagaaggacaaatacggcatgattccacttatatgagatatttaaaataatcaaattcatagaaacagaaagaagaatggtggctgtcaggggctggggggaggggagaataccagttattgtttaatggatacagagtttcagtgaagtgttctgatcataatatacaggtgtgtgtgtgtgtgtgtgtgtgtgtgtgtgtgtgtgtgtgtgaataaagttaagaggaactagaacagtgtactgccaggctcataatcaggagtgttgcacaaccatgctggaataatgcctggaggactggtatcaggagcaacccaaggcttgcaaacagcagtggtgaaaactaaagggctttgtggacacatagccagagccagatgcacaaayagaagataagcttctgggtgtggaaactcttcacaaagcatcgggggtcaagaggattgctccaatcccagttgttttccatctt

SEQ ID NO: 897126 - DNA, 617 bp, Homo sapiens
ataggagcaaagaaaactatatttatattttgaatttatattttgaacagtatcattggagcatgacttaaaatggaaaaaaaaagactaaagtggtaattcttattgatgcgtgttgtaacatcaaacacgttttctagtatccctcgtattttttttttgggaggggcgcggcttattgagatattcacaaaccgtacaattaactcatttgaagtatacagttcagtggttttagtatatttagagtgcgcagccatgaccacagtcaattttagaacattttcaacaccccaaacctttcagcaggcacactccactcacgtttttccccatcctctggaaaccactgagctttgtgcctgtatggattttgcccactcttgacatttcctgtaagtggaatcacacagccccactttgtgcctgtatggatttgcccactctggacatttcctgtaagtggaatcacacagccccactttgtgcctgtatggatttgcccactctggacatttcctgtaagtggaatcacacagccccactttgtrcctgtatggatttgcccactctggacatttcctgtaagtggaatcacacagccctactgtggccct

SEQ ID NO: 897127 - DNA, 598 bp, Homo sapiens
gatggaaattcatataaagggggtgttatcaggtaattcatacaaacgggttatgtatgaataagttatcatataaagggggtagttattagtatgggtaactggggcttatctacactggcatactctggatccaatacagaatgcacacctcggagtcatccaccagggagactgggagctgggtcttcattcctcatctttcaattgtcacaggttggcagctactcctggggggtgttaatttcccaaccctcctggcctccccttctagcctctgtccatgggcagagtggactccaatgatcaaagagagccttcaagcaaagagacacaggcgctggcagttgcaaattaggccaacttccagggaaactgtgagagctgataggagatggctggccaccagaagtacatgcaaatcagtgcaccaaggcagagatggggatgcagcccagccctccagccctctggccatgttggataaatcaygcttctgcctttagcatcaagagaacacctggcatgatttcagacaagatcgggcacgttcagggttgtatggccatagacacctggcatgatttcaaaagtgtga

SEQ ID NO: 897128 - DNA, 569 bp, Homo sapiens
agcttaaaacgacatatatttattatctcaagttttcacagatcaggagtctagacaggcttagctgcctcttctgctcagagtcctatgaggctgtcaatgaggcatcagttgggctgtgttctcatctagaggtttgagtagagaaaaatcagcctccaggttcattcggattgctggcagaattcattttcttgtggctgtagatctcatggtggcttgcttcttcgaggccaacaggataatgaaaatgagtgttctcagagtcatatatgtagtaagatagtgagggccatgatatcccatcacctttgccatacaatataattcaatcaagccagtgacatcctatccatcacctttgctgtattctgttggcaagaggaagtcacaggtcctaccacatggaatgagaggggatcgccaagacataacactagaaagcggaggtcactggggttgtcttggaatcctacctgccataaaatatgccatctgaaacataggaccgatagtggtgccygggtcaaagggttgtcttacatttaaagagcttaaaacagagcctg

SEQ ID NO: 897129 - DNA, 650 bp, Homo sapiens
aggctggcactttgatttcttccaattccgtttggtttcccacttcctacgagaaggaaggaagctgagagcaactcctggggcagctggtctggctgcagggttactcccctggcttgtgaatattagaacaaaactatgagttgatgaggtacatggtatctgaggctaataaatatgggttgaaatcctggctctacaatttactagccacatggccctcagaaagttctttagcctctcactttttcaactatagaatagaaataatagccctctcctccagaaggttacagtaaggataaaataagcatgttaataacagctaatatttattcagtattcattatgtatcaaacacttcactaagcattgaacatgtgtggattacttatataattctcatacagaaataggcaaaattgttatctcaatgtcacagatggggaaacggaggcaccgagagtttctctaactgccccattgtctcatagcaagctttgcaccaggctttctggctccagactaaaactgcttagtgaccactctgcgagcagagagtgcctggcacatagaargtgctcaataaattttagggtttttttgtttgtttgtttgttatttttgtcattgagttacctcgtaattgc

SEQ ID NO: 897130 - DNA, 562 bp, Homo sapiens
aaggatggtgccttccactttctgggcattttagacattgcaggccatttagtgtacatgattttacccaagctctgtaccagccctgtgagggaagggagccaatgttctccagttagatgtggaagccgagttcccaagaagtcctgcgatctgtccaatttgaggatatttttccccaatagtaccaaggcaaggattcaaatttaggttttgtggttccagggataaagttgttcattatgcacatacaaaaatgatattgatataaaaattagccaggcatggtggtgtgtgcctgtggtcccagctacccaggaggctgaggcaagagaatcgcttgaacccgggaagcaaagcctacaatgagccaagatcgccccactgcactccagcctgggtgatagagcgagactccatctcaaaaaataaaataaaataaaataataataaaaataaattatattggaaatccctgcagaaatctccctgtcacctcaattcagtaagagaaacytagcagaatgtgggagtggcatgcacagagaaagggaatgaaatt

SEQ ID NO: 897131 - DNA, 650 bp, Homo sapiens
ggaagtgtcggcctgaccaatgttaatttccctttcctgacaytaataacagcagcagcagctaccatctgtgcaccttaccacgtgccaagcaccgtcctgagtgccttctatggcatgcctctttcagtcctctccacaatgccatgctctgtgcactattattatccctgttttacagatgagaaaactgaggataagaggttaaataactggcctaatctcacgccgctagtaagtgatggattcagaagtcgcatccaggtttttctgacctgacagcttacgctcataacgactccccccagggcctggcactgtgcctggtgctcaccaagggcgtgacgaaaagccagtatgtccacatggcaggaggacatggaactcttcaatggaagagtggtggatcacactgagctccgggaggacactcacacgtgcctgcgaccatgctgcaagaaaagcagggaggcctgcacacaacactgggaaatgtagcacgacccttgctgaggatcagaaatgaatagggatgtggggtgggtagcagtccactgagcatcttctttcctgagtgtcaatttactatacagtcaaaatttacaaggttcaaaacatacaagggaatcatctccagagaaagtcctaga

SEQ ID NO: 897132 - DNA, 650 bp, Homo sapiens
ggaagtgtcggcctgaccaatgttaatttccctttcctgacattaataacagcagcagcagctaccatctgtgcaccttaccacgtgccaagcaccgtcctgagtgccttctatggcatgcctctttcagtyctctccacaatgccatgctctgtgcactattattatccctgttttacagatgagaaaactgaggataagaggttaaataactggcctaatctcacgccgctagtaagtgatggattcagaagtcgcatccaggtttttctgacctgacagcttacgctcataacgactccccccagggcctggcactgtgcctggtgctcaccaagggcgtgacgaaaagccagtatgtccacatggcaggaggacatggaactcttcaatggaagagtggtggatcacactgagctccgggaggacactcacacgtgcctgcgaccatgctgcaagaaaagcagggaggcctgcacacaacactgggaaatgtagcacgacccttgctgaggatcagaaatgaatagggatgtggggtgggtagcagtccactgagcatcttctttcctgagtgtcaatttactatacagtcaaaatttacaaggttcaaaacatacaagggaatcatctccagagaaagtcctaga

SEQ ID NO: 897133 - DNA, 626 bp, Homo sapiens
cttgttcattcccatgcagttgaagctaaaactctttgtgatgaatgttgagcctctgtcctatagaggacctcccctgcttaacygcgagttcctcaatgtaactgtgtctcctaggtcgtataagaaggcattgattatttattttacaattaggaatttaggcaaagcccttagattcagagatgcattgacttttgaattgtgactttaaaaataataataattgatctttttcacaaatgtgtatatcctagatgatgccaaagatcccaaatcactaagggcatccagttcattggcggtgcaaggaggaaaaattaagcggaagtttgtggatctggggtaagcacttcacgatgtaaaaagaaagccctctgtaaaaggaggattgaaagagaaaatttcagcttcccctttctgactgcttactatcattacagggcgcctttgcgaaggaattccagcaagggaaagaagtggaaagaaaaagaaaaagaagccagtaggttttctgcaggtagcaggtacggttgtgtgattaagaacacgtgtatttctatacctaaactttctggccccctcttctattgttaaccaaaatcagtggtcagtatctttgagct

SEQ ID NO: 897134 - DNA, 626 bp, Homo sapiens
cttgttcattcccatgcagttgaagctaaaactctttgtgatgaatgttgagcctctgtcctatagaggacctcccctgcttaactgmgagttcctcaatgtaactgtgtctcctaggtcgtataagaaggcattgattatttattttacaattaggaatttaggcaaagcccttagattcagagatgcattgacttttgaattgtgactttaaaaataataataattgatctttttcacaaatgtgtatatcctagatgatgccaaagatcccaaatcactaagggcatccagttcattggcggtgcaaggaggaaaaattaagcggaagtttgtggatctggggtaagcacttcacgatgtaaaaagaaagccctctgtaaaaggaggattgaaagagaaaatttcagcttcccctttctgactgcttactatcattacagggcgcctttgcgaaggaattccagcaagggaaagaagtggaaagaaaaagaaaaagaagccagtaggttttctgcaggtagcaggtacggttgtgtgattaagaacacgtgtatttctatacctaaactttctggccccctcttctattgttaaccaaaatcagtggtcagtatctttgagct

SEQ ID NO: 897135 - DNA, 679 bp, Homo sapiens
gagcagaaattatctgaaagacttcctaaagaaggtatactgtaagccragccttagaggatagagagaatataagttggtataaacagtggcactgtttctagcatttattcctatcttctttatggtactatgaactttgaaggaagtataatacaatgctcagttcagtactgatacatatatatactcaaggcattttgttcaatgaataaaatttttgataaagggtacctaaatataccaaatataatcttgtttcaggccttaagtgaaattgatttttacacttctggataatctatgtacagccaattatatttcaatgttcttatctttaaagtctatctcgaactcttaaacccctcagcacaaagtgttcaggcccttatcttatatggctctcagcatgagtgccacgtgcttctgtaacactgtgaagataacacggacaattatggtcaattagctttaacaagtagattattgcctgaacagttgaaagaagacacatcaaatttagtcttgttaaattgagaatttttaagaatgggagaaaaaaattaaatcctatgaaaaagaaaaataatacattttgtagaatatgagatatacttcattcattaaaatctgaagtgggccccatatctaatatatagaagattataattggtatttc

SEQ ID NO: 897136 - DNA, 577 bp, Homo sapiens
aaaaatgtgccttcttgtctctaattataaaactgacagagactctgcatttaaccaaatactttggtaaatggattttaacaatgatatctctcatgacttaaaacagccactagttttaatttagaagtatattaaatttttatattaaaatctaggattagtctattattacatagaaaatttgtggtctgcatgtacatcatcatccattgaatggtccacagtttctgagtttcagaaatgttaatataagaatacttcttctgattgaataatttaagttttctcagtaactaaaaaagattggaattactgatcactcacttataatgtggttttaaatgttatttaatgaagatatataaagtttcttttaaaatcattttaacaacatatttctcttgcttttcacttttattagaaaataagtatgaaaatttatgttaccacaagmctataaattttatttaaatctagacataatgctaatcttaaaagatctgtatgtttaagattatggataaccaatttacacttaaaagataaataactgctttccagtaaatcaaatggg

SEQ ID NO: 897137 - DNA, 621 bp, Homo sapiens
aaactactgacagattgatagcattctcatagctgaatattacttcaatttcttggtcatcagccaaagggtaatactaaatttaattatgaatatatmattgaagaaaatcgtatgctgacaaattcaagactcttcaaaactagaagcagctcacctgaattggatagttttagatttattactgagctaatcttaggaaactcgtttttgaacattaaatcaacttgcataattcagcaataaataaaatcaatcagacaaaactgaactttgtgtcttcttaatattggattatttctgtaaaataattatttctttgtatgagtcagaatagaactaaaacaggtgagtcagtaacatttgtaatattatgttctatgatatatcggcattgtgaaaagatagatggaaggagatgacttgctgagaaaatgacttcgggtggcagacaatgtgctacgcattgagatacagaagtgaatgatgtcatttgctgctttcatttttattagttccaatcagaggagagtgaaaatcaaaaagggtaatatagtgttgtaagtattaagatggacattagcataaggcagtgtggcaccacaggtcattctagaatcc

SEQ ID NO: 897138 - DNA, 608 bp, Homo sapiens
aaaaacagctgactttgaaatagaaataatagaaatagkgtttatgggccataatgataagaaatggattggatttacttatgacatctttgccaaatcatgtcgtaaaccagtgatataattttatttggttattagaaaattgtgtttctttaaaatatcaaaaataattgactgtgtttcatggattatgctattaaataaaaaagatttaagacactttgcttatcctaagtcagacagaagagggaaaaaaaatcttggcatttgaaacaaagacaggaaataatttagcaatatgatgaattaattctcctaaggaagagggtaatttgataagttgtcctgtcacagcggcatgctgagcatatgacttcctgatgactggggagtttttaattaattaaaactagtgagagagtgaggcagtggacattttgtttataagggacattagatcgaagcatccaggggcctgtggccaatcttcagcgattttgctgagtaaggatggctgagtctctgtgatgagacacattaattatgggcaaggtccaacagcaaggaaaaaccacttcaggggctacctaacaaatgcaagtgggcta

SEQ ID NO: 897139 - DNA, 608 bp, Homo sapiens
aaaaacagctgactttgaaatagaaataatagaaatagtgtttatgggccataatgataagaaatggattggatttayttatgacatctttgccaaatcatgtcgtaaaccagtgatataattttatttggttattagaaaattgtgtttctttaaaatatcaaaaataattgactgtgtttcatggattatgctattaaataaaaaagatttaagacactttgcttatcctaagtcagacagaagagggaaaaaaaatcttggcatttgaaacaaagacaggaaataatttagcaatatgatgaattaattctcctaaggaagagggtaatttgataagttgtcctgtcacagcggcatgctgagcatatgacttcctgatgactggggagtttttaattaattaaaactagtgagagagtgaggcagtggacattttgtttataagggacattagatcgaagcatccaggggcctgtggccaatcttcagcgattttgctgagtaaggatggctgagtctctgtgatgagacacattaattatgggcaaggtccaacagcaaggaaaaaccacttcaggggctacctaacaaatgcaagtgggcta

SEQ ID NO: 897140 - DNA, 595 bp, Homo sapiens
catttttattaaagcttaggtggtcctgtctttagccaggacaaattgtcattcaaatagaatcttgagtcttttcawtatgactctagtattctgatggcttccttactatctagtataacaaaaatatttcaagactgtattggttttgtattgtgacgtaacaaatatcacaaatgtcaagacttaaaagaacgtgcactaattctctcacagttctgtagtgcagaccttcagcattgcatgcctgggttctcttagggtcttataaggctgaaatgaaagtattagatgaattgcattcttatctggaggttctagataagaatttactttcaaggttactcaggttgttgacagattcaggctatcaggctgacgtcttcatttcctcgctggcttttgactggtggtcactttcagatcctagagaccttgttctagttctttgtatacgcatcccctccatcttcaagaaggcactgtatgccaaatctccctcgtgctttgaacctctaacctcttttacaacccacagaggaaaattctctgctcttaaagtgctcctgtgattcagccagctaaccaggatata

SEQ ID NO: 897141 - DNA, 625 bp, Homo sapiens
ctttcccccagcagaatatgatagagatgtttcctcagttgggtctttgcctttggttgggatttgtctgtcttgtggtcaggtggttaggcaggatgtttctcactgcctgaacccctgtgaaatgtttcartttgaccaaggtctgcaaaatagcaggaagcttataaaatggtggtttggactaacaggtacagtaaaaatatggcataaaaaataaaaaatgggacacttgcataaagtatttatgaatactgtctgcaggactagctgttgctatgggtgagtgagtgagtgactggtgagtaaacgtaaaggcctagaacattactgtatactactctagactttataaacattgtacacttaggctatagtaaatttataaaacattcttcttcaataataaattaacctgcactcatgtagcttttttcttttataaacttctaaatttttaaactttcttattcttttacaacatgtagattaaaataaaaatacattttatagctctacaaaaatattttttgtttatatacttattctataaggtttttctatttttaagtgtatttactttcttttactttttaattgcttttgttaaagaagaataagacac

SEQ ID NO: 897142 - DNA, 602 bp, Homo sapiens
aaaaaagctcatcaacaaggagtatagttatcaggctatctaaagccaacatgaatgaaagaattctaagagyagtgagacaaaagcatcaggtaagctataaagcaaaacctatcagagtaacagcagactactcaaaagaaaccttacaagccagaagggattagagtcctatctttaaccttcataaacataatagctgtcagccaagcgttctgtatccagcaaaactaagtttcgtaaatgtaggagaaataaagtcattttcagataagcaaatgctgagagaatttggtactactagaccaaccttacaagatacgctaaacagtgttctgaatcttgaaacaggtactcaatatgcagcaaaatagcatgaaactcacagggcctataaaacaataacataacaaaaaatcaaagtgtctagataacaactaacatgatgaatggaatagtaccttacatcttaatattaatgtttaatgtaaatgtagatagattggaagatacagattggtagaatggattaaaaaaatcacaaaccaaatatctgctgtctttaagggatgtacctaacatgtaaggatttaggtaaattc

SEQ ID NO: 897143 - DNA, 629 bp, Homo sapiens
tatattatacatatataaacatatrtatatatatacatacatagatgtatcttgatagtgagaaaaacatgggtatctacataagcttttgaatttagtgctctttcaccagccaccaatttatattctctagatagcttctgtaggtactttcttagcttggtgtagattttgtttcaattaacaaataattcttaatggtctgttttacaccaacactattctcaggggacaaagacttaagcaaaggagtgtactcaagtgaatcaaaaacctatatctacaaacaaacttgcacacagatatttataaaagctttattcataattgccaaaacttgcaaccaagatgtccttctgtatgtgattatattagtaaactgtggcacatccagacaatggagtattatccagcactaaaatgaactattaagccatgaaaaaacatggaggaaacttaaatgtatatttctaagtgacagaagccagtctgagaaggctacatactgtacaattccccaactctatgacactctggaaaagacaaaactgtagagataataaatcaaggattgccaggggttagggggaaggggaataaataggtggaataccgagaatttttaaggt

SEQ ID NO: 897144 - DNA, 629 bp, Homo sapiens
tatattatacatatataaacatatatatatatatacatacatagatgtatcttgatagtgagaaaaacatgggtatctacataagcttttgaatttagtgctctttcaccagccaccaatttatattctctagatagcttctgtaggtactttcttagcttggtgtagattttgtttcaattaacaaataattcttaatggtctgttttacaccaacactattctcaggggacaaagacttaagcaaaggagtgtactcaagtgaatcaaaaacctatatctacaaacaaacttgcacacagatatttataaaagctttattcataattgccaaaacttgcaaccaagatgtccttctgtatgtgattatattagtaaactgtggcacatccagacaatggagtattatccagcactaaaatgaactattaagccatgaaaaaacatggaggaaacttaaatgtatatttctaagtgacagaagccagtctgagaaggctacatactgtacrattccccaactctatgacactctggaaaagacaaaactgtagagataataaatcaaggattgccaggggttagggggaaggggaataaataggtggaataccgagaatttttaaggt

SEQ ID NO: 897145 - DNA, 631 bp, Homo sapiens
gagatggggcaagtgatgggtgtaagcttgttagggcagccacaacaaaataatgcacatggcattaacagcaaaattgacgggtttttttacatttttggaggctaraagtccaagatcaaagtgttggcaggtgtgatttcttctgaggtctctcctgacttgcagatggctgccgtcttgctatgtcatcatgtggctgcattttaacttaatcactttttaaagaccttttctctaaatacagttacacagtgaagtactggaggttgggactttgacgtatgcattttgggagaacacaattcaattcattacagggagattagggtattccaaacataaggggcaaatgagtaaaacagaaggaaaggagagcaaatcaatggagaatagatatttcccccgttcacatataaacaaatatatcttctagaaagctgtacattctaatacatattttttgatattgataataaccatgaatctgaatgatgtggaagggttatcaatatcaataaaatttgaagttatttttaaattattaaaataaatatattttagaatggtctgatatttatattcatatgattaacttagaataaagctttaaaatgcttaaatatattta

SEQ ID NO: 897146 - DNA, 564 bp, Homo sapiens
aactgttgcctgagcatccaggcatttccatacatcttctgaaatctaggcggaggttcccaaacctcaattcttgacttctgagcacccacaggctcagcaccacatggaagctgccaacgcttggggcttccaccctctgaagccacagcccgagatctactttggcccctttcagccatggctggagaggctgagacacaaggcaccaagtccctaggctgcacacagcatggggaccctgggcccagtccacaaaactactttttcctcccaggcctttgggtctgtgatgggaggaactactgtgaaggtctctgacatggcctgaagacgttttcccgaggatcttgcagattaacactaggcttgtgctagttttgcaaatttctgcagccagcttgaatttcttctcagaaaatgggcttttcttttctatttgatcatcaggctacacattttctgcatttttatgctcagtttcccttttaaaatggaatgcttttaatarcatccaagtcaccttttgaacgctttgctgcttagaaatttcttctgccagat

SEQ ID NO: 897147 - DNA, 566 bp, Homo sapiens
acaagctaacaataaggtttaacactcttatcagttaagatcaggtttgaaaaatatacaggtggaataatttatatggaggccatagataaacagagagcgtactgttttggtgaagycagttgcagtaggggggacattattcttttatattgatgttttcctctggtcacagtgtctgtccacatgtatgctatgcagccagtgtcttcctcccctcttcattcacctatgctcacttattcaggaaaaccatctgtgaactcactgccttgctcacaaccccacattacctttagcacaatttatcatttctcaatttatttgagttttctgaaaactattaagtctcttttcctagaatttaatctccatgagagcaggacaatacccatttcagcaattcatttgaatccctagtacctaccatatttgaggatattgcaggttttccaaaatatttgttaaggaaaagataggagagaggaaagaaagatgaaaggagtggagggaggaaaaaagatggcagagttgaacccataacgtacatggaggtgtattaccaa

SEQ ID NO: 897148 - DNA, 568 bp, Homo sapiens
tttcaaatggattagaactttcaataggtaaaaattactaaattgtttgcaaaattatttttttcaasattatgctgatatttatctataaggaaatgtgccaaagattagagatcagaatgcagttggtgaaaatgtttctcatcaaaattatttaaagatcttctggcataaatatggtctgatattcttactggtggggcagagatcagactacacttgtgaaagcaatccttcctgagtgatgaagagctgatagaattggtcagagtttcgttactctgctgggaaagtttgttttgacagtgttgatggacaccatggattgtaggtttcctaaaggataaaatgagcctgggcttgatttttagcaagcagattgaaaaaacccactgtgctgcagtctccactttcaaatttgattagctgtgggataattactatttcaaattcttacagtattaacagttatcagtttctattttgagagggtttttctgtcaaaataatacttcaaacaccgggaaatttagatagaatgactgtatctacttggctattaaataca

SEQ ID NO: 897149 - DNA, 568 bp, Homo sapiens
tttcaaatggattagaactttcaataggtaaaaattactaaattgtttgcaaaattatttttttcaacattatgctgatatttatctataaggaaatgtgccaaagattagagatcagaatgcagttggtgaaaatgtttctcatcaaaattatttaaagatcttctggcataaatatggtctgatattcttactggtggggcagagatcagactacacttgtgaaagcaatccttcctgagtgatgaagagctgatagaattggtcagagtttcgttactctgctgggaaagtttgttttgacagtgttgatggacaccatggattgtaggtttcctaaaggataaaatgagcctgggcttgatttttagcaagcagattgaaaaaacccactgtgctgcagtctccactttcaaatttgattagctgtgggataattactatttcaamttcttacagtattaacagttatcagtttctattttgagagggtttttctgtcaaaataatacttcaaacaccgggaaatttagatagaatgactgtatctacttggctattaaataca

SEQ ID NO: 897150 - DNA, 626 bp, Homo sapiens
attatttaatgtagttacaggtaaatattactggctgctaggagacagggcctagtataatcccttttctrtatttttttatgcatggaaatactgggataacttgttcaaatgtataactagacggaaatggaagaagtattttgtttctattttctgagcaatatcattcaattgtgggccacatagagtactaaagtcacattccaaaaatcacatggcaatctactatcaaatatgttgttaatctatcacatgacagcttgttgtgctaaacccctatcaactccaaaggggatggcaccagattcaagaggcagaccaagatacccagagccagcaaatgagccatggagatatattgagggcttacatacagggaaggaagaaagcccagtggcagtgggctggataggagacttgctggcccagtggtggcaagacaggcagaactgcaactgcttgtaaaaggcatgcagttcatatgacattttcacttaacaccctccctgtaacaacctttacctggcaaccttcatttaacccaaaacaaaggggctgatctcctctgtggcccaagttctttgggaagggccaggggctcagatgttcctcattgataagga

SEQ ID NO: 897151 - DNA, 656 bp, Homo sapiens
gaatgcgtatgtatgtaaatatcctttataggtgttatttccgaccttcatcaccaatgttgtgttcataggccatgtaaacaaaacagtatctgcttgttcttctttcttagctatgtttctattggagagggatgaataaggacaataactcttttttctttgcattattcttataattatttcattatttttgcagtgttgttaccatatgttgaagtaagtaattaattctaaaatcttagtggcttaacttaacaagttcttttttttggcccatgaaacatatacagtgcaaattagtagctggaattttgtggggatttggatcctcagtcagggaccctcgctgacagaggctccatcaccttctatgtgaactgtctggaagatgtggcctttcccattcatgcaataggtgaagagacacaagacagtcttgcactggtaattaagtactttgctctggaagtatttaataaccagtcttctggagaagacatgtgtgatttcattggccagaactagtcacatgacctcacctaaatgcaaaaagatttggaagtataagagagcamatgaaataatcagtgggctgactcattgccatactatattccagaattatatatttgttgagcaagagaaaattttaa

SEQ ID NO: 897152 - DNA, 563 bp, Homo sapiens
atttctacgtatatttaattcatcaaatattgtgtttcatgcttaaatgtttggttaatcacatgtattcatttaacaaactttgtagatgtcaagaacattttgattatgaaatgtamacaaaaataattttaataagcttaaaaattccagctacacattaaccaaaattttccaataatcctatggatatttaacacatagatttttaaaaatcctcatattaaggatttctggcatatcaataaacactttagagtgagtagacaatttataatactttgttgtaaataacataaaatgtggttactagaagtctcaatagctccagtagtaaataacaatctcttctttcagatttataatatatttaaaagttaatattctacaagactgaaattcatttatatttttttaaaacaaagaccccttaaagagattttaagatattttacagttctcaatcaggatttgttttcacttgaatgaaatatttgtgtgttgtatacagagctaaaatatatgcagttctttatcttttaaaattgtcttaatatggatga

SEQ ID NO: 897153 - DNA, 610 bp, Homo sapiens
ttttgtatgaagtgtaagagaggaagtcttccagggtgatgtrtagaaaagcataatgagaatcagggaatacaagagtatagataaacaacaagataatttccttgcagactatatgatatggtttggttctgtgtccccacccaaatctcatttcaaattgtaatccccacgtgtcgagggagggacctggtgggaggcaactggatcatgagagtggttcccccatgctgttcttgtgctagtgagggaattctcacgagatctgatggtttttaaagtggctgtttcccctgtgctctctctctctcctgctgccttgtgaagaaggtacctgcttacccttcaccttctgctatgattgtaagtttcctgaggacttcccagccatgtggaactgtgagtcagttaaacctctttttttaaatgaattacccagtctcaggtagtatctttataggagtgtgaaaatggactaatacactatatattatcctaaataatctctggataatactgtggaatattttattttaacaccgtctttatccacatttattttccctttgccctcttactaaagctagtgggcatattatgcaaggattta

SEQ ID NO: 897154 - DNA, 644 bp, Homo sapiens
ttttttttatttttagtagagatggggtttcaccgtgttaggcaggatggtctcgatctcctgacctcrtgatccgcccacgttgacctcccaaagtgctgggatttcaggtgtgagccaccacgcccagccatgatggggttttctaaatacgcaatcatgtcatctgcaaacagagacaatttgatttcctctcttaactatgtgaataccctttatttctttctcttgcctgattgccctgaccagaacttccactactatgttgaacaggagtggtgagagagggcaccttgtcttgtgccatttgtcaaagggaatgcttccagtttttgcccattcagtatgatattggctgtgggtttttcataaacagctcttattattttgagatatgttccatcaatgcatagtttattgagaatttttagcatgagaaaggctgttgaattttgtcgaaggctttttctgcatctattgagataatcatgtggcctttgtcattgattctgtttatctgatggattacgtttattgatttgcatgtgttgaaccagccttgcatctcagggatgaagccgacttggtcgttgtggataagacttttgatgtgctcctggattcggtttgccagtattttattg

SEQ ID NO: 897155 - DNA, 532 bp, Homo sapiens
gcctgacccctctttgagctgaatccgaaatgccaaatacattggacaggcacggtggctcacgcctgtaatctcagcactttgggaggccgaggcgggaggatcatgaggtcaggagatcgagaccayggtgaaaccccatctctactaaaaatacaaaaaattagccaggcgccgtagcgggcctctgtagtcccagctactcaggaggctgaggcaggagaatggtgtgaacctgggaggcagagcttgcagtgagccaagatcgcgccactgcagtccagcctgggcaacaaagtgagactccatctcaaaaacaaacaaaaaagccaaatacagacatttttcctgccctggagctcagcatgagttagcatattctttgatcatattactaggagtagagggtctgaaacagaggaggggatcctactttacccccgttctaggcctctctaatgaattggcagttggaggagacatcttgggggtgtggtaggacctggatcgggggaattcatgcctccttttt

SEQ ID NO: 897156 - DNA, 542 bp, Homo sapiens
ccaggccatgaggtctgagaagcatctggatttggcctgttcacagcagggaagtgtggtccagtggcaaaaagttgagggcatcctaggagttgaggaggtggtggcggttagagtaaaccactctggaggcrtccggggtggagagacgagaatgtgcaagaactcctgcctctagcctggcctcctcaggaccccggccaccagcctccctcctagaagtccccagagcttcctcctccttgtgccccagaactggttcctgggttgctccaaccccagaccttccctggaagtcccccccagtgcctcctggctgggaacccccaactgcattttgcttctgctctcgtgccagtagtccccttttctctccagtgtccaggccccaaccaccaagaccctgcctcctcacttggctttgctgttcttagttctctactcagtaggttgtgtctgcctccattcctggccagacgctgccctggggctgagtgcacagtccccagccactcccgagatcctcagagcttctggaagcc

SEQ ID NO: 897157 - DNA, 604 bp, Homo sapiens
aaaaacccttgaagataacctaagaaataccattctggacacaggaatgggcaaagatttcatgacaaaaatgccaaaagcaatttcaacaaaagcaaaaattgacaaatgggacctaactaaacaaaagatmttttatgcagcaaaagaaactatcaacagagtaaacagacaacctacagaatgggagaaaatatttgcaaactatgcatctgtcaaaggtttaatacccagaatccataaggaacttacatttacaagagaaaaaaaaaccttatcaaaatgtgggcaaaggacattaatagacacttgtcaaaagacatacttgcagccaaaaagcatatgaaaaaaagctcaatatcattgagccccagataggaggggcacctctctctttcttacacctaggatttgcaatgcaaattaaagaaatgcaaattaaaaccacagtgagttactctctcacacaagccagaatggctattattaaaatgtcaaaaaataagagatgcaggcgagattgtggagaaaaagaaatgcttatacactgttgatgggagtgtaaattagttcagctattatggaaaacagtgtggtgattcct

SEQ ID NO: 897158 - DNA, 643 bp, Homo sapiens
gcctattcttcatagtctggagaaaatgaatgatgataatgttactcatctacaaaagttcagttttctccataaacacagctgtgtygtgaattaagcaaagtcaatatgtgaaaacttagattgactgaaaaataaactgaagatgattatttgtaccataaaagaattctgtaccataaaaaagagtcatcatggaattattttgaattgtgaggtccattaatgatcctgcaatgcaattctgtttattaaagatgtgattagcaggcaactttctaaggcctcatcagctgcatagagaaaggtataatcacactgacagttctaccttctcttttgagaaggattttgtttatttttccaaagacaaatcagttttctgtgattattttatcattgagatatgaacttatatataaactaatttccccttaaattgactttagaataggaaaacaagttctattatttcaaggctagttaaaatacttttgcctaaatgaccactttattctagaaaaaaataatggagacattagtaaggatatggtttttaatcacatcatctgtttccaacatagccttgaatctaaaggattaatgtacactccaccttggaatggagaatagtggtattaaa

SEQ ID NO: 897159 - DNA, 594 bp, Homo sapiens
tcttctctcctctaggccaagtgtcccctgccccctgcactgtcaggtttgccttcttccgtcgcctctccctggggaaagtgagtggttctggagtagctggccaccatcatcagccccctggcgaactccctgccacgtcctctgctgttgcgtgaatgacacagccatgagcagtcgagggcggctgccttcagggacttctgagcatcactgtggtgttcccatagggctctgggctccccagggagggcacctgcctgtcactacaagtttgagactggttcttgaagaccatcacccactgcaaaggcatcccatcctggagtcaccctctgccctgggcacctcccagagagtcacagtgaaaagtgttgctgacgggcatggcctggagctgtggcttggtaaggcccgctggtctctgcactccagctgctgaccagggccatggggaagsaacaagagctgctgaggagtggcctagccagagccctgttcacagaggtggtgcgtgtgtgcaccctaatggcgagagctgtccagaaatgcaatgggctgcccctcaaatataggtagggacctgcctgtcag

SEQ ID NO: 897160 - DNA, 578 bp, Homo sapiens
cttacctgtagtttgtctttattacttttaaatttttcttccagagaaaagtagtaacaggtcaggaaaatcccaggcgaaggagtaagccttctatagttgaacagtttggatatkaaggaaaactcaataaaatatttatacctgctttagtgagaacttctgatctggaagaaactagttcttgtattcctgtgagtccctaagccagacctaagtgaggagtcaggccatgtgtccctactgtctggagaggagaagagactcctgcctggctggcctgaaggcctggggccacccctccacttcctgcagggtagctggggccctgacacacagcacaagttcatgtgtctgacaaggtttgcggtgacttttcaaatcaaagaaggggttatgctctttactaataatatgttctgaatatattgttgcaggataataaaaagtcgctcacagcagcgtaacttccagcttctggtaatcactcatgatgaagattttgtggagcttttaggacgttctgaatatgtggagaaattctacaggattaaaaagaacatcgatcagtgctcaga

SEQ ID NO: 897161 - DNA, 579 bp, Homo sapiens
aatacttttttacttgctttgaagccttctagaaatgtgttgaccctytttgtgataagctgtctcttgtttatctttaaaattgttttatactctttaacaggatcttaggagggaggagaaaataaagtgtgtgctcatttggcgatctttaatgagaaacttcattgcttttacaataaagtctcaaatgctttctcttcatcaaagcacttgaggtaaatcatgtatcagcctgatctggtgcattttcatgtctcctgtgtttgagctccagtggtctggtcatagttctctgaatagtttcttcaagttttcacatcttggtttatgctgtgtctacatgctggtatgttctttctaccttctttgttcattaaaatcttgttcatccgggaggcggagcttgcagtgagccgagatcgcgccattgcactccagcctgggcgacagagcgagactccacctcaaaaaaaaaaaaaaaaaatcttgttcatgcttcaatgcttcaatgttaagtcagctaccacttcttttacatagactttcctcttctcactggaataactatgcctaatt

SEQ ID NO: 897162 - DNA, 600 bp, Homo sapiens
ttgcaatccaataatgtgattaacataagatggcttttcatttacttaagtcttctttatttcaattatttcacaccaaagtgtgygtgtgtgtgtatgtgtattagttttcagtgtcttatacttcttttgttaatttctaaatttatttttaattcaagttttattatttttcattgcactgctaatgagatttttttaaaatatcacttttagattgtttattgctattgtgtgggatataatttatttttagatattgattttgtatcctgcaaccttgctgaactcatttattaatcgtatagtttttaaagtagactctgttttttatgcctaagattatgtcatctggaatattgatagctttctttccttctttccaatctaggtgttttaaatttatttttctgccctaattgatctgcctagcgcttctcacgacaatattaaacagaactgtgaagaacatagatctatatatttttcctgatcctaatgagaaagtattttgcatttcatggttaggtagaatgttagctgtagggttttcatacatgtcctttataaggttgaggaaatctctttatagttcaagtt

SEQ ID NO: 897163 - DNA, 562 bp, Homo sapiens
ttgtcatagtgctttttagagtgcttacactgtgcattttaacttaccagaatctactttagatttatactaaattccactgaaatatagaaatattactcctatatagctctattyatatttttcattttgtgctattattgttatacatatatctatatcttacatgccacagaatgtacttatataaattttcgataataataataagtttatcaaaagttaaaaagccttttaaagaagtgtagcaaagaaaagattgtatttatagtgtttactatatttccattcttgtttactatttctgttacttttcatatggtgctagagattgaagttgtcatttcttgtccagtataacttaatatagctttgtttgcacctgcctccattatgcttttattgccaaatatgttatatcacattagtgtatataatagaacagagcgttctttctctttccctgtatatgtatatagaggtgattttgagtcaattaagagaagaaaaacaaacatgcaattacattgtttataattacctacataattatctttaccac

SEQ ID NO: 897164 - DNA, 619 bp, Homo sapiens
ttgtatttagaagtttatacagtgaaaaattaaagtataaaagttgaaaatacagaagagagataaacagaattcacttattaatttatatagtctcatgtttatctcccccacagcaataaaattaaaccagttaaagatatattacataatatcccattgaacatcctttctgtatttgctgaacttatcagaggagcaacagggagaatataaatcttttaaatatcagattatttccttagggacaattaaatctgagatatttatataacaacataggtaaaaggcactatatagttggacagaatgtgccattataggaaaagtaagtaacttatacacacccaccaggaaaacattaatcagaaaaggcagaacaggcatgaaacttttcaccacgagcttgaagctgcatgtgaagcagaagtaattcattgccaagagtctggagattacaaaacatcacaacgacttttaaaagtagacaatttttcaaaattatggcttagccaaatagttwtcactgatcacttgtgaaagcaaactgtagacatgtttttaaaatgtgttaactaaaagtaacagtaatgacctaagaacacaacaattaatttca

SEQ ID NO: 897165 - DNA, 525 bp, Homo sapiens
gaactcacaaactatctaaaaattgacaactagaaacatgtagttgttcagtgatctctctcatcaatctcttctttttattttcttcaaaatagtttgagatcctccaatcaagaaatgaatcccagggaatacactgacgacaaacttatcaaaaatacattaagaagtgaactattatgtgctatgtcatctgtgcctaaatgatgcctactaaagaaatgtcattcaaaatatatttgctggatgtataagtgaatgaataaacaaaattattttataggtattcactgtccaaaagttattcttgacagtggatttgtactgactactgttatttaaatcataataaaatatcaaccactgcactaaaataataacctttaatttaattggatataagtaaaaacataaaaatataaaacaacaacaatgaaaacattcaaggaatccaatggctgtcaacgtaastgttcttgattgctgcatagttaccttttttgtggggtggcaggggcagacatg

SEQ ID NO: 897166 - DNA, 631 bp, Homo sapiens
tcttatcaacagaataaataacaaaaaccatattagcattttaattgatgctgaaaaggcatttcataaaattcaacatcccttcataataaaacactcaagaaactggatataagatgaacatacctcaacgtaaataaagccagtatcctactgaatggggaaaaactgaaagcctttcttctaatatctggaacatgacaaggatgcccacttttaccactgttattcaacatagtactggaaatcctagctagataaatctgacaagagaaagaaataaacggcatccaaattggaaagcagtaagtcaaattatctttgtttgcagattatatgatgttatatttggaaaacactaaaaactccatcaaaaaactgttagaactgataaattcagtaaacgtgcaagatcaccaacatttctatatggctaacaacaaacacactgaaaaagaattcaagaaagtaattccatttacaagagtacaaataaaataaagcatctaggaatccaccaaaaaagaaagatatctacaataaaaagctataaaatattgatgcaagaaatcaaagagaacactaataatggaaagatattctagatmataggttggaagaatgcatatta

SEQ ID NO: 897167 - DNA, 466 bp, Homo sapiens
ctcactttgtgttttggaaaattatgtacaggcagttacattagcctttctcccttttctgtacttccagggaaccaccctattaataatagtgcccattataaatatttaatataaaaaaaccagaaaagtaagataacaaaggggttaaagagcatctttgatcataatggattttgcagggaaccacattgtgattagaaaagaaaatatttgtgagtaaatcaattccatgctcctgtcttatatttttgactgtgtgtatttagcaacagagcaaacagagcatgttataccaactccattactgtatttaaaattttgagctcataaatgatatttgtttcataatctacaaaaatatctagcctttttctttttcactagcaagagatgtagaggaggaaakccttagttattcctgggcctgagtaaggctgaggaaggggaaggactgaaggaactt

SEQ ID NO: 897168 - DNA, 638 bp, Homo sapiens
agaccctttttctttagtgaggtctaaagcctgaactttcgcattttgttcagtgacccaactmagctatagcagctctctaactcaaatacacagggatattttcagtttggagaaaaaaagaagtaacttatattttatataaatttctccttttcaactcaattatcctctctacttaatgctgcttagtttttgtgtgtgacacatttcagagtatacagcttgttcttatgttcattaagaacattatagtatttttctttccttaaaaatatgatctttatcctttttttcttcagtgctttaccatgcatagagcaatagtaataaagtttagatagtaactagtcataattaggtacaataaatattttagtttcatcagagccttttatgtatagtctgaatcaagtagccttaacaatacatagcttaagcgagtgttctcaagacttcatatctagaacacagcaaacttaatatatctgcgtgcatgttgataattacctataggtggaattactggttctaattttatgaacccataatgtgaacagctaaatggcacattagccagggaaagaaagttctgatctccaggtatccccaccagcactgtggtgaactctcaaagg

SEQ ID NO: 897169 - DNA, 666 bp, Homo sapiens
agaaattgatttttcttttccatgaatagagtctggaggtaggttgcttagggctggtaagaaaactccaccatcatcagtgacccaggctgcttctatgttgctgctctgccatccgcatgctgcttgtggttcagagcatctggtctaagctccaagcatcctgtctgctttgcagccaacaaaaaggagggaaagggaagaagagcacttctcttaaggagacttgctgtatgttccactcacctcactcagatctcatttgtcagaactcagctacctggctacaactaactgcagaggaggctggggaatgtagtctgttagttcggtggctatacgctcaactaaaacccagagttctacttctgttcccaaggcaaaggagaactgtacacgggaggcaattagcaaacctctacatgtatggaaacattttctaaactgcagagacctttaggaaattaaagatctattagagtgggataatggctgcatttatttgatattacatctattgtctaatggttttcagtcttcccttgtagtaattatttttcatttagaatctagagttgtcatttgatttcttsagcaactccagtatccctgaacttatgctcatctttttgctgtgctttcggaaaaagaaagctagatgacttc

SEQ ID NO: 897170 - DNA, 641 bp, Homo sapiens
cagttctaatttgattgcactatggtctgagagaktgtttgttgtgatttcagttcttttgcatttgctgaggattgttttacttctaattatctggtcaatattagaataagtgctatgtgttcttactagaatgtatattctgttgatttggggtggagggttctgtagatgtctattaggtccacttgatccagagctgagttcaaatcctgaatacccttgttaattatctgtctcattgatctgtctaatattgacagtggggtgttaaagtctcccactattattgtgtgagagtctaagtctctttataggtctctaagaacttgctttatgaatctgggtgcttctgtattgggtgaatatatatttaggctagtagctcttcctgttgcattgatccctttaccattacataatgcccttctttgtcttttttgatctttgttggtttaaagtctgttttatcagagactagaattgtaacccctgcttttttatttcctttccatttgcttagtcaatattcctccttccctttattttgagtctatgtgtgtctttgcacatgagatgggtctcctgaatacagcataccaatgggtcttgactctatccaatttgccattctgtgtctt

SEQ ID NO: 897171 - DNA, 654 bp, Homo sapiens
tttctaggtcatgtgacctgtgagaatttgaaacccacactcctaatactcaggcgatatgtatgtgtatattaaagccttccactaaaatgcargctgagctagtcagttttctttgctatttacttttgtggggcagacaattttctggtccaccctttcatgtaaaaatcgttggcttttgtggaaatctttattccaactcctctcattacatgggttcaatgtcatgtgttcatgtccatgtgtgtctttatgacctaaagctctgaattgtagggactggcaaactccctttccgtagttagcagctttagcaccttctgttagatgtagatttaggctttcatttcatatttctttcatgtgaatattctttattttcttgacagcttagacagattagaagaattacatatatgtatatatatatacacacacacatacacacatatttgtcttttacatatgatacataattatatattattttaaatatataatatttgtgtgtgtgtatctttttttcagccaattttgttttgtatcagatttttcatacacagggagatttcaggatatctggtcaactatatttccagaaatgcaagtactcctttcatctcaccatcaatttctgttgagctctaacag

SEQ ID NO: 897172 - DNA, 628 bp, Homo sapiens
gctcattcctctaatgccagctctttgtgaggccaaggcgggcagatcacctgaggtcaggagtttgagaccagcctggcccacakggtgaaaccccgtctctactaaaagtacaaaattagctgcttttggtggcaacccagctactcaggagaggcaggagaattacttgcacccaggcacccaggcagcggagtttgcagtgagccagtgttgagactctgtcaaaaaaaaaaaaagaaaaaagaaaaaagaaaaaaaaatattccgcatggatgaatcttaaatgtattttactaagtgaaagaaaccagaccccaaaggctacacatagcttgagtacatttatatggtgcccatataattaagcaaaaaatagatacatagaaaatagattaattgggaagatcagtactgcattttgactacaaagcgacagcacaagaaaatttttgcggtgatggaactcttctgtaagaaaatgtggtgatagatgtctgagtctatatctttgccaaaaactcataaaagtgtacaccaaaaagagtgagatttaccatacataaatttaagaaatgaaccaaaatgttggagaaactcaagaaggaatgcaaactataaggatgaa

SEQ ID NO: 897173 - DNA, 607 bp, Homo sapiens
aactagagactgtaacaacactattcagccaacaacaggggttatttttagaatcctacttaccattagaattctaaatttgaacctggacttgcaggttactatgaggacatatttgtcaatgttggagaatgcaacatattatatttaacaatttgttttcctagtttgttatttcatgtatgtaggtataatatgcaattgtactcctgccccacccttgaaaatctagtggatgagcctagaaagaaacctgaggaatctgataagacatgagcagaggcagaaacttcagcaattgtggtggcaacagccacaagggagtgtatgaggtaaagtttgaagatctactaatacatttaagttagaagattgaggaataaagtctatattcattaacccatcattactaacccttcatacagttcatcaaacattcttcgctcgtgcttttaaaatggaataccatgctctgcctccccttycccacttcaccccacctgcacctcacataccctgactgctttgaatctttctgcaaacactgagtactcaaccttctataaactcctactctactccctatactacatttttctcctaactc

SEQ ID NO: 897174 - DNA, 579 bp, Homo sapiens
cagaaaatagccttaccacactgggtgcttgtgtcacactggtgcatccataggttggtagtatcacaacaaaaagtctttctcccctcaaactaaaattcarccctcctgcatccacaagacattgctttgctaattttcttctaaaatgttaacctcatttttccttgaacctgtaaatgttttaaaatacctcccaaagaacctcctcctgtagtaacaactatatcccaacctgctaaaaaacttctctctgtggcaaaataaataaattaattaaatttttttaaaaataaaaggaacaaactcacagactctgcttcttcgaagtccccagcactcatttaggccccagtctctactttaatatttagtttgaacatcatttttggtgcaccttctccatccaatcctctccatccaacaccagtcatggctaagcatattttagactacatgcccaaagcattttgtaggtctccattagagtttatatcacatgttatctctgtatggtttgtgagactgcatttcctattcaattctgaactccataaggtcagaaatgatgtcttatca

SEQ ID NO: 897175 - DNA, 566 bp, Homo sapiens
aaaataataattttgaataggacaggtttcatgcatgytaatattgttttttattatttcaatctatttaaacttttatgatgttctcttttaaatattcagggtccaactttagctatttggttcatttttccccaaagatattctgatcttctttatattcaataaaaaaaatcctattattcaataacattatacattgcaaagcaccttgcattgttttaccttttataaaagcccattgatataaatggatattaatataaaatcccatataaaatgatgatataagaaaacctatgacccttgcaacgtcatatcacatattactaataaatgggagtttagaaatcagaactctagattctatcatcttatttcattatgtaatctcttaaagtgtcaaaataaactggaagagtagggatatacatattgttaaaagaaattttgttcaaccagagtgttacagagagaaaaaaggagagcttaataataaaactgtgtcttcatggaatttttcatgtggatgcattgatggaaaggcattctaggaaaaggcaaca

SEQ ID NO: 897176 - DNA, 619 bp, Homo sapiens
taaaggttgcagcttccactcatgcaggaggggcttcctttccctttttggagccaaacaggatcttcttcatccttttcccaagtagcccaaatgacacatgaccagtacccacatttttttccacacaatcctacagatgtacttattttcggtcatgtatcttttttcccaattaaaagagccacatcctgctcctagcttatttctattaatgacagcacaagcgtcaaattataagattatgcgtttgggcacccctttttcttctgttctggctaatactttacttgtatcatttatgagtcctcactagtcttcagtccttaatctgatttcaaaaactatggaaatgggaggttcagaggggtcatagcacacgtcaggctggtcacttcctggattacagactttgtactgagtgttattatacaaacatgttccttttggaattactaggcattcataataactatagaacaaaaaaaattgtcttaacgtgttgtcctacctcagtgacctgatatatgcactgaaagcagtcctctgtgtgggaagaagcagtggaagcttttaccacacmagtccatgttataaggaaaataagtcccacgactat

SEQ ID NO: 897177 - DNA, 671 bp, Homo sapiens
catttagcagtcatcacaacaataattgatgcagacaacaatcttcaatgaatgttaaaattagacactgaaaatttgttgagaaaggaatattttcagtcttaaaatactcctcctgrccaggcgcggtggctcacgcctgtaatcccagcactttgggaggccggggcagacagaccacaaggtcaagagattgagaccatcctggccaacatggtgaaaccccatctctactaaaaatacaaaaattagctggatgtggtggcgcatgcttgtagtcccagctactcgggaggctgaggcaggagaatcgcgtgaacccaggaggcagagcttgcactgagctgagattgcaccactccactccagcctggcgacagagagagactctgtctcaaagaaaaaaaaaaaaactattcttacttaattttccccccacttactgactacaaaagaaaaaacagtaactttgcagtgatggttgaagccataatcttaatgaaatatcactagtaattggacaagtcaacatatttttaatatctgtgatgaagtacagaatctaaaactaattgtaaagaaatattagataaatctaaactgaagggcattctgtaaactaactggccatgctcttaaagaagtattacagtcacaaaggaaaggtaaga

SEQ ID NO: 897178 - DNA, 599 bp, Homo sapiens
cactcaggctttttgaactgttggcgtttttgtgctgattctttctcatctgagggtgccagtgtttctttgtttctttctttatcttcttcttttttttttgaaattgctgttgtttgtakagggcttttgtttttatattctttttttcccttgagattttcattgtggtgtatgttgtttatagtcaattggctttatttcttcgagctttcagagggccaaggctctgtatgggttttttacgttgatagtttccttcatgggctttcacaggtgttgtaggtgaaggaatttatttttgtttggtggtgtagtttagactgtgacttagtaaatggcacttaagagtaagggtaggctcttagctgcgtgcctgttttgcatttcagtgtgtatgcagcaatgctctgggaaagggagacagagggcaggagaggactccttcaccaagtctgttcctgggccttggtggagcccctttcaattactggcactgtgcttatgtttccttagcctcaaggcaggctttggcaggctgtgcttttctctccattaagaacagttcaagatgaaagtcaggtaaccaggagacccat

SEQ ID NO: 897179 - DNA, 521 bp, Homo sapiens
tcaaatgaaaattaggtaatgtaccatgaaatagttaaatatattcatgataaaaatgtactgtctgttaggagagaaaaaatgatacacttaaaacactgaaaacattaattgaaggaatattttaagattttacagctacagtaactgcctaggcaggaaattctcacatacaacttcttcatttcttaagatgtaatgtttttaatatgctctatatatttctttagtagatatagattttatttaagaatacaaacaaaaatgtatctacctagaattcaagattattttatttgcttgattttaccatagataggttgactagagtagtaacatggaatagagaatcaaaacggctcctatagtgtctttcataatttaagaaaatttatgataatgmaatatatgtagtgcaaaacctttatcatagcaacccttaaagataatttttacattagtgatgggacattgcatcttacaatgcggtctaatccatttttatatacctttaattgttc

SEQ ID NO: 897180 - DNA, 604 bp, Homo sapiens
tattgagtttagaagcagcctccccatctgcaacaaccaccttgggtagaggaaagaaggaaaaaaggagatatattttgtagcttcttccaaatrtttccttataaaagtcttctctatttgcactctctagattctttcatatctttgcagttttaacatatggtctagtatcccttttggaataaaacatatgccctatcatgatggttcaactgaaatgtcaattttggtatcctgttaaataatatatacatatatatatatatatatacacatgtatgtatgtatatacatgcacacacatatgcatatttatatgtgtatcatataaaatgtcctccagaatgtgctgcagagttcaaaactaaactcaactcctaacttgctcacccttccctccatgttccctcaattagtagcccaatctaaaaagcccagttatgctaaaattcttccatcatcgaaacttaacacttacaactcagaagtgccaaaaacttgcccactttttccttgtttagtattaggaaccaatatcttcttagctagattattgtaatagttgcctttgccaaatgagcaaataaataagaggaagccc

SEQ ID NO: 897181 - DNA, 566 bp, Homo sapiens
tttaaaaaaaaaaatcaaaattgctaggtcttcaggacttagtctggcatttcttttccttaaagcactttaaaaaaaagaaacaataccatatttcaytgaagacagtaacacctactattcccatttcttatccctctccataaaccagaagggccatattcccactgggcagggtgaccagtttcctatagtctttgttcttgtttttcctaatgaaagctaacagctagacttttctttatgctatccaacagacaaaaagagcatttttgctctagagaaatctaattttacagacaaaaaaactgaggtgtatcaaggccaaatgaatgatattactgatcattcttgtgattattatattaataattataattaaatctgtttagagctaaccacacacgaagtaatatgttaagatgtcacatgtgttaactcattttgttccttaaacaggtctgcaattttggtattatttttcctattttaccagtgaaggaaaaactttaagaaactaatgatcttatgggaaagctagtaagtaataaagcaaggacattaaa

SEQ ID NO: 897182 - DNA, 571 bp, Homo sapiens
gcaagttcaatctcttgctctctcacgtgctctcttgcccttctaccttctgccacacgatgacacagcaagaaggccctcaccagatgttggtctctctacctggaggaattctcagcctccagagctataaaaatcaatctccattctacataaactagccagtctttggtattctgtaatagcagcacaaaacagactaagacacaggcaaaaatgacttctgtaccttggtatcttatacaatgtacactttcataagtaaaagttgataacttaacccacctttcatacccagaaggggatatttcctaactacataatgaaggatgccaccgcagtactgcataacagtgctgcaggtccatcctaatcactgaggcaaactcagggcttcgactacagcagcaaaaggatacacatgtacaactagctgagctgaagacaagcagcccccagacctctgtgtcttcctcacacccttttgaaactgaaggcacctcctgggaaattkcacgtacccctcccttgacaaggaagcttgagtgtagacatcatctctaccaccaac

SEQ ID NO: 897183 - DNA, 706 bp, Homo sapiens
ggagtaaagtgaaatcaagctttaatgaactaaggctcagtttcaaaatccaagaaaagaaacagaagtttgcataataataataacaataaattggctatgtaaaccctcataaaaggaaagtcatcccgcctctcatctaccacttacatgtacaattgactaaacttttagttcaaactcatgagctgtttccctatcactttggcactaaatatttcacctgataaaagatgctgtatcctatatgatgtatttttagtcatatggaagagtttcttccatgtgttactcacaggtaacaatgagtgatgaatattcctggcatgaacaccatgtatcccattgcaagctttttattatgcaagctgtccatactgtgatgtgaaagtttctattagattccccatgaagacgatagaagatgttagcagccccaaacacaaggcaggccacagaaatatggattcaactacaggaattaatagtcaccattgtaaactattcatgcctggagccaacccacaaaactaatgcaataatagagattctaagtcagagctggaaattgctgcccaggtcaggctattccctagagcccagctaggattactttgggtgcattctggaacgmcacagctggtctgagttttcattgtctcatataatgaactttcaccatttcctttaataatccccagccccc

SEQ ID NO: 897184 - DNA, 632 bp, Homo sapiens
tattaaacacgcccatcattgggagagaatgtgctttcctgagcatctrtgaacataggactgctgcctctccataaatgcaagggaccctccatgaaagtcttattctatcagagacttggatgatccaaatgtcgccaaatatagaattcagaagctgccctgacttaagggaatctatttcacaagtaaaaatgtatttaattgaacctgctctctgttcttattttccattttatgtgccccttgcttcttctaaaacaatatctgcacggaactttattccaaaagaaattaaatcatctatgccccctgcttacatttcaacaagcctagtttctcttaatggcatttaatgaccataatatgtacttttgaaaaaaaaaaaaagtcaagcacttttattgagcaagaatattgtttattgagtttttaatacgactttgctcaaaactctgtactctgtagtgctaatttaacaaatctccagcactttgttttccaagcttagaataatgcttagaatgtccaatgcacctctgaaaacagttctaacttctggaaaacaatagcggtttctgtggtcattgatgaaaggtaataggatagttagggtgattctagcctagcca

SEQ ID NO: 897185 - DNA, 575 bp, Homo sapiens
ttctcttagcctaatgttttcaaggttcatccatgttgtggcatgtgtcagaatttcattacatttttaagctgtgtaatattgcatcgtatgkacaggctacaatttgtttatgcatttatctgttgatggacatttgtgttgtttccaccttttggctattttgaataatgctgctataaacattgttaagtatctgtttgagtccctgctttcaattctttttggtatatactgagaagttaaattgctagatcatacggtaattctatgtttaactgtgcaaggaatcacaaaacttttttacacagctgctgtgccattttacattcccaccagcaacctacatgagttccaacttctctatatcctggccaacacttgttactttccatcttttgtttgtttgtttgttttgtttttataatagtcactttagtgggtgtgaagtactatttcacggtggtttgatgtgtatttctctaatgatgagtaatgttgagtgtctttctatgggcttattggtcatttgtatatcttctttgaagaaatgtttattcaagccttttactcat

SEQ ID NO: 897186 - DNA, 619 bp, Homo sapiens
taaagtgatttttttccctagacttcactcgttgtccttccccagcctcatgtgtgtgcacggacacaaacatacatacatacacacatatacatgtgtgtatatatgcacacacatatttgtatacacatgtattttgtatacacagggtaattcacagatgttatctgatttcataaaattgtgtgtgctactttatacatctttatcctttttaaccttttgaatcagaaaggcatatggtcagaggaaaactcagtttctctgataatgactgaattaaatatgcaatcttacagtgtagattagtatacagtatagtatagattagtatatagtatagattagtatatatatagtataggttagtgtatatatagattagtatatcatatagtatagatagtatatagtacagtatatagtatagtatagattagtatatagaactttgtgccaaaaaataaaagcactttttaaaaatgcagttccagttttgtaaagataacttaagtattgcrtccagtattaaactggaagtaattgtgtttaagaaaagagctttaattggcatgtatatgccttgttgctattcacctagactacccacttttggcca

SEQ ID NO: 897187 - DNA, 593 bp, Homo sapiens
tttggactgtgagcctgaaaaagacggagttgccactaagaggagtaactttgaccttagagagatgaggagaactgttttagatatcttaaatttgagatgccaattagacatgcaagtagagatagtgagtaggcaacagaatgcgcaagtctggagtttgggtagaggtctgagtagcagttgtaaatttggatatcattagcttatagatggaataatttaaagccatgatactggatgagattcttaagaagcaagtataagcagagaatgcatgatgcccaaggaccaagcccttgtactcctacgtttaaatgtctgggagatgaggaagaacccgcaaagaagatacaaaagggtggaaggaaattacctctatggtatggccaaattacctctatgatattttgaatatatgcatgttaataaggttaaatgaatattcaaaagacttaaaatatcttgaagagaggcacaaaatcctactcattttgggcttcagggaccagcactgtaccagctacataaaaaaacactaaatgtatytgttgaatgaataagtgaatggataaatgaatgtagaatcttaa

SEQ ID NO: 897188 - DNA, 593 bp, Homo sapiens
tttggactgtgagcctgaaaaagacggagttgccactaagaggagtaactttgaccttagagagatgaggagaactgttttagatatcttaaatttgagatgccaattagacatgcaagtagagatagtgagtaggcaacagaatgcgcaagtctggagtttgggtagaggtctgagtagcagttgtaaatttggatatcattagcttatagatggaataatttaaagccatgatactggatgagattcttaagaagcaagtataagcagagaatgcatgatgcccaaggaccaagcccttgtactcctacgtttaaatgtctgggagatgaggaagaacccgcaaagaagatacaaaagggtggaaggaaattacctctatggtatggccaaattacctctatgatattttgaatatatgcatgttaataaggttaaatgaatattcaaaagacttaaaatatcttgaagagaggcacaaaatcctactcattttgggcttcagggaccagcactgtaccagctacataaaaaaacactaaatgtatctgttgaaygaataagtgaatggataaatgaatgtagaatcttaa

SEQ ID NO: 897189 - DNA, 594 bp, Homo sapiens
tataaataagtacctacctcatagggttgttagtattaaaaagattaattaatacaaagtgcctaccatagtcactggcacatagtagataatcagtaaatattagcaattaccatttttcatttgaccttcaatagcctttcattattcttagggtaaagaccaatatccttaacaagacccataaagtaaccccattatctggccactacttgttttccacacttttttcttttcctgattcattaagctccttttattttattatctctcatgaaatgcttgttattagatctcagtgttctcttactcatcttcccttggccaactgattgttttctcatgcttcagatttgacttcagaggtaacattcttagccaaatctttcctgatgttcccatcagcccccaacacctccttcccctgcctaagttcaatgctgttgttggctgtgttccttatagaattttraaaggatgataatacaactgggttatttgttttctttccacaccagagcatattatagacccagaattgttcttagcacataggcaaaggataaatatttcgtgggtgtgtgaggtagtgag

SEQ ID NO: 897190 - DNA, 603 bp, Homo sapiens
aatatccttttccatccctttattttaagtccatgtgtgtcttcattggtgaagcatgtatcttgtagccaacagatcactgagtcttgctttttattcaatcagccgctctatgtctttttactgagaattttagttcatttacattcaatgttattattgattaatatgaacttacttctgccattttgctatttgttttctggctttgtggccttctcttccttcttcccatccttctctttgtcctttttgtgaagatgattttctctggtggtatgatttaatttcttggtttttcttttttgtttattggtcgtatgtttttgatttgagattacaatgaggcttgcaaatataactcattattttaagctcataacaaatttaaactgcttgcataaacaaactaacaagcaaaaagaaaactaataaaaattctacacttcaactttgccccctactttttaactttttgtttgtatttatcttatygtattgtctatgtcttgaaaagttggcatagttcttatttttgagtggttcatcttttagtctttctacttaagatatgagtagtttatctaccgcagagtattataa

SEQ ID NO: 897191 - DNA, 717 bp, Homo sapiens
acttatttatgtacatactaacttgaagttcacataaaggaacaaagtatcagtcttcacagtctcacagagacttgaaaacttaaaggaattcccaacaacaytcagcaaatttgccgtgcttggcctggtttggaatgttactaagtgctttaccctttccaagtgctttgcaataatttataaatcacttttcaaaaaatcctgagggggagggaaaaagtattatggctattttttttaaaaaaaaatagcaaaatataaaagaaaaaaggaagaaagagaaggaaacttccattctgagtgctcactaccttctttcattttcatttctctggctttagattcccacatggttcatgactttccagaataccagggcatattgacatacaaaccatgaacaaggaaggaaaaatcacaaacttgtctcccattgctcagagtggcacaggttttaaagtggcacacccatcataggtttctctattctgtttcttctccctaaatcgcaggagcttagaggcttgggttcccaggactatggagtctactaatctggcctctttctactctccaaattgagacctctcacctctttttattttctggaaaaatagtactgttctattttgtttgtcctgctataacaaaatacctgagactgagaatttactaggagcaaaaatttatttcttaccattctagaggcttagt

SEQ ID NO: 897192 - DNA, 708 bp, Homo sapiens
caaaatgataatttaaatgggactgtctcctacatagctgccaagaagttttcagcacataacttgaaccacataattatgaagtaatccccatgacaacaaaatacattttatgtaacaaagactagtttcctgcgaagattttaccattacaaatgaagaagtttggcactgtatattttactgtgtctcattccttctccccaaacagatttggctgattaattatgtcactgtcatcccttgctagggacgaggaacattaagacaatgtgggccaatgagagagcaggagagatttgctgggtgttctggaaaaggagttccttctcaacaattccatatcttctctctctactccttgatctcttctgaccaccttctgacatttcctaccaaagccacatgcacagccacaaagcccagactgccactggcagcaaacctgccaccacgaggggaaccgtctaagaatgaagcctgagtgtaggcagcaaagtagacgcaaagagcctgtcttcatgacctcactgagccagcagaaaaacctgggacccaccctgaagcatactgtatctctgtgtctgctcattgataaacacacaaatgccctttctctatatgtcggtccaaagaggatttgttacatggagccaaaagcatcctaattagtcmttgagtatacactttgtaagctaaagttaacca

SEQ ID NO: 897193 - DNA, 621 bp, Homo sapiens
gtattggtttagtaatcatgcagattcttgtttagattggatatcaaaattaaacttttcaaacttaatgtatattctgtatcataatgtctwttaaaagaagattttgaaaacagccaaaggttacagagctagtcagttgaagggtcagaatttatccctaggcagtctggccgcagagcctgtgcttttaaccagcaaatgagagaggacactgcagggattttgacaagcatgctcaagatggagcagaaccaaaaactagtagtgtctaaaaaaaaagagagagagagagaaagacagacagagagacggtgaggacagagtgtcataaagaaaacagagtgatcagaaatgtgcaacgcaacagaaaaatcaaaatatgaaaagatcttaaattaagccttcatatgaattgaattttactgctggactttgaaaaaccaggtactctagtacctgctaggctgttaatctgggggtagtaatttaaataataaataaaaagaggagaaaagtaaatgtatcaggtatttaatttttgaggttactaaaactggtattactattattattattattttatctgtatcacaaacccccatggagtcttttcatccc

SEQ ID NO: 897194 - DNA, 621 bp, Homo sapiens
gtattggtttagtaatcatgcagattcttgtttagattggatatcaaaattaaacttttcaaacttaatgtatattctgtatcataatgtcttttaaaagaagattttgaaaacagccaaaggttacagagctagtcagttgaagggtcagaatttatccctaggcagtctggccgcagagcctgtgcttttaaccagcaaatgagagaggacactgcagggattttgacaagcatgctcaagatggagcagaaccaaaaactagtagtgtctaaaaaaaaagagagagagagagaaagacagacagagagacggtgaggacagagtgtcataaagaaaacagagtgatcagaaatgtgcaacgcaacagaaaaatcaaaatatgaaaagatcttaaattaagccttcatatgaattgaattttactgctggactttgaaaaaccaggtactctagtacctgctaggctgttaatctgggggtagtaatttaaataataaataaaaagaggagaaaagtaaatgtatcakgtatttaatttttgaggttactaaaactggtattactattattattattattttatctgtatcacaaacccccatggagtcttttcatccc

SEQ ID NO: 897195 - DNA, 559 bp, Homo sapiens
agtggtaaagataattatgtaggtaattataaacaatgtaattgcatgtttgtttttcttctcttaattgactcaaaatcacctctatatacatatacagggaaagagaaagaacgctctgttctattatatacactaatgtgatataacatatttggcaataaaagcataatggaggcaggtgcaaacaaagctatattaagttatactggacaagaaatgacaacttcaatctctagcaccatatgaaaagtaacagaaatagtaaacaagaatggaaatatagtaaacactataaatacaatcttttctttgctacacttctttaaaaggctttttaacttttgataaacttattattattatcgaaaatttatataagtacattctgtggcatgtaagatatagatatatgtataacaataatagcacaaaatgaaaaatatraatagagctatataggagtaatatttctatatttcagtggaatttagtataaatctaaagtagattctggtaagttaaaatgcacagtgtaagcactctaaaaagcactatg

SEQ ID NO: 897196 - DNA, 603 bp, Homo sapiens
atgaacttgaactataaagagatttcctcaaccttataaaggacatgtatgaaaaccctacagctaacattctacctaaccatgaaatgcaaaatactttctcattaggatcaggaaaaatatatagatctatgttcttcacagttctgtttaatattgtcgtgagaagcgctaggcagatcaattagggcagaaaaataaatttaaaacacctagattggaaagaaggaaagaaagctatcaatattccagatgacataatcttaggcataaaaaacagagtctactttaaaaactatacgattaataaatgagttcagcaaggttgcaggatacaaaatcaatatctaaaaataaattatatcccacacaatagcaataaacaatctaaaagtgatattttaaaaaaatctcattagcagtgcaatgaaaaataataaaacttgaattaaaaataaatttagaaattaacaaaagaagtataagacactgaaaactaatacacatacacacacacrcacactttggtgtgaaataattgaaataaagaagacttaagtaaatgaaaagccatcttatgttaatcacattattggattgcaa

SEQ ID NO: 897197 - DNA, 621 bp, Homo sapiens
gtagagtggaaattgtaggcatgattgtccaaggtaatatatagttaatatatataaaatgaaaccccacttatctcatcaccactggaactcagaaagatggtacaaatgagagtaaatgmagttttgtgtcaccccagcatccttgtagtcctggtaattgatgccaacaggggaaaatctgctagggacagaaagcaacatacccaccttctctgtggttggggaatggtggtagcagtagcagaaaggaaacagggcagcgaagcatagcataaagatcttttataacatttctccaccagtgcaaatatcagcatatgcacacacatgcatgcatatatagttattactgtttaaattatacatttgttctactttagtaatatataaatttttaagatatgcgccagtaacatagaacatgtagaagataataaaaataataagagttccaatatgttcttccacatcctagtgactcctctccagcactacatggagcatctgtatctcattggagaccagcgttataaggaggagaggctaaggttagactcacttatattcaattagatgaaataattcccagcttttaaaagctttataaatgtaactatc

SEQ ID NO: 897198 - DNA, 628 bp, Homo sapiens
tccgtctcaaaaaaaaaaaaaaaaaaaaaaaaaaaaaaatatatatatatatatatatatatatatatatatatatatatatatayatacatacatataaattttaaaaaaaagagaagagtcttaccatatccataccctcaggctggatatgactgtcaagattgttgacattaacgactcccttttaacaagattttatcatctgaatctgaatatttgcatgatctgtcactctgtgattcttttttatttgtttttttaaaggtaagataaaatattttgtagaggaaaatcccttataagcccactggcgttggttttacccttcctcatttaaattaaaattcaatcaccctaatcagcattaaaaaaaacttttctagcattatgctttgataactgtgttttctgagaaccaagaaggaaacacaaaatgatatggaataataggaacataagtttaaagctaaaggtatagtaatctatcctgacactatagtttcacaaatttaaaaaacagagaaacaaaggtaaatgtaacctttctaagatctctataacttgtccaagatctccataacagattctttactctttctccattcaaaaattattcattcacact

SEQ ID NO: 897199 - DNA, 628 bp, Homo sapiens
tccgtctcaaaaaaaaaaaaaaaaaaaaaaaaaaaaaaatatatatatatatatatatatatatatatatatatatatatatatacatacayacatataaattttaaaaaaaagagaagagtcttaccatatccataccctcaggctggatatgactgtcaagattgttgacattaacgactcccttttaacaagattttatcatctgaatctgaatatttgcatgatctgtcactctgtgattcttttttatttgtttttttaaaggtaagataaaatattttgtagaggaaaatcccttataagcccactggcgttggttttacccttcctcatttaaattaaaattcaatcaccctaatcagcattaaaaaaaacttttctagcattatgctttgataactgtgttttctgagaaccaagaaggaaacacaaaatgatatggaataataggaacataagtttaaagctaaaggtatagtaatctatcctgacactatagtttcacaaatttaaaaaacagagaaacaaaggtaaatgtaacctttctaagatctctataacttgtccaagatctccataacagattctttactctttctccattcaaaaattattcattcacact

SEQ ID NO: 897200 - DNA, 504 bp, Homo sapiens
gggaaggggaagggaggggaaggaaagggagggggaggagagggaggggaagaaaagggaggggaaggaaagggaggagaaggaaaaggagaggaagacagggaaagggagcggaggagaggggagaggagrgaaaggcaggagagaggaggggaaggttggggaggtcctctggtttgcctgattgctcatttaataactatttaatttctcttcctctttttgctgccaaacttctcaaatgagtcctctttactgacacttatgtaataggatgttatgatagggcttctactattttatcagtttctgagtgaggctctaaacttgagaacaaaatgttttattatccacaaattataaaaagacttatcatactctccataactaaagagtgactcaaaagaggcagcctaaaaattaatcaggtgatttgtccccagcctaccttgatgaggggagacttaaagattcataaagacaaaaaaggacttttttacagga

SEQ ID NO: 897201 - DNA, 606 bp, Homo sapiens
taggttgcctgatgcttttgccttacagctcttaagattcttttcttcattttgactttagataacctgatgacaatgtgcctaggtgatgatctttttgcaataaatttcccaggtgttcyttgagcttcttgtatttggatgtctaatctctaacaaggctggggaagttttcctcgattattcccccaaatatgttttccaaacttgtagatttctcttccttctcagaaactctgattattcttaggtttggtcatttaacattatcccaaacttcttggaggctttgttcacttttttcttactcttttttcttggtctttgttggattgggttaatttgaaaaccttgtcttcaagctctgaagttctttcttctgctttattcccttgtcttttaaaattggcataatgataatgaagaaagcaatatttagagtcttaaatttcccaactctaatccaaaactatttcactccactgctatcttcttattccccaggtatccatttgctgccttttatttttatttttattttcttttaatttttttagaggcagggtcttgctctgtcacccaggctggaatgaagtggtgtggtca

SEQ ID NO: 897202 - DNA, 551 bp, Homo sapiens
ccttggtttaatcagaatttgctttattttggagcacaaatgctgcacttactagagccagcaaatatgtagcattacctaaataaaacccctttgccttataaagcttgcagagccctcctatcattaatgtgattaaaagttgccagagggctcatggaaatgcaaagtcctaggtcccaccattagaattccgtcaacagtaggctgaagaagagactgggcatctgcactttgaacaaatgccccaagcattttgagaattgcatttaaagaaaaagattttgaaacccagaaatctgaaacaaaatctatttttcaaaacctgaaggagcaactctttcatcacttgaaagctatgtcaacattttgcatgcccaacaaatttgttactggaagcttttgaataattttagttgaaatttaatattacttgrtacttgcaaatgcaaagatttgatatcatagacttgtcaaaaactaattgttaagtagtatgtatgtaaatacaatattgaaacacattggaaataggcattttaaaaatgaga

SEQ ID NO: 897203 - DNA, 628 bp, Homo sapiens
gtctttcatgtctgtatttaatgacagagctctgattaatttactctcaacaagtatgcgtcttatgtgktttttttttctattttgaggtctttcaagtgctcttgacaataacataaattctatctgcccatgtacattggagctctattatcatggactgtgagtgtaaaaagagaagcagtagatcctcattatatgcggattcagtatttgcaaatttgtcaatttcctaaaattatttgcagcccccaaattgatacttccagagctttgatgatcattcacaaaaatgcccagaacagcaaaaaacttgagccgtccaaattacacattttcagctaaggtcaaatgtaccactctctcactgaatacatttttgtattgaattttgtgcatgttttttgtgcatgttttcttcattttttgtgctttctgtttttgattttgctgtttaaaaatgttccctaagtataatgctgaagtgctgtctagggtacgtaggtgcaagaagactacaatgtgatagagaaaataatgtgtaacatgagtttccttcaggcatgtgttgtagtgctgttggtcttgcagtcaatgttaatgaattagcaagatatattaaataaga

SEQ ID NO: 897204 - DNA, 292 bp, Homo sapiens
ctctgctagggcagcatggaagggaaatgtgggtttggagtccccacagagagtccctactggggcactacctagtggagctgtgagaagagggacatcattctacagaacccagaattgtagattcactgacagcttgcactgtgagcctggaaaagccacagacactcaacacaagcccatggaaacagccaggagcgaggctgcctaagacsacaggaagcaatcttttgcatcagcatgaccgagatgtaagacattgagtcaaaatatcattttggagcttcaagat

SEQ ID NO: 897205 - DNA, 292 bp, Homo sapiens
ctctgctagggcagcatggaagggaaatgtgggtttggagtccccacagagagtccctactggggcactacctagtggagctgtgagaagagggacatcattctacagaacccagaattgtagattcactgacagcttgcactgtgagcctggaaaagccacagacactcaacacaagcccatggaaacagccaggagcgaggctgcctaagacgacaggaagcaatcttttgcatcagcatgacygagatgtaagacattgagtcaaaatatcattttggagcttcaagat

SEQ ID NO: 897206 - DNA, 558 bp, Homo sapiens
tgatttgagttctttcttcatttttaggtataggtgtttacaactataaattcctctctgagcactatgtgagttgcatctcataaagatgaaattttcaagcaagttatcactgagggcaactagagcttaatccttcttaggaactcttatagactttgtgaaacgcagtacttaggaagtatccaccaactgttattagtcactaattgaggattaatcttgggaggaattaattattgggcttttctggccttctccatagtctggtggtcagaaagggagctttcgagcaaaaaattacagtgctggcaattagaagtcagacctataagcaaagaaatggaaaataataagatgttctgtgcaaaacactgacagcacctgttgcacgactgaatgtgtctttttcttagttgcaaggttgcaaggtgcaatagcttgtcttttttcttggagtacacgasaacatgttcaaatatgtgccaggctattggcttcctaaaaatcttcaaagtatgtagcagcctctcaatctttgtagcttttatctctgac

SEQ ID NO: 897207 - DNA, 654 bp, Homo sapiens
gtgaagacaacaaaggatgaagatctttatgatgatctacttccatttaataaatagtaaatatattttctttaccttacrattttcttaataacagtttcttttctctagcttagtttattgtaagaatatagtacacaatacatatcatagaaaatatgtgttagtcaactgtgtgtgttatcagcagggcctccagacaacagcaggctattagtagttaagtttttggggagtcaaaaattacatgtggatttttgacagtgcagggggttggtgctcttaacctccatgttattcaagggtcaactgtatttatttaaggtctgtgatgcattgcaaatagacacacacacacgcatccctactttgctgagctcaaagttcagtgaaatttcacagaatgttatcttgcccaggtccttcattttatagatgaagaaacagtaggctttctccccagtaccacatgaaaaaccaaggatataatctaaagacaaccttgactttttgctataccaaatatataccaattctatcttacctgtctgagaaatgcatgctatggacatatgaaggtgatgataaatcttggaagattaggaaataggcttccaaagcagataaaggcaggcatatgaaaatgaataatgc

SEQ ID NO: 897208 - DNA, 618 bp, Homo sapiens
ctgtcagtagtaaattaaactcattgtatttttaaaaatattctgacttcaacaaaacccaaraagtgtctttaaagtcactttaaaatgccataccctagatttcccatgctcttgaaaaatgttggtaaaaatgttttaaaattacaatatatgtttaaaaaattagttgatgtccataaaatcttatttgaaataagaaccacattttttaacagtaaataagttgtttcaaagtaagtaagttgtaacagtaaataagttggccaggccgatggctcatgcctgtaatcccagcactttaggaagcagaagggggtggatcactagaggtcaggagttcgagaccagcctagcctacatggcgaaacgctgtttctactaaaaatgcaaaaattagccaggcatggtggctggtgcctataatcccagctactcgggaggctgagacaggagaatcgcttgaacccagaaggaggaggctgcagtgagccaagatcatgccactgcactccagcctgggcaagagagtgagactctaccaaaaaataaaaaataaaaataaataaaaatttttagttcccacagttagtaaccaaacgtctttttcaagtttgc

SEQ ID NO: 897209 - DNA, 619 bp, Homo sapiens
ccaagttactaatgtcacaattggtggggaaaattcaagtgatcccatatcctgattttcagttcagcatatattctttgctctcactgtgtttcaatttaatattttcctggaaataatattcagagatatagaagaactcattggaaagcacttggaaatatgtgacaacaaagaattaagaacaaagaattaaggtatagcatctggtttaaaaagatagtcttgctttgatgactgttgctgcagacctaacatacattgaattattgctttgtacctgacattgttctaagcattttacatgcattcattaatttaatcttcacaatatccctaaaagttgatatattatcattcctttttacaaacgcaaaactggaggcacaaagagtttgagtaacttttctaaggtcatttagtaacaggaagaatcagaatgcacagggctgtgtacctaaccactgtgatacactgtctctcttgattttaagagcttcaaacacaaagrccattctttttctttcacaaatatggaaactgaggcacaaatgggtttgaatgttttatttattgttacccagtcaataaatgcaaatagacatcccaaactaacttt

SEQ ID NO: 897210 - DNA, 627 bp, Homo sapiens
atctcattttatctaagatattctctaacgtagactttcctaaagtggcctattttttctcacataatcatagatttaatttaarttatttgcctttttaaaacatcaatttttttctggatgattgcctctctgtgaaacttgtatattatgtgacctggaacaaactaataaatcccatttttcagcagtttcctcatctgtacaagggagataattagtagtgcctacatatataacatatatatatgtatatatatgtgtgtgtgtatatatatatactatatgattcttttgatgatttgttgtaataatgactgtcaagcacttagcacaatgcctggtacttagtaatccctaaaacactatgtgattatgactgtaattaccataatcacctcttaggattgttatgaggataaaattgtaatatgatgtgatacatagtaggaacttaacaaattatagctactcttttgtaggtttatacctctggaagtgatcacaagcagaaaggaatgtgagatgattgtcactttatgttttttaattttttatttggaataattatagactcagcaggagatgaaaaaatagaacatagaatcgcattagctttgtaggttt

SEQ ID NO: 897211 - DNA, 680 bp, Homo sapiens
aaccattgtgaaagacagtgtggcaatttctcaaggatctagaactagaaataccattttacccagtgattccattactgggtatatacccaaaggattataaatcattctactgtaaagacacacacaagtatgcttattgcagcactattcaaaacagcaaatacttggaaccaatccaaatgtccatcaatgatagagtggataaggaaaatgtggcacatatacaccgtggaatactatgcagccataaaaaggatgagttcatgtcctttgcaggggcatggatgaagctggaaaccatcattctaagcagactatcacaaggacagaaaaccaaacaccacatgttctcactcataggtgggagttaaagaataagagcacatggacacagggcagaaacactacacaccatggcctgtcagggggtagggtgctcggggagagataacattaggagaaatacctaatgtgaatgacttgttgatgggtgcagcaaaccaacatggcacatgtatacctatgtaacaaatctgcatgttgtacacatgtaccctagaayttaaactataataataaaaaaaagagttgagaaatattacaaccaataccatggaaatacaaaacatcattaaagaccactatgattaccttcacatgcataaactagaaaacat

SEQ ID NO: 897212 - DNA, 628 bp, Homo sapiens
tgtacaaataatacattaggaatgcaaatgaatagataaaataatttcaattttttaaaaaagcaaagtttgaggagatatcataaaaaggaagtgtacccattttcaactcttagctattttccattctttgtcttaataacacaagatgagtataggttcttattagctttttccttttattcatgctacatttttttgtcagcctattttttttttctcagcaaagtcctgcaacagagcaggaacatgggaatcacttgaagggattcagtgattttttttctttctttcttcacttaacagttatattgaagttccaacattctctgacttcaaagtcagaacaattactgtgttctcaatcctccaagtgcacagattatctttctgcactgtggtggccactgctgtgggataggggaggggaggcattggcaattcaggactgtcttttctgtcctcctcagtgccactttcagtgatatgaagttaaaaccagatactgtgatcactcagttgattttagattcttatgaaagtgcttttttgtgtggataattgttyaatttggtgttcctacagagaggatgattggtagagacttctatttggccctcatgctcca

SEQ ID NO: 897213 - DNA, 571 bp, Homo sapiens
aagccactgtttgtcactggtaggctccaagcagccattgcatggaggtggagaagacaggctccaagctgccctggggtgcatgtttccttaattttgggtatgttgggaacagttccttggtaaagtggcagcagagtgctgccaggggcccacccctgtggtttcttctccagttgttccaatcctttgagcaacagaaaggggacccaggttgtggtctctgagcaacctgcctccaccccagcccaaagggaaggtgagtggggcagtggcagtagagcctgagtactgcagagacctgagttttctggtcaaactgggtctgcacttgagggtggaggacagcagggaggaaggctccttggttgggatcatcttggtctgaattgtcctcatactggaagtcatcttgagggtgggattctgaggggttaggacaagaggaaaggagtgctcagcagctaccttccagcccrcacctgcatcccccacaggagagccaaatgtggctggttgtggagttccacttaagcaggggagagatgggtgccttctgggagtccaggag

SEQ ID NO: 897214 - DNA, 631 bp, Homo sapiens
aatacctacctcatatggttatattaggatttcatgagttaatacacacaaaactcttaaaacagtgcttggcacatagtaatcaccaggtaaattttactgttatagtatttagggacagaagacctgagtttcagcctgtcactactagttatgtatcctacagcaagtaagttctgcccctgctgactacctgacaaggtgcttgggaggatcatgtaagataataaacatttaaggatatttaaaactgtggatattattattgctattgagttgagccttaaaggatagtaaagatttaacatgaaagctaccatttactaagcacttagccaaatgccaggagccaggctatgtatatatactggaagcagaagaggcagatagtctgccttctagctccttggctcctagaacacaggcgcatgcaatatgtttggccgagttgatgtttctgtccaggattttgaatcttagaggagtagcagaaagacagagatgagtcagaagtctatggatggtgccagtgacatggtagcatcagcagtggcattttagctaygctggccctgagccagttaagggtcaccatagtacctaaccattttatgaactggaaagccagcct

SEQ ID NO: 897215 - DNA, 614 bp, Homo sapiens
gtagctgctggaaaactccactgtacactcgagaaaaaaatgagagcaaaaaagcaaataacatgttaatcttctyaagaatattttgaccttgcagatccctgaaagggtttctgggacatcccccgcccctaccaggaatcagtgagaattactggtcaagacccacagtcatggaaatgaagtactgtgaaaaatgagaagaaactgattagcatcagtttctttgacagtcaccttaacaattacatatgtcaagatcattttatcatgctatttatttttaattttgtgttttgtactgaaaaaaatatcaagttttcagctttcttgaagagattcattattgatattagcattcattttaattgtctctaagcttcttgtttcactcagaacttcacaactctagaaatatatggcatgaattaaaaatatattttatcataaaatcttgtctatttttggttaaaaacgaacaaaacaagaaaataactatgttattgtgcacagaaacccggagtaaataatgataattggcaggcataaaataatgcagattcttccataaagaggttttgtgttcataaagtatcttttgtacattaataata

SEQ ID NO: 897216 - DNA, 524 bp, Homo sapiens
aaagaatattttcatggtcttgttcagtatacatgaaaattcccttcatcttaccccatacccacgtttcttcccccagatcatgttgcacaatgragaatgggtgaaatattatggtttacatgatgtatgtaatacatgtggatgaaaagtggaaaaataactaagcatttcatggatagttacatatctggatttggggactattattaaatcaacaattagtgtctttggcattcctctaccactccttgggcagcatatccctggttccatgatcctcctatccaagtgagaaagttgcctgccccatgctcttattgtaccctgactgccccccactgtgtctccattggcattctcattgccctcccccatcagcatttacttgcctgtcttacttccacaggtcctgctccctggtggtaatttgatgaactaactttttgaaaataattgcattacaaaaactaggctttatgggtattatttttaaagacatgtcataaataatatttaagaaa

SEQ ID NO: 897217 - DNA, 589 bp, Homo sapiens
tgtgttccactattccttacaggcttaattcttcaaacacttctcatgtatatcctttcttacacttctcttgctttatctcacttgttaaaacaacgaccctgaataattcaactgtccaccayaccaccatgttgactcactatacattcatgaatgaaccctaagtgagactgaagttctgataggtaaccatacactcacatactctcctagatgacttatttctctctcctcatattcccaaaatttcctctcccagccccattctcggttgggaaactttgcttcactaagaaaattgaaacaattagaaaagaacttctatagacttccgttgccatctctggccaactatcagcatttataccaagatcctttgctttcatgccagttacatgaaatggattatctatactcctctaaagcaaatatttccacttgtgaccagatcctatccttcatgaccaattaagagcattgttccagcaattctcccttttctctcttacattagcaatgtttcactgtccactggatcaatcatccacattaacatataaatgttatggcattcttcccatcttaa

SEQ ID NO: 897218 - DNA, 594 bp, Homo sapiens
agttggttggggggcagggtgtttagactgataaccacttcagctctaattctggggaggggggcaattaattagtttacaggtaacgcyagtgatatgctggcattggctggtactggcttgcatctttgcatttagtaacatcttgttagatgtgtggtcatagtgggagtatttacaccaaggaatttggcaaacgctattaatcagggctttttttttttctcccagagaataatgtcacccacataccacttgataaatatcagatgtctagtaatattcacagtggagactggctttcatcttactttgactatgtgagaaatcttccttaatggataaagtgaggacatttatttatgtacatttagtattttgcccctgagaacagcagcaaatccaatatttactctaagtgaaagcatccctgtcactataaaccttcaggggagatttgcacaaaattctggcatcatgagtgtaacttgggtaggacaattgctggtggcagctattgttttggtttcctggtaaaccaaagacttcctttagattgttcaagtgcatggttagtggaaactttttcaggca

SEQ ID NO: 897219 - DNA, 601 bp, Homo sapiens
atggtatatattatcgtggacttctttgaaaaatacaatttgcagaagtgtggtagagttttttaaaaagtacgctaaagacattgcaagttaaaaaatataaaacagcaacccctggcggttattttaaagcagagggagtccacatgaaaagcaatgcatcaaagggagaaaatggcaatctggagatgtcaactcttacaaattaactcatttatttgtttgttaataactcgttaaacattcagtgtttgccaagttctaggggatatagaaatgggaaaatcaaggttcttgctcttaagaaactcacctaacatggcaaatagctccatcataattttagtaccattgtttaactttgggagcatgccttgtgctagcacagtaagtaattgttagaagagatggcctctgatcagtggcccttacaatatttgctatcacaatgttttcctgggtgtggcctatatggtcagtgtgtatagtctgcttgaatctggtatgcagatctgccaatcacttgcacytggcaagccccattattgctattcacactatcattgatttaaataaccgtggtgcttaacttctcaaggat

SEQ ID NO: 897220 - DNA, 399 bp, Homo sapiens
ggcctagaattccatttctaacgtggtttaacccagcacttcccaaactcttttgacagggaacccttctcttccccaaggagcttcttacagaacaggtgttctcaggaacacattcgaggagccccctgctaatgagagccagagagcccctgggttcgcacactccaatgctggccatctgaatccggagctgtgggtgggaggggaccctgagccttgggcactagagggatggcatagaggagcttctagaaggactccatactgtgtagtactctaggttctagcacctgtggttcttgagcacttgaaatgtggcttgagkagctgaggggttttttttgtttaattttttaaaacagggtcttgctctgttgcccaggctggagtgcagtg

SEQ ID NO: 897221 - DNA, 399 bp, Homo sapiens
ggcctagaattccatttctaacgtggtttaacccagcacttcccaaactcttttgacagggaacccttctcttccccaaggagcttcttacagaacaggtgttctcaggaacacattcgaggagccccctgctaatgagagccagagagcccctgggttcgcacactccaatgctggccatctgaatccggagctgtgggtgggaggggaccctgagccttgggcactagagggatggcatagaggagcttctagaaggactccatactgtgtagtactctaggttctagcacctgtggttcttgagcacttgaaatgtggcttgaggwgctgaggggttttttttgtttaattttttaaaacagggtcttgctctgttgcccaggctggagtgcagtg

SEQ ID NO: 897222 - DNA, 244 bp, Homo sapiens
tgcaaatcttgtgacctctggaataatggctggtaatcatttaactacatctatatcttagcagaattagggctcctctcatcctcctaacctggtggccttttattagttttacaaaggcagtttagttttgggacgggctactaccatttaaactataaagtaaatttctcccaaagttagctkggcccatgctgaggaatgaccaagggaaatttggagattaaaggcaagatggagtttg

SEQ ID NO: 897223 - DNA, 581 bp, Homo sapiens
ccaagcttagggctcaagggttggggagggaacattgtttttaaacagtcgaatgcatgacaaagtaaaatcacaacagtttgacagcacaattttaataagttttgcttttttctggcaccgatattcatcaagttatggcttgaagcaatagagggaatgataaggaaagaaacaagtgttgagacataagtagtcactgtggtgggcgccttgaatgttattttgttgtgagaattgttcacgccgttgatattcccaaatgctttaccagcttaaattaaaaaatgattatttaatatattcagctcttctgcctacccctgagagaacaaacattacggtcttccacgtcgctgaaggtggagcaggagtggattcataactccacaaagccctcctcacccacccctgtctcctgcaagttggggtcatgttccaccaccttgcaggctgcagctgaaagccatggagaactcagcttttctggggtgcttcagaagatgtgcagggatgtgatgctkgtggagggagaggggcggcagctgctggggcctgcatagaatgcttggacattctag

SEQ ID NO: 897224 - DNA, 601 bp, Homo sapiens
ggggaggattaaaatggaggtcctaaatatctttggtgagagcaaatctgtgtacacagctaaaaatgagaagagttcatgtggaaatttaaaacattatttgaattttatgtgttttaccttcttccacctggatatatttataattctagctccatgtatttttaaattttcatccaaaacaattaaatagtcccttctgtcttcaaatatttttttcaggcctctcttggtataaaggtatgattagcaagttaaaactgggaagattcaccttgacccaacctgcttcatagtttaatcagaaaatggtaggcagacaattatttggggcttttgttgattatggttgatttagcaaacagcatggaagagtttcagagcacaggctagaaatatgaaaaagtcctgcagctagaagaagcatggagttgccaattccttcagcatcatatagatatgtttacctggctgagaatgtaattgatatatcatggattacactgcaaaagagtgacctcactctctgccattctttttatatgtgggttttttatgtgytaataaaacagtcttgcaaactggagcagaaatccaagta

SEQ ID NO: 897225 - DNA, 630 bp, Homo sapiens
gggagtggcttcacttagctgaatttttatgaatgattacttctttaagctggatttggtgctttatattatagcctaccatgatgctgcccaaaaatgtrtcataaggttaaaaatttcctagatagctagttgtctgtatatctttactacagtcagttgaggaaccagagaaattatatgagaaagaataaaccatggttaacattttttatagctaaatttagttaccagcaagcctggtaataattttgtttgggacacaaactgacatattcatgtagtgtagttataagtaaggttgcttctatcaagcagaatctaactgtatttttactgactgattgtataaagtatgcttactgtctgaattccaagtgttaacctggtatttggctatggaagtaaaaattgcatagacaagacaaaggactactaataagagtgataatttgagacactttgaagtaattaagcacgggagcattatactgaaaacaaataaaccagtgaaagaataatagaaaaataaagtttatttatgttacattttaatttttgttagacttagatttcacttttcttgttactttactttcaactcgcaaatcattttgtaaaacaaataaa

SEQ ID NO: 897226 - DNA, 630 bp, Homo sapiens
gggagtggcttcacttagctgaatttttatgaatgattacttctttaagctggatttggtgctttatattatagcctaccatgatgctgcccaaaaatgtatcataaggttaaaaatttcctagatagctagttgtctgtatatctttactacagtcagttgaggaaccagagaaattatatgagaaagaataaaccatggttaacattttttatagctaaatttagttaccagcaagcctggtaataattttgtttgggacacaaactgacatattcatgtagtgtagttataagtaaggttgcttctatcaagcagaatctaactgtatttttactgactgattgtataaagtatgcttactgtctgaattccaagtgttaacctggtatttggctatggaagtaaaaattgcatagacaagacaaaggactactaataagagtgataatttgagacactttgaagtaattaagcacgggagcattatactgaaaacaaataaaccagtgaaagaataatagaaaaataaagtttatttatgttacattttaatttttgttagacttagatttcacttttcttgttactttactttcaactcrcaaatcattttgtaaaacaaataaa

SEQ ID NO: 897227 - DNA, 631 bp, Homo sapiens
cattaagtcaaatgtgcatgtgaaagttgtacattgtgcccaaacttttccaaagcatagggaggagctgggaaagaaacagtggaaattcaaatactttagaaggcaagaaagaaataacaagactcaaagacaatgtgatgataataaaaaggtaattttaaaaacaatttcatttatagcagaaatcagaatgtaaagtgcctaggattcgatctagcaggaaatgtgcaagacctttaaggagaaaattctaaacatttttgaaaatctttttttaagcagctaataaatggtaagatataacatgttcatgtatgggagaactgacaatgtcataaaaatgagttctgcccatcttggtctgtaagttgagtgtatttccagtgaagcctaataggaattttttaacatttgacaacttgattctaattttttttgaggcttgaagagttatgagaattttgaagaataatgaagatttacttttatcacatatcaagacttactagaaagcaatagtaattgaaacaatgttatatattcatgyaaaaacagaccaaggaaacaatagaacacaggaaggaagagcctgctctatgacaagtgatgatacagatcagaggggagt

SEQ ID NO: 897228 - DNA, 587 bp, Homo sapiens
cccagccacttaggaggctgaggtgggatggtcacttgtgccggggaggtcaaggctgcagtgagctgtgatagtgccactgcactcccgcttgggcaacagaatgagaccctrtctcaaaaaaataaaatgaataatagatttacatagatcgacatgaataacactcagaaatataacatctcgtcttcaaaaaaaaaaacctagtaagctgtactgaattaatctatcctaccatttaaaatttttgttgagggtaaaataatattaaatattccctttatagcaatcctcttagtgctttaagtctgcttgttgggtccttaattgtttcaattttatacaaggtcgtttcctttcctgctttccagcatttcattaagttcttgttcaggtctccagctagatcagtctcattggttctagcaggtgtgggtcttggtgggttggtgcaagtccattcactatttcaactcttcagaaagtcccggaaccagtcagttttgcagttcattcctaatactaagattgtttctgcttcacttatctttttaacttacctcagtgtaccaagaaaaacagtcatc

SEQ ID NO: 897229 - DNA, 588 bp, Homo sapiens
attatgatttgaaataatttgagctatgagttctttaactgcaaaatgtactgtatgctattaatcagaagtaagctttccttccccatcacctccatttttgcgattaagagcagagcagaaggagttaggggattccacttgggataagtactaggtggttttagcaagcacagccacctcctgaataccaactaagctgcctgtatgtctggaaaagtttggaggacaaaagttgccatcagatgcagataagctggctcagtttcagtgttattttgtatttgtttccctttccactttatagacataaactacatgaagactctcttaggttttaaaatattccaggaaactaacatcatcgcctcttcccactccccacttctttgcccatacttccccttctggtcctatgtcaaggctgaagaaaatagccagatgttgagacttgcaacaaattctctttgagttaattatgrtcagagcccagtattaggagctgggatgagagatttgcccaggagatcaggagttattcacaaagcacttttgcctggatggtctggtttgattatcactagggaa

SEQ ID NO: 897230 - DNA, 632 bp, Homo sapiens
ttgggtttatggcccaccctgatccagtatgtcctcatcttaactaatgacatctgcagataccttatttccaaataaggtcacattctgaaattcctggtggacatgcattttgcagggggtactacttaacccactaagggagtaagcactttctagaccacattttgagcagaatttagatggttctattctctgccatcaccactgcatgggtgtagaagggggcgggaagggtcccctggaaggtgagtggtggtgttttttgtttggggagctgcactacctccagctcaatcaaaaagagcagatgactcaccggatggttttgtgctgaacaaattaaacccgtcccatcacagcagagcagttcagccaactccatgctgaacttgtgcccatatcatacatttcataatcctaattgtggcttgcatttcccttttgccttccaaaccaaaggctcatcataacagatctgcaagccctgggagttgggtttgtttgcytaggtatttggttttctctcttttttcccctaatgaataattttctaatgaaagcaaagtagggtcgcagtatgaggtagatgcatgcacgaaggagaagaggccagaataaacagactttgc

SEQ ID NO: 897231 - DNA, 641 bp, Homo sapiens
tttagcgaaaaaaggtatttttttaaaaagagtctaacctatgaagtattcttgccccctcaaattgaacctcaatctagtcaggttacagatctaaatagaaatgagggatataagaacagctaaacattgccatatgagtatgatggccaaatccataaggtaggacatcctgcagcataaatgacctcgttttaaaaaaaaaaaatggcaaggcgggaaaaagcagacgatttgttaaagattaaaagagacttaaaacgcacatcaatcagatacaatgtgagagtcttggttggaatctgattctaacaaaccaaatataaaaaggcatttttcagacaattaggaaaaattgagccaggcataagatagtaattattaattcctgttaattttgtggggcatggtactttatctgttagggacacatactgaagtattaaagacaaactgacaagatgtctagggcttgctctaagatactgaggcaaaaatgcggggagtggttggggaaacagtattaagttgatggttcttgaagctcagtgatgtgtacacgagggttctttatactatttcctatactcrtgagtcttgaagttttcatgataaagttttttaagaaagtccactggaaa

SEQ ID NO: 897232 - DNA, 577 bp, Homo sapiens
atcttaaatgttgggttagaggtaaatatcagaaaaaagcttattatttcatttaggaagccccctcaaagacctcacagttgaaagtattaaaaattatgcacaatttaattcacattacarttgcccataataactacatattttttcactgggtgaaaattaggtgcaagaagaacttttaaattgaacatttagctatgcaggttaagtcccagcaaatttcagctggaactgcatgactgagctgagtttaacctcatgatttgaaatgaaagaaactgggaattatatttgcaagatttaagaatagcatataagatatttgcccagtgtaattttcttttattcctctgttttgcaggattatgagaaaaagcaataaaggaagacatcaattctcaagcgaataatttcttctatagagcctgctaaacaacaccaacggcaagtgatgaggagtaaatttacttctttcttctcaaaacaacaaaaatatcttcattagaaacaaggctcacgttttcatacaaatctttatattcaatatgctgcattttcaggagaaacaaataga

SEQ ID NO: 897233 - DNA, 622 bp, Homo sapiens
tttactatagacaccttacaattacatagttcctgaattctgtttcttggtagctcaaattctttcataaattccacaattttttgccgttgttttttgtcgtttgccccatttcactttctaatctctactttatactgctcctcagcctatctatggatcccattgtttataccacctattaaatattataatcatctctcatattttaatagtgctttatggtaacaatactttttgtgtattctattatttgagttatataaaagttagttactaaagttacagactatgaaataacgataataattaataattgcagagtttagcccctggcactttgcacttacatattaatgcaatcttcccaacaccctggaagtcagctactactagctaacctcttttcacatacgaggtcattaagcaagagaaggctaagtctggggtttgaacctaagctgtctggcttcagcctaattctgcaayactgtgctaatgcctagcaacatacgcttaaagaggatgggggcttaagctaatctaaaagctgatcagagcagagtcccggactctaactcaaatcttcaccaaactcagaatcaacaccaaactacttgat

SEQ ID NO: 897234 - DNA, 613 bp, Homo sapiens
acctgaattttgattcccactaattcctccccattttggtttacccttccccaactgaattaagaatgggtgttgaggaaacattaagaaaatgtgaaaaaagtaacttgcacctggaaatacatagttcatagcattcatcatgtaaagaaacagaaatcactacttttctcaaggcctgtcatattcaaagaaatgtttttgggtaatattccatataaactagtattatggttctgctgcaatcaccacccagtgggttattcaagtcctcttcccctccttcagttaggagtcccagactgtggacagtgtggaccccagagttcaaaagatgtgagtcagagtcccagggaagtatttgagtttgtcagtggttctgctaatgaaggtaatggacggtagtatttaaggacttttccagaggcagcctatcatcatccaaaagaactttctgtgataatggagatgctctacatctgcaygatcctatgtgacagccactggctacatgtgacaactgagcactgaacagtatatagtgcaatggagaaactataaatttttaattttatttacatttaattcgtttaaatttaaaaataaagagcca

SEQ ID NO: 897235 - DNA, 613 bp, Homo sapiens
acctgaattttgattcccactaattcctccccattttggtttacccttccccaactgaattaagaatgggtgttgaggaaacattaagaaaatgtgaaaaaagtaacttgcacctggaaatacatagttcatagcattcatcatgtaaagaaacagaaatcactacttttctcaaggcctgtcatattcaaagaaatgtttttgggtaatattccatataaactagtattatggttctgctgcaatcaccacccagtgggttattcaagtcctcttcccctccttcagttaggagtcccagactgtggacagtgtggaccccagagttcaaaagatgtgagtcagagtcccagggaagtatttgagtttgtcagtggttctgctaatgaaggtaatggacggtagtatttaaggacttttccagaggcagcctatcatcatccaaaagaactttctgtgataatggagatgctctacatctgcatgatcctatgtgacagccactggctacatgtgacaactgagcactgaacagtayatagtgcaatggagaaactataaatttttaattttatttacatttaattcgtttaaatttaaaaataaagagcca

SEQ ID NO: 897236 - DNA, 613 bp, Homo sapiens
acctgaattttgattcccactaattcctccccattttggtttacccttccccaactgaattaagaatgggtgttgaggaaacattaagaaaatgtgaaaaaagtaacttgcacctggaaatacatagttcatagcattcatcatgtaaagaaacagaaatcactacttttctcaaggcctgtcatattcaaagaaatgtttttgggtaatattccatataaactagtattatggttctgctgcaatcaccacccagtgggttattcaagtcctcttcccctccttcagttaggagtcccagactgtggacagtgtggaccccagagttcaaaagatgtgagtcagagtcccagggaagtatttgagtttgtcagtggttctgctaatgaaggtaatggacggtagtatttaaggacttttccagaggcagcctatcatcatccaaaagaactttctgtgataatggagatgctctacatctgcatgatcctatgtgacagccactggctacatgtgacaactgagcactgaacagtatatagtgcaatggagaaactataaatttttaattttatttacatttaattcrtttaaatttaaaaataaagagcca

SEQ ID NO: 897237 - DNA, 639 bp, Homo sapiens
tcatccttctcagtctaaaagaactacatatttagaacttagcggccaattatgagatataatttcatgaacaatctataaaaatgtttgcatttcttagaagtaaygaaaagaaaaatatcacattggggttacattataatttggtaaaaactgtatggaattgaagaattataaattgtattcatgtttaaatatttggttaatcagtgagccagaaagctaaagtctgctgttctcttatcttaccaagcatgacattctataatagagacaaacccacataaaattgtttaaatgctactttctatgatgtagtattcacaaatagcagatttggagactctctacattcctgtgtaaggaggcgctacccagcattgttctagtgctcaataaatatttgattaatgtcaaatagatgaagttcagaagaaattactgacatacttaattatatacttggctataaagactattaaaaaaccacacacacacaaattattcactatatattcaaggtagttttatttacaaagaaagaaaatggacaaccaccttaacctttcatattagaatatataagtaaagacaaattaattcaataaaatatcatgtagctattaaaatatgtattga

SEQ ID NO: 897238 - DNA, 647 bp, Homo sapiens
gaatataacaaagtatttttagggaagaataatacactgggacagacaaaggtatctactggcmaagtctgataatacagctcagcttctagattttgataaacccttgataaagaaggtgggattagggaacaaaggcatcccacatattgaaaaagtgcttctggtacagtatatcatggcttacagctagaaaggacctagaatcaaaaacccactttagagataagaaagctatgacccaaaacctttttttctaccaaggcatcctctttagtgaagtgctacaagtcttcttgcatatgccaatgtccactgtgataaatgactggctatcttaactgtttctacctcaagttaacaaccatgttaacaatgaggctttgtacctccctgatacagttccagtgtttttttcctgcaaaacaataataaaatagtgtttggtttaccaaaacatgctttacaactaattgtcctagaataatttattccccccaaaatccagacacataaatgccatacagtgagataaacatattaaatggagaaaggtaacatagtaccactcaagattccccatcttatgatttggggtattcattcatggaaaaaagacactgatatcaaagagatgtagagtcttt

SEQ ID NO: 897239 - DNA, 647 bp, Homo sapiens
gaatataacaaagtatttttagggaagaataatacactgggacagacaaaggtatctactggcaaagtctgataatacagctcagcttctagatttygataaacccttgataaagaaggtgggattagggaacaaaggcatcccacatattgaaaaagtgcttctggtacagtatatcatggcttacagctagaaaggacctagaatcaaaaacccactttagagataagaaagctatgacccaaaacctttttttctaccaaggcatcctctttagtgaagtgctacaagtcttcttgcatatgccaatgtccactgtgataaatgactggctatcttaactgtttctacctcaagttaacaaccatgttaacaatgaggctttgtacctccctgatacagttccagtgtttttttcctgcaaaacaataataaaatagtgtttggtttaccaaaacatgctttacaactaattgtcctagaataatttattccccccaaaatccagacacataaatgccatacagtgagataaacatattaaatggagaaaggtaacatagtaccactcaagattccccatcttatgatttggggtattcattcatggaaaaaagacactgatatcaaagagatgtagagtcttt

SEQ ID NO: 897240 - DNA, 567 bp, Homo sapiens
tctcaaattgtcctgactttcagggtacacttcgtatcactgtcccagtctttraagagcagttcccagtggtttttatcaaggagtctctatgtagcttagagctacatagagtccttcgccaatagtggcctatgctcttgctccatctaggagtcagtacagtttgctgagattttccttctattcttgttagatttctttgggtccaagttgccatttctgtccccaaataaacttgaaaacgtttagccacttaaaaaaacaactgctaatatgaattaaaccctaagtacaacatcttttcccttttatgtgttggtctgttcttcaatttcatttttccttttatatctatttgacttgttctctatcaactttttctccaaaaaagctttctccttcccaattacttagtttattgtctcattcttccattgctcctgtcctaacactgaagcatgctctaaaaacctcttcagacattccttgatgtcctgaatgaacctgattcctagagacagactgttgtaggcacagtctaattgtctagactgcctctttaat

SEQ ID NO: 897241 - DNA, 666 bp, Homo sapiens
ttgtctacagcaatatggctgtctctgttaattggttttatctgtgcagcaggcaagatgaacctgttacactcactcctactagtgctcacctgcttagagatcaagcagcttcttttcctgtgccaggtgtcccaagggctaaaggacctcagagagcagaaactttgagctatgtgaccatgactgacttgccacacaaagctcccctactaccccaggcttatcctccctatctttaaaataggcccagttctagtccctgctctgtggctttaggcaaggtgctttctgtgcttcagtttactcagctgctgaagggcatcagagcatgccaccccaaaatatgacactttggcataagaattattttgagctgaaggcaattgagaaaaaaacagcagatgcagaaaagttctctaccctctactttctatataaaggcagagcataaaaaggtgtccgggctcccttctgtcataccaggaaaaggagatgactcttatcactggagattgcaccagcttgaatctgcataaacaaaccttactgaaataaccattatcttctctttatttcccccttttctaggtatttatcttcccacaatttaccacccccagaagcataaamccttttcctttgtcttgtcactttgtcttgtca

SEQ ID NO: 897242 - DNA, 642 bp, Homo sapiens
gcagcatggctgctcatgtgcccacctcagcaagggacttggagggaacaacagagctaagaggaggcatgggattggagtagcttgtttggaawggtgaagttctgtgtgtggattggatctgggagtgggcagctgagctgccacccttgtgttcatatctcacctgggagagcagcccattaaccaagaaaactctaacccggctgcacgatgcttgtgaagatgttgccctatacgaggctgcctggccgaggggtcgagtaggggctgagagttagcccacgctccgctcaccaaaccatgcaccttggttccgaactgactctatccaaagggaggagggtgtgtaataaatgttcgcagggtactgtatgggtcaactacagtctcagcaacatgggctgtatgttttcagtggaaggagccaggcaggatggaaaagactagaccagagtcagagattccacaccaggaaaggaagttgcagtaggaaggtaccataggaccctccaataaccaatgcatgtaactccacaagacagtcagcacgcagatccctgctacacagagcgcctggcaattgatgttagccagagaagcagtgacagcaaacaagaaaggtttacagcctcgcccagc

SEQ ID NO: 897243 - DNA, 689 bp, Homo sapiens
ggtggtcaagagaagcggtctcctcctctctatataaagttgctgcttctacaggagcgttcttcgggaagactcgcaggggccttcacacmggtcacctacctgggggctctggatgctacttgatctcttccaactacccccgtctcatctgttctccccatagtttttattgccagacagaaaggctcaagccagctaccctcccagcgaccgcttggagcatagaaaatgcagacatccccccagccagaccaagggcggactgcaggctgcccctccactgcccgccgtcgtctccacccctctgcccctgtttgggagggggcaggcaggtcataagtctactgcctaagcaagcagccagtcaaaagtagcatgcagggcgcctgtcaaaaccccatactctagaagtggttttctaggaatgcctcttacttggcttcctgggggagcagcagctgcagcagaccccctccaaggcaaaccctcataactgtacatgttggaagggcacagccaagacagggagggctgctgtggctctgccgggtcttagcaaaccacaagcaggtgtctggctcttgccatccatggttctctttgcttagcatctctgctaaagtatttagcctctctgtacacctccagatgtggtccccagttgccaattctgagtgacagagaga

SEQ ID NO: 897244 - DNA, 570 bp, Homo sapiens
ttccaaaatcaaacttcagttttaaaattttctttcctgatgcctagctttttgaattgatcagagggcccttgaaaacatctggaaaagaagtaaacgagattatttgacatgtttaggtatatgggattgccaaaatgatgttcaatcttctttaggttatgtttttgtaaataatactaatatatattccaaaattgtatgggatttctaaaattctaatgtgtaagtatatgctatcaattataattatggttattatgttaagttactgtaaaccacagaaataaccaaatttccttgtataaagctactaacccaagtagaacaaaaaaaaattaaatgccaagaaaagtcagattctcatgttaaaccagctgatactgaaattgtttagatatacaatttgaataaacttcacagtctaagtcaaattacctttgataactcatcagttgtcagtgctatgcacctaatttagaaaaacwactggtattcgagaggatatacatctaatgttaataagcatggactcatggagaaccaggatgaccaccttgtccttcttga

SEQ ID NO: 897245 - DNA, 576 bp, Homo sapiens
tctgccctggagcgacagcaaggactaattatcagaggagacactctgtgttactcctaggtgttgaggaagccctaatagaaaggaattttggaaaagagggtgtcctgtttacagaagtcatttaggggccctggtccattcttaagggcatcgtctgtacacaatgttctccctatctttctaacatttgggtccactaaggactaacttgcctttaactcgaggctgtagataagttggttataatgggagtagtcttcaatttttgagtccagaaaaagacagcatacaagtttctgctatcattagtgctcaatctgaatgaattacccacactggagggatattaatgctttaagtcatcatcctttcggcttaaaaaaaaaaaatactatctaattgatccctcactgagatcaatctctgagacagagaagcagaaagaactctgraccaggattaacagctttctgtccaggcaaaccatttgtgtaagagctaccttaatgtggagaggttaactctttacgaaatgcattgtcctcatctgtaaaacgaggtttattaataata

SEQ ID NO: 897246 - DNA, 578 bp, Homo sapiens
taactcatggtgttctctttctcctttcacatttcctgtaaactcatcatgaattgccttgtttattgttttgatttctcattcaacaacaccrgaatactctgtgtttagggtaaccttagacttcagttttcctgaggagtttcagtttacacgtcttgcaccggtacaattaacagtgcccctttcaggttaaaaagtgtctcagtgtagttcataaattatatagtcaccccatgtgtgcagcaatcagagctttttcaatgcaaagttgattatgatgggcataaatgaatcataataaaaagttctagtatgatcccatctgactgggcttcttgtgatggcccatttcaacaccatgggtgtcattagtggcttcacaatggttcttcttgtaaattccctcatgacctagagttttgatttatgccatcctagcccactttaagctctgactcatgctgggattgccctaaacagggcagggcagactaatggaatgcattgcattgtcctaacatttcttaacctgcccaaggttgaacatgcttgtttgtttttcttttgctctccaa

SEQ ID NO: 897247 - DNA, 578 bp, Homo sapiens
taactcatggtgttctctttctcctttcacatttcctgtaaactcatcatgaattgccttgtttattgttttgatttctcattcaacaacaccagaatactctgtgtttagggtaaccttagacttcagttttcctgaggagtttcagtttacacgtcttgcaccggtacaattaacagtgcccctttcaggttaaaaagtgtctcagtgtagttcataaattatatagtcaccccatgtgtgcagcaatcagagctttttcaatgcaaagttgattatgatgggcataaatgaatcataataaaaagttctagtatgatcccatctgactgggcttcttgtgatggcccatttcaacaccatgggtgtcattagtggcttcacaatggttcttcttgtaaattccctcatgacctagagttttgatttatgccatcctagcccactttaagctctgactcatgctgggattgccctaaacagggcagggcagactaatggaatgcrttgcattgtcctaacatttcttaacctgcccaaggttgaacatgcttgtttgtttttcttttgctctccaa

SEQ ID NO: 897248 - DNA, 598 bp, Homo sapiens
gctgtccttttcatgtagccacgtccccatgccaactagagttcctttggtactaactctgaaaccactgatgggaagtggagattttcctggaaaccctgaaatgggtcatagyacttcattaattaaatcatttccagggtcactctaagcccatgttttgtaccctattccatttctcctccaaaattatgcccaggcatcttgtccaaaatagtttataagtggctctatgatgagatcacgtacaaaggttaagtgggggtgttaactagggacacaatatccacagtgctgcaaaaaggtatttctatgtcctcttactgtggaatactgatgcctaggacacctgcccccaagagtcttctcctttatttataattatatgatccaaagccaacttgagagcatattatgaggactatctcaaactaatgggcatgacatggtaatccaagcttgacccctttggtttcctccttatcaagcagagcacgatttggggtcagcctagctaggtctatttaccttgaattgactacttaaagctagaccctcacagcaagctcaagggtcttgcagtgtaaaaatatcaatt

SEQ ID NO: 897249 - DNA, 514 bp, Homo sapiens
attttttttaacgattagagagaaaaacagtatataaaagataaacaaagagtcaataaatgaataattgaaaaccccaaagaagaaaaacaaaamcaaaacaatggaacagaacaaaagaggttgcagtgagccgccgagattgtgctactgcactccagcctgggcaacagagcaagactccatccccccacaaaaaaaaaaaaaggaaaaaaaaaaaggctagagatgaatgcagactctgcatctgcagatttcctttattacaacagaattccaccaatagccttggcctatttatttattttcccaacagccctggcctttaacagggccagctcctcaaaaatggctggaaacattggtagtcttgacagaaagaaacacagactttctagatagttaaatgatttttaacatgccaagctctcaaatccagagtacaaaagtgtttccaaatgatgagaaataaatcagacagtcacttatgcaaattgtcattgacaaattttat

SEQ ID NO: 897250 - DNA, 514 bp, Homo sapiens
attttttttaacgattagagagaaaaacagtatataaaagataaacaaagagtcaataaatgaataattgaaaaccccaaagaagaaaaacaaaaacaaamcaatggaacagaacaaaagaggttgcagtgagccgccgagattgtgctactgcactccagcctgggcaacagagcaagactccatccccccacaaaaaaaaaaaaaggaaaaaaaaaaaggctagagatgaatgcagactctgcatctgcagatttcctttattacaacagaattccaccaatagccttggcctatttatttattttcccaacagccctggcctttaacagggccagctcctcaaaaatggctggaaacattggtagtcttgacagaaagaaacacagactttctagatagttaaatgatttttaacatgccaagctctcaaatccagagtacaaaagtgtttccaaatgatgagaaataaatcagacagtcacttatgcaaattgtcattgacaaattttat

SEQ ID NO: 897251 - DNA, 602 bp, Homo sapiens
atttggttgatgaagttctatcaggtcatattgaacttaacaaaaataaatactttcctttttttttttttttttttgctctgkaagaataattaactatatcatgagagttaacaaattgtatacccagtgggaaccatttaaaaaataaccttttcctttttaaatgaaacttgttaggatctacaatacaggttcaaaaaattggtaaagctaaaagtctaacattaatttttaactttttgttcaaattcaactatttatattaaaaatatgccaggcttaagtattaaaatgttgcctccctttagaatttcctaacataactttaaaatattttttgagacaattcctacagtttatacaatatttatacgttaaggcaagaatattaaaaagtgaatcacttttatttaaccagaagtcaagcctctggaagatacacacacacacacacacacacacacacacacacacacacacaccatttttttaagtgtaaagaactaattttaccttctccagtacattaactatcaccagttgccagtacttgtgatttggtttccaaatgacatttcaataattagcaattttatgac

SEQ ID NO: 897252 - DNA, 602 bp, Homo sapiens
atttggttgatgaagttctatcaggtcatattgaacttaacaaaaataaatactttcctttttttttttttttttttgctctgtaagaataattaactatwtcatgagagttaacaaattgtatacccagtgggaaccatttaaaaaataaccttttcctttttaaatgaaacttgttaggatctacaatacaggttcaaaaaattggtaaagctaaaagtctaacattaatttttaactttttgttcaaattcaactatttatattaaaaatatgccaggcttaagtattaaaatgttgcctccctttagaatttcctaacataactttaaaatattttttgagacaattcctacagtttatacaatatttatacgttaaggcaagaatattaaaaagtgaatcacttttatttaaccagaagtcaagcctctggaagatacacacacacacacacacacacacacacacacacacacacacaccatttttttaagtgtaaagaactaattttaccttctccagtacattaactatcaccagttgccagtacttgtgatttggtttccaaatgacatttcaataattagcaattttatgac

SEQ ID NO: 897253 - DNA, 585 bp, Homo sapiens
ggcgactcaccttcttcacccgcataggccagaatggatcgtgctcgtatctgtttcccttctgtcgttttccctgagcaggtgtgtgagcaggaggaccacgtagaccatgtgctgagcacacagtctttcgggcatggggcatcacaggccacagggatggggaagatggcatctctgcacagctgtctgtcaacttcttctcctggggaaaacatgaccaccaacagctattattgttaaattaatgtaaaatgagcaatttaaaccagatgggcacccagataagttacattatctttcttttgctcttacttaaaaaaacgtagccaaaagagggattgcctactatagccagatgttaatagaacaccaggaacaagcatatatacacacatatacactcatgaccctaaatgaggcttctttcattatcagggtatatcaagcacattgctgagacgattcttatgccacagacacctgcccattaagtactaatttttatacttgtactcttaagttgtaataaggagyatcaacaaagcatgtcccctctttcttttttggagatgagctatgatt

SEQ ID NO: 897254 - DNA, 634 bp, Homo sapiens
tgagaaccaaatcagaaagggaatcccattcacaattgccacacacacacaaaatacctaggaatacagccaactagaatggtggaagatctctaaaataattacaaaacactgctcaatgaaatcagggaagacacaaacaaatggaaaaacatgccatgctgatggatagaaagaatcagtatcattaaaatggctatactgcccaaagcaatttacagattcaatgttattcctatcaatccatcaataacattcttgacattcttcattcttctagaaaaaattattttaaaatttatatgaaaccaaaagagagtccaaatagccaaggagatcataagcaaaaagaagaaagctgagggcatcacattcccctcttcaaactatactacaaggcttcagtgaccaaaacagcatggtactgattccaaaacaggcacatagaccaatggaacagaatagagagcccagaaataaggttgcacatctacgaccayctgatctttgacaaggctgacaaaaacaagcaatggggaaaagacttcctgttcaataaatggtgctgcaataactggctagccatatgcagaagattgaagctggacccctttcttatgccatatacaaaaat

SEQ ID NO: 897255 - DNA, 600 bp, Homo sapiens
caaaggcaaagtttctgcttttgagacacatctttctgcctcttttgtctcctctaattgattttgttattttaattgaaaacactggttttaaagaatggaattctgtagggccctggttagagaatagccacaataaaaagtatacatgaattatcttatttcttctgagtggcactgtttggctgtggtgcctctagaccattctctaccacttactccagtttgcacttgagggcagatttttctcaacggtactagtaggtgcagtaatggagctggctgatgctattggaatggtgcttgaacaggaggaacttttttattagccatatctgtagttctgatcttccaggaagttagctagttataataattcccttggcttaaaaagatcatattaggtaggaaatcttcctattgaaaaagatgttattctgtaggactaatagctaaataataagctaatatgagtaatgacactactttggagagtgtcagtaataccaagtttttcaagtggccactctctgggtccccttccattgtgtgcaartgccaattaacagtttacctgtactagctacccactcactagca

SEQ ID NO: 897256 - DNA, 641 bp, Homo sapiens
gatgtatgtgtggtagtaaatggatgtcttcagataaacccagcagctggactaacaggataatgtttatccttgaagataatttcatttatccatctgtctatcatctgtgtatctatatattgctataccatattgtatattacagattcccattctggtaaaaatttgaccatattaatcatgttactttgtaatctgggattttcatttaaaaacatatcatggatgtctttccacgttagccatttaaagatttcctcatccttcacaacagtagcatattctattgtgtgggtataccccaatttatttactcaatcctatttttaaagacagttaagttatttccatttgaaaaatcataaacagcattttgtacaggtatccagtaatcttcttgggatagtttttttagaaataaattattgggccaaagtattcatacttataattgtcatgcagtaagccctttaaaaaagctattccaattcatgttctcactaacagtctcttttccacactcctgttagccttcagtattactggatcagtattactgatccaaaycatttgtcagtttgataggtcaaaaaaattccatttttaaaaaaatttgctttcctttaaatttcagcaag

SEQ ID NO: 897257 - DNA, 649 bp, Homo sapiens
aaagccggcagtcacaggcctcacccagctcctatgccaaccaaagggctggtcgcattctcaccgtgcccctcccacagcagcaccaagtctgtttgcaggaggagggtgagatgggcttgaaaacttgcccaaagctatctgcctcccagctgcaaaagaaaagggctttacttctttccttgcctatgaagtctgcacgcccaatttgcgccctgccctgagttctggccaggaggcttctcaccccactgaagttgttaaaaagctcagctagagaatttcttctccctgtggagttttaccctctgctcctctcgccaccctcctgatggttccctgtaatgccaggcaagaatgggctgcttagagacccagggtctttctgttgcttcctctacccctgtattttgctcagctctctaactttactcagcttcaggtaaagtcagaagcttctcccacaaacagaccttcaacctctccagtgggggtgtgtgtttgggagagaagggtctccctttttcatttccrcagttagagcactcacagtatttggggtgtctcccaggtcctgcaggagcagtccacttccttcagagggtctgtgggtcctcttgggattgctagtttgttcttgcagttgatc

SEQ ID NO: 897258 - DNA, 588 bp, Homo sapiens
cagtggttgaatctgattcactgcattatctttggagcctgcacagggtaagggtttaaggagctttgctgggtgaagtcatgggtggcagtgactgcctctaatgatctcgccttgaaaagtgtgtgasaggctcagtcagagcattctgtctttcttcatgtctctaatttagtcctttcatgatgtgcaaatgaatattaactcctaaaccccacagatagcctgaagagtgcagagcaatagccttaaagtaaatggcaaggtgcaagtttccatggtggctttatcgttctctaattggactcacctggctgttggatgacagtacttcctgctccactgggccagctccttgctggttcaggtgcatccctcccagctcagtggacccccttgagaggcaggacatggtatgtctggagggtgacaatagctttagcctttgttctgtacttggttcattgataataggatgccccgtcttctagattttaaggaagctttgatctggggatccaagaagattggaagcagctactagtatgccctgttttaggtattccattataaaaggcttctgtagac

SEQ ID NO: 897259 - DNA, 653 bp, Homo sapiens
attaaaaccttttcagttacaggatttaagcaatataaaaggcatcagcataaaagtgaaaatctcccttgattcagttactcatagataaatattgttaacattttgaatttcttcagactttatcggttgtctataaaggcgatcagcatctcagttttgtttggaaggaagacaccaactgtaaaaatgtggatgggatgagaggaaacaaggataattaagtcattccattgtaaggtcagcacaacgtctggatatatctcctgttattcaaagatgatactcagacaagattaaaaagaaaagtaaatggaagaaacatagaaaacaaaaaacaaatgtctacaacccacccactcacccttaaacataactaaagaataaaagaacaccatgcttttcaaaaattcccaatggttaagtacttgtaacaacttaagtgtctatgatgaggtagtagaaaaatgtattattgtgaattcatttagcagaattctatgttgttagtagaatgtatagawtattatatgctgctataaaattatcttcgagatatttttaaaaaatcaaggctgctatgatatgatttatattaaaaacagcacagatgaatatacatttacatgcttaagtataaataaaatgtttct

SEQ ID NO: 897260 - DNA, 549 bp, Homo sapiens
cgtcagatgcatagattgcaaaaattttttcccattttataggttgcctattcactctgatgatagtttcttttgctgtgtagaagctcttcattttaattagatcccatttgtcaattttagcttttgtggccattgcttttgctgttttagtcatgaagtctttgcccatgcctatgtcctgaatggtattgcctaagttttcttccagggtttttatggttttaggtcctatgtttaagtctttagtccatcttgagttaatttttgtataaggtgtaaggaaggggtccagtttcagctttctgcatatggctagccagttttcccaacaccatttattaaatagggaatcctttccctattgctgtttttgtcaggtttgtcaaagatcagatggttgtagacatgtggtgttatttttgtggccttagttctgttccattggtctatatatctsttttggtaccagtgccgtgctgttttggttactgtagccctgtagtatagtttgaagtcaggtagcatgatgcctccagctttgttctt

SEQ ID NO: 897261 - DNA, 618 bp, Homo sapiens
tcaaatacaaattaaaaataaggggtttcatactcccttttgcaaacaaggaaagagacttccctcccctccyttagagtatttacttagaaaacttgtaattatatattctgtctctatctatttgaaatgtatgtatatctttttaagacctagataagagttttgctagcttttacctcaaaaatgtcttacttaaatatgtggggactatctctttgaaatgtagtcaaagaagatagtgctattatcttcagattttagtggaagggtaactaagtaggcacctcactgtaagttgcaaaactatctcctgtcattaagaaatgtgaggtttagttttccctcgtatataatcaattaactaacactgatggccaccctaatagccaggcaaatttatgatgaagtgtttatgacaaatgttgctgtcaagtcctcttacttgaggacaagttattatcttgtgaatatatatgtattatattgaataaaagactgagtttttttactgtctttgaaatctcttagcaaattgcctatgatgcaagtcatgttctagtttaatgcttattcaataataattttttttccttttacctttgtaaagaacttttc

SEQ ID NO: 897262 - DNA, 620 bp, Homo sapiens
gcctcaaaaaacaccttattttttcaaattcacatgagggaatttagaaactattcctcctgctgaaattagtccatgtaaaagaaaaaaaaaaccctaaactttctggtacagaaytattttccataagattaggatttatattgatagaaatccaaggaaatttcttccttctgtgttattcttgcatcttagaggcccattcagtaaaccatacttcttttaaatttatcaaccctactgtctgatagcctaaagttttcactttttatgtattttaatgtatttattagcaggcatatatttagcatcaactatgggcaaggctgtgttctaatgaaaataatagctatatagacatttgatacatagcactttcctaaaggcacttaaaacttgtttattatgttaaattatataaaacaaagtaataatatatgcaatgtatatatcatcaatgtattaatgcatacacatatatgatactacaaccacaaaaatctgtgttttaagcaccaaataaatagaataatcatgaatgcaacatagtatgtcagatttttttcaccatgaagttacgtggttaggaaaagctttattatcaatgtgggaattcaatt

SEQ ID NO: 897263 - DNA, 625 bp, Homo sapiens
caaaacattttcacatacagcttgtctctagtttttattgtgggatattagtttcttactataggtctcaaaaagctaagaaatttctatttgtagattctaaaaaatagtgtttccaatgtgttgaataaaaacaatggtttaactttgtgagatgaatctatacatcacaaagtattttcacagataggttgtttcaagtttttaccatgggataattgatttttcacaataggcctcaatgggctctgaaatgtcccttcgtagattctacaaaaagtgtgtttccaactgggtgaatcaaaatacaggttccatttggtgagatgaatccacacatcacaaacattccacacgtatcttgtttctagtttctatttcaggatatgtggtttttcactatacttctcaatgagctcagaaatgttttttcatagattctacagagagagtgtttccaacatgttgaatcaaaacaatggtttaactttgtgagataaacycacacatcacaaagcattttcacacatagctggtttccagcgtttgttcaagaaattcagtttttcactgtaggccacaatgggctcagatatgtctctttttagaccttttattttccaca

SEQ ID NO: 897264 - DNA, 618 bp, Homo sapiens
ataaactgcccattttctagattattcagtgtctcctagagtggcttttytttcaaaccatcaggaataccagtccactgactcctccactgttcccaatccataagtcactttatttactttgctccacacaactctatgcactctttgaccctgtcatgctggccttctttgagttcctcaaatgtgccattgaaggagttaaaaatataccattctggcataatgactattgtgaattaaaggtacttgaaaaacagcaggtacaagatcattctggcctcctttctgtttcttaaaagcaggaacactgaaaggtcctctccctataccagaaggaaagcaacattcttatcatcaaggatggaaatttgagccaaagaaaattctgtacagaccttgctaaaatagctcttgtctcttaagcctctccacataatttagttgctttttcacaacttactattctttgtccaattcaatctataactgattcactctaattgtttctctgggtcttcatttcttcatgaggactcccactgctttgtaaaagttgtattaaatcaattcctgtgcttttctcctgttaatctgtcctatgtcaatttaattctt

SEQ ID NO: 897265 - DNA, 681 bp, Homo sapiens
caacctaaatatctgttaggccttttattaggtgcactagtgactgacatggaccaatggacactgccctccaactcgaaatcaacaagtcagacaragggtagtaatatagtttgctacaagaaaagagcaagtttgtcttgtgactaaacaaggaaactttcggtctctaagggtttttatctggcacatccttcatatgaaataacaaactcaagaattccttggacacccaaccaccagttgaaaatggggagcttctgactgttcttgccagtaacataaaagcagccaaatacaaatggactgtttttattctcctttgtctttaagatgaaatattaaatcatcaggcaccctacctgtttcctacatcccttcttggttcaatcatcacagagaatcttgtgcaaacattataattttaagatacttctctgttacaaaatgatacatgaattataactaataaagcagtacacagaataatacttatatttgcaaaatgaaatacacacacggagagaaataaaacattcactaggtagatcaggctcagcaaaataaaagcatttaattctcttgattactaaataatgactgattttccatggttcctaaatctgaaaaggccttccagaaaattctgccctccaatgtaatctatcaaaactatatctg

SEQ ID NO: 897266 - DNA, 627 bp, Homo sapiens
gtggtgagggaaactggccaaattatgcaatgaatcttctgtgaagtgtggccaatgaatataattctgtgttgtgctttaatgaaattttcttcctattcctgagaaaaggacaaagaaaaatagcaatacatgagaagaagaaagtcaaccatgaaacagttacgagcaagaattaaaatgctgctgaggaaaccactgaataatttaagagttcttgctaagtgcctcaatcttcaacctcttgttctctaagagaagattatctctagcactcaaggttctttcataaattccaggtgccttgtgtctgcagaagagttctcaactgaccatatttcttccattcccaaatcaaaacaccaattcatccctacctaaggagaatgcaaacagttatcctcagacctcctgataaaatatatttaaaataagtaacatcaatttgatatcgttcactacattaaaatatggccataattttctaagtttgtgaaaattttgagtaatattaaattktgattatttacatttacatggtactactgtaattcctgttgccctaaatattcatacaaaacatacatgcacaaaatatttgggaatagggaatatatctatacatat

SEQ ID NO: 897267 - DNA, 618 bp, Homo sapiens
aaacaatgtcgcgagcaccgacaccagacaagctaagtctgtgaccttgtgcagaacgagaccaccctgcgatcgggtctgaacacagaccagacgtggacgtcgttcaaacccccaagatgcccagacacccaccctggctgagatgagcaagggctgctgctttactgcccggctcctgcctccccctgagtctcctgcctcccctgaatcgcccctccctttagagaagattgattgagatgcccaatcctagcaggacctcacctcctcacatccctcaatccagagtcacacccggtttcctcgcaagccccccaaatcacctcctgcagcccacacctgacaatcaggccctcctaacctctctgagatgcccaggttccccagggcatgtgttccctcttgctgcactgagtgataacccagcctgctcggccataggtgagctccgggggtcttaggctgcagggctttgacaggcgagcctgtctaacgtttagaaaccactcaacatgggagatggttgcccagagagctgacactgtctttgctctggtacttagtgracatctgcagaaatgcaatgctaggagctgggaaagcaggtggggggtt

SEQ ID NO: 897268 - DNA, 563 bp, Homo sapiens
tccaaatttaaaacttactagcaaactaccataatcaaagcagtgtggtattggcattggcataatgataaacatataaatcakcagaataaaattgagagtctagaaataaacccataccctcatatttatggccaattcattttaaataagagtgtcaagaccatacaatggggaaagaatagtaccttcaacaaatggtgttgggacaactggatatccacatcaaaataatgaaattaaacgtctactttacatcatatacaaaaattaagtaaaaatgaattatagacttaaatgtaaaatttttaggagaaaatatagaggtaaattgttatgacctagatttgtcaatggtgtcttacgataccattgtaagaacagaatcatatagaccaaaagaaaaaaatagataaatccaactttatcaaaataaaaaactgctcatcagaaaacaaaacaatatcaagcaagttaaaagaaaatatttgaaaattatatatctgataagggcctagtatctagcaatatttttaaaatcttaaactctacaacaaaagaca

SEQ ID NO: 897269 - DNA, 611 bp, Homo sapiens
ctgggggttgtggaccatccagagatctttccatggtaaagatcaagcatcgtgggttgccatgatctattgtcaggtacgtttcaaatcattaagaagttgttttagtaagygttaaattaccagaaggtaatttagtatagaggataggcacattctggaattagactgatttttattcctggtctctacactgactgctgcatgaccttgggaaagtgacttcacctctttgagcttcagtttcatttgttaaaaaaaaagataatattaatacctgcctgttaggaattatgaagattaaataggacaatagacacaaagcactcagagtatctggcattcaataaatgttatctattatttttaattagtaatgtttataaattgtttacttttataaagtcaaattaacaaggctttactttcataacccacattctaaaatgctttctacaatgatagggaaaggttggggttgtagttaggcaggggaaattgttcacaatcttggaataccaggtagaatctgtgcacacacaaacatcattcatcatgtgctgttggtggatggggagagtcagacatcctcctctgggtaaatccagagg

SEQ ID NO: 897270 - DNA, 620 bp, Homo sapiens
aggttcagagagtggcctgggagcaccttcctgagacccctctgcccctcccaacgcccagtcaaccccaaatcatcgcacgcccacggcaggaaggyggatgcccagtcaggcggcacccaccccccgccccgtccctggtgcggatgtcccctcggggctcagggtgggggtgcgggtcaccgacgccaggcctggggtcaaggcgagggccccagggcgccaccgccccctcgctgggcggggtgggaaggaggaaggaggatgttgtctgaagcacctgctgaatcacaggggctgtgtctgtagcctgcagggtggggggcgcgtcccctgcactccaggacccgcccctcgggatgccgacccccaccccagactggggatcccaggggtcaaggctgtgccctgggggcgtggggtggggtatggagctccaggctcagagccctggcctggtagggtcagcccaaccaggggtgcagcgggcggaggggcggcaggcggaggccaagtgtgcgtagggaagcacggagaggtaaactgaggcacaaagagggcagggaccgctgggatctcgcggggcggggtcggccctggatcgctcccttcccccaacc

SEQ ID NO: 897271 - DNA, 669 bp, Homo sapiens
gaaacaggaacacttttacaytgttttggggagtgtaaattagttcaaccattgtagaagacagtgtggtgattcctcaaggaactagaaccagaaatatcatttgatccagcaatcccattacttggtatatacccaaaggattataaataattctaccataaagacacacgcacacgtatgtttactgtagcactattcacaatagcaaaggcttggaaccaacccaactgcccatcaattatagactggatagagaaaatgtggcacatatacaccatggaatactatgcagccataaaaaggatgagttcatgtcttttgtagggacatggatgaagctgtaaaccatcattcttagcaaactaagaaaggaacagaaaacaaaacactgcatattctcactcataagtgggaactgaacaatgagaacacatggacacaggcagaggaacattacataccagggcctgtcggggtgtggggtcaaggggagggatagcattagaagaaatacctaacgcagatgacggattaatgggtgcagcaaatcaccatggcacatgtctatctatgtaacaaacctgcatattctgcacgtgtctcccagaacttaaagtataattttaaaaaaagaaaaagaataatttgttttaaaagatctccttt

SEQ ID NO: 897272 - DNA, 669 bp, Homo sapiens
gaaacaggaacacttttacactgttttggggagtgtaaattagttcaaccattgtagaagacagtgtggtgattcctcaaggaactagaaccagaaataycatttgatccagcaatcccattacttggtatatacccaaaggattataaataattctaccataaagacacacgcacacgtatgtttactgtagcactattcacaatagcaaaggcttggaaccaacccaactgcccatcaattatagactggatagagaaaatgtggcacatatacaccatggaatactatgcagccataaaaaggatgagttcatgtcttttgtagggacatggatgaagctgtaaaccatcattcttagcaaactaagaaaggaacagaaaacaaaacactgcatattctcactcataagtgggaactgaacaatgagaacacatggacacaggcagaggaacattacataccagggcctgtcggggtgtggggtcaaggggagggatagcattagaagaaatacctaacgcagatgacggattaatgggtgcagcaaatcaccatggcacatgtctatctatgtaacaaacctgcatattctgcacgtgtctcccagaacttaaagtataattttaaaaaaagaaaaagaataatttgttttaaaagatctccttt

SEQ ID NO: 897273 - DNA, 662 bp, Homo sapiens
aaattaaatatactgttaattttaccttttcatatactctgttactgatattttaaaatacttacccctcttttttcctgagaatcagattttcttgccttttcacttatttagccatggaaattggtttaagtccataaagtatgagctgtaaagggcttttattccaaaatctacatgagattccaactacaggtgcaactatcagcctctctgataagaccatggagaaatttaaagagatggctcctataagttctcagctagacaaaagagtttctaagaagttgaatggaattgtctcatcgctctttgatttttaagcccaaagtagaaatgaacctggattgaaggtatacataggtgtggttttgtgtaacagagtggtttataatctaatctgcaagaattccatgcaacttttaaaggatttgtgccatcttgtactgaaagggtagcaattgtgtaaaatgaaaagaggactccttccctaagcagtctgagggaactactcaaatgcaaatatttgccatttttcatagaagagcagtgactcacaggatgggaccaagattacagcagkcagggccaaaagccctggagaacaattctcaaggagccaaactgagttctaatcaacaatatttcatgctctcagagca

SEQ ID NO: 897274 - DNA, 603 bp, Homo sapiens
ttgggtactgaactaggagtcagaagttctccacccctttcaggaattgtttaagagacaccccatcttgtagtgtataggatggggttgaaacctttttatgatattacgtacggtgtgtctttaaagatgaagctcttagaataacatggattcgattaatacataaaatgggatggtgtgttgaaccaaatgttctacaaaaaaaacctttagattttaaattctgtgatggaatgagttttcaaaataatccaaatttaggttccattttaactggatagaacccttattgagaaggtactttcagaagtacagaaacattattgggctgtgatggttattgggcccaccttgcacatggcaggatgtaactatggagttctggttgcctggactaagcaggtttgttgaaaatgtatacacttgcaggttaaagctttaaaaaccttttaaaaatattttagctgtttcttyatgacactttgaaaactatttttatccttcttggatcaagatggtttataaacaataaaaaattaacaaggactgtattatagcattttatagatagaaaattgaaacataaagcagttaaactat

SEQ ID NO: 897275 - DNA, 469 bp, Homo sapiens
aggtagagtggaaagaacaacattgaaatatggtttttatcctgaagaaaatcatactgagtggaaaattaaaacattatttttttaagtcaatggcatagaaatacattcaggggggctgaaatttcaaaggagcctctcatcatttctccccattactccaactccatcacacacattttcacccaccatgacttttccagcttggattcataacaatcgtgttttcagtatgctccctgactcaatctctgtctttttcagactcagagttcacctcctccaggaagccttccttgagacgccattgctcacctggctctacttgcttgaccagaagtactttaaagattatatctttacattttgtatctgyaggacttgaaatataatgaacattccagacataattgatgaataaaataacatccaatcccttcattttatagattggttgatgaagaccttg

SEQ ID NO: 897276 - DNA, 439 bp, Homo sapiens
tattcactatcatgagaatataaagggaaagactagccccatgattcaattacctccccctgggtccctcccataacacatgggaattctgggagatacaattcaasttgagttttgggtggggacgcagccatatcaagaccactatttgtgagtatgcacgaacagcttgtataaactctcggacttatttttcttgctctactttattcagataagttctacaaaaagaatatgatttctataggtcaaaaaggtcaaaagcattaggatccatcaggctagtaagtacactgaaatataaggtttcttgagtactgacaacttttttcaatattcaaacaaatgttagtaaacaatcacacatgctttcttcgtccattttcatgctgctaataaagacatacccaagactgggtaatttatacaggaaagagga

SEQ ID NO: 897277 - DNA, 439 bp, Homo sapiens
tattcactatcatgagaatataaagggaaagactagccccatgattcaattacctccccctgggtccctcccataacacatgggaattctgggagatacaattcaacttgagttttgggtggggacgcagccatatcaagaccactatttgtgagtatgcacgaacagcttgtataaactctcggacttatttttcttgctctactttattcagataagttctacaaaaagaatatgatttctataggtcaaaaaggtcaaaagcattaggatccatcaggctagtaagtacactgaaatataaggtttcttgagtactgacaacttttttcaatattcaaacaaatgttagtaaacaatcacacatgctttcttcgtccattttcatgctgctaataaagacataccsaagactgggtaatttatacaggaaagagga

SEQ ID NO: 897278 - DNA, 568 bp, Homo sapiens
tggccaacatggtaaaaccccgtctctactaaaaactayaaagattagccgggcgtggtggcacgcacctgtggtcccggctactcgggaggctgaggcagaagaatcgcttgaacccgggaggtggaggttgcagtgagccacgatcacatcactgcactccagcctgggcgacagggcgagactctgtctcaaaaaaaaaaaaaagaagttatggaaaattggctgggcagggtggctcatgcctgtaatcccagcactttgggaggccaaggcaggcagatcatgaggtcaggagttcaagaccagcctggccaacatggtgaaaccccgtctctactaaaaatacaaaaaattagctgggcatggtggtgcgcacctgtaatcctagctactcgggaggctgaggcaggagaatcgcttgaacccaggaggcggaggttgcagtgagtcaagattgcgccattgcactccagcctgggtgacagagcaaaactccatcttgagaaaaaaaaaaaaagaagttatgggaaaccatcatataacagtactagaagagactatttct

SEQ ID NO: 897279 - DNA, 583 bp, Homo sapiens
ttccaagcttagggctcaagggttggggagggaacattgtttttaaacagtcgaatgcatgacaaagtaaaatcacaacagtttgacagcacaattttaataagttttgcttttttctggcaccgatattcatcaagttatggcttgaagcaatagagggaatgataaggaaagaaacaagtgttgagacataagtagtcactgtggtgggcgccttgaatgttattttgttgtgagaattgttcacgccgttgatattcccaaatgctttaccagcttaaattaaaaaatgattatttaatatattcagctcttctgcctacccctgagagaacaaacattacggtcttccacgtcgctgaaggtggagcaggagtggattcataactccacaaagccctcctcacccacccctgtctcctgcaagttggggtcatgttccaccaccttgcaggctgcagctgaaagccatggagaactcagcttttctggggtgcttcagaagatgtgcagggatgtgatgctkgtggagggagaggggcggcagctgctggggcctgcatagaatgcttggacattctag

SEQ ID NO: 897280 - DNA, 550 bp, Homo sapiens
taatacattaaaatcttgtttaagtcatacagtttaagtttagtcctactttaggagttctccaactcccttaataaggctgctaaaggrcaaaaataacagtaaggactaatgacaattttgaattgttaatatctatatgactctcctggatagtttgttaacattcagtttccctggctccacttagagagcttggattaataggcttgaagtagagaccaggaaactgcatttttaataagcacccaaaggagactttaatgcagatattctttggaccacactgtggcagagctatcaataaacaatggcgggaaggagaagcaaggattacaactacagtagtgaaaagaaagacaaacatctgtagaaagattacaagaaaaccaattgtggttcttcctggggacagggataaagctctctgactgtgggcagtgattgtagtttgtagcattcagggtcctcctctctgggcatgttcacctcccactctagggttcaggcaagctggggctcttaccttccacatagcccagcagattct

SEQ ID NO: 897281 - DNA, 630 bp, Homo sapiens
ggaaattacttttttaaaaactataagcagccaaaaaaagcagacagtaaaatgcagataaaacagctcgggcacagaggaaggtggaggaaaagtctcttgggtaactgccaaacttcaccctcatacaatgggccccagtaaaacagtgggccttaataagcacattcctttccctccaggtgcactaaaatagggaagctaaaagcagacttggggggtatgcctacagctgcagaaaaatgtataaaagcaaacacaccactctccctcccatataagcacaacaaaaaaacacagaagcagtccaagcctctaagaaactctcccaccctaaatccttaaacactcttagtctgtagaaaagactctaacctaattcagccagcagcccctctcaggtgtgttttctctaaaataaacctgtcttaaccatcaagccacttttcgtgtttctttcctctttctttaattcttacactgacctagtggtggaggcttggcaaggatgcctgttaccaagtgggttacttctgcactrtttatagagaaggagaaatggctaaaagtagaggtaccaggttgccaataatggttacttggggggtagcattcaaagttctccaaagc

SEQ ID NO: 897282 - DNA, 630 bp, Homo sapiens
ggaaattacttttttaaaaactataagcagccaaaaaaagcagacagtaaaatgcagataaaacagctcgggcacagaggaaggtggaggaaaagtctcttgggtaactgccaaacttcaccctcatacaatgggccccagtaaaacagtgggccttaataagcacattcctttccctccaggtgcactaaaatagggaagctaaaagcagacttggggggtatgcctacagctgcagaaaaatgtataaaagcaaacacaccactctccctcccatataagcacaacaaaaaaacacagaagcagtccaagcctctaagaaactctcccaccctaaatccttaaacactcttagtctgtagaaaagactctaacctaattcagccagcagcccctctcaggtgtgttttctctaaaataaacctgtcttaaccatcaagccacttttcgtgtttctttcctctttctttaattcttacactgacctagtggtggaggcttggcaaggatgcctgttaccaagtgggttacttctgcactgtttatagagaaggagaaatggctaaaagtagaggtaccaggttgccaayaatggttacttggggggtagcattcaaagttctccaaagc

SEQ ID NO: 897283 - DNA, 662 bp, Homo sapiens
tcttttccacgggccgttattatggggcttyttgttccttagctaagggcatctgcagtaacattctggcatctggggatgtgttccaaccaggtgaatatcagattcctacaacttcaaagcccaacctttataatcttctttgtttgcttttaaatactcataattttcatgtttaaacattttaagaccctatgaacaatgaggaacatgattctccccagacacagaagattttatctatattcccatctattaaaatctgtaagtaactggaacttttaaaatacttcctttccatcaataattccttcatacctggaaccacatatttctttagataactgggtgggaatttatatttttttatttgcaagagcttaaagagaagtttttacgcttagaattcctttgccatttaagtttctcattcagcacataagcccctttccttttggaaagtgctagataagtattatacttattctccatgcaggccacacctcaggtttgaaggtatctggagaatatatataaaagcagaattttgatacttagaaacagctaaaagtcatttagagcaaaatctgatgtataaaatcagcaatcaacttgagaaatgctaatctgatttttttaattggattaaactctctagaggc

SEQ ID NO: 897284 - DNA, 650 bp, Homo sapiens
cttgctatgcattgaattgtgtctccctaaaattcacctgttgaagtcctgaatcccagtatcttaggtcatgaccttatttggaagtagggttgttgcagctgtagttagttaaaatgaggtyatactgaagtagggtggacccttaatctaatatgactgggatccttattaaaagggaaaatttatatagacacacacatattgagactgccatgcaaagataaaagtagagactggaatggtgtgtctacaagccaaggaatgcaaaggattttaagcaacccaccagaagatagaagagagatatcaaacagtttctccatcacaaccctcagaaggaacaaaacctgccaaccccttgattttgaactcctagcctctataactgtgagacaataatgtatgttgtttaagccactcagtttgtggtactttgttatggcagccctagcaaactcatacatgaagttttaaaaacttcacctactgtgtaccatttttcacgtagaaactagaagttgtactctaccaaaattaggtagtaaataataaaatagaaaagcataggatgcaggaaactagaatctaatgcatgaaagagtcagaaggaatccccaggaaaatggtaaagggagatctttgctttg

SEQ ID NO: 897285 - DNA, 570 bp, Homo sapiens
tgcatttacagctataaacttctctcttaatactgttttagctgtataccagagattctaatattttgtatacttgttctcactagtttcaaagaacttcaggattttattgtttacccaaaagtcatgcagaagcaagttgcttaatttaaatgtaattttgtttttaagtgattcattttttattatttcatatttttattacactgtggtctgtgaccatggctggattatttattttttttaatttccagaggattgttttatgtccaattgtgtggttgattttagagtatgtgccatgtgcagatgagatgactgtatattccttattttgggatggagagttctgtagatgtctattatgtaaatttagtcaagtgtccagttaaggtcttgaatatcttctttagttatctgccttgatgatctaatactgtcagtaagctgttgaaaggtgttgaagtcttcatctattattgtgtagttatctaagtctcttcacaggtgtctaaaaatttgctttatgagtctggatgctcttgtttargtacatgtatatttaggata

SEQ ID NO: 897286 - DNA, 563 bp, Homo sapiens
tttagctgtataccagagattctaatattttgtatacttgttctcactagtttcaaagaacttcaggattttattgtttacccaaaagtcatgcagaagcaagttgcttaatttaaatgtaattttgtttttaagtgattcattttttattatttcatatttttattacactgtggtctgtgaccatggctggattatttattttttttaatttccagaggattgttttatgtccaattgtgtggttgattttagagtatgtgccatgtgcagatgagatgactgtatattccttattttgggatggagagttctgtagatgtctattatgtaaatttagtcaagtgtccagttaaggtcttgaatatcttctttagttatctgccttgatgatctaatactgtcagtaagctgttgaaaggtgttgaagtcttcatctattattgtgtagttatctaagtctcttcacaggtgtctaaaaatttgctttatgagtctggatgctcttgtttaagtacatgtatatttaggatagttagatcytcttgttgaaattagtcttt

SEQ ID NO: 897287 - DNA, 652 bp, Homo sapiens
aaatgcttttatgctgtttttggagtgtaaattagttcaaccattgtggaagacagtgtggcaattcctcacggatctagaactagaaataccatttgacytagcaatcccattgtttgatgtatacccaaaggaatataaatcatgctagtataaagacacttgcacatgtatgtttactgcggcactattcacaatagcaaagacttggaacccacccaaatgtccatcaatactagactggataaagaaaatgtggcacatatacaccatggaatactatgcaaccataaaaaaggatgagttcatgtcctttgcaggtacatggatgaagctggaaaccatcattctcagcaaactatcacaaggacaaaaaaccaaacacctcatgttgtcactcatacgtgggaattgaacaatgagaacacatgtacacagagaggggaacatcacacactggggcctgttggacagtggagggctgggggagggagagcgttaggagaaatagctaatgtaaatgatgagttgatgggtgcagcaaaccaacatggcatatgtatacctatgtaaaaaacctgcatgctctgcacatgcaccctagaacttaaggtataataataataagaagaagaagaattcccaaacaccc

SEQ ID NO: 897288 - DNA, 652 bp, Homo sapiens
aaatgcttttatgctgtttttggagtgtaaattagttcaaccattgtggaagacagtgtggcaattcctcacggatctagaactagaaataccatttgacctagcaatcccattgtttgaygtatacccaaaggaatataaatcatgctagtataaagacacttgcacatgtatgtttactgcggcactattcacaatagcaaagacttggaacccacccaaatgtccatcaatactagactggataaagaaaatgtggcacatatacaccatggaatactatgcaaccataaaaaaggatgagttcatgtcctttgcaggtacatggatgaagctggaaaccatcattctcagcaaactatcacaaggacaaaaaaccaaacacctcatgttgtcactcatacgtgggaattgaacaatgagaacacatgtacacagagaggggaacatcacacactggggcctgttggacagtggagggctgggggagggagagcgttaggagaaatagctaatgtaaatgatgagttgatgggtgcagcaaaccaacatggcatatgtatacctatgtaaaaaacctgcatgctctgcacatgcaccctagaacttaaggtataataataataagaagaagaagaattcccaaacaccc

SEQ ID NO: 897289 - DNA, 587 bp, Homo sapiens
taaagagcactcatggtatactaaggaatttagaaaccccacatactcacccaggataggaaacatgctcagaaaagacctcaaaagactcttaagttttcaccactggcttatctatatgctcagggaagtaargaagtgaaggcttaggcaaaattataaatgtcctggctaaatataaaagaagggcctggaataaagtcaacctgcaaagactgggaaaggcgggttttttgtttgtttgtttgtttgattttctagacggagtctcacattgttacccagtctggagtgcaatggtatgatcttggctcactgcaacctccatctcctgggttcaagtgattctcctgcctcagcctccctcgtagctgggattacaggtgcccgccaccacacccagctaattttttgtatttttagtagagatggggtttcaccatgttggccaggctggtctcgaactcctgacctcatgattcacccacctcagcctcccaaaatgctgggattacaggcataagccaccatgcctggccttcccccccacccccatccaagctactgaagttcaaggaaaacccagc

SEQ ID NO: 897290 - DNA, 591 bp, Homo sapiens
cctggttgggtgctatttctctagaccacatagtatatatctcatatcatgtttcctcacaaatatcagaatatcctggcacttaaaagagatttttgtaaattcttatagctgatagaatgtatagtatatgacattcagtaattcacttattcatcatcgcaataagcatataacttacaatgctgcaggccctgaagtggatagtgttgaaatatttgaggcattcacagaggtatcactaccgaataattcttattaaataaatctctaggagcattattggatataaatgcgtaaatttttctaagagacctataattcttcatttgaaagggttttcagaagtcacactatccatttcctacctccaagcagagctgcatccaactttgatgactgcaatcatgtgtagtatcactgatctaagattatatatatagagagtatagtatcactgatatatagtattgtatcactgatctaagattatatatatatatatatatatatatakagagagagagagagagagagagagagaaagagagagagagagatttaatccacaccataattctaacagataga

SEQ ID NO: 897291 - DNA, 647 bp, Homo sapiens
ggggtgtttgggaattcttcttcttcttattattattataccttaagttctagggtgcatgtgcagagcatgcaggttttttacataggtatacatatgccatgttggtttgctgcacccatcaactcatcatttacattagctatttctcctaacgctctccctcccccagccctccactgtccaacaggccccagtgtgtgatgttcccctctctgtgtacatgtgttctcattgttcaattcccacgtatgagtgacaacatgaggtgtttggttttttgtccttgtgatagtttgctgagaatgatggtttccagcttcatccatgtacctgcaaaggacatgaactcatccttttttatggttgcatagtattccatggtgtatatgtgccacattttctttatccagtctagtattgatggacatttgggtgggttccaagtctttgctattgtgaatagtgccgcagtaaacatacatgtgcaagtgtctttatactagcatgatttatattcctttgggtatacrtcaaacaatgggattgctaggtcaaatggtatttctagttctagatccgtgaggaattgccacactgtcttccacaatggttgaactaatttacactccaaaaacagcataaaa

SEQ ID NO: 897292 - DNA, 647 bp, Homo sapiens
ggggtgtttgggaattcttcttcttcttattattattataccttaagttctagggtgcatgtgcagagcatgcaggttttttacataggtatacatatgccatgttggtttgctgcacccatcaactcatcatttacattagctatttctcctaacgctctccctcccccagccctccactgtccaacaggccccagtgtgtgatgttcccctctctgtgtacatgtgttctcattgttcaattcccacgtatgagtgacaacatgaggtgtttggttttttgtccttgtgatagtttgctgagaatgatggtttccagcttcatccatgtacctgcaaaggacatgaactcatccttttttatggttgcatagtattccatggtgtatatgtgccacattttctttatccagtctagtattgatggacatttgggtgggttccaagtctttgctattgtgaatagtgccgcagtaaacatacatgtgcaagtgtctttatactagcatgatttatattcctttgggtatacatcaaacaatgggattgctargtcaaatggtatttctagttctagatccgtgaggaattgccacactgtcttccacaatggttgaactaatttacactccaaaaacagcataaaa

SEQ ID NO: 897293 - DNA, 601 bp, Homo sapiens
ttgtttttgttgttgcaaactggayatttgaatctaatatgtggtaatactggatatcagatatcccccttcccccagagtttactttttttgttagtgcttattggttttgtttttgtttcttattgttgtaggctatctttgtaccaaggagcagcctgaggtataaacttaaggtcttcataggtcttttctgagtctgtaactttccctgggtgtgcacagtcactttctacttttccctgtgtatgcagttgcttttgaatgtcctagtccccaaaaagaggaaaaagagaaaaatgaaggggagagaaaagagaaccagaccttaaaatgccctggaagtcactttagccagagtgggagggacttgaaacaatactgggaagtagaacagcaatggccacccacctctttgtctgcacttctgtgattaaaagcagcaattagtgattagagagcatgaatccctgatatttggaggacagggtccattgttgcctaccctggctcctacaagctgtgtgtaggttgctccagaaatatgtgcacacctgcatgccacgtggctgggagtaggggatgggtagttgctactata

SEQ ID NO: 897294 - DNA, 658 bp, Homo sapiens
atgtgattcctccagtttttttgtttgtttgtgtttaggtttttgttgttgatgtttgttttgttttgcttaggatagctkgggtcattctgggtcttttgtggtttcatacaaatttaataatgttttttctatttctgtgaagtgtatcattggtatttgattcagggatttcactgaatttgtagattactttgggtagtatggacattttgacaatattgagccttctaattcatgaatatggaacatttttccaacttttggtgtcctcttcaatttggtttatcggtgttttatagcttttattatagagatctgtcacttatttggtaaagttaattgctgggtatttaaaattatgtgtggctattttaaatggtattaattattatttttcatattgctcactgttggcttatagaaatgctactgattttgtatgttgatcttatatcctacaactttacttatcagttataatagtgttcttgtggtgtctttatgtttttccaaatataagatcatctgcaaataaggataatttgacatcttccttttcaatttggatgctattatagatttatcttggctgattgctctagctgggacttccagtattattttgaatatcagcggtgacagtggacattcttgt

SEQ ID NO: 897295 - DNA, 658 bp, Homo sapiens
atgtgattcctccagtttttttgtttgtttgtgtttaggtttttgttgttgatgtttgttttgttttgcttaggatagcttkggtcattctgggtcttttgtggtttcatacaaatttaataatgttttttctatttctgtgaagtgtatcattggtatttgattcagggatttcactgaatttgtagattactttgggtagtatggacattttgacaatattgagccttctaattcatgaatatggaacatttttccaacttttggtgtcctcttcaatttggtttatcggtgttttatagcttttattatagagatctgtcacttatttggtaaagttaattgctgggtatttaaaattatgtgtggctattttaaatggtattaattattatttttcatattgctcactgttggcttatagaaatgctactgattttgtatgttgatcttatatcctacaactttacttatcagttataatagtgttcttgtggtgtctttatgtttttccaaatataagatcatctgcaaataaggataatttgacatcttccttttcaatttggatgctattatagatttatcttggctgattgctctagctgggacttccagtattattttgaatatcagcggtgacagtggacattcttgt

SEQ ID NO: 897296 - DNA, 658 bp, Homo sapiens
atgtgattcctccagtttttttgtttgtttgtgtttaggtttttgttgttgatgtttgttttgttttgcttaggatagcttgggtcattctgggtcttttgtggtttcatacaaatttaataatgttttttctatttctgtgaagtgtatcattggtatttgattcagggatttcactgaatttgtagattactttgggtagtatggacattttgacaatattgagccttctaattcatgaatatggaacatttttccaacttttggtgtcctcttcaatttggtttatcggtgttttatagcttttattatagagatctgtcacttatttggtaaagttaattgctgggtatttaaaattatgtgtggctattttaaatggtattaattattatttttcatattgctcactgttggcttatagaaatgctactgattttgtatgttgatcttatatcctacaactttacttatcagttataatagtgttcttgtggtgtctttatgtttttccaaatataagatcatctgcaaataaggataatttgacatcttccttttcaatttggatgctattatagatttatcttggctgaytgctctagctgggacttccagtattattttgaatatcagcggtgacagtggacattcttgt

SEQ ID NO: 897297 - DNA, 579 bp, Homo sapiens
aaaaagcactttatttcaggtttctctctgtctggctagaatggggaaaagaaagttatttatataagctattatagtacataattacacaggtaacaaaagaaaaaaaatcaataagattttgaaaggaatacgttcttaccctaaaccgaatggaaacaaaaacaacatagaaggtattaattcaaaatcaggcagaccaacaaaagtcattgttaaaagaaaccatagatttatataacctaaacccttcattttatggatgaagaaattaacaaccagtgaattgaaatctttacttcagttgtggtctgtgggccaagcctaagcatcacctgggaggttattagaactgcacaatttcaggcctcacttcagacccacaaaattagaatctgcattttaacaaaatctccaccccagataatttctatgtacattgaggtttaagaagtacttgttaaattacttctccaagttatcattaatcatttaccatgyatatgttactcagtggtagtagtcaaatgtgtcaagaaacctttctttgagtaagagtaattcaagcatacttccctc

SEQ ID NO: 897298 - DNA, 561 bp, Homo sapiens
aacagagaatcatggcccctcaatcaatttccagacttgagccagtttacagacccagaaccccttgaacgaagaggaggctgagtccccggactcatcctgtggtcatttccccagtgccagaatacacarttggcatagacatacttagtagctggcagaaaccccacattggcttctggattggcaaggtgagggttattattgtggaaaaagccaaatgtaatccattagagctgcctttacctagaaaaatagtaagtcaaaaacaatattgcatccctggagagattgtggtgattagtgccaccatcgaggacttgaaagatacagggatggtgattctcaccacgtccccactcaactctcccatttggcctgtgcagaagacagatgaatcttggaaaatgacagtggattattctaagcttagcctagtagtgacaccaattgcagctgctgtaccagatatggtttcattgcttgtgcaaattaacacacctcctggtgcctgctatgcagccattgacttggcaaatgcctttttctccattcctgtcc

SEQ ID NO: 897299 - DNA, 618 bp, Homo sapiens
gaaagcaatcacttgaaggtactagcaggtgagctaaacaagcagactctgatgatttgtttacgtttggtgaagaagggaaaggatgattcatgtgagtaagtttctgccatcaaggattttagcacaggcttaaatagaataagaacagcagtctttccagattgaggaacctgaatagtgaaggcacaaaactctagtcagtcaagagagttgaaataatggccaaaaagctcccaaatgtgatggacagaaatttacaaatagaagaatctcaataaatgtcagagaaaataaacacaagtgtgcacacattgaggcttagtataatgttgaaagtcaaagaaaaatgaaaatattaaaattggcaaaaaataaacccatgttacacagaacgggacaataattagattaacttctcattagaagccatagataccaaaataaggtgaatatatatatatatgtattgtgtttatgtttagtgatgaagagggatgatgagtcctgtgagtcagtcagtcctgtgtgaaatatatatatatatatatatatatatatatatawataaggtgaatatatacacacactatgtatacatattaggtgaatagtgta

SEQ ID NO: 897300 - DNA, 578 bp, Homo sapiens
aatagtgctgcaataaacataggagtgtgcaccagatatctttcaatatattgaattccttttgtttggatatataaccaacagtgggggtgctggatcatatggtagttcttttgtttgtttgtttgtttatgtaatttacatttccatcaagagtgtacaggtatatcacagtttattgcacttcactttttgtgctttgcagatgttaccttttttaaaattgaaaatgtgtggcagccctgtgtcatgcaagtctattggtaccactttttgacagaatgttatcattttttgtccctgtgtcacattttggtaattataaaaatacttcaaacttttcattataattatatctgttataataatctgtaatcagtgatctttgatgttactattgtaattgttttggggagccacaaactgcatccatataaaacagcacactcattcaataaatgtgtgtgttccaamtcctccactgaccagctattgccccatctcactcctcctcctcaggtgtctctgagacacaacaatatcgaaattaagtcaataagtaacccaacaatggcctc

SEQ ID NO: 897301 - DNA, 630 bp, Homo sapiens
gaattcatgcactaaaatatttagtttcttgatctattgccagcactagtgtctggcatgtagtagaccctcaacaaatattttctgaaaaaatgaattgaattatttaaagttyagtttggttatcagcacttacagggggtcttttttgcttctcccctagtaccatcaacctaaattagatgcctctctatagtgttctcatgttaatacatatatttttctattgctgcacatactacattattttagaatttatttgttgatgtgtgtatttattcctagatgttgaattacctctcgctagggaccctgttttatttatttctaaacattttttcatgcctagtagagcagatgacacatatggggcattcaatatatatctgttgaatacatgcatgaataaattcactcttaacactaaaaaaaaagtgtgtgtgtgtgtgtgtgtgtgtatgcatttatcaaggttcaattccacccaggtgtcttctagagattgtcaatgtttggtacgtctgctttagggactagattgtgttttgattattttgattaaaaagaaacaaagattttatattaccaaaagagagagattgttccttttgtttttgttgttgttgtatg

SEQ ID NO: 897302 - DNA, 613 bp, Homo sapiens
ttccttcactgtatacctccatgtgttcctgatttacaggcaaggtagttagtttccttttagattatctgcttcaaatattttttcaacattttaatttacatttctcrtattcttacttatcttttcatacctatttcaaatgtaataaaatctacaaagcatggcttgatatattaacagtattgattacctccacttttgtacccacactaagcacaatgcattctaaaacaatgaacctacggtatttttaaaacttatttttctatatatctcatttccccaacagttcataaacttctttaattaagactgtgacttacttactggtttatattcatgacagctaccactgattttagctcataaaatacactctttaaatggttagatagctatagttttcaagattaggtgcagaaatcacttccatttaagatttagggattctttccattagggttcttataaaaaccactggttcttctttagtgtacacgaataacattttcttaattttaaaatggcttctattgtttgaacagagacttggtgtacattctgtagaaggaaaataactgtcaattgacaatttcttgagtgcttatta

SEQ ID NO: 897303 - DNA, 658 bp, Homo sapiens
tccttatctatcaataataacattaaatgtaaatggactaaactctccaatcaaaagacatagactgcctacatggaccaaaaaaccaaaccaaaccaaaccaaaacaaaaacaaaaatgaaataaaaaamaaacaaacaaacaaacaaagaaacccaccaaggcttaactatatactgcctacaacagattcagttcacatatgaaaatacacacagactgaaaataaagggatggaataagatatttcatgcaaatggaaaccaaaaaagagcagaatagttatatcagataatacggatttcaagaaaaaaactataaaaagagacaaagaagctcattatataatgataaaaaaataaatttagcaagatgatgtaacaattataaatatatataaacccaaccctggaacacccagatatgcaaggccaaagttcttagagctaaagagagacacttcaatgcaataacaggagacctcaaaaccccaattgcagcactgaacagatcatccagacagaaaatcaacaaagaaacataagacttaatctgtaccacagaccaaatggacctaataaatatttacagaatgttttacaccaaagctgcaaaatatacattcttctcctcagcacatgtatcattctcaagtata

SEQ ID NO: 897304 - DNA, 631 bp, Homo sapiens
ctaattgtgagtgttcacacatcttgcagcrgaaatattaatgagttgaattactggttactgaaacagatctttctggcagtgttgccttcaattatgtagtatatgcattgcatcttctgtttataaatgaaaaattctgaatttaaagcacatttgccctcagacattttagagatacattgtcaacctttattgctaaaccttataaccaatagactggaggaattattttccccaaattgggggtatgttaaaaacacaaatgatcatccatttacataagctatgtcttgataaatccattgtaaattgaaaatgcatttaatacacctaacctaccaaacatcatagcttggcctagcctaccttacttaaacatgatgagaacacttacactagcccacagtttggcaaaatcatctggcaatacaataagcacaatatgctgtagagtatgggttttttacccttgggattgcatagctgactggaggctgcagctcgctgtacctgcccagcattgtgagagtacagaacagcatattgctagcatgagaaaatatcaaaatccaaaattaagtacagttcctgctgaatgtgtatcacttttgcaacatcataaagtgga

SEQ ID NO: 897305 - DNA, 689 bp, Homo sapiens
ccatgtggggaatcattcagtatttgtgactggcttytttcatttaacacaatgtcttcaaggtttatccatgttgtagaatgtggcagaatttctttcctttctaaggttgaacaatattacatgatatgtttataccacattttgtttatccactcattcacagatggacacttgaattgcttccactttttggctattgtgaataatgttgctatgaacatgggtgtacaaatatctgttcaagattctgttttcagttcctttggagatatacccagaagtgaaatggctggatcatatggtaattctatttttaattttttaaggaactatcatgctgttttccatagtggctgttttccatagtggctgtgccattttacattcactctagcagtgcagaagaattccgatttcttcctatgaaagccttttttaaaagtacaaacaggctgggcacagtggctcacacctgtaaccccagtactttgagaggtggaggcaggtggattgcttaagtctaggagttcaagaccagcctgagcaacatggagaaactccgtctctgcaaaaagattaaaaaaattagctggactcaggaggctgaggcaggattatagcttgagcctgggagacagagattgcagtgagccatgatcatgccactgccctccagcctgagcaag

SEQ ID NO: 897306 - DNA, 684 bp, Homo sapiens
cgtatgtttaaatatttatgggattttacctacaggattgttttggtggcccattgccataatgaaatacagcattctgtttaattacagtgtagccaggttttaaggaaaattcagccaagttgggtttttttgaaatggattgctttcagtgggttgactggtgactaaaatctctatggctgtggttggtgctgctgaaatgtcccattcacatgggtccctcatgagccagaagttctgatttggtgaattggccacatacaattagtgtcaccagtgccccatgttcaacccactcattgtcagatgtaacgtaaggtaaaagtcaagggcgggaaagacttaggagtgtggatgagtctgtgtccagaatcaaatcctatgtcgcctcctggaatttgtaggagcacaaccacagggctctcctcacattgacctttccatgaccaagaaagagctcctggcatcaagcacacattctgccaggctgtgtgttgtcaacagatatcactattctgttgaagacctaaaactgtagcagatgtgattgccatttttagctattgttaattcgttcaaacaaatttactggggaaacatttttctcagatagatagaattgtaaaataatatatgaggtttcctaattkttccttttcacttaatatttttaaatacctt

SEQ ID NO: 897307 - DNA, 619 bp, Homo sapiens
gagacttctggcctgggcacatgaggtctgagatagtataagaggtcagaggctgggtgtggcagctcacgcctgtaatcccagcactttgggaggctgaggcaggtggagaacacttgaagccagaagttcaagaccagcctggccaatgtggtgaaaccccatctctactaaaaatacaaaacataaataaataaattagctgggtgtggtggtgcacacctgtagtcccagctactcaggagactgagacaggagaatctcttgaacctgggaggcagaggttgcagtgagttgagatcatgccaccgcactccagcctacacaacagagtgagactctcaaaaaaaaaaaaaaaaaaaagaggtctgagatgttacaagatgtcctggcagagattccaatcttgagtccagactggagagggaggctgagaggctgggggagagggtccatagagctatgggtacaagtgagccagaacaccaaggcagggagtgagggccgggatggaaggaaggctgggagggagccctggrcatccagcacccagagggtgaggaggggaggggagccgccaaaatgtgtgccgttcaggaggaaacccgcggagtgtgag

SEQ ID NO: 897308 - DNA, 576 bp, Homo sapiens
aagaatgcatccctggcagacctgtgctatgagaaatgttaaaggaagtccttcagtcaaaaggaagtcaatattggagggaaatacagatccacacaaatgagtgaagagctctggaaatggcatmtaaataaataagatttttttcctattatttaaatttcttgaaaagataactgattgttcaaacaaaaataataacaatgtaatatagggtttataacatatgtaaaactaaaatatatgacaagaacagaaaaaaagaatgggagaagaaaaatggaagtgtgctaatataacattatattataagtaaagggggtagtatccatcaaaagtagattgtggtaagttaaacatatatgtatattataaaccctaaaggaaccactaaaataacaaaacaaagtgttatagctaataagtaaaaaaaaagtaatgcagatatccataaaaatattaattaatattacctattaatccaaaaggaagcagaagaaaaagcagagattgcaggtcacacagaaaagcaagaccaactctatgttgctgtggtacaataggaaatatatatag

SEQ ID NO: 897309 - DNA, 604 bp, Homo sapiens
tcagaaaaaacttgagagttgcctataagaawttcatgtcaaatataaatacacaggtgggtcaaaagcaaaaagatggaaaaagttatataatgttaatactaaaaacagaagaaaacaaaacaaacctgcaatggctatattgatattggacaaagtggatttcagaacaaagaatatttatagggacaaagaaagtcatttcataacaataaaagggtaagtttgtccagaggacatagaaatcttaaacatttatggacctaatgacagagcttcaaaatacctgaagcaaaaactggtataagtaataactccatggagagatagacaagtctacaaccataaaataaattttaatatctctttctcaaaaattgatagaaaaaaaggtaaaaaaaaaaaaagagagagagtaaagaatatagaatatttaacagcagtatcaactaaattgacctaattgacacttatagaacaatccacataacaatagaatacaccttcccctcaagtgcctgtggaacatttaccaagatagacaacattctgagttagaaaacaaaccttaatatgtttgaaaggattcaagtcatacaactta

SEQ ID NO: 897310 - DNA, 604 bp, Homo sapiens
tcagaaaaaacttgagagttgcctataagaaattcaygtcaaatataaatacacaggtgggtcaaaagcaaaaagatggaaaaagttatataatgttaatactaaaaacagaagaaaacaaaacaaacctgcaatggctatattgatattggacaaagtggatttcagaacaaagaatatttatagggacaaagaaagtcatttcataacaataaaagggtaagtttgtccagaggacatagaaatcttaaacatttatggacctaatgacagagcttcaaaatacctgaagcaaaaactggtataagtaataactccatggagagatagacaagtctacaaccataaaataaattttaatatctctttctcaaaaattgatagaaaaaaaggtaaaaaaaaaaaaagagagagagtaaagaatatagaatatttaacagcagtatcaactaaattgacctaattgacacttatagaacaatccacataacaatagaatacaccttcccctcaagtgcctgtggaacatttaccaagatagacaacattctgagttagaaaacaaaccttaatatgtttgaaaggattcaagtcatacaactta

SEQ ID NO: 897311 - DNA, 551 bp, Homo sapiens
aacattggggctgatagacatgtttgctgtcttgattctggtgatcatttcgtggatatatacataggtcaaaaactcatctaatgctatattttaatatagaatttttatatttatcacatgttaattacatctaaataaaggtattacaaatacaacaatacatccttccattttttatttttatttattttatttttttgaaatggcatctcactccgttgcccaggctggagggcagtggcgtgatctcagctcactgcaatctccacctcccaggttcaagtgatcctcctgcctcagccttctgagtagttgggattacaggtgcccaccaccacgcccagctaatttttgtatttttagtagagatggggcttcaccatgttggccaggctggcatcaagctcctgacatcaggcgattcaccygcctcagcctcccaaagtgctgggattacaggtgtggccaccatgccgagcccatccttcaattttttaaaaaatagctgttgctgaagattaagttagtactaatacaaaaaaaaaccc

SEQ ID NO: 897312 - DNA, 611 bp, Homo sapiens
taacatgttttgacaatttctgaatgagataatggtgcaggagactttttttttcttcatcaatgctaaacggaaactcagaacataaaaggaaaaygtggagctgcttgggctgcatcgaggttgggggcccaggtcctgtcctccagatcctgtgtgtgtcccatttcccaccctctgtccagcctctgaggggcttccctagagccagcgatccagggaccccagcctgaaacccaggggcagcaggaggagggctgaattgaaagcccaaattgcactctgaacaatcccctttcccctttctgtaaaataagcagttggctctgacgggctctaaaatcccttctagagtggaactgttaacagtctttgaaatgccaaatcaaaatataggatgtaaacactcatttttacaactgaccagtgactaattaggaatctttaaaaggaatacaacattggctttgtcctttctgctatattctgtcttccctgagagggtaagtcattatttttgagttaattaatgcactggcaactttgctattctcttaaggcatgaacaatctctttgaactaaaaagttattactgcaggatttttgcaaa

SEQ ID NO: 897313 - DNA, 559 bp, Homo sapiens
tctaccccatgcccctactgtctaatctatgttgtagtatggctttttttcctyagtatgcttatttgttttttccttgaagatagcacaattaatttaaaaaaatagaagaaaatgaaaacctaccatatacacttttgcatgtgaattctaaaaggagctgtttattatgcattttctttttgcagaaaagttttgtcaaataactttttaattctcatcttcttacccccaattcatgtaaaacatatgagagtcttgagactaaagaagtgttttcttaactaccaaaaggaacatcttttattagatggtaattagcctaaaaccttcagattctgtgtttccctttatttttttaaaaaatgaagggtgtttttttcttccacttaaaaagtaatacatgcttcattcaggaaacgcacatacacatttattcctagaaggaatcacaagaaactattgacaatggatacctttagggagagaggaattttgcatttttagttcttttataccttcaacttttgaaattggaattttctgctgtgcacaggta

SEQ ID NO: 897314 - DNA, 505 bp, Homo sapiens
ttttttttggatgggatccacaactgtgccactgtggagggggtcttggtcctagggggtggagaggcttggtgacttcattcaggacagtagattcaaacatagtgttacccattgtccttcaccaagcagaggcgtgcattcatttgccaaagaaagaacctgaattgttaatgcagaaagcattatggagctggaaaagatcacttgcattacagggtctaaagaacctatagattttctctgcaggaggttctttggaaataacatgtaactgacatacccagtcttttctcaggattcaagggtaaatgaagatgagcataacttagctattatagtaggtgacaggtaccctgatgatgctgaccagccgacttsctgcccttgcacgcagtcataaaatggggtgggataggatgcagtgagaatggatttaacttagattacatccgctcatgagactgggttttgccaagcattgttttaaaccagaattccctaa

SEQ ID NO: 897315 - DNA, 526 bp, Homo sapiens
tctctaaataaataaataagtgatggacatcccatttacctccttgccccttggtttctattcccaaatcctgggcttcagtttgatcttggacaagctttattctttgggtcatgggttccctatctgtagaatgaacattttggatggatgatttgtgaggtcacacatgggtcagattttcttttttttttttttttttttgagatggagtcttgctctgtcgccaggctggagtgcaaaggcgagatctcgagatctcagctctccacaaactccgcctcctgggttcaagtgtttctcctgcctcagcctcccgagtagctgggattacaggtgcgtgctaccacgcctagctaattttgtgtttttaagagacagggtttcaccgtgttggccaggatggtctcaatctcttgacctcgtgatctgcccacctyggcctcccaaagtcctgggattacaggcgtgagcctctgcgcccagccctggctcagattttctagggttcaaatattcgcatgtg

SEQ ID NO: 897316 - DNA, 596 bp, Homo sapiens
ataaaattcaccaattttaagtatacaatgccatgtacatttacaaggtggtataattatcatcacaatctaataacggaattttttcatcttccctaaaggaaaccactagctcttacaccccattctctcccacttctcaccctaagcaagcactaatcaaattcttgcctgtatcgatttgcctatcgacatatcaatgaaattatataatttctgttcttttgtgacttttcacttagcatgttttcaaagttcattcaattttagcatgtatcattacttcactcctctttattgccaaataatatcccattgaatggatatgccacaatttatacaccatttatcaatcaatggccatttagattttttctactttttggttattgtgagtagtactatgaatattcatgtataagcttttacatgggcatgttttcatttgtcgttggtacatatctacaagtggaattgctagatcacatggtracagtatgtataactttttgaggaatagcctcactgttttccacagcagctaaaatcattttacattctcaccagcaacatgcgtgggttccaagttctcaata

SEQ ID NO: 897317 - DNA, 623 bp, Homo sapiens
taaaggatggcgtcatatttcacaatgaaattctatgcccactccttcctttatcgacattactcttgatctgttctacattccttcactgtctgccactgaattcaatgtgaactcaatatgtgaatgaaataatttagtttggatgaatatcaaatcaaagtcattacagctacgttgaggtgcctcatatctatttaatttttcttcctttagattaaaaagtccactaagatgtattttttaaagttgagatagaaagagaaggtgaattttaaaattttttaacaaaattgaacctgtcaagacttcagtggaattttaatccttacagtttatacattgaatttgagggctatgtttttgttaccaaaggaaaggaaatatctcttatttctttcttcttcttcttttttttttttttttttgagatggggtctgattctgttatgcaggctctacagtgcagtcgatcatgtctcactcacagtcaatcatgtctcacaatcatgtctcactgcagcctggacatccccaactcaggtgatcttcctgcctcagcctccccagtagctgggttacaggtccacaccaccatgyccactaatgtttgtgttttttct

SEQ ID NO: 897318 - DNA, 599 bp, Homo sapiens
agactactttcagacagatgctaaaattcactaggcttttgttttccttatttgcctttttttaaaacagtatttttagataaaataatgattgaaataatggctttaaaaatgtccaaaggatctctaagtctcagagcagttgtaatgcacttcaatagagctttaagaatatatttcccttgttcaaagataaatgagttagagacaaatcattacttttaaataatgatgtaactttaagtatcataggatatatagtacatctataggtactacattcacttcacaaattcacataccacttattgactactaggtatgttaaagcaacacttttccacctactgtagcatgtcatttcttgtggaagatagtcatgttcatattcttctctgcattatgtatgtatttaagcaggtatgggactgtaaatgcacacaatcaaacatacagagacttaagtgctattgacacctttacatcatctctgtcacctccgtcaatcacatcgtcttcaraaaactccagatgctaattatatattatattttattcttgtgcttggggaaaggattataaatctctagatattcaat

SEQ ID NO: 897319 - DNA, 632 bp, Homo sapiens
cagtttataaaagcagacaaaaatagacaaaaccaatccatgattataaaagtcagagtatggataatgattaggtgtacaaagcaagggttataggtaattccatatcttgactgggtggtgattacacagaaagtccattttgtaaatatgtgccaattagcagttaaaatatgtgtactttataatcattatactgtagtaaaactgcttaaatttttaaagaagaggtgtcaagaactaaggattttcatgaaatgtacaatatttagaattcccattggaatattatgcgtcattgtcctctgattttaattctcagggaatttgctaagccaccgcagatcaactcgggtacaaacacgtatacttttagatcatagcactcagctctatctcttcattctgcttcctagtgagtttcactcacattcaaatcatttcctgtaatttgctgaaaactttagcaacccaactcaagtttttgttttgttttgttttgtttttcccatgcaaaacctaacagctatyttaaggaaatgcaatgtctttatttttgctcagatgacaacctgccctttcagttccttgacctcatctccacttgattcaacctaagtaaccaaatccca

SEQ ID NO: 897320 - DNA, 621 bp, Homo sapiens
tgttaatttgttgattacatataaattaatatttttgcttccctagtgaggaaactgagaaacaaaawgtggaaaattcttagactcctgggaagaattatctttatccttttattataccagcttgatgaacgtttacagcaagaatcagaggagcaaatttcagtaaaatctctaaaataaaggctcattttatttgtgtgtgtgtgtatatatacacatatgcaaacacatacacacatatacacagatatgtgtgtgtgtatatatatctatagatagatacatctccttacctctaactatacatatgtctacctatctacatcaaaagaaagatagcattttaaaagaaaacagattatatattcttaaggccagttcaataaaggtaacgtttatttttctttggtttttaaaatattatttgaaatttaaatatttacatttattagggatgagttacttatttcttagtcttttactttatacaggtaatatttctgaaaattaattttaggttaaaacattgtttgcaccgaatagatcttgctttattattgatcttaagttacttttcatgtatcataaccttttttgtgtggaagctgaagtagtttt

SEQ ID NO: 897321 - DNA, 503 bp, Homo sapiens
attgggaggacccaggacatctaattagagagtgcctaaggagattcagcatagtcctgccagcaaagattatttatttactttaagagtttagagtggcagtttggggatagcaccaggagatatcagctgtgatggcttggagaaacagtgtaaaccggcagtgtaaacaggagcagggcatgtatgagtagttgagaacagtgaataggagtatgactagacagaagatagtagggatgacaagtttttgggggcacagtccaagttggtctggtgagactggggcttaataaaaaggagcgtccatacaggagctcaaatgggctgtacattgtagcattctgaggacaggcctgaattctgagaagggaaartggtaaaagtattgtctagtcctttttaagttggtggctgagcttggtgaggtgtgtttttaaaagaccattagtccattctaccttttctgaagactgaggaccataagggatataaaggtttca

SEQ ID NO: 897322 - DNA, 452 bp, Homo sapiens
agtcagcaatccctgtcttatctccttggttcagattggcctctaatcttctattacctccagttaacttctgcagtctgcttctattctcttgttaacatttgttgctgcatctgggatgaagcttataattatgtgtccattgccaactctttactagagttttggttaatccaggtcttattttgtttatgtttgcttaagcaaatgatgttcaatgctctttcagatatcctttaaagtaatgggatcaataatttaagcctttataagtatgcatatcctggctaacctcattttacccatgtgtctgtactgtcagttatatttacattgagcaacstcactgactcttgtggatttatttaactatgaagcaaaataatagttataaattcagtatgagaaagtattacagatatcatgtcttatcttattctccagcgtatttt

SEQ ID NO: 897323 - DNA, 452 bp, Homo sapiens
agtcagcaatccctgtcttatctccttggttcagattggcctctaatcttctattacctccagttaacttctgcagtctgcttctattctcttgttaacatttgttgctgcatctgggatgaagcttataattatgtgtccattgccaactctttactagagttttggttaatccaggtcttattttgtttatgtttgcttaagcaaatgatgttcaatgctctttcagatatcctttaaagtaatgggatcaataatttaagcctttataagtatgcatatcctggctaacctcattttacccatgtgtctgtactgtcagttatatttacattgagcaacctcactgactcttgtggatttatttaactatgaagcaaaataayagttataaattcagtatgagaaagtattacagatatcatgtcttatcttattctccagcgtatttt

SEQ ID NO: 897324 - DNA, 612 bp, Homo sapiens
agacaaagactcagacaggaaagaatggtgtttgaggaaggtagtgactcaacaagatgggttgcagcagaggagttagggtgagcaacaggatagcttggaaatttccatctttgacttttgagaagaactttgggacaaagctctttgcttaagattggtattgagaaacaataacatgctagccactcttttttttttttttgaggtgaagtttcactcttgttgcccaggctggagtgtgatggcacgatcttggctcactgcaacctccacctcctgggttcaagcgattctcttgcctcagcctcccgagtagctgggattacaggcgtctggcaccacgccggctaatttttgtattttagtagagacagggtttcaccatgttgacaaggctagtctcaaactcctgacctcaggtgatccacctgccttggcctcccaaggtgctgggattcaactctttattgagcacttactacatacatgacattaggttaaaacttcacatgcrttatctcacttaataataataactttcaggtaggtattattgtacctaccaaccaaccctgtaagtggatgaggcagaatgaaccaaggacagtc

SEQ ID NO: 897325 - DNA, 577 bp, Homo sapiens
ggtcagatgttctgtttcagtaggtctggagtagagcttgtgaatatacttcataaatatttgttctgatactcattaaaagttctcaaaccactaacttaggttgcaggaacctaaacactgttaggacaaatattttgcctatttgcttgcttatctttctgctcattcatctcccagtgacccctcttccctgctccatcccctaccataagcttgtctaggtttcagtgaactgtcaattagtatctgctaattggtgcttaacgtattgatgctcatggtggtatttttgtttcaacaacaatagtaataacagcaacaaccacaagaacagtaatatctggtttacatatttgaaaccttgtatctctttgaccctcaaatacttctggtgccacaagttgtagggaattttcatactgtgagatgatactggccttggactttcatgtaatcacttgaaatgrgtcagcaaattgggaagtaggagtactcttgaacatcctcctaaactgagatggttagcaataactgaagtctatatggaagtaactgtaaaccatataaatatttc

SEQ ID NO: 897326 - DNA, 577 bp, Homo sapiens
ggtcagatgttctgtttcagtaggtctggagtagagcttgtgaatatacttcataaatatttgttctgatactcattaaaagttctcaaaccactaacttaggttgcaggaacctaaacactgttaggacaaatattttgcctatttgcttgcttatctttctgctcattcatctcccagtgacccctcttccctgctccatcccctaccataagcttgtctaggtttcagtgaactgtcaattagtatctgctaattggtgcttaacgtattgatgctcatggtggtatttttgtttcaacaacaatagtaataacagcaacaaccacaagaacagtaatatctggtttacatatttgaaaccttgtatctctttgaccctcaaatacttctggtgccacaagttgtagggaattttcatactgtgagatgatactggccttggactttcatgtaatcacttgaaatgggtcagcaaattgggaagtaggagtactcttgaacatcctyctaaactgagatggttagcaataactgaagtctatatggaagtaactgtaaaccatataaatatttc

SEQ ID NO: 897327 - DNA, 577 bp, Homo sapiens
ggtcagatgttctgtttcagtaggtctggagtagagcttgtgaatatacttcataaatatttgttctgatactcattaaaagttctcaaaccactaacttaggttgcaggaacctaaacactgttaggacaaatattttgcctatttgcttgcttatctttctgctcattcatctcccagtgacccctcttccctgctccatcccctaccataagcttgtctaggtttcagtgaactgtcaattagtatctgctaattggtgcttaacgtattgatgctcatggtggtatttttgtttcaacaacaatagtaataacagcaacaaccacaagaacagtaatatctggtttacatatttgaaaccttgtatctctttgaccctcaaatacttctggtgccacaagttgtagggaattttcatactgtgagatgatactggccttggactttcatgtaatcacttgaaatgggtcagcaaattgggaagtaggagtactcttgaacatcctcctaaactgagatggttarcaataactgaagtctatatggaagtaactgtaaaccatataaatatttc

SEQ ID NO: 897328 - DNA, 577 bp, Homo sapiens
tgtctactatttccatcttatgtccaagtatactcattgtttagtycccacttctaagagggaatatgtggtatttgattttatgtttctgagtgagttcacttagcataatgacctccacctccatccatgttgctacaagggacataattcttttttcatggctgcatagtacttaatggtatatatatgaatttatccagtaaactgttgatgaaaacttaggttggttccatgactttgctatcgcgaatagtgcttcaatgaacatacaagtgctggtgtttttttgatatgatttattttcctttgggtagatacctactagtgggattgctgggtcaaataatagttctatttttagttctttaagaaatctccatactgttttacatagaaattcaactaatttacattcccaccaacagtgtataaacattcccaaaaggtataattcttatcctcccaccttttcagatgaagtgttgaagttgacctgtttgaaatcacttaacttattacaatgggacaagtattaaaaaggatacttcctgttcatggagtttaccatgctcct

SEQ ID NO: 897329 - DNA, 577 bp, Homo sapiens
tgtctactatttccatcttatgtccaagtatactcattgtttagtccccacttctaagagggaatatgtggtatttgattttatgtttctgagtkagttcacttagcataatgacctccacctccatccatgttgctacaagggacataattcttttttcatggctgcatagtacttaatggtatatatatgaatttatccagtaaactgttgatgaaaacttaggttggttccatgactttgctatcgcgaatagtgcttcaatgaacatacaagtgctggtgtttttttgatatgatttattttcctttgggtagatacctactagtgggattgctgggtcaaataatagttctatttttagttctttaagaaatctccatactgttttacatagaaattcaactaatttacattcccaccaacagtgtataaacattcccaaaaggtataattcttatcctcccaccttttcagatgaagtgttgaagttgacctgtttgaaatcacttaacttattacaatgggacaagtattaaaaaggatacttcctgttcatggagtttaccatgctcct

SEQ ID NO: 897330 - DNA, 588 bp, Homo sapiens
agaaatggattgaggaaaaaggagtcactttataatgaggaaaatcttaagaaagcggttatcttaatgtcaaggaagagtcccaaaaggacaaatgctagacatatccctctctactgttcttctacaacagaacaaggacaaattagaattggttctctagtaagcattaactactctgaaaaattttgagcttgtaaagtcaaagatctctggttcctctgtcaagtataaatgcataaaaataaaaccgtaagacacaacaaagcttggtaatttgtacgtaattctcctccatagacttggcaggaattcaagctctggaattggagaggttaaggagtcctagtgattccttggcatcattgttggtggacttgttaaaaaaaaaaaaaaacacttggtttggaaggatgtgaataatttagatatctgaattcactatctgctgagttgaaatgaaatgctaccaaggggtaggcytgaaaggttatttagccagattgtggaatctctaaatatgcaatcactccccaactcagagttgccacatttagcaaaaaacaggacacccagttaaatctgaat

SEQ ID NO: 897331 - DNA, 569 bp, Homo sapiens
agaaaagaatcttttaatatttcctaaaccagcttattgttttactctgtgtctcaatagrcctaggttttctatcggacaatttgaacaatgtgtccattggatctgattcatcaaattggtattgaacatccactgtgtgcaaggtactcagcaataccaacttgataccaagatgtgtggaagatacaacaatgaatatttattcaatagctattaaatgcctttctatatgccaggcactgagctaggtgatgatgatatacaagagagaaggtacatatagtttctgtccttggggaccttctagtctagagggaaaaaataaaccacaattataatgaagtctcagtgccgtgccagggaaggacaaaatgcaatgggaaagaagagcaagataagcaggaggcctaggaaggtgaccaggtggaagtgaccataagttgagaacaaagcatgagtaggaattagccaggtaaagagctaggaagagcactagggaacagcacagggaaatgcccaggcaagcgaaggccccacaggcttccctgagaaagcagtaggagtta

SEQ ID NO: 897332 - DNA, 599 bp, Homo sapiens
aattgcaagggttgaatcctggcgccactcttcactgagctctttttgcctygtttccttgttggtagaatgggattcaaaaccatccgaattttgtaggattgatgtgagaattaaacaagagagagccgaaatggtggctcatgctgtaatgccagcactttaggaagctgaggcaggaggattgcttcaggccgggagtttgagaccagcctggtcaacatagtgagatcctgtctctttttttttttaaacaaaaaataaataagaattaaataagagaaccatgtaaagggcttagcattctaactgacacatggtaagtacttaatgaacatcagctatcatcatcactatttttcatgcagagctagagtggcagagccagtattggtacccagccaacccaattccagagaccagtttcttaaccaaaattcctattgtcttcggactttctgtgtccatctgtctggaacgaacttcccttagatatccatctgcacagctctcttcccctctacatttaggcctctgctcaaatatcacttcctctgaatgacacttcttggctgcctgatctaaaacggtactctttg

SEQ ID NO: 897333 - DNA, 677 bp, Homo sapiens
gttcccaaatttataaaacaattactaatagatctaagaaatgagatagagagcaacacaataatagtagggtacttcaatactccactgacaacactagataggtcatcaagacagaaagtcaaaaaagaaacaatagatttaaactataccctggaacaaatggacttaacggatatttacagaacattctacccaacaactgcagaatatacattctattcatcaatacataggactttctccaagatagaccatatgataggccacaaaatgagcctcaataagtttaaggaacttgaaattatatcaagcactctctcagatcacagtggaataaaactggaaattgaccccaaaaggaaccctcaaaaccacgcaaatacacggaaatgaaataacctgctcctgaatgatcattgggtcaaaaatggaaattaaaaaattctttgaactgaacaacagtagtgacacaatatatcaagagctctgggatgcagcaaaggcagtgctaaaagtaaagtttatagccctaaacgcttgcatcaaaaagtctgaaagagcacaaactgacaatstaaggtcataccttaaggaactagagaaacaaaaataaaacaaaccaaaacccagcagaagacaggaaataaccaagatcagagcagaactaaatgaaa

SEQ ID NO: 897334 - DNA, 517 bp, Homo sapiens
ctttgcctcaggttctctgtctgcaaagcaaatgatagcacttccttatatggttgttgttaggatcrcattagctaacatacgttaaagcacttagagcagagcccggcacataggcagccccatgtctgtcatctttattcattatcatggccattgtgattattatttatcatggaagagaggtatcttccaatgagtgatacacattgtgctgagatccaaaagatgaagttaggtattctaaggatgtttattttttcagtgtttagatgttacatttttactttaaagcacattagaaaattattatattcccacttacagcagtgacttaatgtcatttccatcacctccatagcattatctgccctgaaatctgaaaatcagtcagtcctgaaatcattcctctgggtatgctaggtttgcctaactatgctctgccaaccaccatgcagctgtatcttttttttttttttcttttttgagatgggagtttcgcttttgttgtccaggc

SEQ ID NO: 897335 - DNA, 617 bp, Homo sapiens
aaaaatatacagtcactgagattctttaaaagagctcaatgcatgaattcaacagaggattagacagagcagaaggaaggattagatctcaattcasaaaatacagcatgataaatattttgaaaactttccagttatgaaataactatattttatacaattgaccagaaacagctttttaaatttatgagtctatttataaaatataccgcctcaatcagcaccgtcaaatctaaatataatgcaagtcacgtatataactttgtgttttctagtagccacactagaaaagtaaaaacaaataggtaaaattaattttaataatatactttagcagttgaataatatatttaacccaaaatatccaaaatgttattttaacatgtggcactagccacattttctgtgcttagtaaccatatatactagtagctaccatattacacattgcagccctagatgcttcatcaattcttgcagacagccttttaaatgcttagctgaacacgaggtagattataccaaaaaattgaaaacaaaaaaaaaaagaagctactgtcgtggacattctagggaattttgcctttctcagaaacttctgttccttgagtgtttat

SEQ ID NO: 897336 - DNA, 498 bp, Homo sapiens
tttgccaggcaattgagtggggagggagggatgactaggtggagtatgggggaattatagggcagaaaatctattcggtatgaaactgtaacaggacacatgtcrttatatatttctcaaagctgatagaatgtagagcacaaagagtgaactctaatgtaaactatggactttagtaaataataatgcatcactattggctcatcaattgtaacaaaagtaccatactaatgcaagatgataataacgaggaaaactgttgaggaaagggtgagtggatgtgtgggaactctgtactttccactcatgttttttgtgaacctaaagctgctcacagaaataaactcttatgtaacccttgagaagtctcaacagacatggtttcctatttataattgtggccagcgcttgaaaagtcaggttggagaggttgtcaaaggaataaataaaaggtagattcctttcttctattctcaggatcattctgctgcattcatt

SEQ ID NO: 897337 - DNA, 647 bp, Homo sapiens
actgccaaagatttcttacatcgttagcactcactggcccactctgacttgctcttctggctctttacgaatgtatatgctttgcctgaaattggaaagcacttgctcttaattttctctgcattaagcaagtgtttccctggcagatgcagtttgcgcaggcatatttttaagcgctccccctgctggcaagtctgtgtaaacagtttgttggcctctctaggccctggctactattaaagccacttcacctgtcagcttaggagagctgtctgtgattccataaggccccagttaggcactcacatttacagaaggacaggagcagcaatttagcctttaactattagcttgccataacagattgcattatcaacagccgctccaacactcagaatgataagatgcaacctgggttcatttcaggggatgctgagggcctgctgaacatgccaactttgccttataggagataaaaagcttctccttcagtatctgtacttaacaaggttgrccatcttgcttttgtctgctttatctcacatacttttcttatttaataagcaaatgtgatgttaataggtattaacattggcaacattttcagtttttcttaagtggttttaaaaaggatcacagaaaaagga

SEQ ID NO: 897338 - DNA, 647 bp, Homo sapiens
actgccaaagatttcttacatcgttagcactcactggcccactctgacttgctcttctggctctttacgaatgtatatgctttgcctgaaattggaaagcacttgctcttaattttctctgcattaagcaagtgtttccctggcagatgcagtttgcgcaggcatatttttaagcgctccccctgctggcaagtctgtgtaaacagtttgttggcctctctaggccctggctactattaaagccacttcacctgtcagcttaggagagctgtctgtgattccataaggccccagttaggcactcacatttacagaaggacaggagcagcaatttagcctttaactattagcttgccataacagattgcattatcaacagccgctccaacactcagaatgataagatgcaacctgggttcatttcaggggatgctgagggcctgctgaacatgccaactttgccttataggagataaaaagcttctccttcagtatctgtacttaacaaggttgaccatcttgcttttgtctgctttatctcacatacttttcttatttaataagcaaatgtgatgttartaggtattaacattggcaacattttcagtttttcttaagtggttttaaaaaggatcacagaaaaagga

SEQ ID NO: 897339 - DNA, 635 bp, Homo sapiens
gtgcataaatatacatggactttcatcatggctaaagaatttatcatggctaaattcttttggatttcaaaaatttggtagataacaatagtatttcccaatggattattttatttcttaaatacwtttgcataagtttcaaccaactgtcatcaggcatacttgtagaatgaaaccatgcattttaatcctttagggtcttatactaaatggcaaagccaatcatgccctgggtcctataaaacacttcttaaatttgtgcttatctgtctcctaagtggaggactttgcatcttcactgatatagaccagtggttttcaaactgagcaataaggatttttagggatatttgtgcattgggaactattctggaagattattgaggtgaagtgggacatcaaacaagttggtgtctggacctgtcccacttgtttttaaccagaacagctctgtatttcttttgtatatcgagttttcacattgtgttctaagaaagttttactctgttttaaaaaataagcttggaaattttagactggaatgatgaatctcagaagatgctactaatctgtgtagagagtgagctatatatagcctttattcttttacttggagttgtcatacttcataactt

SEQ ID NO: 897340 - DNA, 611 bp, Homo sapiens
agtgctttccatgtgttatctgtttcatctttccaagagcctgctatgaggagcaccactgtccacatttagcagaggagggcagtgmggctcagagaggtgaagacagttttccattgtcacacagcttgacaactgataagtgttggaccacacagaaatgctcaagagtttcttgatctcccgggtcaagcaattctccttcctcagcctcccaggtagctgggtttacaggcgtgcaccaccacgcctagttaatgttttttttgcatttttagtagagacggtgtttcaccatgttggccaggctggtctcaaactcctgacctcaggtgatccgcccacctcagtcccccaaagtgctgacattacaggtgtggaggtggaggttgcagtgagccgagttcgcgccactgcactccagcctgggtgacagagcaagactctgtcttaaaaacgcacaaacgaatgaacaaaaacacataagaaatcacgtgtgtctgtgccctttccacattccacaggcacacagggaactctggcctggccctggcctctttgggaaaggcgaacataatctcagctcaatctacaagggatcagatgagacc

SEQ ID NO: 897341 - DNA, 628 bp, Homo sapiens
tcatcaagaggtctgaaatcagtgtctctgggctrgatcgttttccatatctggaaaaaaaaaagtcttttaaagcaagtttggaataggcataaaaacctttaggaaaaaggaagatagtctcctatttgggatatgaaaactaaacattattgtcaggtgttcatctgtaacaagcaagctaggtgtatgaagcatatattatcgaaacattatcataaatattatttcaaattatttgtatatatatttaaactttgctcaaataataaataatctaggaggttatttaaaccgaaccaaaattcctagtcaaattcctgccttcttaaacaaccacaaataatatgtatagagatacatacttttataactaggtgacaggaaatttgaaaacatggaagcatgattgtaaatgtttccacaattagttaattggctattgttctgatgatacacagcagtttaaatcttaacaaggagaccagatgatatttcaaagacagtcctagaaaaaaaaaatcagcagattgccgtccaagacccacctgtgtctttgaatcccaattttctcgtttgtaaaacaacccctgcttaaatcagagtctttgtgaacatccagtgtgaa

SEQ ID NO: 897342 - DNA, 620 bp, Homo sapiens
aggatggaggaaatggtctgtgtgggggtttggggtgagaagctcctttaatagtgcctgagtttgttgtctgttttggtgctgcagctgcctgtgtcagcttggagagtgggtaatcacccacttgaaaactgcctattttcataattatactgtgttttcagtctgttaattttgttttccacatgttcaacttattcatcaggttataaatttgcagatctagaaatacatataattttaaacacatctttacaagtaagcgaaagcattttcctccttccacttcagagaataaccaaccagtattgggagatccggggaagtgggcagtatgcgggcccccactgcagtggaagttactgcaagacagagcttcttctctgtctggcaatgaagggcagagtgagtggctgacactctccagggtaatggccctgcctgggcacgtggggcagggctggcagctggggaggaggagctgtaagctcatgccttgtcgttgcagtgcagggtaaggaggcctgaaackgcaggccagctaacacttttagccacgggcctgtcaccgggggtggaggtaggcagagagacccagtgggtaccaccaagaaagaggc

SEQ ID NO: 897343 - DNA, 639 bp, Homo sapiens
gcgcttttatgttacagagacagcgtctttccctaaacctcatgaccaacctctgctagcttccaacttttcttctgcagcttcctcacctccctcagccttcatagacttgaagagagttagcrccttgacctgcattaggctttggcttgagagaatgtcatggctggtttggtcttctatccaaaccactcaaaccttctcactatcatcaacaaagctgtttcactttcttatcatgtttgtgtttgttgcagtagcacttttaatttccttcaagaacttttcctttgcattcacaacttggctaactatttggcacaagaggcctagcttttggcccatctcaggttttgacatgccttcttcactaaatgtaatcaattctagcttttaatttaaagtgagagacatgcagctctttcacttgaacacttaagtgccattgtagggttattaatgggcctaatttcaatattgttgtgtctcagggaatagggaggctggaggagaggcagagagagggagaaacagctggtttatggagccatcagaacacacatgagaattacccaaatgtaacacagagatagaaaatcagcacattagcttagtgtaaaaactggtgagatccaaata

SEQ ID NO: 897344 - DNA, 655 bp, Homo sapiens
ttgtcaaattgtggggttatgaactacagaaagtactcatgttgggggcagactaacgtcaactaaagtggacagtgcattccccagctctcatgtattacgttcctcttggcacaacccagtatggcttggacttgaaataattatgttttcttagctttcaacccaagcatctgttccagatggccctggagcacaggagtcgtgctgctcatggttaggggcttgccctaaaagagtcagtcattagtctccttcataacacagagggctgattgttgtgatttaacaacaaaccaaatgtttgtcatcacaatcctgaggaaaaatgatgagtcacagtgcatttaagagaaagttccactttgcctcccaaaagggctcagactaagtcctttggttttatatattaggttgaaacatttgcagtggatttttgtaagtaagaaataataaaaaagcagcaatttaatattgttcaatctagtccaaaaaaatgagcaataattcacaggcagccacatagactgtatacagcatttcttcagaaacacrgcctgagctgaccaggaagaacaggcaggtgccatattggtttcattacagagtttgagaaagccccctgccttttggaaaaccttccctacctgtctgc

SEQ ID NO: 897345 - DNA, 620 bp, Homo sapiens
cagtgagattacagtggggaattagaagcatgccacagggagggagagttgacaagcccttgatgtcatctgtcttcatgggtcactgctgccattcctgccttcacagtccttccaggccckgctggcctcctggaacctcctaacaatgactccagctcaagaagggagatgcaaaaacttggcattctgtatttccaggcccttttcaggtcctgcctccgctgctgaatgctgactagaaggagcggcactggccccttctctaaaacccacttgatgtcttttctctcgctccccagcctgatgatctttctccagccttgggaaggagggaaagaccttctcactccctccatatttctccaaatatttgctttatatccagagtcctctcagtagccctcagagcttagacttttgaaaaccaaagtcaaacaatttatttcccagctctttattctgactgatctctggaaacaagttgctctgtacctcctaaaagaaagtgtgcattgggcaataccaaaaagctgggaaaactaccctgaaaaatcagcctaacacatacatttggtcatgagaagaaactgaaataatcaatgtcaacaagtgacttg

SEQ ID NO: 897346 - DNA, 438 bp, Homo sapiens
ttcaggcagagagaggataggatcagcttatttctgctctatgatgtctggagccacagctggggtgccttgaaaggatgaagatggctgggacggctcacacagggacatatgtctggagctttagttctggctatgggctggttcctatggtccttcctcatacggcatctattagctgaaatgcccatgatgtcttctttaatcacaggtctggttcctggactgggatggctggaatatttgggaactggctgggtacctctctcttgcctcatggcttcttcatgtgactagcttgggctctctcacagcatggcaatctcagggtagaacttctgatattgtgtctagcctttctcaragctagtgttgcaagagacaaggcagaagctccgagtcttcttaaaaggcttcttgaaagtcctgtgtcatccc

SEQ ID NO: 897347 - DNA, 587 bp, Homo sapiens
tgaatacatactcagtgactttgagagaattccagggaattggtcagtccctgtttcacttgtaaatacacagcaatcaagcctaccaaatctatgattgattggggtgtctgaaagagatggagggaatggaatcaacctgaaaaacatatttcaggagttcatccctgaaaacttccccaacctagctagaggggccaacattcaaattcaggaaatgcagagaaccccagtaagatactccacaaaaagatcttccccaagacatcatcatcagattctccaaagttgaaatgtaagaaaaaatgctaaaggcaactagagtgaaaggcccggtcacctaaaaagggaagcacagacttacagtggacctctcactggtaaccctacaagccagaagagattgaggaccaatattcaacattcttaaacaaaaagaattccaacccagaattttatatctgactaaactaagcttcataagcaaaagagaaataagatcattttcagacaakcaaatgctaagggaatttgtgaccattagaccttccttgcaacagttcctaaaggaagcactaaatatggaa

SEQ ID NO: 897348 - DNA, 606 bp, Homo sapiens
aaaagaaaaaaatatgggcattgcataaggataaagtgttaaattaaacaagaagatctaactatcctaagtatatatgcaccmaacacaggaacacccagattcataaagcaagtttatggagaccttcaaacagacttagactcccacacaatagtagtgggagactttaataccccatgacaatattagacagatcattgagacaggaaattaacaaagatattcaagatctaactcagcactaaatcaaatggccctgatagatatctacaggactgtcctacttgaaaccatacaattacatggtaattgaatgacctgctcctgaatgacttttgggtaaataataaaattaaggcagaaatcaagaagttttttgaactaatgagaacaaagatacaacataccagaatctttgggacacagctaaggcagtgttaagagggaaatttatagcactaaatcccacatcaaaaagttagaaagagctcacgttaacaatctaacctcacaactacaggaactagagaactgagagcagaaaaacctgaaagctagcagaagacaagaaataaccaaaattagagctgaactgaaggagat

SEQ ID NO: 897349 - DNA, 637 bp, Homo sapiens
gcaaccgtactcgagacgggtacagtcaagtcattgggggatgatatgtttccagaaagcatttttaaggcaaatccacatatatagacttgctctatgaaaaaatatacatctggatagaggggactctggctttggaagggaatatttgctatctagaaatagggtattcttactaacatgcctttgtgttctgcccttttgtctatgaacatctaaataataatacctaccctctacttaatcccaagcaatgtaccaatggtttgagcttagtttactcaaacatgccaagaaaccattccgtttgggttagtataaatgcattctttgattcaaagtatgtattgagcaccatctatcgaacagtggggtctttgattgcaagcgataaatattatctttggcaaacaagtaaaaacaaggaatttgttgggaggaacatagtgtagttcaccaaaaggggaggaactagtatgtctgtgaggaccaagggggcagaatcaaaagacaatctctctatcatagaattgtgaaatggayctactccagcccatttccacctttgagtcataggttcagaattcacattccatggagcaagagtttggttggccaagctggtgttctgtgccat

SEQ ID NO: 897350 - DNA, 647 bp, Homo sapiens
cacagccttggacagctctgcccctgtggttttgcagggttcagcctccatcccggctgctttcatggatgggtgtagagtgtgagttttccaggcacgyagtgcaagctgtcaatggatctaccattctggggtctagaggatggtggcccttttctcactgccctagctacactaggcagtgccccaatgaggactctgtgtgggggttccactcccacatttcccttccacactgccctagcagaggttttccatgaggactctgcccctgcagcaagcttctgcctgaacatccaggcatttctatacatcctctgaaatccaggtggaggttcccaaccctcaattcttgacctctgtgctttcacaggctcaacactacatggaagccaccatgtgtttgggtttgcaccctctgaagcaatggcccaagctgtaccttggccccttttagccacagctggatctgaaggagctgggatgcagggcaccatgtctcaaggctacacagagcagggggtgcctgggtctggtctataaaaccattttctcctctgggcatgcgatgagaggggctgctgtaaaggtttctgacatgccttggagacattttccccattgtcttggtgattaacattcagctc

SEQ ID NO: 897351 - DNA, 482 bp, Homo sapiens
atcaagctaattagatttgttctttaaatggttgtttcaaacagctagctgttaagaaaaaaaaaagcaaagctagacctaccactcaataaattctagacaaattaaatatttaaatattaaattatgaaatttaaaaagactcaaggaaaatacggaagactttttttttatttaatttttcataggggaggaagatggctgaacagaagctcccaccaattgtcctcccaacaggaacaccaaattgaacaactatccacacaaaaaaaagcatcttcatgagaagcaaaatcaggtgagcaatcacagtatctggttctaacttcatattactgaaagaggcattgacgagkgtaggaaagacagtcttgaatcaccagtgccacccctcttccatccctcaggagttgcctccttgtacaagagagaatctgtgtgcttgggggagagagagtgcagtgattgtgcgactttgcatt

SEQ ID NO: 897352 - DNA, 427 bp, Homo sapiens
ttttgaggtgaaattcacataaaataatcaaccactttaaagtatacaattccctgggattgaatgcattcacaatgttgtgtggccgccgcctctgtctagttccaaaatgttttcatcacctaatacccattagcagccactcccctaccccacccagtccttcaaaaccaccaatttgttttctggctctggctctatggacttacctattctagacatttcatataaatgggactatatactactatatataacgatgcattatgattgcccctgtgagtagccacggcactccagccattttgtcaacacaaaaatgtcgacattgccaagactgagaaactttggtctgcataaactcacayagagttcactctaagacgctgagtgaaaaaccaagttacggaaagatatctacgggaga

SEQ ID NO: 897353 - DNA, 625 bp, Homo sapiens
gaggcagagacaggagaatctcttgaacctgggaggcggaggttgcagtaagccgagatggcgccactggactccaccctggcgacagagcgagtctctgtctcaaaaaaaaaaaaaataaataaataaaaagaagaagaagaaaaacatattcctttgctggaacttccattcattccttctctgccctcctactcccttctgataaatcacgttcatcccccagctccaggtatcatgagacgttcccacccatggctgcaactccttggaacagggcgcgtctctaaatctgaaccaaccagacttcctctggggttatccatgtaggaaagcagaggcaggagactgtgttgctctaaggaaggagccagaaatcatgctttggttgttttccagctcccatgaggtatgcctctatgttctgaggcaatgaaatgtagccatcagacagaaagaagggcgtgggaatcagcagggctcagttcaaatccctcctctggctgttgtgtaatgattatttatttatttatttatttatktatttatttatttatttttgtagagacagagtttcattctgttccccagactggagtgcaatggtgcaatcatagttcactgc

SEQ ID NO: 897354 - DNA, 643 bp, Homo sapiens
ttttccaaacataaacacaacccagaagtattggactttataaattagcagaatgacctctagaagacacagctgagrtacaatattagagaagttatcctgtgagaatagatgctatccttcacagtacaatatatatcttatatcaatggccacagtatggtacagtatatgcccactggtttgaatatataggcctgtgaaccaagaaggggaagaagaaaagaccctgctcactatcacttccagtgacccagtttcttaacttgctcttcttgtcctgacaactttaggttctgtgggtctagaagtcctggtttccagagatgacacagagttccaccaaacttcaagttgtgataatcacccgatcacattgaactacccagccagcaaacctgaatgcaaggaaagtagttaccaaattggtgggtgtaaatggtcttgataaccaggaagaggtggaactgcagatatattatagcaggaccaactgtagcagcagagactcaatttacccagaaattgtaactaactgtccataagcttggagaagctgtggtggaaagcaaggaactgaatatgataagcaagtagatctaagaaatgtaaggaatgaattatggtagataactcaggagac

SEQ ID NO: 897355 - DNA, 398 bp, Homo sapiens
ccctttgggaaacttacatcctagttaaagagacaaaaaaaaattgacaattaaaataacagattaccaagctatgatacaaattggaaacaaattagggtgctctgaaagagaaaagaaggagagctctactttaaatagggtgcccagggaaggaggtatttatgatatgacctggaagatgagatggcaccagccatggttggggaggagctgtcagcatagaggagaaatggaccaacaggaggagaagccagccacagagagaaggagcccaaagaagagcattccyggcagagggggcagccactgcaaaagcccagaaaaagaggaatggatatttgaggaacaaaatggcagctaatctgactacagttttggggaacaagaagagtatc

SEQ ID NO: 897356 - DNA, 622 bp, Homo sapiens
actagacatccatatgcacaagaataaaactgaccttgatctcccactgtatacaaaaatcaaatcaaaatggattaaaacttaaatcgaagacttcaawctaagaaactactaaaggacaacattggggaaaatctccaggatattggtctgggcaaaaatttcttgagcaataccacagaagcacagacaaccaaagcaaaaatagacaaatgggattacacctggttaaaaagcttctgcatagcaaaggaaacaataaacaaagtgaagagataacctacagaatgggagaaagtatttgcatctgacaagggattactaaccagaatatataaggagctcaaacaactctgtaggaaaaaaatctaataatctagtcaaaaaatgggcaaaggatttcaatagatatttctcaaaagaagacatgcatgtggcaaacaggcatatgaaaaggtgctcaatatcaccagtcattagagaaatgcaaatcaaaactacaatatcatctcaccccagttaaaatgactatccaaaagacaggcaataacaaatgctggtgagaatgtagagaaaagggagtacttctacactgttgatgggaatgtaaattagtgcaacc

SEQ ID NO: 897357 - DNA, 550 bp, Homo sapiens
ccatctgtaaaaggggggaagcagaatcatcataagagctcttatttactgaggtctcatatatgccaatatgaccaataatatttattattttttttctgtattttcatagctaaaagcaaagagctcttacatatttaaagtaaaacataggccggccacggtggctcatgtctataatcccagcactttgggagactgagacaggcagatcacttgagcccaggagttcaagaccagcctggccaacatggtgaaaccccgcctccactaaaaatacaaaaattagccaggtgtggtggcaggtgcctgtagtcccagctactcgggaggctgaggcaggagaatcgcttgaacctgggagatgaaggttgcagtgagttgagattgcgccaccgcactccagcctgggcaacagagcaagactctgtctcaaaaaaaaattwaaaaaaaaaaaaagtaaaacatgatagcgggcacttctcatgagccatctgtgcccagctcttttgccttccccatcacactggctctctctgtgtaccccaga

SEQ ID NO: 897358 - DNA, 667 bp, Homo sapiens
aggtgtcccacagagcagcagacagaggaaagagacggcaaggaaggtaccaggcggccgcagcagggatgcacgggccgcagacagacagacacagctgcgtggctgtcagccacactcagggagaggcaggcagagggccagacgccgagcttacggtcactcagcagagagacgccagtgggtctgtctgaggccgctggctgccacccagccgcatgtgcagagtggggaggaagaggaggatgtggtgagccgctccccgccagccccgcccacccgcagctgggctcctcctgggagggagtgagaaagaggtgggagggggcctggccccacagcaggcacccactgtcaccaaaggtcacctgcaagtaagacatttggggccatcggggtgacacttccctcttagggacctgtgacatcatccccacaggcctctcagtcataacccatgaggcaggcagtgcctcctggagccaccacattgcacagatatggaaactgaggccagaggtgtgaagatgtggcacagtttcacccgtggacccagagtcctcagtggccgastccagcccctcagcacagagagaaggaccagaaccttgcccaaggtcccacggaagcccctttttcagactttgcaaaccagcctgtttcttat

SEQ ID NO: 897359 - DNA, 550 bp, Homo sapiens
tgcctgatgttataccactcgaagtgacagattgggagtttgtacccagggccacctgattccaaagcatacattctttctgctaccctttattgcctcatgtttttatattttgatttctttgtagttaatgccttatatattaggagcacagtaaacatttaacctgtattgggcttcttgattcctttccattttagtttttgctttttactagtacttctaccagaaaataagcagaggcagtgaaatctgagttaataaattctgctttttatccattttgcaaaagatttaaaagggaaaatttgaacacttttggcatagatatagggatttgaataatctctggatggtcatcatccatgcagttcctacccattattcttatagattacaaaaaaaggcggggggacttctttagaaaatgttattctcttcagaayttcattttaaaaatctgttttaatgctatgcaaagcatcagaaaatataagccatgaattgtctttagccaaaaatgtttcctcttttgtgactttgcttaaaa

SEQ ID NO: 897360 - DNA, 602 bp, Homo sapiens
aatcacttaattaaattttaatttgaaaatactcatttcaggtgtaaacatttccatttataccttcatcatggtcttaacatgtggcaacataaagacattaaaattattatttcagcactacaggactatctaccttaaaatatgactctgtgccgaataaaatgtcataggtgacacaaagtcttctctcaaagtaaatcatctctcacctctatggaaacaaggtatgtttctaagctgatgtaataaacacatttttccttttttttaaaatcaaaaagctttgttgaaatataatttacatactatagaatgtatctgttttaacataaagttaaaagatttttagtactttttctgagctgtgcagccatctctacaatccaactttagagcatttccatcactgcaagatccctcacgcccattagcagtcactatcagcttccagccccagcccttcacaaacattaatctactttttgtacctatatatttctcttttctggatgcttcatgtaaatggaattgtacagtatagtaaacacagtttttatctactgatttttrtattcaactaggttcaacatgtatccaga

SEQ ID NO: 897361 - DNA, 580 bp, Homo sapiens
taatcaggagtgtatcctaaacttgagggtttktgtgtgtgtgtgtgtgtgtgtgtgtgtgtgtgtgtgtgctgttattgttgttagaggcaagagtctcactatgttgctcaagctgaacttaaactcaggctcaagctgggactacaggaacatgtcactgtgcccagcttcaagaaaatgtttttaaaaatgttcaggccttattaggtctattacatcaaaatcctcaggggaaagcctacaattgtagatttttaacaaaatgtcctcaggtcgctgtaatgcacaattctgagaattagtgcagcaatcacttcagtctcatctctcacccgcatggctagttccctttatcagttggacatgtggccaaaaagagaaaagagtaagagatagtgtcatttattaaagctccagttaagtttcctgggtatgggtagaacacaaacaagtaaactgaaaatcccacttgattttgctatttacaagctccttatctcccaccttcccaccaagacattctaggtttgagaggagtctttagactcttatctaagtggctgtttctgccaggatg

SEQ ID NO: 897362 - DNA, 597 bp, Homo sapiens
ccatgaagacagcggacgtgatgagagggcaccagtgttttcacacaatgtgcacacactccagtcaaagacttcaagtccaccagacgctatgactcagacgtcactgtgtctctgccccatcaggtgctccgtgctgaccgagctcagggcccctcttccctgactgagcatgaccagaaaaatgccccactggacaaggcccgttgccgccaaagcctcagctccccttcagtctcccaccacaaaacaaggagcaggcaccacccagccagacgcaggctcatcccgagtcccgggtcctcctccccaagacctgtctgtcatcagccaccctgcagcagccacctcaccaggcccggccctgagccacacgcccaggcagcctcgtccacgcccacagtaaccctccccagggagctcacctgcaaatgctcccatgggcccctggccaccctctgcccgcaacctggctcagccactcgcatgccctgggtggtccagtccyctacactccatgaccctgtccctgacccaggctccccagcaggcacccacatgctccagccccacggccttcccacacgctctccagct

SEQ ID NO: 897363 - DNA, 592 bp, Homo sapiens
acaatttcctgaatgtccttaattcatagttcttaaaagtttttacyttctttacaccatttttaaagcatgactcaagatcactatcatctgaggcgtatattaccttctcttcctcttttttctctttgtgctattttgtagacacagtgtcaggaatgaagaatgaagatgaagagaacagcacgttttaaaactaacagatgaaagaaatggccaacaggagatataataaccgtgctgtaaatccatgtagtagaatcctttgacactgctggcaccagagagaccaaccaattgcttgaatagttatgaataaaaatcaaattaagttgcttaggcacaaatatttacagcgtgtcaaagatttacccttaaatcttttccttgaccactgtttggtaagctaatttaaatcatgagaataacagaaaaataatgaaaaaactgttctttgatcatgaaaaacttggaaattacttcacacaaagttataatttatatcataatcaaacccttgaaccattctgcatgaaaggtaacattattatttccattctatggatgtgagctcagatagatgaaattactc

SEQ ID NO: 897364 - DNA, 592 bp, Homo sapiens
acaatttcctgaatgtccttaattcatagttcttaaaagtttttactttctttacaccatttttaaagcatgactcaagatcactatcatctgaggcgtatattaccttctcttcctcttttttctctttgtgctattttgtagacacagtgtcaggaatgaagaatgaagatgaagagaacagcacgttttaaaactaacagatgaaagaaatggccaacaggagatataataaccgtgctgtaaatccatgtagtagaatcctttgacactgctggcaccagagagaccaaccaattgcttgaatagttatgaataaaaatcaaattaagttgcttaggcacaaatatttacagcgtgtcaaagatttacccttaaatcttttccttgaccactgtttggtaagctaatttaaatcatgagaataacagaaaaataatgaaaaaactgttctttgatcatgaaaaacttggaaattacttcacrcaaagttataatttatatcataatcaaacccttgaaccattctgcatgaaaggtaacattattatttccattctatggatgtgagctcagatagatgaaattactc

SEQ ID NO: 897365 - DNA, 616 bp, Homo sapiens
aaacatttgtagaatgtaatttattcatactaaatacatcagaaaagtaactctagtgttaaattacagcatgaagaaattaaaagggagaagggagcagttgggtttaagtggatactctgaggtttgtagaaaatgtcgaaagggttcaaatgttcctaatgtgaaagtaaatatttgggcatattgcaggaaggctttctctcagtgtaagataataaagtttttcatgggatatggtagaaagaaaaaactgtttagtctagttcatttaatttccatgtgctttattaataaatgattataccccaaagatgatgttcttactcactttctttcttattcaactctagttccccataaagtttattctccagtgagtcaagcaatctttattttcgttttccttactgatttttcttcatttagcagaaatttcactggagcaataagacacatatccttgggaatttgaggaccagaggctaataaggagtccatggttgataggatctaggaatacacagacactgctgtcatctagcccaaattccttcccattgttccaagagttataggcacaactaaggtraagacaggcaaaatatcaatttgc

SEQ ID NO: 897366 - DNA, 605 bp, Homo sapiens
taaagataatacacacaaagggcttgatgaatyggtaccatgatgtctttcagttggtagatgggaatgaactgaattaaatgctgggaaatgttatttgtgcttccaaatttcttgcacttgctttatctgaagttcttgtgtcattgtgaggaaaaaattaatactgatgcaagtgacaaaaagggcagctaaaatttgtaagagagtaaatcataattatctttatcataattatcatcgacattcctgtgctcaaacaattaaacatatctcacatattttctcttcagacctaaaagtcaatacaacaatagcagtgagcctatgcatttaaggaatacattaaatataataaaatgatgtgtatgcaagttaatatctaacagtgatagctaagctgcttctgtcttataagcaatatcttttgtgaatggtgttttcaggttatagttctctctctttttaaaagaagtcctataaagaaaatctctgtttcttttctgtggccaataattttggaggacactgtatgttctattgtttgtatccacctgaaacattcattaaataattgaggaatgggaaaaatgcttatctccata

SEQ ID NO: 897367 - DNA, 671 bp, Homo sapiens
tagtccatgtaaagaagtagatgaacaatgtatgattgtattaaaatgtgatatatatatatatatatatatatakagagagagagagagagagagagaccatagaatgtcactcagtcgcaaaaaagaatgaaatcatatcttttgcagaaacataaatggaactggaggccactaacctaagtgaaatgcctcagaaaaagaaagtaaaaaattgcatgttctcacttataagtgagagctaaacaatggctacacatggacacacagagtagaataataaacattggagagttcaataggtgggagggtaggagagaggtgagagatgaattaccacctattgggtacaatatacactatttgagtggtggtacatggaaagcccagatttcaccactacacaatgtatccatgtaacgtaactgcacctgtaccctgtaaatctattttataaaaagaaaaaaaaagagaatgtttgtatagcaaacatcactctgaaaagaagttcaggtttcttactgtccagtataataatgataatgtctaccttcagcgtaaaaagcaggcatgcacaatgccaattataaaagtcttaggttccctatacttagtgttaacctcctataatgcaggttattgcatgttcaggagtcatcctgaggggactg

SEQ ID NO: 897368 - DNA, 562 bp, Homo sapiens
aaagtgttggaattctactccagacactctattgacctgaaaatgaggtgtgatgtggcaaatttagtataaactatttcacacaggattgactcrgaggagcagatggctttgagaaagaactttttgtcatccaaccagtatattcactgtttagcaaaattggcaaagggccgttaaacaaagagatacattctgttaacaaagcattctttgtggcctctttctgtctttcagacactcaaagttgatgcctgtgtgtctgatgtttctagtaactacctggtgtttgtttgttgtttggagtataactgaaaatatttttttcatggaaaaatttgctgaatatttttctttgggagcaagagaggtctttgtattccatttcaagcagtggggaatagtaatgtaaatattggctgaacagatttgcttgatttaagtactaatactttcatttgcacaataggaactgcattacagtatttgtagtctcattaaaaatggaccacattggtggtaatgtatagtgatacacatataccaaggtagaacatgtatg

SEQ ID NO: 897369 - DNA, 606 bp, Homo sapiens
gtaatgtatagtgatacacatataccaaggtagaacatgtatgacctaagaagatttttaaaaaaattaatctttgtgagactttgtcttaaaattcatcttctttggactttgattctgcttctgacagataagaaacaaagtcatattcccttaaaaggcaatttcctggatatctattggcctattggtaaaatgtgtttgcgtctttggaataaaggtaatgaatagtgacaaggtgttatttattaactattggctagtatgaattcattaatttgcttgtgtatgtaggtcgaaacagattagtgtagaggaaaatatatcagtgcctgctcttctttgttcagattttttttattgccagcataattaatttgcagtgaggggtataatctataatttagatgctgtatctgggaaggcaatgctttgtatctgtggtaccaaatgtatctgctaaacatatgatcactgtcactaagacttttagtataaaatggsaaactgaaaatagcaatggagattatatatttataatgtatttcttttctcttctatatttctgcagttgaaatgtttgcccatcacaacagtcatcaacag

SEQ ID NO: 897370 - DNA, 568 bp, Homo sapiens
ccaggaccatacaccaggaggttagatgagaaagaagattgttgccctttaaaatmtgctgttattttgagtcttctgtcactcatagcggaatctaatattaattcaagtgttcttagaaatgggatgccacaatcaacttttggtgttggattagtctaagtggccaggtaacagaactcattgcagattagaagtctggtgacccctattttgtcattgcaaacatttaagaacaccatccccaaaggtctcttagaaggtagtccgtgtgcctggtgaggataaactttaaaaagagaaaatggtaagaataattcaaaatgttgggttttgtttttgttgttgttactgctttcaacaaggctgtagaagtgagatattacttgggggtagagttgtccaggctgcaagcagagataaaggtaatattactatgctgagctcaaccatctctgcctccagctggaatacaaactgacgaagagtttgatatttaaaaacttgcagggttgaaatagctgactgattctataaccccaaacaaagcagcaactttagcagaagg

SEQ ID NO: 897371 - DNA, 598 bp, Homo sapiens
cttgaggattcaccacactgtcttccacaatggttgaactaatttacacccccaccaacaatgtagaagtgttcctatttctccacatcctctccagcatctgttgtttcctgactttttartgatcaccatcaccattctaactggtgtgagatggtatctcattgtggtttgatttgatttgcatttctctaaagaccagtaatgatgatctttttttcatgtttttttggcttcataaatgtcttcttttgagaagtgtctgttcctattcttcacccactttttgatggggttgttgttttttttcttgtaaatttaagttctttgtagattctggatattagtcctttgtcagatggatagattgcaaacatcttctcccattctgtaggttgcctgttcattctgatcatagtttcttttgctgtgcagaagttctttagtttaattagatcccatttgtcaattttggcttttgttgccattgcttttggtgttttagtcatgaagtctttgcccatgcctatgtcctgaatggtattgcctaggttttcttcaagagttcttatggttttaggtctgacgtttaagcctt

SEQ ID NO: 897372 - DNA, 589 bp, Homo sapiens
atcttgggtaaccaggaaatagtagatgctctcataccctctgtggtcacggctaattgggaagctgcctcagttattttcttctgccatcatttctgtttctggttgcagcactatgttggggcaggaaagaattcagaataccttgtgttctgtgttcaggtcactcaaattttaaatagaatttctatgtatgctgggcttccaatgcattgagatgagttcgtgtgtatgctgattcttcctgatcattagaaaataaagttacattggttaagggattgaatagcagatggagaagagagcgatgaaataaactgccagtgggaacctcagcacagggaacttacacacacacatgcacatgcgattgaaagccctgactttaaaataattctatctgtggctttcaagatccaagaatgtgattctttattcttgtctgtatcattccggagtgagagggggtctctagaattctgcaccctgattgacggaaaaagataaagagkccaaggaaattagtagagagtgtccattaattatcaacaagagggcagatgactggccagtctctgagaggcaagag

SEQ ID NO: 897373 - DNA, 687 bp, Homo sapiens
tgaagcacagagggacttgcaagatggagcagaaatctgatggctaaaattaggttgtagagttttccagcattttcctgctatctgactaccagagaggcacagataatccaagttagtagtgtaattggtrgttggcgagaagtcttctgttttagatacacatctcagccattttgtatttttttaccatatttttgagtctataaaaagaagatgcagggctgggtgtggtggccactgctgtaatccctgcactctgggaggccaaggcaggaggatcacttgaggtcaggagttcaaaaccagcctgggcagcatggcaaaacccgatctccaccaagaatacaaaaaactagctgcacatggtagcatgtgcctgtagtcccaactactcaggaggctgaggtgggaggatcgcttgagcctaggaggtggaggttgcagtgagctgagttcacgccactgaactccaggctgggtgacagagcgagaccccatctgaaaaagaaaagaaaaaagatgtggatagactcttttgaaataaaggactagacagaaaacctttatgaacaacatatttcctgaattacagatgcactatctcaacgtatccctgaactgtgaaaaattactataagatctaatatctttaaaaacatccttttgttttattttgccttttga

SEQ ID NO: 897374 - DNA, 664 bp, Homo sapiens
gcctgaaattttcttttttattgtgtctctgccagcttttggtatcaaggtgatgctggcctcatatactgagttgcaaagaagtccctcctcctcaattttttgtaatagtttccgtaggaatggtaccagctcttctttgtacatatggtagaattcagctgtgaatccatcaggtcctgtgctttttttggttggtaggctatttattactgattcaatttgggggcttattattgatctgttcaggcataggcagaaaattgaagttggactccttccttacaccatatacagaaatcaactcaagatggattaaaggcttaaatgtaaaaccaaaactataaaaccctatgagacaacctaggcaataccatcttggacgtaggaatgggcaaaggtttcctgacaaagacaccaaaagcaatcacaacaaaaccaaatactgacaaatggggtataattaaactaaagggcttcttcacagcaaaagaaataaactatcaacagggtaaacagacaacctacagaatgggagaaaatatttgcaaactatgcatctgacaaaggtctaatatccagcatctataagaacttaarcaaatttacaataaaaaagcaaacaaccccataaaaaagtgggcaaaggacatgaacaaacact

SEQ ID NO: 897375 - DNA, 658 bp, Homo sapiens
aaatcttaattatattttaataacttgttcttaaaataaattattgttttactgtgattttcaaaacatgaaagaatatattttgtaaattattcttgtgttaggtgactttataatgtgaacattatatgcataaatattataatataggtagaccatttgcaatcaggttcagattgttggtttttttttttaaaggaaaatgtaaaaaataatgaaaatatgtcattggagtggtagaaatcattatgacaaaaaagtttggaaacttattgtaataagttcaggagatataatgaggatcaggattatagttgtgacagtggaagcagagcgaatgacacattgtacttcaagtcatgtaaaggatgaagtggagttgagatgatcttaataatggctatcatttattgaacatgtaagtgtagggcattgtaccaaaatattttcaagcatcattttacttagtgataacaataaaaatgatataaatactatccttttattttagtagatgtgaatattaattgtaaacatgaaattatttgttcattattgaacagtggaattgctggaagttgaccacagtcaaacctcagagactctcaaatagtggttgycactgttgctattgcaccatttcaagcctagataacag

SEQ ID NO: 897376 - DNA, 635 bp, Homo sapiens
tatgatttttatacttgtttcttttaaaaatcttacacaattctagttaaatgatgaagaccaatctgagctcctgttgtgttttatttgtatttacctawaattttaaattagactatggtttttgtttgctttttgtatctagagaattaagtactctaaggaagactgcaactatattactctattcggtagttggtaaataatagttgcacacaaaattggaagaactgtaaattctggaattagccataatgatctgatgctttttaaaaattgaatttgttgttagtatctattttaacatattttaaaaatattttatctgttgtatgttcatgtgttgtaatgccattaaaatgagcatgtagctagcaaatcttctgtaaatgttcttacaatcttgtggaagaacatttttaaacttaaacaaatatgaatataagctgaaatttcgcaacttaattggtctttgacttaggacttcactgaattcattagtaaaatgacaggaaaaataactacaacccttttgaattgcagaatcacagattgtagcataatggacaagcctcctttgttaataaatgcataatagaaatgtattttaaatttccttacatttatacttccta

SEQ ID NO: 897377 - DNA, 596 bp, Homo sapiens
tagatggtttagcaaatacgtagatatcattaccttgagtcagtgcttccacaccaggatgattaccatccctcctcccacccataatcaaacacacagacacacacacacacacacacacacacacacacacacacgaggcatttggcaatgccaggagaaatttttggttgtcacaaatgaggagtgtgccactggcacactctaaacaccccataatgcacaggacagcctgagaatgttaatcatgccaaggttgagaaattgtgccctaaataagttcttgcctatttcaggatacttctctttagaatttttttccttatgggccattactctaacttttagaaagactgttgaaagttagtaccttaatgataaatcatgatataacaacttgtttcaaatattttgattggtgtagggacaaaatcattattctgttgcttggtcactgaggtaacgaggtggtttttgctttctaatagtagcattatggtgacaaacctttaaactataytccttaccatatttacttgaaatcagattttgaggacaagtcaaataaaattcaaatgagagaaaattacaagtta

SEQ ID NO: 897378 - DNA, 586 bp, Homo sapiens
ttaaaaagtcaaactttaaatttgtgcattaaattatagatcagaaaactaaaagacaaattttttaaaaaaagatgcaatgacaacaaagattaaaccaacaggtattaggaaagttagaaaaaaatttaaaaagtgaaactatgcaataaattggtgtaaataattcgaataaagtcaacaataagactaaatgtgaatgttttccattttcttagcaagaggaaaaatggagaccagaaaagtactctgttagaatttctctaaaatgagtaaaacccttttctttccctgctagtttgtctctcttctctgtctcccgctctttctttttctctctctctttctcttgcactggcctaggtgctagtcaatgagttccttattactattcttttctgtacaagaaagtttattttgggaaagagcaactaagagtaaaaaaggcaatggtagaatttyccagtttgaattatgtaatggaaaattttggaaccatgattactgtggaagcagatataagcaatggttctattagccggcagggagagcaggcaaggttgaaggagagcaggcaaagttgaac

SEQ ID NO: 897379 - DNA, 658 bp, Homo sapiens
atttttaacctggggattataacgaatcagyagctaatcaccaagatataaattacctaattaattactaaatactatcatctgtaaacacggagtcctaaaaaatatgttggctgagagaagattcatcagttgtaagcattaactcaacgtggtcaatgtttggtacagcaacaactaggagttaataagttaacaaaatgtgctaggatgactgggcagggtaaaagtggtgttgtgggagctggcttgaaagagcagcaggaagaagctgaagacattttttaacttcctaattttgcctagagccaatcaccaggtaaataaaaaattttttctgacaatcagaaataatgtttgaaatcatccatttctagaaatattgtcactcagagacggaaagatgactgacatgtttgttccatcgccagatggaagggatgctgcttttgttagtgtgtaagctctttggcttgggtgtctacagactgctttttgaaggtgacagaaaatgcctgcacctgccaaatctcatgtttaacattcaacagttggtggtgctggcaggaatatcattcagagataaaaatctctattactcatgccactttaggtaagctattagcaacagtaagcaaatggcaacttttaaattcaa

SEQ ID NO: 897380 - DNA, 607 bp, Homo sapiens
attgttgccagattcaaggggcctttttatcaatgagttaaagcagatcccaaaatgccwcatgagggaaattttgtaccaacttttcccacagccattttcttagtagaaatggggtagctattattcaagctcattctaatgcccctccctcttcattagaaatgctgttctactcccaggccacataacaataaagtgtgtggctttgctcttcatcaataacacaaagtagttgcacccagagtacttgtaagggagtccaactacaaatttattatctctcaacacccatccaaactttagttaagagaataatatctatgaaagatttcctgaagcgtaattcaatccacatagaggaaccattaaaacctacccatagattaagtctgacaaacagagaaatgcacacacaggctgcaaaatgttgtcacccacagaaacacttttaataaactgtgcttcaccttggcattgtgccttgtgcctgcactgaaggactccataacaaacagtcccataaaacgcatagatgtagtaaactacaatttattcaggatattcttcactatgtcacagggtcctttttatgaggaatcaaaga

SEQ ID NO: 897381 - DNA, 607 bp, Homo sapiens
attgttgccagattcaaggggcctttttatcaatgagttaaagcagatcccaaaatgcctcrtgagggaaattttgtaccaacttttcccacagccattttcttagtagaaatggggtagctattattcaagctcattctaatgcccctccctcttcattagaaatgctgttctactcccaggccacataacaataaagtgtgtggctttgctcttcatcaataacacaaagtagttgcacccagagtacttgtaagggagtccaactacaaatttattatctctcaacacccatccaaactttagttaagagaataatatctatgaaagatttcctgaagcgtaattcaatccacatagaggaaccattaaaacctacccatagattaagtctgacaaacagagaaatgcacacacaggctgcaaaatgttgtcacccacagaaacacttttaataaactgtgcttcaccttggcattgtgccttgtgcctgcactgaaggactccataacaaacagtcccataaaacgcatagatgtagtaaactacaatttattcaggatattcttcactatgtcacagggtcctttttatgaggaatcaaaga

SEQ ID NO: 897382 - DNA, 642 bp, Homo sapiens
caatttcctttgaatttaggggtacccatgttatttgttttggctaaatgtataagcgtggaagtaaaacatcacttctgggaggcagttttaagagttggtgtgcaatttgcacatcctttctttttccctttgccactgtatccaggaaagctctagatggtggcagctctatcatcctgaatcccagagagaggggtgtagaggagagactccaactgatgtttgagagatatgcactgtgaaggaaaacaaaacctcactgatttaaagcaatggcccttgactggaggcaattttccttcccaaaagaatatttggcaatatctagaaacattttttggtttttacaacttccgcaggggttgcacctatggcatctagtgggtaattgccagaaatgctgctaaacatctgacaatacaccagacagcctcccacaacagagttatccaatccaaaatgttagcgcaaagtctgagaaattctgtcaatcatggagatagaatratttttgttggtacagcatcatctaggatactctgactgatagatggttcaatatttggaaatctgttaatataatcttaccataatgatggggcaaaggagaaaaaatgtgatcttctcaatagatttaga

SEQ ID NO: 897383 - DNA, 656 bp, Homo sapiens
attggagtgttttatggaataaaataagttttctggaaatgaaattccaattatgaacactgaaactattggaaatgaggagttaacttatgttggctacacrcataaccaagatcaggggcaaattgaaggaaagatgcatcctattttcactatttattcctaatgaaaaaaaaattgattttacagacgaggtctcactatgtttgccaggctgaccttgaactcttgggctcaagcgattcttctatcacagagcagctgagattacaggcatgtgccaccatgccaggccactatctccacttttattcaacatagtactagaagtcctactcagagcaattgaaaagagaaagaaataaagagcattcaaattggaaagggagatttcaaattattattgtttgcaatgatcttatattgcaaatataaatataagattattataatgatcttatatatgagattatttgatcatatgattatttgattattataatgatcttatatatgtttatttgatcttatatttaagataatacaatgtaacaatcttatattcagatcttatgcaaaattttttatttagaaaaaattaaaaacatcacccaaagataagtttagtaaagttacaggatataaaatcaacatac

SEQ ID NO: 897384 - DNA, 614 bp, Homo sapiens
tcctttctttgacatttatggaccacagctattaaacaataattttctctctgagctatacccagtaaaatgtgcaagtagagagctctgcaaacttccatgctgagctcaagttgctcatttgtattcyaactaaggcaaatctaatatacagtttgtacaaaatcctcaggctggaaatgtatatcatggcctagcaggtgaattccaaaggcctttgccaaacatccgatgtctcctcatggttactaccttgcaagaagatcaagaaagaaaagacataaatgatgctattacaacaggaatttctatgtttcattgatgactgccatattgctcagttttggggctatgagattgttgagggttaataactgcagtgacttttaaaatttattctttctttggtcaggacaggtcatcatctgtctttgctggtgtcccttttatgtcttgctaacgatttgctgaacatgtgcctgatatactacagttttcatgaaataggcagcggacaactattgagatatgcttggtgttgatagcatacaaggggctgtatatgactattctgtacactggcagaagtaagcattgcaaacacaaaattctgt

SEQ ID NO: 897385 - DNA, 568 bp, Homo sapiens
aaacaactttttatttgtattattattagtattactggctagttacctgcactattctgggagttgagtagtaaaaagcctcaatggctcttcctcattagtcttatttttgcccttaaggcactgagggtactcctggagcctgaaaattttccaaatgagtattgcatatgcttctatagaaaataaaatataaattacttcatcaataagtgaatcctaactataaacatccattgaaaaataatggtaataatagctaaccttattggataccgtgcttcaggtatcacactaaggcctttgaacatttcatctcatcttatctttacaacagatgaagaaacttaggcttagaagtaacttattggagcttacgcagatagtagatgctagtgccttgccccagacttaggtctggctgacttcgatactccttaagctactgactattgtggtttatactctaaggaataaaaaaagaggcacatagtytcgggtcttgagctgttaatgatcgactaaaaagttatgaaaaacacccacaaaataatagaaaactgattta

SEQ ID NO: 897386 - DNA, 585 bp, Homo sapiens
ttgcctcatatctgtgttgactaggccaccatttttttgggcaaacaatgctccttatgcatctcagacaatacaaattcttctccttgaagtatcctattctcttctacaattgaaagagtaatattcattcttcaaaatcttatgtaggttcctccacaccttaagttacacccaggtagagtgatttattctttcccatatattcgcattactctggtagttaatctgtcacattcaaataatttgtttacacgtctatctcccacactaaattatgagcttcttatgggcctaaatatatctttatcttcagcatcgaaccaaaatctggcacatagtagatattgaatctttgcttaaggcactcatccacaaagtgatgacttcgtggaatgcaaatacaactctacctatataaacatatttttgggaaaatcactgtcagaaatacatttttaaagcgattaatgtcaataaaataacaaaatagtctccatattaastaatcaagtctaccagagtcagaaataataaaaaaaaactataattattttaatattacactagaacttcaaatttgaa

SEQ ID NO: 897387 - DNA, 664 bp, Homo sapiens
ctatgtaaggtgatggaggtgttaattaggttaatagtgacaatcatttcacaatgcatacgtatatgaaaacatcacattgtacaccttgaatatacacaatttttayttgtcatttatacctcagtcagtatgaaaaagtttaaaagaagaacagaaagaaatgaaattgaaaacagaaaacaatagagaaaattaatgaaacaaaattgattctttaagaaatacaatgaaattgataggaactttaggcattttgatctagaataaaaaagagaacatataggttactaatgttgggaataaaagaaggatatcaccatggaacttacagatatgaaaggaataatcaggtaatactgtgaataatcaaagacattaaaaggaacgaaaactatagaaccatatctctcatgatcatatgcaaaaaaattctcagctaaatattagcaagctaaattcaacaacatataaaaactaagtgaaggttatctcaggaatgcaagggtggtttaacatttgataataaatcaatataattcacaatattatcagactaaaaaagaaaaaccacattaccatcttaacaaacgcaaaaatattgataaatcaacatttatttatgatttttattttaaaaaactattagaaaactaaggataga

SEQ ID NO: 897388 - DNA, 638 bp, Homo sapiens
actaacaggctgtctaagattgagcaaattactttgtgtatgctttatttactttccataaccaaaaattaagagtggacttaatatatggtcatttgyaggtcacaatgatgttttccttcacctgcatgtcttcttttttgccagttaatattccctacttaaagaagagagttgtttgaaattatatacagatttaagttacaccaacacactacattctcttaactatccatttcgcaatgtagcctcgattgtgaaaaaaagcatgagaaaaatcatgtttgttttgtactgtttttgttgttgttgttgttgttgttgttgttgttgttaaggggtttttgccaaagttaaaatttccagctaataacctttgaagctctagcattaaccatagtaaaatataccatcgtaaccctaatctggggctttctgcaaagctgtttataacctgtcttaagtgatcctttataaaaatagaaaatagtgctctaatgctgttatcaaaaattctgtttaatcaaatttgtattacttttgttcggctgaaatgcagaggtcaaatatcacagtattcattattttattgccttaattctcaatgatgcttcaaaccccaaacaactgcatgtgat

SEQ ID NO: 897389 - DNA, 605 bp, Homo sapiens
ggtcatctgtttccaccttgactcttgggagagcatctgataggacctcgaggggcatamcatccctttctgcccttctccctccagagtgcacgtttccattttccagtcccattaacaccaccgttatcacaactgctaggattttgctaagtacttaaagcagaaagaggcctggattagaattctgaatccttttaatctctctctaggtaagttttgccagcctagtttcttaaaatgtcaagtattaaactgcttttatctcactaattaataattagctttggcaagcaagaaagtaaaaggcatggctggatctttctcaaaaataagatcccggatagcagactaggtataaaacgcaaggtgatggcaagatcatttggattcaaataaagcagaaatcatgagctgagtgtccttcctcagaggatggaactgggcgggagagtttccattactctccctggagagaggtctgtgcactggtgggtttccacaatgagcgctctatacttgaatgcccttaaagactagaggcagtcttttctattgctgctttgtagcttggaaatcccagctagagatgactttatggggtt

SEQ ID NO: 897390 - DNA, 549 bp, Homo sapiens
actattttattaagcaaagaattggctgcmtaaacgtccactgaaggcacaaaagctaaatagctacccaccaataatctcattcagtgagaaaactagtccaatcagagacccaaggagtggcttccagtcacatttgtacctttccttaaagaacattcttcctgtccttttagttacatatgtttatgtttacatattgccaaaaaaaaaaaaaaagccaaggtttggtggaaatggctaaagtaagctgtactttattcactcataataggaaataacaatttcatatactgagccctgagttcaagttcacttttttttttttttgagaggggggtctgggtatgttgcctaggcagatcttgaacttttgggctcacgtgatcctcccacctccgcctgcagggtcgttgggactataggtgcatgtcaccatgccaggctctcaagttcacttgagataaagaatacccaacactgtgtaagcatagactcctgtccaaaagtggtggtgaagcgtgaagggggctgtcctatggtggtggt

SEQ ID NO: 897391 - DNA, 596 bp, Homo sapiens
atctagggcacttctttgctaccttccctgtagatcaytttccattttatgagtcttttcttatttctttcccagcccagattgcacttataacagtgatttgtctcacaggcttttcatcagtaacttggcatatgtagagtgtgagtgttggaatcatacagtcctgggttggagtcccagctctgtttcttactagctgtgtggccttgaatgagtcactcataatccttgagggtcagtttcctccttaaaattaggtcaacagcatcttccttgcagggttgtcaactggattatagctaatacaggcaaagaatcaagcaattggacagttgttttgtgtcttttgaatctaataataaaaaagcttgtatttcatatgtatgtttttaaaatttcattttctagtgattcatctttgttgtatttgtaaaagtcttgttttgcagtggactggacattctttaaaaattggttcttcaccgcagtttgagaaacattattctaagcaggggttgacaacctgtagcctttgcactggttacctatttttgtaaatgtttaattgcaacacagctacacccactcactta

SEQ ID NO: 897392 - DNA, 516 bp, Homo sapiens
cttgaacacacaatatgtatctttctgaagttatgggcaagttcaataacagctctctccaaatctttgttttatttccactctattagaagcgattaaggcttctatggagatctcccaaatgactaacattttataacttttattttcctttacatgttttatttgtagtaccacttgaacctaattcagttataaagccaataaaagggggatggatttggatttgggcatacttggctagaattagaggttctagtcttaatgtccattatattttaaacattaatgagttatatgtttttaatctggacaagtcagtggcctagaaattcagggaattgttagaattgaaatttcaattctctatttatctgttaaagggtttctattcattttcagggggaaaaaccttagttaagatcataacactaaatrtaacaatgtcatttgggttccagtccgtgagttgtaggagaaaggagtttgccgtccatttttttttttttttttttt

SEQ ID NO: 897393 - DNA, 589 bp, Homo sapiens
tttggatcagttttgctccaagtgttctcagcttttgagagtagtaggctggatggggaatgttctcatgatgtgggatgaaaggtcccaaaggtgatgagagaaaaaaaaatgccacttaaggcctaggcctggaatgtaggccattcccatcccattattgtaagttacatgcccaagtattgctaatgcctattcctctctgagagatgagaaagaatggaatgaccattcctgaataacaatttaatctcccacaagtgatacatattgtacttcatgttcctacaacgttgtcataaacatttccacccaatgactaaattctcctgcttcttttctctttaatgtctcttcctacttctctagtttcttgggttacgaatgccacatatctcccttaaactattccaatgatctccttccctgtgctttcatggacttaaccttcatcttcyaaaatactgtcgttaactctgtattgtaaaattggggcatattattctattccttataattcagtgactccttatcataataggtgggcaaattttcttaaggtggaataggtgacccagtcaaactaact

SEQ ID NO: 897394 - DNA, 616 bp, Homo sapiens
taacatcttgtgtcagagagcaaaaaaaagtgctcaaaaaatgatgggggcatgtcaaatgacacaraagcaaacttgaaggggttcccactggctaaatataagacaatttgagcatcaaaataaataatgatactcattggaatataagccagagactaaaacagaaatcttcctatgtgaagctcttacctagaggcatcttgtggtttaccaaggaatatggccctcaatttggcctaactaaacttctgatcaacaaattggataaagactgaaggtttgcttactaaacacacagaatttataatgctgggagagacagccagtaccttggatgagatgctctggactcaacgagatgaacaagtagaaacacataggttataatttaaaatgtgaattcctaaactcagtttcaaaaaaaaagttgtagagatgcagaattggcaagacctgactaaaaagcatttcttgtgaaaaaagatccatacttgcaatttgagtcagcaatgtgacatagcctctcaaaaaataggatcctgggctgcattacatttttgcccacaaaaatgaactggtcctagtgtcctctgtgctggtcacatcatatttg

SEQ ID NO: 897395 - DNA, 603 bp, Homo sapiens
aaaaaaaaaagtagaggggctgttgttaaaagatgatgggggggatcccctcggtgactggagttttctgccttctatttcctcccttctcaaatttcaagccccattggtcagtaaaagaacactggtcccaacagctaaagagacaggagtagagaggaagacaatgagacaacgtcttgtaaataagaaagagccagggtggtggcctgtgtctgcagtccgggctacttgggatgctgaagtaggaagatcacttgagtcaggcagttccagaccagcctgggcaacatagtgagaccctgactcaaaacaaaacaacaatgaagattaagaaaaccagaaagtgtcctgaggagcaaaacagatgactaaaacattacagacttagctataaggttctatatacaagtaacacacgattatattgtccttgacaataacagataaggctgcgctcccttgagaatgacagataaggcgcaggtmccttttgacctaaccccaggcacttctcccttgcctggcagtgactactggtaaaattggcagagctacttattttacaaaatctcccagacactcgcctaagggccagatgat

SEQ ID NO: 897396 - DNA, 658 bp, Homo sapiens
ttctgctaagaattttgaaactgtgtgtcttagccttggttccaggtgtgggatctgcgaactgtggcccacagagctaattaattcttcttgctttgaaaactccagaattgggcacagcagccagcactctcccctgcatgccaaatcagatcaagtgcaggttggcggcagaggggcagcctcactgagggccatgagtggggccagtggggccaccattaggctggggtctggaggaagcagaccccacttcaggggagaggacaagggggaggctggggcgtgggagctgcagcctggtttgggggtgctccaagcctccaaggagccgcaaggggctaaaaggaatcaggcagtgcttggaggggaagctttgctattccacaccctgcccctctgtcttgtcagttccaacctgcctctctcccttcggagcatttcctgtgcctgggtctccccattgcccccattctgctttcttctctctgctgtcatgcttgctctgagctgtaccttgcaattattttatctttccatctccttgccaggaaatccytgacgccgggttcccctgggacactcactgcgggggaggcaccgcacatgctccatccatcctgcctggagcagcagtcagttggggagggaggatggg

SEQ ID NO: 897397 - DNA, 618 bp, Homo sapiens
tctgtgtggtacacacacatttctatgagttaaggcttccaaataagtcagagccttaaacttcttgaagaccaagctgttaaaaatrtaaaagaggaaaatgctttttttttttacaagagaatagcagctacaaaatttaaaagaaaggctagagttagaaagtcaccattttgaaactcctcatgtaattaattgagtcagaaaaggaccatttaatatttgctaaaaattttgggtgaaagttattagagaatgaaacattcacacagtcttaaaatgtctccttatagtgttattattacacaaagaagaaaatgcacactttcaataaaacaaacggcagtcaccccttaacaaagggaccaagggtccaagctaataccactggcggcgggacaggctggcatgtgcctcctaatatgcaacaaaagaaaatacacagtagcacctgtgaggcactgtattaaaaaggttgaacccgactctatgcattaggaaacagacaaatccaaaattgaggacattttataacagtctgaactctaaaagcaaaccaaacaaacctggggcaggtggattatcatactagagtaatcatttctaattaaaataaat

SEQ ID NO: 897398 - DNA, 618 bp, Homo sapiens
tctgtgtggtacacacacatttctatgagttaaggcttccaaataagtcagagccttaaacttcttgaagaccaagctgttaaaaatgtaaaagaggaaaatgctttttttttttacaagagaatagcagctacaaaatttaaaagaaaggctagagttagaaagtcaccattttgaaactcctcatgtaattaattgagtcagaaaaggaccatttaatatttgctaaaaattttgggtgaaagttattagagaatgaaacattcacacagtcttaaaatgtctccttatagtgttattattacacaaagaagaaaatgcacactttcaataaaacaaacggcagtcaccccttaacaaagggaccaagggtccaagctaataccactggcggcgggacaggctggcatgtgcctcctaatatgcaacaaaagaaaatacacagtagcacctgtgaggcactgtattaaaaaggttgaacccgastctatgcattaggaaacagacaaatccaaaattgaggacattttataacagtctgaactctaaaagcaaaccaaacaaacctggggcaggtggattatcatactagagtaatcatttctaattaaaataaat

SEQ ID NO: 897399 - DNA, 623 bp, Homo sapiens
tgactccctactgtaacaaaggtaatgcttctaattgccttttatgtacatatatacatgtaaatatgtattttctttttaaatgtggtcagactgttcccattaaatttcaaaatctaccatggacatatttcatatctttaagtatttgacattattttaatggctatgcatagttcagttgcatggatggaactttcttttttttaaccagtcaactattgttacgtatttaggttgataccagtttttctttctaataaaccatgctgcaatgaacattcttgtggctaaagctttgcacatccttaatgttttttttaagtattaaatcctagaagttgaattgtttgatcaaaaactgccacgattcttacatgaatctatcctgtataccctttaggatggcacagagtatctgtgtagcaaaagttagcaccgaatgttttccacactaaacctgagatagggaaagagcaggaaggacttytgccctttactctcggaagttttgtttgtattactgcctgctataaatacaaagagaaggacttggctcctcctatattttggctgttgcaagccctaaatatttaattcaatatgtttaaagtaggccttat

SEQ ID NO: 897400 - DNA, 623 bp, Homo sapiens
tgactccctactgtaacaaaggtaatgcttctaattgccttttatgtacatatatacatgtaaatatgtattttctttttaaatgtggtcagactgttcccattaaatttcaaaatctaccatggacatatttcatatctttaagtatttgacattattttaatggctatgcatagttcagttgcatggatggaactttcttttttttaaccagtcaactattgttacgtatttaggttgataccagtttttctttctaataaaccatgctgcaatgaacattcttgtggctaaagctttgcacatccttaatgttttttttaagtattaaatcctagaagttgaattgtttgatcaaaaactgccacgattcttacatgaatctatcctgtataccctttaggatggcacagagtatctgtgtagcaaaagttagcaccgaatgttttccacactaaacctgagatagggaaagagcaggaaggacttttgccctttactctcggaagttttgtttgtattactgcctgctataaatacaaagagaaggacttggctcctcctrtattttggctgttgcaagccctaaatatttaattcaatatgtttaaagtaggccttat

SEQ ID NO: 897401 - DNA, 620 bp, Homo sapiens
atggctgggccaggactgagcccaggcagtctggttccggagttggtgtccttcaccagtgcagtagcagggctggtggtccagagggaggtggaaagggattacatcccagtttgagttcagcaggttgcaatgttgtgctctgcaggtgacagaattagattttttgtgcttttttggtaaggtaaaagatgtgatacctgttgggtactatggtcgctatttgggtgataggttcactagaagcccaaaccccgcattacccaatatgcctgtatgacaaacctgcacatgttcccccgaatctaaaacttaaaaaaaaaaacaaaacacgcatgatagtttttcattagtatttgggggaaggaagtggttgtttctttaatgagtaaatcattgacttgagatgggagagatcagatgcaagagctttccaagcagcacctgagtaggacagtgtaaggaggggctgggaaagaaatccacrtggagtttctgaagggaacctgagaatgtagaaaagaggtgtagaggctgtaacccaggagaagagccctgggagtgaggcagaactttccagggtgtggagggatgcagtttttctcaggttgactggaggc

SEQ ID NO: 897402 - DNA, 671 bp, Homo sapiens
gccctttacctgtactttgccagaaagtaagtttctggttcccagataatatgaaatattacctgggagacatatacattctaactttaacagccatttttgttatgtaaagtttgttgccatgggaagtataatagtaacgttcgtggttccgcatatgaaacaaaattaatcttaaagtttagtaataatcacatttaatggtgcatgtatattttttactatgcacaaaaggatttttctggctgcaaagtctaatgtgcagtgctaattaaagtgctaaatatttgtcagaataattgaatttgatagagagagaatgataaagtttgctattttcaaaaaagaaaaccttgcctaacaaaatatttaaaatgtcatcaaagagtagcctttaaaaaatgttgtcaaaggtcactgatacttggatgattaaataaatcagggatgataaaatccttagtgctgaggctgacttacaagagaatgaaataatacagcatgaaatggatgttttcatattctttcaatattcctttcaatataagacatagaaatagagcacttacraaagcattgtcttctctatattaacattctgccatatgttttgtaatctgaatgaaagtaaagcaagaataaatgcattaaatatgcagaaagatagtttt

SEQ ID NO: 897403 - DNA, 566 bp, Homo sapiens
gaagaaatttctaagcagcaaagcattcaaaaagtggtctgtttttgaacagcaaaagctgttctaacagctgcttctaacagcatatggtcatatgcattcacaaagagatggtctgaaactggaacttacattttaaagggaaacagcataaaaatttagaaaatttgcaacctgaccatgtggtagaaaagaaaaactcattttctggggaggaattcaagtggctacagaaatttgcataagtaaagaggggccaaatgttaatagccaagagaatggggaaaatgccttgaaacatttcagagaccttcacagtagccccttccatcacaggcctggaggcctaggagggaagaatggttttgcgggctggacccaaggccctgctgccctgtgcaaacttggacacactgctccctgtgtcccagccactccagctccagctgtagctaagagtcccccaggtacacctcaggccgctaccccacagggtgcaataagccttgacagcttccaartggtgttaagcctgcagatgcacagagggcaagcattcgggcttc

SEQ ID NO: 897404 - DNA, 639 bp, Homo sapiens
attttcagggataattttttcacttaaaggatttacatgatttgggtggttctgttttaagtagaggaggaaatttgaactctacatagttggattcttttccccctgaaaccaaagatttaaaattttgtcgatgttgtttatgttctaataaatatgctcaatccttttaaaaagacagcagtctgacaaagaccagaagtgtaccttgcttgatgtctgcaagtcaatacagttaatctaggcctagtttgcagattttaccccattgcctagcttagtaggtgcttgacaaatgctctttgaactaaggtataaaagatgatggagaaaatagcactttgtaattaggagtaatgccttggaatggttttaatgaagctaatgaaacaactttgttttcattaatttcttttggctttgcatttgtaagacactaagagtgggccgggtgcagtggcacacgcctgtaatcccagtactttgggaggtcaaggcaggtggatcacctgaggttgggagttcgasaccagcctgaccaacatggagaaaccctgtctctactaaaaatacagaattagctgggcgtggtggcacatgcccgtagtcccagctactcaggaggctgaggcaggagaa

SEQ ID NO: 897405 - DNA, 538 bp, Homo sapiens
tattttgaggtatactccttctatgcctagtttgttgaagatttttatcataaagggatgctggattttatagaatgctttttctgtgtctgttgagatgattatatggtttttgcttttaattctgtttatgtggttaatgacatttattgacttgcatatgttgaacatccctgcatttcagggatgaaacccacgtgacaatggtatataatccttctgatgtgctgttggatttggttagctaatattttgttgaggatctttgcatctatgttcattaaggatattggtctgtagttttcttattttgttatgtcctttcctggttttgttatcagagtgacactgaattaataaaataagttagaaaatattccctctttattaatcttttggactagtttcagtaggattggtactaattcttttttgagtgtctggtagaatttgactgtgaattcatctggctttggggtttttwgttgtttttggcaattcgttagttactgactcaatctcacggcttgttattggt

SEQ ID NO: 897406 - DNA, 539 bp, Homo sapiens
aatcttgtttaagtcatacagtttaagtttagtcctactttaggagttctccaactcccttaataaggctgctaaaggrcaaaaataacagtaaggactaatgacaattttgaattgttaatatctatatgactctcctggatagtttgttaacattcagtttccctggctccacttagagagcttggattaataggcttgaagtagagaccaggaaactgcatttttaataagcacccaaaggagactttaatgcagatattctttggaccacactgtggcagagctatcaataaacaatggcgggaaggagaagcaaggattacaactacagtagtgaaaagaaagacaaacatctgtagaaagattacaagaaaaccaattgtggttcttcctggggacagggataaagctctctgactgtgggcagtgattgtagtttgtagcattcagggtcctcctctctgggcatgttcacctcccactctagggttcaggcaagctggggctcttaccttccacatagcccagcagattct

SEQ ID NO: 897407 - DNA, 571 bp, Homo sapiens
cctggcctctgattcactcattttgttttcgtaagttttattctgcccttcactgccattattaaacaccctcattcttttttttatttcaaagaattcatttttgttcttagatgatggtggcttgtccttctcttcctcctcctttttcctttttttctattctactctttcttcagtgatgaaatagcctctttcatctcagtgagacttgaagttaaatgttctttattgttttctgcattaacacaaggtacattttccttattgcctgatactaacaaattaagatccgcatctagtgggttgccaaaagtaactatgatagagacctttatgtactactcatggagattctaatttgaaagttccagggaaagacgtgcaaatgttactttttacaataggtacccaataatttgatactatttgtatagaccagtgtttgggaacttctgatgcaggtcgtttagtatttatcgctagtgtaggctcatgttggttttagtggtatttttttyttttcattttttttcttgttagagtgttctccaagcatatcagtggtgca

SEQ ID NO: 897408 - DNA, 550 bp, Homo sapiens
actaatcttaaaaatattattccattatcatctaggttccagtgttgcagatgaaatgtctgatgtcascctcatttcttttttctttatttgtaacttgcacatactgtcttgaaaattgtcatattttctttttatccttggagttcagaaatttttcaggatgcctgagtgtgtgtttcttcttactcttacctgaaactacacaacccttttccctcggtaggctttagctcagggacagtttttcatgttatttaattattgcctctcctctacagttttactcttctccttgtgtaactgctattattcacctcctggatttccagtgtctatttccccaggccttggatcttttcctttttgatgctaatctctgtttttatctagattttaaaatatttcttctgttttaactgatatgccattatttcagggctcaacagtgactatttacccttccattaatgtaattattatttatgtaatcttaatgtgctgcagggctttctaggcttattactaaaagataaaactagaaagaaaa

SEQ ID NO: 897409 - DNA, 642 bp, Homo sapiens
ctgtgaggaaggtgctctcatgccggtgttacaagaggagactgatgcttagaaacatgaagtaacctccctgaagtagcacagctcttaagtgatmaatcagggagtcaaaacccatctctagactccagaaactgactttttaaactgttactcctctgtgttattctattttcaaattgcattgaaaacacttctacccaaaattggcacatttaatgtaaacataagcatggtatcattacatcgaaaagagatgaataattcatttaattcatttatttttcttcggctttttgctatttttcttatttgctcaggtccccctcataatcctgtggcgaattccagccctggtagctctcaggcagaaaccagctatacaatgtagttgcctctgccaatacactgctgtggtagctagcattgttccccaaactactttttataaaatcatttttgatttagggccagagttgtttctgagcttgatacatatgaaagttgcaggtcagggataaatggagctataacgtaattcagaattactcaagattccttcacaggaatctcatttcagggaaatactactgcatgcttaggaaactttcagcaacgtgacttaagttttcctcaaaaatg

SEQ ID NO: 897410 - DNA, 563 bp, Homo sapiens
gcctttagctttgttctttttgttcaagattgctttggccatttggggtctatttgtggttccatataaattttaggacagttttttttctatttctgggaaaaataccattgggatagttatakaatttgcattgaattggtagataactctgggctgtatgaacattttaacaatattatttcttcacattcatgaacatgggatagcttgctatttaatgtgtttaatttatttcatcaatactttatagttttcagtgcacagatcttttaccttcttagctgaattattttaaagtattttattttttggtagctattataaaagggatttttttttagttctttttttggaaagtttgttgttagtgtatagaaatgctactgataatcgtatattgattttgtatcctgcaactttactgaattgatttattagttctaagaggtttttttttctttttcttttttttttttttttgaaggagtctttgggtttttctatttgttaagaccatgtcatctacaaacagggacaatttagcatttaatttccaattt

SEQ ID NO: 897411 - DNA, 645 bp, Homo sapiens
aatcttttcttatttttgtgtcacactcaggtgctataatttttcacctgtttccttagctcttgtaaaaatattttcatgcagggatagttgttcaaattgatgtttctgcaggaagccagggaatgaggactggaaagtcctattctgccatattgctgacatcttgctgatcagaaccccagtcttcagttgttaaggatttagaatattttctattataaacaagtattggaattgctctcttgaagattatcagtaacccctaatgacgtaaaccaatgtcattttctgggccttctggcatttggaatggctgctgcatcttttgagatgaacttccctctgcctttgattctctttcttttgttctgactttttattcctctccctctcctaaatgtagatgtcctttgaggtagtgtcctttgctttctagtctaataaactcttctctggaaaatttacttttctgaaatttacatttttagtgttgaaatctctcacaagttctatccmttttttcttcttaaacatttctacttaaaaccaatgttaaaaccaaattggatttaccaaagattatataaaattgaacttcactaaccccaaatttatgactttttgtaacttacagatttaatg

SEQ ID NO: 897412 - DNA, 621 bp, Homo sapiens
tcagggatgcttgtaaaagcaacatgactgtctttagggaaaatgaatttttgaagtctcaacagaaagtatagytcagtgcttttgggggaaccacagggatgacattttttgggaatggtgatttcatttctcaacttggtcatatggtagagaaaaaaaaggctcttttaaaagtatagtctggacattgccctagtaccacatcagattggaaaactatgaaactttgaattcttaatatttcatttctccttaaacgggttataataacacatctatttttttcatatttgattcatcatttgattgatttttatatgttctagcaggaaaggagctaaaaaattcatagtattataattaacaaatgtcaagtacctttacaatttatctcattctactttctatgccaacctctttcctatcacaatataactagaaattcatataaaacagtccacatgaaatagcatctgctttcagctggctttctaacttctcagagttagatacatgaaaaaaagttgaagaaaatgagaagagagtaaaaaataactgttaaattaagtttaaaatgaatacttcagggcaggatttgggattctgtggataattcag

SEQ ID NO: 897413 - DNA, 643 bp, Homo sapiens
tccaggaaatcctattagaaaaaggagccactcatccatttattcattcaacagatattctttcctgaattcactctaatgactatggggacattgggcacaggctaatgactaatttcatcaaggttcttgctttcatgggtcttacattctgaggaggagtattactaaataactaagtaagccagaaaatgccatatgacaatattaggatgaaaataaagcaagatattgtgattggaataaacatggactttttcggatcccataggttgagaaagatctctctggggatataactttttaaacggacacctgaatgataggcaaaagtcagtcatacaaatatatgttgcagtaatttccaggcatatagttccagcatagagcaaaagtcttagggctgaaatgagtgtgactttgtcttttatcagaaagaaggcaagttgtatagagagagtagaataaaagtgaggcctgtagtcccagctactcgggaggctgaggcaggagaatggcgtgaacccgtgagacggagcttgcggtgagccgagatcttgycactgcactccagcctgggtgacagagcaagactccctctcaaaaaaaaaaaaaaaaagtgaggccgggcacagtagctcat

SEQ ID NO: 897414 - DNA, 633 bp, Homo sapiens
gaagttgaaatcctgacttgaaatcttagtgctggacacataaaacattatatgtgtgtgtttgtgtgtgtatatttacatatacatatatatataaatgtattagcagttgtcaatgcatatatatgaatatacatatatgtgtacatatatgtatatttacaatggtgggttgtaggtgctgagcactaatgtgagtttcacatggcaaaaacaaaagagggacagcagataaggtgaaaaagccagcatctttgggtattaagaaacccagaaccacaggacttaaattatccttaaaactccttatggcagtaaaggaatgtgagcgtcagaataaatttcatacctaaaaatttcacatcttactcttttttatattacactcctcaaaacttcagaaagtcctcccatatcatctcccctttaaggtggccctgactatagctttaatctgcaattctttgtataaaaagttctaggaaatggagtttagccaatataattttcccaaaccttggaccatgggattaggattaatcgaggagaaaaacggcaccartattgtttgcatgagattataaaatgtcagtgtgacaaaattttttgtttagaaaatttataactaaattt

SEQ ID NO: 897415 - DNA, 293 bp, Homo sapiens
acacacaattatactcttacacacacatccaaaaccaagaccagggcaaaatatttccttagtatttctcttyggtgggtgaatttttaaaataatctatgtttttactgattgtgcagccctttggagacgcgttctttccagctttatgtgcctaggttccaagtctattgcaagtgaccaaggccttgtttcttgtctttgttggctgctagaagagaaatggagtttgaagtttagcagatgcttttataatagccacagccttaaattattgcttataattttcttct

SEQ ID NO: 897416 - DNA, 293 bp, Homo sapiens
acacacaattatactcttacacacacatccaaaaccaagaccagggcaaaatatttccttagtatttctcttcggtgggtgaatttttaaaataatctatgtttttactgattgtgcagccctttggagacgcgttctttccagctttatgtgcctaggttccaagtctattgcaagtgaccaaggccttgtttcttgtctttgttggctgctagaagagaaatggagtttgaagkttagcagatgcttttataatagccacagccttaaattattgcttataattttcttct

SEQ ID NO: 897417 - DNA, 566 bp, Homo sapiens
cagctgaggaatgtggagtctgcatgttcctcccatgtctgcatgggttttctctgggtattttggtttgctcacatgcctcagagatgttcacatcaggtgaattggcatgtctayggagtccctgtctgagtgagtgtgggtgtgtgtgtgagtgcaccctgagatgggatggtgtgttgtccagccacagttcccaccttgctccctaaactgacggaataggctctggccacccacgaccccagactggaataattaggtaatgaatgatcttacttgtttttaatctttcttaagtgtatgtaagcttagatttatttcagtgtttaatattaaaagtgttttggtctttatttagaagtttagtgatgtttttgtgaccagacgtatgcggtgggaacttaactctcttgtttatatcaattagcctatggagaaatgagttctcttttaacgatcattagtcaaggcttccaagaacctattggtgacgttaaatgaggacttactgtatataataattaaaacataggaatccccaaaggaatcagagcctccttgtt

SEQ ID NO: 897418 - DNA, 628 bp, Homo sapiens
atttgtaagagaattaggaagggaccctggcaaggctcactggcatcctagcttggaagagtgaagactgaaggcaagggcagtcaggacccatcgctcaaatatcctcctaacttgctgacaygcagcattcaggcagcagaccagctgcaaggtgggctcagtcctttatgtagaggagaaggctttcttggagatctgtccctatctgttacaacactgttagtgtccacgtgataactccctcctcaccagcagtgttttcgacacccataattgggaagttaaaactagaatataaagctgaggagaaaagaaaaaggaatgctcttcaggtttcagtctggacctaaaacgtccttttttcaaatatttggaaagaaccttatctaaatttatataatgtatacagtgtatctttcactcgattgtaaaccaaaatagaccaagcctagaccttctctaactccaaaagaataaacagaaaagtcaacaggtttatgtaaaaatgttctaattccaaagacagtgaccgctccaatgaacagcttagctctgaaatagtctagtgtaagaaaaaacactttttaaaaatatgatttgtgacctcaccacaattcaagagatt

SEQ ID NO: 897419 - DNA, 628 bp, Homo sapiens
atttgtaagagaattaggaagggaccctggcaaggctcactggcatcctagcttggaagagtgaagactgaaggcaagggcagtcaggacccatcgctcaaatatcctcctaacttgctgacacgcagcattcaggcagcagaccagctgcaaggtgggctcagtcctttatgtagaggagaaggctttcttggagatctgtccctatctgttacaacactgttagtgtccacgtgataactccctcctcaccagcagtgttttcgacacccataattgggaagttaaaactagaatataaagctgaggagaaaagaaaaaggaatgctcttcaggtttcagtctggacctaaaacgtccttttttcaaatatttggaaagaaccttatctaaatttatataatgtatacagtgtatctttcactcgattgtaaaccaaaatagaccaagcctagaccttctctaactccaaaagaataaacagaaaagtcaacaggtttatgtaaaaatgttctaattccaaagacagtgaccrctccaatgaacagcttagctctgaaatagtctagtgtaagaaaaaacactttttaaaaatatgatttgtgacctcaccacaattcaagagatt

SEQ ID NO: 897420 - DNA, 616 bp, Homo sapiens
aagatccctggatatgcaattctaggtttcccagtagcccattaaaacagaaagttctgtgacttgggattagtagttcaccaggagagaggccagatttaggactgtggtactatagtagatcggatttatgttgtagattttggggatcctctgaggatttttcttattatcccagttgtataataaaaggctttatttttaaaataagacacagacttttactttcaaaaagataaaggagatgtactttttcctgtagttgccactaaattaaaaaatattccctggaagttgtatagaaaacaaaccataaaaagactttgaaagttggagagaagaaggcagataagctagatatgtcaaggcccaaaatgacaaggtgattagttcccttggttttctttttgcctcccacatctcaaggttggagctaaagaagccaacaacacggaaacatcagtggacacagatttgtaaaaaccctaacaaattcctgctctttctagccraaggacaaataaaagaccaacttagcaagacacaaaattttagacaataaccactctacccagccaaaaacacacaaaaataacatggccataccctcacccat

SEQ ID NO: 897421 - DNA, 553 bp, Homo sapiens
ggcagtgtataagtgttctcttttcttagaaaccttgccagcttctgttattttttgactttttaatagtagccattctgactggtgtgagatggttatctcatggttttgatttgattgtctctgatgartagtgatgttgagcaatttttcatatgtttgttggccatgtgtatgtcttcttttgaaaaatgtctattcatgtattatagtttgcccattctttaatggggttgtttattttttgttaatttgtttaagttccttatagattcaggatattagacctttgtcagatgcatactttgcaatattttctctcactttgtaagttatctgtttactcagtggatagtttcttttgctgtgcagaagtagctctttagtttaattaggtctcatttgtcaatttttctttttgtggcaaatgattttggggtcttcgtcatgaaatctttgctggggcctatgtccagaatggtatttcctaggttttcttctagagttttatagtattagattttacatttaagtctttactccatcttgagtt

SEQ ID NO: 897422 - DNA, 553 bp, Homo sapiens
ggcagtgtataagtgttctcttttcttagaaaccttgccagcttctgttattttttgactttttaatagtagccattctgactggtgtgagatggttatctcatggttttgatttgattgtctctgatgaatagtgatgttgagcaatttttcatatgtttgttggccatgtgtatgtcttcttttgaaaaatgtctattcatgtattatagtttgcccattctttaatggggttgtttattttttgttaatttgtttaagttccttatagattcaggatattagacctttgtcagatgcatactttgcaatattttctctcactttgtaagttatctgtttactcagtggatagtttcttttgctgtgcagaagtagctctttagtttaattaggtctcatttgtcaatttttctttttgtggcaaatgattttggggtcttcrtcatgaaatctttgctggggcctatgtccagaatggtatttcctaggttttcttctagagttttatagtattagattttacatttaagtctttactccatcttgagtt

SEQ ID NO: 897423 - DNA, 625 bp, Homo sapiens
acattttttagtacctacaatgttccaggcactggccaggtcaatgtgcacacatcactgaagaaactagacaaatgtcttcaacyaggcattgtgagtagtggttctcttctacaccagctttcctgtcacccatttccctggtctacttcctgtatatcttcagctctgcatggcaaggaggacatccccaacagagcttctattagctggcttgttactgaagtcagcaatgggacaggttagcaggagtttggaggagaagtgggaggaatggaaggtgggtgcatctcctctgtttcagccttgggcagcaacgttgcagccacaactgatatatcttcactctgcaactcactctctggggtgcctactgctctagttgggctcctcagcccttcctttccctctgcagacaacaccatatggtaattccccttgactgaaaatactctgactatttagcccctgaagttttttctatttacctaattagaaagcatcatagagtgttagctaaatcaaaaaaggtgcgtttttctttcaggtaatttatgctaccctaccagggagtggacacagcttcagtgtttttcttctttttttttaatggaactttcaagtt

SEQ ID NO: 897424 - DNA, 625 bp, Homo sapiens
agacatggctgaaattaaagctggctttccctcttacaatgggtactcactctccacaaagggttatgcccacaggacaagaatgatactgaaacactactttgctattttactttctttacttggatctcctttccaactttcccttcaagcatgttgggccattttgatcgctggtgagcacatgtgattgggggaaccagggcaaaggaagcagtactggatccttttccttgtgccttttaaaaccacagatatttctatgccataaagccagaggaagattttaggcataagtggtttttctttcctcattttttaaaagatggcacagtggcaattcagtgattaaagctcattgtctgaatgacaaagcttctggcccactgtgtcctgtcattgtcgtggcttctgattcaattagggactgcacactgggggggttcttcctggtttccacggacctaagacttttatttttatcacatacgaacttggttttaaacaaagctttgaagcttcycagggctaatctttaatgaaaatggaaaggcaaataaaaaaggctgaaataaattccaatgaaagcagcaaaagtgttaattcagggaggttggaaggagat

SEQ ID NO: 897425 - DNA, 639 bp, Homo sapiens
tagagtctccaataaaaacctatagcaaacrtcatactaaatgatgaaatactgagcacttctcttctgagactgagaacaagagaaagatatttgctgtcattacttccaatgcacagcatgctaatgtctagcctgtggaagaaagaataagaaatgaagagcataaggattgaacaaaataaaaactattattatctgcagatgacctgtttgtgtatatacaaaatccaaaatcatctacggataagtcagaagtaaatttagcaaagtctgcagataaaagctcaatatacaaaacttaactgtagtttaataaagccacattaatttagaaaataagcttgggaaaaaataccacactagctataaaattaaaatagataaactgtacttcatcaaaattaaattgttctgctaataaaaagacattaagaaaattaatttctcactgtgagaaaatattcacaataattatttctggaagacttatataaagaatatatatatatatttctttttcttttttaagatggagtctcactctgtcacccaggctggagtgcaatggcttggtctcagctcactgcaacctctgcctcccgggttcaagctattctcccgcctcagcttcctgat

SEQ ID NO: 897426 - DNA, 639 bp, Homo sapiens
tagagtctccaataaaaacctatagcaaacatcatactaaatgatgaaatactgagcacttctcttctgagactgagaacaagagaaagatatttgctgtcattacttccaatgcacagcatrctaatgtctagcctgtggaagaaagaataagaaatgaagagcataaggattgaacaaaataaaaactattattatctgcagatgacctgtttgtgtatatacaaaatccaaaatcatctacggataagtcagaagtaaatttagcaaagtctgcagataaaagctcaatatacaaaacttaactgtagtttaataaagccacattaatttagaaaataagcttgggaaaaaataccacactagctataaaattaaaatagataaactgtacttcatcaaaattaaattgttctgctaataaaaagacattaagaaaattaatttctcactgtgagaaaatattcacaataattatttctggaagacttatataaagaatatatatatatatttctttttcttttttaagatggagtctcactctgtcacccaggctggagtgcaatggcttggtctcagctcactgcaacctctgcctcccgggttcaagctattctcccgcctcagcttcctgat

SEQ ID NO: 897427 - DNA, 586 bp, Homo sapiens
cacaaaacacaaaaagacataagataccctggttgaaaaccagcagaaacaataaacagcaaactaaataagtagacttaatttgaattatcagatacaaaatataaaaaaaccacayttaatatatttaagaaatcaaagggaaacttgaaaaataaaagaggggagagcagtcagatttgataagaactaaataaaacttccagaaataaaaacaataataataattaaaaagttaaaactcagcaggtgagacttcactgaagaggggattattgaatggaataatgaataaaaagaaagtatccagatcagtctacagaggaaaagaaatggaaaatatagaggtaaaaatgaatgaataacagtgcaataatagattaagtattggaataatagagtattccatattccagaacaagaaggaaaacagcaaataatgcatatggggaaacaatgacacacggcctctacatcacacatacacaaaaattaaataaaagatgaggcattaacctaaagacaggagctaaaactataacccttccagaagtaaacatgggagattatattcatgatcttgcag

SEQ ID NO: 897428 - DNA, 569 bp, Homo sapiens
agccatggagagaaggcatggtttttaaaaccgcaaggagaggcctaagagaaggctgccttatggggagcaaggagacgtagccaagggagacagcagcccaggtggtctcccrgggaagacaatggggaaaaaatatcctgacctcacatcccctcccatctcattgtctaccagaccctcactgggtgaacacaaccagagccagaaatgcgagtcgagggctgttgacccaggctgtagaagccagcctccggggctagagcaaactgaagaagggtggagagtgcatttgaaaaggcaaactgaggacaaattctgtgtcttgaaaatataatttgggatgcagacattgtggggagtgagggttgatttggaaacaggaaatagtttaattgttttggaagagaatagtaagagggaagctggatctgatggtgaaataccttaaataacttagagagttcttcctaaataggaaacccagcccatttaattattttcatggtccatttcacttctttaaattgctagtttttcaaagtaatgtgttgtgtaatgcatctggc

SEQ ID NO: 897429 - DNA, 569 bp, Homo sapiens
agccatggagagaaggcatggtttttaaaaccgcaaggagaggcctaagagaaggctgccttatggggagcaaggagacgtagccaagggagacagcagcccaggtggtctcccggggaagacaatggggaaaaaatatcctgacctcacatcccctcccatctcattgtctaccagaccctcactgggtgaacacaaccagagccagaaatgcgagtcgagggctgttgacccaggctgtagaagccagcctccggggctagagcaaactgaagaagggtggagagtgcatttgaaaaggcaaactgaggacaaattctgtgtcttgaaaatataatttgggatgcagacattgtggggagtgagggttgatttggaaacaggaaatagtttaattgttttggaagagaatagtaagagggaagctggatctgatggtgaaataccttaartaacttagagagttcttcctaaataggaaacccagcccatttaattattttcatggtccatttcacttctttaaattgctagtttttcaaagtaatgtgttgtgtaatgcatctggc

SEQ ID NO: 897430 - DNA, 665 bp, Homo sapiens
gagttagaagaggagagagtattcaggcatgtgcctttgagttttactcagtgaaatgaccctggactggaggacttgtgcttcratatatatttttgaagaatccctgcagctgctacatgagacttccctagaaggtagagaagatgaggacagaagcagagagaacatataagagatacatggtggccttagagaacaattctggaaatgctttgaagttagagctgacttgatatgctgcctgattgaatgtaggtgtgtgggaaagaggagagtcagagatgagtgacacacatatctattccacaagcgtagcactgctggtgcataacaacataagcattaagaaaaccctcaaaataggccccagttagcaccattgttctttttccccatttcatttttatctccttttttcattcttgcctttttcattttatcttctttcgtgtctcttgatcactgtggcaacaaatatactttataaagtcctttttcactcttattatttctattttattcatcactaatttaattcatgacctctaagatgaagaaaattcagaactaaaaaacaaacaaaaaacaagctaaaaaggctggcagtctctgttcagtctactgtaacaaaacagcttagaccaggtaattcacaaacaaca

SEQ ID NO: 897431 - DNA, 606 bp, Homo sapiens
aaaaatggattgatcctttccatgtcccaaaatatgtattggggtgagcaagtaaaaccttttcttcaaatgcagggacttttcttaacttggggattgggttaacagagtcctccctgctgggaagtacttcccctcaatggataaaaaatagcttttaagaaagtctaatatgttaaagtcaaacttacaaaaaagctctcttaagggatttcagcatcctggcatgcttccacaaaccaaactactaccttctattaaacggaaatgcccctttaggggcaaggggtttggattcacttcttttatttctctccacagcacctggtgcattgctgtgtctggaagttgttaaccacctggctgactgtggatcccatgggtaaggggatggtaggggttggtaaggattggtaagagactcagttttctctcagttatcttccaaaactctgcattgctaaatactttaaatcttcctcactgcctgattgaggacatatacatgcactcttttgatttctatatgctaaatcatcaaaataaaacacagaagctacctatyatatttgatttaggtttatttcttccataagggtttagcat

SEQ ID NO: 897432 - DNA, 601 bp, Homo sapiens
gccctatcctatgtaggtgttagacacgctcacaggcacatagtacattctacgtccttgtactttaaccaagatatctgtgctggatgtgctcacaggcatgtcccagcttgcagcctataccccttccttatttgggaatgttattacttttctaagtccttttgtaagcaacttcctcttttcctctgttttccattgcttttacctatttagaaaagttttaaattattagccagtcgggatttagtttagattgtaaagtctggctccagccaatggagacagacacagtagcagggacaaactgcataagggataaaaattgcttcttccctcctttgttcaggtgtgctcttgccattgttccatctgtgatgaacaccctttctgcagaagtaaaaattgccttgctgagataattaaatttatgtttgagtgctatttctttatggcactggggaacaagcattctgtttctaaataaacattttacatatgacactatacaactttccaattgtttgggatgatgtacaaaktcttctcccatttgggatctgacagccttgttaatatcttccaccaccactcccaactt

SEQ ID NO: 897433 - DNA, 605 bp, Homo sapiens
catgttctcactcataagtgggagttgaacaatgagaatacatggacacagggaagggaacatcacaccctggggccttttgggggstgtgggggcaaagggagggggagcattaggacaaatacctaatgcatgcggggcttaaaacctagatgacgggttgataggtgctgcaaaccaccatggcgcatgtatacttatgtaagaaacctgcacgttctgcacatgtatcccagaacttaaagtaaaaaataaaataaaatataaattaaaaaatcatgctgctctaagagaatcattcaccctccaatgatgcttaggcaaataccagctgttctgaccccaccttaagggtcatatcctaagatcatattctagcagcagctgctgttggagaatatatacaaggctccagggcagaaattgggtaccacaagtggatactatgggtgctgctatgtccaggctgcgggagcctgtcccctttgtctctccttcagtatgagttgttgcaagtagagtcagaaatcatatcaaaatgagtacagtcacctgtaaactaaaagtaacacctaagccaccaccaccaccaacagctgaacaga

SEQ ID NO: 897434 - DNA, 605 bp, Homo sapiens
catgttctcactcataagtgggagttgaacaatgagaatacatggacacagggaagggaacatcacaccctggggccttttgggggctgtgggggcaaagggagggrgagcattaggacaaatacctaatgcatgcggggcttaaaacctagatgacgggttgataggtgctgcaaaccaccatggcgcatgtatacttatgtaagaaacctgcacgttctgcacatgtatcccagaacttaaagtaaaaaataaaataaaatataaattaaaaaatcatgctgctctaagagaatcattcaccctccaatgatgcttaggcaaataccagctgttctgaccccaccttaagggtcatatcctaagatcatattctagcagcagctgctgttggagaatatatacaaggctccagggcagaaattgggtaccacaagtggatactatgggtgctgctatgtccaggctgcgggagcctgtcccctttgtctctccttcagtatgagttgttgcaagtagagtcagaaatcatatcaaaatgagtacagtcacctgtaaactaaaagtaacacctaagccaccaccaccaccaacagctgaacaga

SEQ ID NO: 897435 - DNA, 617 bp, Homo sapiens
tactgtggctttatagtatagtttgaggtcaaatagtgtaatgcctccagctttgttctttttgcttaggattgcttttggctcttcgggctcttttttggttccatataaattttagaatagtttttttcckaattctgtgaataatgatgttggtagtttgataggaatagcattgaatctatacattgcttttggcagtatggccatatttatactgagtcttccaactcatgcacatggaatgtttttccatttatttgtgtggtctctgatttctttcagaagtgttttgtagttctccttgaagagatcttttacctcctttgttagctgtatttctaggtatttcattttctttgtgggtattataagtgaggccatgttcttgatttggcactcagcctggacattgttgctgtatagaaatgctactgattttttacattgattttgtatgctgaaactttactaaattgacttatcaattctaggagctttctggcagagtcttcaggattttctaggtatagaatcatgtcatcagcaaagggagataactttgctatttggatgccttttgtttctttctcttgcctgattgctgtggctaggac

SEQ ID NO: 897436 - DNA, 625 bp, Homo sapiens
tcattctgcgcaaaggcatcaacagctttagtactaaacttttttccaaggatgtctgtgtaatacagagccaggactagagtgaagcaagcgtggcacctaggattcaaagcttaaagagtcgtggtggcacagataatgaaaaaaagcaggtggggcgacagcccacccaggagtggcacagagaccaaggaacccccacccccagccaagggaagcagtgagtgattgtgcaatcccacccaggaaaccacacttctcccatggatctttgcaaccagcggatcagaagatcccctcatacgcccactccaccagggctttgggtccaatacaagagctgtgtggtatcctggcagagcagctgctcaggcacacacagaggcccaggagttttgcataatcctgccccaggattcctgacaaggcagaagattcatccctacatatcccttggagtgggggctgaatccagggagccaagaagtgtctgtgggccccatttccatggcacctcataacttaagacccactggcttcgaattccagccagccagyggtgacaggctggagccagcctagtaaaaggactgagttcccagggggaggagcggctgccaactct

SEQ ID NO: 897437 - DNA, 638 bp, Homo sapiens
ggactaagggtaatctactctaccttcttgcaagtgattggttcagaaatgggcatgttactcattaagggccaatgagattttcaatgagacacttttggggagagggyaggttaatttttcttcatttttcaggagagcttttggtagaactctttcttctcttccttgtggatgctgtcatacacaagcgtgagatctggtcagagtaagaagtcaacacttacaaggaagtagagtaaagacaaacatagggaaatggagccagagcaactggacgatacgtccctgaagccccacctcaccactggatttcttcaccagtgtagaaacgtatgccagtacatttcttcaccgtatgggccaggtggtgtcagattttctgtgacttccttcccatgcaggtcagatgatacgaagccaaagacaaatgttgtgctgtgtgggtcccacagccactgtgctctgagcagatattgttttttaaaaaaaatcacaagcatctataccatctgtcacttggtataagtaaaagctagacagaaaaaagacatgtgactttccaaggcattgccgtgcaacggacaaaatctaggttgaaatattcttgtctctcctactctgacagtttcttcccc

SEQ ID NO: 897438 - DNA, 617 bp, Homo sapiens
caccttatccataggctcctccaccaagccaatgccaggactcctgcaatcacaggatggcaacaccacttctaaagcacagaagaacttcaggctttgcttcggaagtggcaccatgctatcttcattttccctttcttcaaggtcagaaagctcctgaagctgtaaggatatttaatgtaaggtccttcctggggtcttaatgtaggcttcaaaatgttttgttattaaaagtaaaaacttggctgggcgtggtggttcacgcctgtaatcccagtactttgggaggccgaggtgggcggatcacgaggtcaagagattgagaccatcctggccaacatggtgaaactccgtctctactaaaaatacaaaaattagctgggcgtggtggtgggcgcctgtagtcccagctacttgggaggctgaggcaggagaattgcttgtacccaggaggcagattttgcagtgagctgagatagcgccactgcactccagcctgatgacacagcgagcctctgtctcaaaaacaaaacaaaacaaaayaaaaacccaataaaaaaaagaaaacccaaaaaacaactacactccagtcattcaagctaacagttgaggtgtcc

SEQ ID NO: 897439 - DNA, 589 bp, Homo sapiens
ggaaacagaggcaattaaacaagtaataataatagtgtgataagtactagaagagaggaaatatagtgtgctggggcaacacacagctggggcaccttaaggtaatttaggagagtcagaaaaagcttcttagaagaagcaatatttaagctgagacatgaaggaggacaaggagtgaaccaaggtgtggtagttttccaggcagaggaaaacagtgtgtgcaaaggccctaaggcaagacatagctttttactttcaaggaactaaaatcaatttctgtgtggttagagtataagtgagtggggaatgatggaagatagggcatggtaggggttttccacctgcactggttttgctccccaggaaacatttggcaatttctggagacatttcttgttgtcttaactaggggttgagacagtgctattggtagtagacagagatcaaggatagttcttctaaatatcctacagtagacaggacaacatcygccttgcccttgcccccctcacccccgcccccacacacaaagaattatgtggtctaaaatatctggtcctggcgaaagcaaaggtcctttcattacaat

SEQ ID NO: 897440 - DNA, 527 bp, Homo sapiens
tatagtcaagtggcagcagtgtaattcaggaaaccaacaacgtattgacagtcgtaatgttttcacaattctagagatagaaacatttaggcatggcaaaatgaccgtttacataacatacatacatgcctttatttttgaacaatcagttatgatactatttatctgaatgacaaatttgtgaaaacaataatgatgtagcaaagttgggtaatgagaattgtccacactgagtgcaggctataaaaaaggtgtattctctgtagaaaatttaaaaacagaaaaaccaactttgtctgcttaaattttcatcatgctttggcaattttaaacaatgttaatgataaaatacttttccccagaaaaatattttcttggtccaagctctatacaatcgatgaagttactgttgagttttattaatatgtatacgtcagcttcaaattagcacattctctttaataagaatcctatygtccataaaggtaaatttagagaacttccagttataccaataccacccaaca

SEQ ID NO: 897441 - DNA, 624 bp, Homo sapiens
gtccctttaatcattggaagcataacaaaaagttataaaaaggattcaaggtgaattgctgtcatcagtcattctcaccctagactcaagaggaaggatcagctctttaacacatctttcagaataacagtgcagactatcctgtgtgcaaaatgtaaggggaatcagcatgctaattattagccatataaccttgaagttaacgtctctgaatctcagtttcttttcctattaaatgcggacattaagctaagtagtctttacaattcctaaaaacactaaattttataggcttttttttttctacaaatgaaatcaggcagaggggcataaaagaaacatattaaattcttcttggtttagttacattttcatgagcatttagggagggtgggttttttattaggtctcagctatttggtaatatggtaatatgctcagattcatttgacatccaagcaatgccaggtactttcataaaattttttctcatctcatcttcgctaaaacctttttaggtgagcattattatgctcatttttgctgatggagatcaaggggttaaggaactgacaaaaggtctctcttgacatgttgtggygagactgaaatccaaatgcttct

SEQ ID NO: 897442 - DNA, 647 bp, Homo sapiens
gataggactgggatgggaaccaagacagcctgccttcagagactgctctttagccaatagaccaaagtaggccagtaggggtcccatgactaaggcagaggattggtgcaaaattctggtcccatagagagctcagtactggcttatccactggatagaactttgaagtaggagtcattcctgggggccttacctccctggtatgataggcaaggaaatgtggggggcatcagagaatacagacatcactagactatcacattctaccaaaatggaggtctggaaggaagatcaaggtggttagtatacagtctttctcatatccagatgatcccaagtggggagctcagtgtgcctcctataaaaagctgtagagaaagtcacattaaaagaaaaggcaacacaggatttcaatcgcttcctcacaggtaaatccagaatcgcccctgttttggtgcatttgttatgtatggatggattccatttgtatatgcatttataaaagtattacttattccctacaraaaatttgaggaaaagatcaaagcaaaaatcgtctataatttcaacacctagataacattttagaagagtgttttattgctagtagcatttccccttagaaggcttaataagtatgtattcaa

SEQ ID NO: 897443 - DNA, 511 bp, Homo sapiens
aggagcagccagcttctctccacagtctgcaagagcagcgtgcaatatacgggttgctaaacaagcaaaaggttatccacagactttacaaattacatgcaataccrccctgccagtgacagctctcttctgtctacaattctgccaaattctcaccacccacacctctcccaccctgttcacaccaccgtgtctggcctagattcttgcaaggtctcccaacttcctccctcctcatccttccagtgtgttcctaaagcagcagccagagagcccctgctcgctgccagccagatcatgtcgcttccccactcagggctcaccagtgacttcccaccttgcaatgtgtgaacaccagagtccttccagtgaactagaagcctaacacaacccggccccttgtgacatccccagctttatttccttctgtcctcccctttgttccccatgttctggccacactggcctctgcagatgctctcccacctcaggcctttttttttgcctggaa

SEQ ID NO: 897444 - DNA, 590 bp, Homo sapiens
ttggcaaccactggactaggaaatcaaaactcagcctgcataggtccatgaggatctctgaagttcatgagtcatatgccacttggactgtaaccattcatcaggagtgcagtcgggaatgagcccacccaaagtcataaaaaataaagaacctacagtggtccacacctataatcccagcactttgggaggccaaggcaggtggattgcttgagcctaggagtttgagaccagcctgggcaacatggcaagaccccatctttattaaaaaatttttaaaaatagctgggtgtggtggctcatgcaggtggctgaggtgggaggatctattcagcccaggaagtcaaggctgcagtgagccgtaattgcactacttcactccagcctgagtgacagaccccatctcaacaaaaaataaaataaaataaaataaaataaagaaactgagtgggcaaaataaataaatgacartgagctagatagcaagctaactctttttaatcccaggaaaatgcttagacatgaagtaatagattatactgaaagtactaggaatccaagttttggcaaaggccagtggtctaaacaca

SEQ ID NO: 897445 - DNA, 648 bp, Homo sapiens
aagattcaacaaattgcaacactgcaataataactaacatcactttctaatagtgtttatagtgttttctaatatgaaatcaaaatctgtctttggataacttttactcactccctggtcttgtttctgttctctgggatgacacagaatatatggaattcactcttactctgcttagtactgagaaagcaaaaattaaataaggcattcaaaattcttgtctgtataggggccaagggaaagcttccccttcaccctctgaaggtttgctgataaccaactgacaaaaggaagattcacaggagaaaaagcttaaatatttatttgatcacagttgtatatgacatgagagcctttagaatgaagaccaaaagatacagaggaaaccgtccatttttatgcctaggttcaacaaagtatggacagccatgtagaaatagggttggattcttcttggcctctctgagcagtgcttcttccttctgggtgtggggaaaattcaccatattccttaggtcccctcaaaggcccctctattcactcttttcaggaagggcgagaggaccaatgaataaccaactttctggaaaggggggtcttaagacctacagtcaaacaaagyaggtcagatcatttcttcttttgttt

SEQ ID NO: 897446 - DNA, 575 bp, Homo sapiens
gaactgattggaacgttggtgacaaggaaatttggagaagaggtatatggatagacccacctgaatgggcaaaaaacatgaagatgtttgtgctttatgtgaatgctcaccaaagggtgacctcagcagaagaggattttaataatcaagtaggtagggtgacattttttgcggataccagtgagccacttgccccagccacacctattctcacccagttggctcataaagtagccactgtggcagggatggaggttatacatgggctcagcaatgtggacttccactcataaaggatgatctggctacagccactgctgagtgcccaatctgacagcagcagagaccagcacttagtccctgatatggcgccattcgccagggtgatcagccagctacctggtggcaggttgatttcattggacctcttccatcatagaaggggcagcattttgttcttactggaatagacactgtagatatggatttgccytccctatatgtgatgtttttgctaaactaccatccatggacttatagaatgtcttatctgccctagcagcatacacacagca

SEQ ID NO: 897447 - DNA, 523 bp, Homo sapiens
ttatcaagggctaggggcaggaggggattggggagatgttggtcaaagggtataaaatttcagctgawgggaggaaaagttcaagggatatattatacaacatggtgactatagttaataacaatgtattacatacctgaaaattgctgagagtagattttaagtgttctcatcaaagcaaaataagtatgtgaggtaatacatttgttaattattagctcaatttagccattccatagtatattcacatttcaaaacatcatttgtacatcaaaacatttgcataatttttatctgtcaatttgaaaaatttaaaaactaatacggtatattgtttggaaatttagctattgttctttactttcaaaagatacacagcaatatttttaaatatatataaccatataatctgatatctttacatagaaattaaatctgtgttaattaatttcatctgtatttcatatgggcatatgatgttttactgaaatattaaatttaatttcagggtaaaatcaaatag

SEQ ID NO: 897448 - DNA, 578 bp, Homo sapiens
cttagcacacagttttcccttttgggaaatattcacaaacataggatgagatgtgaggccatgactttacatgacccagacatgctggaaatagctaattgttcctcaagtagtacctgactcaaactgagccagccagcaatctctcattagaatttgaaattctagactaagacacatagagataggcattgaatcacattaatggcaatgccttatgaagaatgaccacaaactcctgtgacaaggccctgcagccactctgccttctactctgcccacatgctacctgttggactcccttcaactctctgagaactctcccagtttccttctatctgcttaggtgggccagagtcagctcttatgcttataatccaagaaaccctcctacatgtcacctgttcacagtcttccagctgtaaccagtcaagctatatttccctctgattaaacaatttgtagagagattaatgactcatacagcttagtatgttatctactctccatagaggcgatagtttggggaaactygtggagatataacaccagaatccagagaatctactccattgcag

SEQ ID NO: 897449 - DNA, 583 bp, Homo sapiens
caggcccgacacaggctgatccggttgagcaaaccctctcctttgatccatttgatcccttctgccatctgccatgctgtttgaacttttctccttaacttagtttgagccagtgctgtttctaggcttccaagagccattctagcaccttctcctggggtccttgccagggggtaaaatcctgcatcacaggagcacactcctattcaatattctttcctatcaagctctatgttttgatcctcatcctcagaatccagtcccatctctactctcctgaatcctgccagcacatgttggcaagttcctgcagctcctccagggtacagtctcattccttcctcagcagcaggtctggcgcatccctggccggttttgttgtgacttgatagctatttgtctggtggccaggagggaggtgcatttcatcttgcaaagcagaggccctgcactatcttcaagcatgaggggagttttagcccttaacagtgggcagggggccgcttctgcaggcccagtrggttcagtggaatctggagattcaagatttttttagtgcattgacccagatgtgccatcccaa

SEQ ID NO: 897450 - DNA, 550 bp, Homo sapiens; identical to SEQ ID NO: 897280

SEQ ID NO: 897451 - DNA, 564 bp, Homo sapiens
atagtcttatcatatgatccagcaatcacactcctaagtatatacccaactgagttgaaaacttatgtccacacaaaacccttcacaggaatgtttatagcagctttatacataattgcaaaaaactgaaagcaaccaagatgtttttcaacagaggaaaagataagtaaactagggtacgtctctaaaatgaaatattatttggtgataaagggaaatgagctatgaagccaaggaaagacataaataaacttacatgtatttttctgagtaagcctgaaaagactcccatactaaattacattttctttttaaattaattttttttcattcccactttaaattttccattcccactctaggttcagggacacatgtgcagatttgttacataggtaaattgtgtgttgtgaagagttggtgtacagattattttgtcacctgggtaatgagcatagtacccaataagtagtttttcaatmctcacctcctcccatctgacatttcgaaaaggcaaaactagagagatagtaaaataatcagtggtttccagaggttttggag

SEQ ID NO: 897452 - DNA, 590 bp, Homo sapiens
ttacattaggttctagttgtgaaaaaaattagagtctggaatgtctattttattcacaagtgccattttcaccatgtattgcaaataaactaaagcttaatrtatcatcatactataacataaatactagtaaaaatctccattttagatttaatatatttctaaattttagaattcctcatgtactctaaaagctatttgatgtaacttttgctggcaaactggactaaataattttgtgactaacagagattatgcttctccttttatcctaaatttataagcaacaatttttattcatttccagatcagttaactaaaatgtttgttttcaaatccacaggaaaggaaaagaaaaaaataacttgctatcttctctttctgtcttgctataaaatcactgaacttaaataaatttaaaacattagatgaaggagtaatcatcacattgaagtgatgaattaaagatatgactagtattccattagatctgaattcaatttcttaatatttgaatgcctcttataagaagatgattgctgatgtcctctcaaagattgttgaaaaaaaaaaaaaagacaaaatctgct

SEQ ID NO: 897453 - DNA, 619 bp, Homo sapiens
ttcctgagacaggaagaaaaaaagtgtttgtcttttccatttctaaattcccaagaaactacagacataaattactagctaaaacaacagcataagcccaaacaaaaagcatytcagaaaaaagaacaggtatttatgctttctttgttctgttgatgactctcaaaagttgcatatatagcaaatatgataaattaatatacttatctataatttctatctcttatattgaataaatgatagtgacagttacaataaattctatgccttttcacaagtatattgcacaaatttaaggaaaataagtgggtttactgaagtacaagtgatataaaataagctgtctatatttaaagtaacaaattttatactttttaaccaaatatatcagtatacatctctacatagttacacataaaaaatagagtaggtaaatagatgatagatagataaatagatagataagtttgctagggttgccataacaaagttccacaacctgagttaaacaacagaaatttattttctcatcattctagaggttaaaagtttaaggcattagcagggttggtttctcctgagacattctctttaggttgtaaatagccaccttgttctc

SEQ ID NO: 897454 - DNA, 567 bp, Homo sapiens
tatttcattcggaaatgattatggaaacttgatgagaattattttatttttatgctgtcatgcgcacttaatttggcataaaatagagcaaacccttataaggtaacattgagtgactggaaaatgggtcaaactactgtatccatgttctccggtttgtcatcttcctactttttgtgctgttctcttaaaactgattccccaggtcccaggtagcagtttccacttcaaagttgttcaaatgcatgagtaattaaaagtattaaggattagagccacagaaatgaggaggcaaaaaaagaggagaaaaggcacttcacaaaacaacatggttttgcattttgaaaataggaaatagcaaataatattttgtcccacaatttatcttgtattatttgggtggggatggcaaatatatgtgctgtttggagcttagaaagaaaaaatgctattcagagagkgtggatgaactggataggagttaacactcagtggaattgctcactgattcaagttctacaagtgattaggtgagaaatcttgcacaaccgacttccaccatgaggg

SEQ ID NO: 897455 - DNA, 584 bp, Homo sapiens
atgactactaaaatcagtacattgtacaatgtattagaaagccacattcactggaagtaaaatccataagagattatattttaatattaagatgatttctaggaggagtagaaaccaattatggtgtagaaaacttgacaaaaatattagacgtctgttctcaagccccagcttctccattccataccttacaaggttaactggttattgagtgagctaaacttaaaaatgttttcaagaagcccctttatttttcatgaactcttcaaaatctttccaccccctgatagcacattatgagcatcccataactttcaagtcacttctattttcttttcaatcattatgactcactctctgttattcagatgttctttccaatctaaatcagagctccaaactctaattccattcaaagtttctctcttctgcacaactcaagattgatccgtggctcaaaggcttctagtgacaaaaggcatattgacattttttttcactttccatcatccttttctttmtttttctacctccttctagaatgaggtgagaaaggagagttggtggaagagatacaaatgtct

SEQ ID NO: 897456 - DNA, 634 bp, Homo sapiens
gtagttctcaccctaagtcagtgagcatattacaaaagaaattccatggaagtgatttacaattcatcaaaatttccacttatctaatatgactggcrtgtcagaaaatgtttctcagaggagaagcttcataattaagttgtatatgatgaactgatatagtcagtaccagaagcagggaatgtgtaagcctggcagtaagagagcacgttaaaaaccacctaggatagagtgcacctaagagagaaaaggtctagtatgattccaggtttctgagttgaatgactgagtaactggtgctgcttcttatcaaggtgcaaatacagagattgtgagaaggaagatatcaagtttggtatcagccgtataaccatgcagtcataccattatttacacatttcaaagcaatttcaatgtaacatcccattttgtacttacaacaaaatagtgaatgaaataaggcagctaacatttccattttatgaatgaagaaattaagtgacttgctgaaggtcacaaagcaactcaagaatggactcagaaatcaaattctggtttcgatttatgaattcagggtttttttctgctattgtactagaaatccatattgtaactattagcatcccctgtacat

SEQ ID NO: 897457 - DNA, 638 bp, Homo sapiens
ccaagatgtcattcctaataatacagtgtcttaggaagtgaagctgggagaaatagctagcagggtggtgaaggatgggttgccacatctataaataacagtgatttgcaggatgatgatctcaccaatagggctcatctcctctcttcctctacattaggatattcagcagcaccagggtgaggctgtcaaggaccccagtggggactgagagagatgatggaagctgttttgcattttagtcattcctgattgaactctagctctcctcattgcagaaggtaaggcagcaggatgttctatacagacaaacagaacttatctttccatgctgctaagtgcagttcctctctctcctagagttatattcactctgttattcaacctaaaattcctttaaggggacatggttaggtaatgttggtggaaaaatcagggcccgtattcaggtgggaatttagtgacttactctgcggttgctactgccaagctctgggggaaatttcttcagtcattgtaccagagaagatgcagtgagtgtatttaggtttytactagacaaaattgtctaaaagatagtgtccatgttcctttgaatcacactgcacataacctgtaatagcaccacaatcatggtc

SEQ ID NO: 897458 - DNA, 681 bp, Homo sapiens
ctttcaacctgtcacaaccattaactcaaaatggatcagacctaaatgtaaaacttaaaatgcaaatgcaaagtgacagtcactttagaagacagtttggcagcatcttacaaaacatactcttaccataagacccaaatgagttatgtccacattaaaaccctgcacgtgaatgtttatagcagctttagtcataattgccaaaactggaaccaacataaatagcttagatgaggggataaacaaactgtggtacatcaagatgatgaaatattattcactcctaaaaagaaattagctataaagtcaccaaaagggaaattaaatgcatattttggtgtgagagaatacaatgtaaaacagctaaatattctatgattacagctatttatttctggaaaagacaaattatggaggcattaaaaggatgagtggttgcaaggggttgtgggggccggaggtatgtatagatagtacacagataaatttcactgtcgtgtgaaactactctgtacaataactacagtgatggacgtatatcattgtacatttgtgaaaactcatagaatgtataatacaatkcatgggtcgtaattaaactacgggctttgaatgataatgatgtgtcaatgtaggtttattgatgctaatacacataccactatgtttacaaggtttcaa

SEQ ID NO: 897459 - DNA, 681 bp, Homo sapiens
ctttcaacctgtcacaaccattaactcaaaatggatcagacctaaatgtaaaacttaaaatgcaaatgcaaagtgacagtcactttagaagacagtttggcagcatcttacaaaacatactcttaccataagacccaaatgagttatgtccacattaaaaccctgcacgtgaatgtttatagcagctttagtcataattgccaaaactggaaccaacataaatagcttagatgaggggataaacaaactgtggtacatcaagatgatgaaatattattcactcctaaaaagaaattagctataaagtcaccaaaagggaaattaaatgcatattttggtgtgagagaatacaatgtaaaacagctaaatattctatgattacagctatttatttctggaaaagacaaattatggaggcattaaaaggatgagtggttgcaaggggttgtgggggccggaggtatgtatagatagtacacagataaatttcactgtcgtgtgaaactactctgtacaataactacagtgatggacgtatatcattgtacatttgtgaaaactcatagaatgtataatacaatgmatgggtcgtaattaaactacgggctttgaatgataatgatgtgtcaatgtaggtttattgatgctaatacacataccactatgtttacaaggtttcaa

SEQ ID NO: 897460 - DNA, 496 bp, Homo sapiens
cagttactgaagaaatttaaccactgtgttccgttgtctgaatgtgcttttttaggagtttctgaagtttttgtgtaatcacaatattattggaatgaatgacttttgaggattccttttgttggggaatacatttttttaaggtccaagtatttcagcatctgtttaaaaacaaaagaaacaaagtagtctctatttggtttttgtaatttcaaaaacacaatatggtgacattgtttctcttcagatatttttatatagttatccagcattttatataggtatccagaaaagaatattttctatatgtatatgattggtaaggaaataagttctgaaaaatctatacctaataaacattctattatctttgaaatgtaagttttgcctatttattgtgaagggaaagatgggagaacwttatgtgtcaccttaaattattggagatagtggccaactggctgtgttctgaaagttttttttttttttttttttt

SEQ ID NO: 897461 - DNA, 504 bp, Homo sapiens
ccaggctggagtacagtggtacaatcttggctcactgcaacctctgcttcccaggttcaagtgattctcatgcctcagtcttgcaagtagctggaattacaggcacacaccaccaygctcagctaatttctgtatttttagtagagacagggttttgccatattggccaggctggtcttgaacttctgacctcaagcaatccattcgctttggccttccaaagtgctgggattacaggtgtgagccaccacatgccaccgtgcccagccaatatttctttttcctataagggcctaccctaatgacctcatcttagtttaatcatctccctaaagaccatatctccaaataaagttacgttctgaggtatactggtgggtaggattccaacatgctaattttgggggaaacacagttcaatccataacaatgtgtgttactcatgatcctagtacagagcctggaaaataagtcttgaatatcttcttggtactgtgttccaaa

SEQ ID NO: 897462 - DNA, 611 bp, Homo sapiens
attcagtaattttttgttgagtatcttcaatatgccagtctattttcttttgtcataaagtgttttggtcaagtgtgatgaaaatctgactttctttgtcttataagtgatttagtctatttgcctggatgctcaaataattcttttcctttaaagtccatttgttttactacagttttcttaattatagtcattttggctgatattgctaggtacatagtggatgcttctgtgtagtttcgaatctttttatttgacattatttctttagtttttttctgtttggttacttcagttttcttcagagattcctgttggatgaagcttacatgttctttggccatccacagctattacattctcctgagtttttctaatctcttaatttctttttaattttcttacttcccgtcttttatttctgttcagtcattaccttttgtgttttttctaatttagtcttcatttctgaaatattttttaaattttctcgccttgtttctaasttattccaagtctgacttttatagttctgtcattttcttaatttcttttagcttattaaatattgggttacagtcttcatttattttatgactgggtctttctga

SEQ ID NO: 897463 - DNA, 617 bp, Homo sapiens
gtttgttaaatttagagcttgtcattttccattccatggtccttgtagtgttgcattagaacaatagttggctttcaacatgagttttaacagtgagagayggatgcacaaaggaagacttaccacaataatgtcttctaccaccaactgctcagcacacgtttaatgcagtgggtcagaagcacttgacattactttgatatcaaatctgaagattgaaattggaggacacttcttaaatactttctacactatccaggatccagaaacatcacagttaagggaatgtgtatactggcaattaagattgttagtacttaactgacttcctccagaatacatgttcctccccgacaccccttcccccggagttgactttgggacatgtagaattactcctctctgggtaagggtgttgtgatgtctgtgacaaggtaatagtacctagagtaacactgatgtccagtgtgctttagaggttatgtatgtggacctgggagttccaacagacctgagtctgagtgctagccccttactggctgtgtaatcttagattatgcaaacttttgtgcctgtactgcattatctataacatgaggatgatgataatacctgcc

SEQ ID NO: 897464 - DNA, 658 bp, Homo sapiens
ttagtgaagtctattccctgtattaaaactgtgttatgtgcttccagatacctgcaatcatcactgcaccctttctcttttagtccttcaacatgctcttcaatatttatttgtataagataaaccagactactagcctgttccagaatatattctgtttatgtccatatttttttcctatgtgaaacaattttctatatccttgtttgctaaaatatgcattattcatagcctagttcaaatgactatttcttgatagcctgatgaacttcagcatgtttcatttttttaaaaaatatatggtccttggctttatgggccttctagcaattatgtgttcctttgtaacaaagatgtttatgtttggtctatctaatttgtgaattcatttctgttttttcctactagcatgtaaaagtcacatctgaggctctgggtcatgctggcagacatcttcagcaaatcatcttagatcaatgctacaattttgtttgtgtgaatgtaagtcaattcaaatgattgaaggcacttaaggatatgaacaaatgtggaagagaactaatttgattcttaaatatttatatatgatattatgatgagttcttctacacrtttttggagattttatctttgaaagagaaataatactttcaacaag

SEQ ID NO: 897465 - DNA, 584 bp, Homo sapiens
accagcctgggcaacacaacaagaacctgtctctataaaaaaaaagtttaaaaaactggcttggcacagtggcacatgtctgtagtcctagctactctggaggctgaggtgggagaattgcttgagcccaggagttcaaggttacactgagctatgatcatgccactgcatcccagcctgaactacagagtgacaccctctctctaaataaataaataagcaagcaagcaagccaactccttccccaagagatccttattcaacttgcctggagtagggcccatgcatcatgattttttacaagcaccacaagagtctaacatgtcaccaaagttgagaaccactggtatggtgtcttatgctattagctaatgacagtgtaaagccctcataaccagcaatgttactttaaaacatattaatttcatctgtatctcactctttttcattgctgttctctgaaaattttatatataaatagcaaacaataaattatttgtggattttcataaacayaaatgaattcccctttgaaaattgatatggtatgagatttgtttaggaaaaaaactgaagcccagtat

SEQ ID NO: 897466 - DNA, 565 bp, Homo sapiens
gtagtgatttaaactgagtgacctaggatggtacaagcattactcatggctctgtcagtttctcttagcctctttttcaagtrtaataaaaataagcctcccagctgaacatgtctggtcatggggattttactcaataccaccaaaagatcactaagagggtagccttagacctccaaggccattatctaacaaactttattgaacacctactatgtaaacacagtgcaaaacttgttggaagtatttgattttgagtcttttttttttaagatagtattggaaattgctaagtaattgcctttttttctttgatgctaaaatgtaaaatctgttatagtttttctacaaattttccaagggattaaaaagggaaaacatttgaagctccagaatattctaagggtagaagatcgcttgctgggactttctctaaaacttgaaaaattaaattattacatgcggggaaatacatggaaatagtaggacagtgctctactatgttccttacttagcaaaaaatacacgtttatataaaatatgttcctctttctgttcactacag

SEQ ID NO: 897467 - DNA, 582 bp, Homo sapiens
cccattaaaatttgagaagtttgctgttatagactagtggttcctaaattttagtggacatcataatcatctggacagctttttaaaacacagaatgttaggccctatcttcagagttttcaattcagtacatctaggatggaccctgataatttgcacttctagtcaaatttcatggtgatgctgatgctactagtttgggaatcactctttgaaaccaccatgtgtagatactacactgtccaatactgcagccactatgcacatgttatagttatttgaaatgtgctttgcattgagatgtgctataagtaaaaaatatgcatcagatttcaaaaagacagtatgacaaggcagcatatcacatttatgattttttattgattatatgctgaaaggctagtatcttaatattgttgagttaaataaaacatattaaaattagttttactttttaatttttataatctgaatactagaaaatataaaattatatatatggttcacattatatttctgttgattggcacygttcatcttgatctccatttggctcaggggtccctgaagtgtgtctaaagc

SEQ ID NO: 897468 - DNA, 596 bp, Homo sapiens
cattggccattttcccaatgatacctaatgacattcagagatagcttataattttgctcttttatgacaagaaaccaaagtagccctgtcatgtaccattataaaaaactactaattaatgacatggcatcatgtatattttcagtctgaagcccaaatgaatcactacgaaatctaaaattgaccttccctcattctttctcatattttcctctcccctaatcttccctctgaggaatgatagtgttatttatatcatctttctatctatttatctacacacctacctacctattatttatcccttctatctataatttttttcttatgaagacaacaaagttcataatagcaaatttggaaaattcagaaaaacaaaaagaatataaatcacctattgtggttctagccaatgataactaatattacttagttgtccatcttgttagtaatttaaaaatattaggatgatactatrtatataattttatatcatatacttttcatgtaacaaatatataaaaatatttttcaatgtaataaaagcttgatgcttataagactatctactgtagaaatatagtatacttcttggg

SEQ ID NO: 897469 - DNA, 606 bp, Homo sapiens
tacacaaccactgctgctgacttcagagatcctccgggaggttcctatagtggattcagtggatgatgtatatgccctgctgggcttgactctgtgacgctctggaggggatccttcccgtgagcctgctgcttaggtacctggctttgccccagcagctcctctggtgagcttctgagctgtgttcttcaaccagtttctcagaaaatccaggaatctaacctacaacatgagaatgaacaatggctcaaggggctactctctgcctgtggggtagccctcctctgctggagcagtcatagagcagtaatagagcagtaacactgccacttcagtaaagctgttttcttctaccctaccactaacttgtccttcagttctttcctgtgcaaagccaagaaaaaaacaaagtgggtcaatgaagctacatgccagagccttgtacctcaacatttcacattatgaggcttacatatgatatagctactaccatgaggtctttcattcaatggcctgaaayatagagctgaacacacagaatctcttgagataattttctaaaatgaggcaaaaaattacaatattggcatttctctttctctacgt

SEQ ID NO: 897470 - DNA, 621 bp, Homo sapiens
agggtgtctgcctgatgagaatggtataggaatcaagagtaaacataagtaaaatgcttagaagagtgtctggcatatattcaaacctatttgttaaataaaaactagatttcttttgcattttttwaatcacctatactatgctatttttgacaatgaaaacaaaattgtacttgaaataatcatgaagaaattggccatttgggataataatgtacttttatgctgaaggctgcttttaactaatacaaatgcatccaatatagataaattagtaaaatcttaatgagataaataaatcagtttgcctttgtaaaactttaaatgtatctaaatttagtgacttaatttagtgacttttccaattaatttgttgtctacaccatcttctaaatatactacttaaattcctgttcccatgtcttaacttttgcagttatgcccaaataccttatgcttccgctcctctagtcctcattctactcatgcttcagtacatcagcgtcacagaccactctgccaggcaatattaggttcacgatgaaaagggagaagaagaaatgttggcagattcccgcgatactcagaaaacagtataaaaaggaccaagtggtttgaaac

SEQ ID NO: 897471 - DNA, 612 bp, Homo sapiens
caaatttcaagatgtctaggaatctcataaggaaattgtttaaaatgattatttacagcctccactgccagagattttgatctcatcaggttgggatccagggaactccagagactgcatgcatcacattttgacaaacagtgaaaaagaatcctttttttctttgtcttccacgtgtttaaaattaggcagagagttggtgtttcctctttgtgcatacaactagactagatttaccagacattgttacataaggcatggccatataactgagctgtagacaatggaaagtgagtggaaggcaattattggtcctgactcataaaaccttactcaacacacttgtccaagctcttttcccctttcagcctagcttaagtggaggtgaccactatggtggcattgaaagtcaacaaaatgtataggagcaaacatcttctaagttagcagttctcctcaacttcagcacagacacaaatcaaatcatatgcttgttaaacccacagattataaaattctaccaccaaagattttgatttgataggtctagaagaaatgcacaggaatccrtattttaaaaatcatgaggcaattccgatttgtgtgattctg

SEQ ID NO: 897472 - DNA, 625 bp, Homo sapiens
actatcatatatatgtatatatgtgtgtatatatgtctacatgtgagactaccatatgtgtgtatatatatgttgttgtatatgtatatattagtgtatatatacacataaatatacacatattttatatgtaattatatacacatacatatatataaatgtgtatacacacacacacacacacacactaacaattacttaaggatatacagtaattattgttccagaaactaagaagaaaatagaaaatggcagcaaagaaatggaaaacaatcctttgatttttggcaaactatttttaatttgacatggtatctggaatacttgaagatactctcagtgtaaattagtttattaaatttagcagaattgactatcttttagaaaatataagaaaaatattaatatatatcaatgaagtgaaaaagcaaagcacagaaaactctttagcaaaattctcttcactctgatagtattcagtctcattctgtgagcataacatttttctcaactatgttaatattccatcaaaaaaaatttgttcaagaaaaactgkgtttccaatgacttgttaagaaatcaaaatatttcttccttgaataagaggatccgttttttaaaaaat

SEQ ID NO: 897473 - DNA, 579 bp, Homo sapiens
gtagaaaactttcacttccttggttacattaatttctacataattaactttatttctggctattgtaaatgggattactttttaaatttctttttcagtttgtttcatgttggcatataaaaacactactgattkttgtgtattgattttgtatcctgcaactttaccaaatgtgtttatcagttctaaaaattttttggtggattctttagggttttccaaatataagattatactatattaacaggataatttgacttcttcctttccaatttgcatgccttttatttccttctcttgtctgattgctctagctaggacttttagtactatgttgaataatggtggtgacaatgggtatccttgtcatgtcccagatctagaggaaaggttttaacttttccccaattagtatgatactagctgtggttctgtcatatatagcttttattaaattgaggtatgctccttctataactagttttttatggtttttatcattaaaaggatgttgcattttttaaattttattttaagttattggatacatgtgcaggatgtgcagatttgttacacagg

SEQ ID NO: 897474 - DNA, 623 bp, Homo sapiens
cttaatagcaatggtcccaccagttctcagggctttgacctcacactaaaagttacatccttggctccccacgttctcaggccttcgaaatcaggctggattacaccactggttctcctggttctccaatttgcagacggtagaaggtgggacttctaggcctctgtagtcacatgagttaattctcaaaagaaatctcctcatagatatgcatagatcctattggttctgtttctctggagaatcgtgactaacacaaacaatagtacaagttgcttcacactttaactttgggtaaccttctttacgtaacaaaagcctgactggacaaactaactgagtagttaaacaaataattcctttttcgcataggaaatagctaaaattcttcttctaacccaagagaaagaaaccttaaatttgatatgatttaaaaaagagatttataaagtgattcatgttttcctagtgaagaaaagtaaacttatccattataactctgatatatcttatttatggagaggcgctcattgttttgttcctctgtgtctttctgtacaaaggccarcgcagtttataccatcaagagctgtctttctgaatgtaaatcacatttaatggta

SEQ ID NO: 897475 - DNA, 623 bp, Homo sapiens
cttaatagcaatggtcccaccagttctcagggctttgacctcacactaaaagttacatccttggctccccacgttctcaggccttcgaaatcaggctggattacaccactggttctcctggttctccaatttgcagacggtagaaggtgggacttctaggcctctgtagtcacatgagttaattctcaaaagaaatctcctcatagatatgcatagatcctattggttctgtttctctggagaatcgtgactaacacaaacaatagtacaagttgcttcacactttaactttgggtaaccttctttacgtaacaaaagcctgactggacaaactaactgagtagttaaacaaataattcctttttcgcataggaaatagctaaaattcttcttctaacccaagagaaagaaaccttaaatttgatatgatttaaaaaagagatttataaagtgattcatgttttcctagtgaagaaaagtaaacttatccattataactctgatatatcttatttatggagaggcgctcattgttttgttcctctgtgtctttctgtacaaaggccaaygcagtttataccatcaagagctgtctttctgaatgtaaatcacatttaatggta

SEQ ID NO: 897476 - DNA, 577 bp, Homo sapiens
caaagtaaatctcctttccagakgtgctttacattggaaagaacagaagagctgagaacagaaagatctaagtttaactcctgctctctacttcttagcgttatgatatctgttaggtttctagctccatttgatttgtctggaaaataggatgataatgttgtaggaaacaatggcacttaatgtccttagtatgagacacatagtaagtactaaataaatatagtttattatcatttgtgttatgggaaaaccactcaagtttacaggctttcccctaatgcacaaactcctattttttctggttatctttaatatctaagaaatctgagataaccagtttggggccatcattttatttccacatttgaaagattcttcctttgtctacttatgattcccagcactagctgtgcagtccggaccaacagataaattttctttcaagggaaaaagggtatttacaaaacagaaagaaaccatttgagaatggctgcctcccttactcttccaagaaaagatgggtcaaccccttgattcctgtaacttaaaattataagtcatgtgtatactcaac

SEQ ID NO: 897477 - DNA, 577 bp, Homo sapiens
gtctttttttcctgaatgagcacttctcagattgctgcaagcttttggttaattttcatagctctggtttttttcccccatttgttcccattttttttwaaaatttatttatttattattattatactttaagttttagctacatgtgcacaatgtgcaggttatatgaaagaggagatttcagaattccttacttgccatttttgctgacatctaggagcttttatttttaattcagcaaattattattttgtgcactattcaaattaaattgagaaagcctataattgtaatatctacatttggtaaaatgttcaacgtaatcataattaggatcttattagatgagttttggcttgtaaaaatattttttgaagaaaattatcctgaatgatacaaagaggacaagacttataaaaatatttgcctgaaacatttatacatttcaaaaggaaaaatttagaattgacaatatctttcttttcgaaaaatttgtttgagtttactgggtaaatcagcacctgtagagagcatattttctcagttaaaaatttgatctaaagagaggaataaatta

SEQ ID NO: 897478 - DNA, 615 bp, Homo sapiens
tttgaagcttaaaaatttgatggccccgctggattttggacttgcttgggccctgtagcctctttgctttggcyaatttctcccatttggaatggctgtattttcccaatacctgtacccccattgtatctaggaagtaactagcttgcttttgattttacaggctcataggcagaagcagcttgccttgtctcagatgagactttggactgtggactcttgggttaatgctgaaatgggactgttgggaagggatgattggttttgaaatgtgaagacataagatttggaggggccaggggtggaatgatatggtttgtctgtgccaccacccaaatctcaacttgaattgtttgattcaaggcctcatgtattgtactgtatgattcggaggcctccccagccatgtggaaatgtaagctcaattaaacttctttttcttcccagtctcgggtatgtctttatcagcagcatgaaaatggactaattcaggcagtagggccattttcatgatattgattctccctatccatgaggatggaatgctccttaatttgtttgtgtcttatttccttgagcagtggtttgtaattctccttgaagaggtccttcatg

SEQ ID NO: 897479 - DNA, 569 bp, Homo sapiens
tgaggatttttgcatcaatgttcatcaggaatattggcctgaagttttcttcttcttcttttttttttctgcaagttttggtatcaggatgatgttggcctcataaaatgagttaggaaggagtccctcattttcacgtgttcagaatagtttcagaagggtaccagctcctctttgtgcctctggtaaatttggctatgtatccatttggtcctgggctttttttggttggtaggctattgattaatgcctcaatttcagaaatcgttattggtctattcaaggattcagcttcttcctggtttagttttgggagggtgtatgtgtccaggaatttatccatttcttctagattttctagttatttgcacagaggtgtttatagtattctctgatggtagttggtatttctgtggtgtcagtggtgatatcccctttatcattttttattgtgtctatttgattcttctcttctactttattagtctagcttgtggtctattttattattttttttttcaaaaamaccagctcctgtattcattgatttttttgaaggttttttgttt

SEQ ID NO: 897480 - DNA, 589 bp, Homo sapiens
gactaaatttttctggagttatcccaatacctattctgtttgtatcacatccagctttgagattgccttccraaaactagccaaggattagtgctaccttggtcctgcatcaaagaatggaccttgtctctttggatactcttgaaaaaataccgaatttggagtccagaatccaggggcctggtctcacaactcataaatgaaagttacctccaaatcaattatccagcagtgcatttgttctctagctctctgtttggtactataatcttcaaaaaaaattttctttcaagaaagtgagaataagaaaaacaataaaccacatctgggctcagaatacctcatgggtatattcaaaactgccttacagttttgaaacaatagtagtcccttcttacagccacactgtatatatgaagctttcagatctataataacatactgttaggtacttactatgtttcaagaacttatcatacataatcctcaaccttcaaaacaagaatgcagaggagatgtttttattatttcaattttatcaggtagaaaactgaacttcatagagatgaagaaacttgagcaaattcac

SEQ ID NO: 897481 - DNA, 608 bp, Homo sapiens
tctggtacatattaggtacttaactaagtggttattaaataaataaatacataatcacatcatatgaggaaaccttattccaatatcttgcctacattccaagatctcattatttttatcacttcctatctttccagctctcttgtgacccaaattttactctacattttatatcatgttgaccactattcctatcctttctctattttctcctaatctcttggttattctctctgttttacatattttactgacaccaataagatgaaccactccttgccaaacactctttactattacatgccccttcctagacagtacatagtcgtaaggcaaaactgacccagtcccataagctgtctctaatggcagcagtggcccgtctggggtggctactgccaaggcgccagctacagcagagaagtgtagccagggctgcgtgctctgcagagccagcaggagccaggatcaggcaggatccccatcccattgtgagttgttggggcaggarccttgtgcttctggacacagccgcagccacccatctgtggctgcggacacaggcatccctgcgctctgcgggcctgggaagctctcctgcccccaac

SEQ ID NO: 897482 - DNA, 598 bp, Homo sapiens
atcagtaactgctaaactgaattgaactcttacaatggtgatttcttaagtagagactgttctaagaaaattatcaatatttgtgttgtttgatggcctataatgatcactttttatcttttaatgaattagatcaatagaataaaatagtataaaatagaatatgtatctcatctaataaggatatctatagaggtatatatatatcactctatataaacaaaaaatgtatatagatatagaaacgaaagcttcatatacagatatagctttcacatatgtatctatatataaaagcttcatatataagcaaaagcttcatatatatctctacatatgagatatatatctctctatatatgatacagtcacatacatgtatgcatattgtcttgatgcaagatatatttattatagattataaacacaattttattaacacagagtttgaaaggggttgatagatatgatccctttcaaaggagttggttatatcataayatataaattatataaataatataaataatacaaataattatatattatatcataagatataaataatataataaaaaatatacaaataatttatagg

SEQ ID NO: 897483 - DNA, 609 bp, Homo sapiens
tgtgccatttgcctggatgaatatgaggatggggacaagctgcgggtactcccctgtgctcatggtgaggccctcactgcctgcccatgcccctctgccaccagcagccaccaggtgcttcaccttgttcctctctgcagcctaccacagccgctgcgtggacccctggctcactcagacccggaagacctgccccatttgcaagcagcctgttcatcggggtcctggggacgaagaccaagaggaagaaactcaagggcaagaggagggtgatgaaggggagccaagggaccaccctgcctcagaaaggaccccacttttgggttctagccccactcttcccacctcctttggttccttagccccagctccccttgtttttcctgggccttcaacagatcccccactgtcccctccctcttcccctgttatcctggtctaataaccccccacacatacacctctggtgacctatttgcacagaccgtcgtcttccctccagtcttctgagggataggggacattccatcccaagcttctcccttacccacacctatccttttgaggggctttggggtggrgctggggcaagcagagggactgggtctt

SEQ ID NO: 897484 - DNA, 570 bp, Homo sapiens
agaaatccgcctagctcaacccgagcctcaaacaaaggccaatttatctgatctcttacaggatggcccaggaggtggtctgggcaccgargaatcgcgctggccctgaccgcatgccccagccttcctggggtttgtgaggagctctgaaggtgggggtgaggtgttgtaagtaaggggtggggagtatgaagacgcccactgaaaagaacattaatcttagaaaggacttgattcgtcttgggagcactatactgagagctaggcaagtggaaaccggaaggggcaggcagaggggtcacccagtgcgatgtcaagagtggggccggctggtccgggaatatgctggggagtggagcacgtttatattcgacgtaggaaaaacaatggagaggaagagaaggtggaagggagggcaagggagagaaacatcacatagatatttttagactttgctgaagatctgttatttttacatccttgggctcgggacggcagggagttaaattcccctgagagaatccccatggggccagggaaagcccgctgcagactggtttaccagaatat

SEQ ID NO: 897485 - DNA, 662 bp, Homo sapiens
atagctgaagattcttttcttaggcatctcgaaaaattcaacatttaggctgggcctcctctggctcacacctgtaatgccagcactttgggaggccaaggcgggcagataacttgaagccaggagttcgagaccagcctggctaacatagcaaaaccttgtatctactaaacatacaaaaattagccgggcatggtggtgtacacctgtaatcccagctactcggaaggctgaggcatgagaatcactttaacctaggaggcagaggtggcactgagcagagatcatgccactgcactccagccaggtgaaacagcaagactctgtctcaaaaataataataataataataataataatctacatttaacagagcatatactctatgcacttcctgtgctcagagctatgagtaattctagggacaagactcagttcttgccctaaacaagcttgcagtctagtggagtagccttcatattccagtgtgttacaattcacattctctttaaacctttttagaatttagttgacaagggatccttgacagtctgttaagcattgggtaactgccaaytgactgatcactagctccaacaagactacaaggggcttgagattcgagactgaatcttcttcatcattatcatcccagtgcccag

SEQ ID NO: 897486 - DNA, 610 bp, Homo sapiens
acatgaaacacctgaaattctttgaaagctgagtcttttgccaccacaacagtatttagaaaatttattatacaaattcacataaatgatataatcctataaaggaagatatttgctcctgtaacacttactatttaggtcagctgactttttcatattctggtagactcctccttaatgtatagctgccatacatacaggaatcatctttttattttgcaatgagttacctagcataagtgaatgattcaaatgtgctaaaaatcagtagactaaattaatgctgattaaaagagcctatgatagcaagcctatagatataattcttgtctataaaatatatcatagctattaccaaagaaattaatctaaaacttaaaattaccaatactagctagatgtcaataaatattactaatatcaacagataattctaatccttttggtctatctgcatgggtaatcttcaggcatgtagcctgcagatttcctcaatactttgagttgttcaatatcattactaatgtttggaggttccccaycccaaggatttccctttccatttctatcaagtttcagcagatccttttctgaagtttaagtaagacaa

SEQ ID NO: 897487 - DNA, 711 bp, Homo sapiens
tattcattcattgatatctaacttttcacacattcattcaaccatttaacccaagatttaaaaatattaaattagaaattgaagcaataataaatagcccaccaagcaaacaaagcccaggaccagacagatttacagctgaattctatcagaggtacaaagaggagctggtaccaattcttctgaagctattccaaacaatagaaaaggaggtactcctccctaactcctttaaggccagcatcatcctgataccaaaacctggcagagatgcaacaaaaaggaaaacttccagctgatatccctgataaacatcaatgcaaaaatcctcaataagatactggcaaaccaaatccagcagcacatcaaaaagcttattcaccatgatcaagtaggcttcatccctgggatgcaagactggttcaacatatgcaaatcaataaatgtaattcatcacataagcagaactaaagacaaaacccacatgattatctcaatggattcagaaaaggccttcgataaaattcaacatcccttcatgttaaaaatgctcaataaactaggtattgaaggaacatayctcaaaataataagagccatatatatgataaacccacagccaataccacactgaatgggcaaaacctggaagcattccccttgaaaaccagcacaagacaagtatgccctctttcaccactcctattcagc

SEQ ID NO: 897488 - DNA, 666 bp, Homo sapiens
aggtaccaatatctgttggggtctctgttttcaattattttgagtttatgcccaggagtggaatggccaagtcatgcagtatctctaattttagttttctgaggaaccaccataatgtttttcacagtggctgcaccattttaattcttatgaatagggcacaagggttccaatttttccacagtctcattaacacttattattttctgggatttttgctttgcgtttgagagtagccatttaaattggcataaggtataatttcattgtggtttacattttcatttccttaatgattagtgatattgatcaatattttctatgcttgctggccatttgtatatcttctttggagaaatgtttatgcaggtcatctgcttatttttttaaattgggttgattttttttttttgctgttgtttaggtagagaaagcaatctttggataccagtgatgtttcactaattctgggccattgatttcacaagttgtatgaggtattagtatgtgagtttggtttcaatcatggctgaggttgaatgccttttccaaaattcagtgtgaatttcaccagaagccasaaagggtccaggagcaagaacatggtgtgactgctctgtgctaaagaatttcagcctgatgacagtgagcaggctacacatgaga

SEQ ID NO: 897489 - DNA, 662 bp, Homo sapiens
tcctttctcagaaaactgatcttcaggcatcccagatagtatcaaggaattgaaacttaccagatcaccacatatggacaaagagggaccagacccctcattcaatatgattgtttyctgaccctaacctaattcctgttttccttcatgtagttacatttcttcactgctatataaacccctaattttagtcagttggggagacagatttgagacttatctcccatcctcctggttggcatcacccaaataaaaagcattctttcctggcaatacttgtctcagtgattggctttctgtgcagtgagcaacagaacctagaccaaaccctggcatttcggtaacaagatcatttaagtacattgttggtgcagacagtcaatggaatagaaagaagttcacaaagtataagccatgtgcatgccattcacacagtcaattacagaactcaacagcctgttgggttcagccaattagaaaacccaacagcctgttaacaccttgttcataaatgtttgttttataaggtaaaacacacagggcacgacgtttcgaaaggatggcttcaaagttccatattcaatttgacatggtaattaagagcgcatactgccacttaccattgtgactttggcaagttaaactttcagcattcaagtccc

SEQ ID NO: 897490 - DNA, 535 bp, Homo sapiens
tttaagccttcaatctgcttccttgttttcctcctggtcatrgttaacatacactttggtggctacttctataagctgggtggcgttcacgcctgcaaaaccttctaactgatgaagctttcatttgatgttaccatgggcctgtcctacaaatgatgtattcaccatacgctgattttcagtggcctcagggtcaaacagggtgaaaagttggtatgcctcacagagtctctcataaaactgacttgggctctcatcagctccctgaagcacttctgaaatcttccctgtattaattgctttctttccaccctcccttagcccttgcagaagtgcctcttggtacctctgcaaacgctgaagctgagttgcatcctctgggtcccagttgggatcttggtctgggagctggccctgagcatatgcctgagcgttcactgcatctgctggtgcaggggcttctagtcagtggagagctccctgtgttactcttctgtgctcctcagtgttaaacagcgtgagaagaagctgccta

SEQ ID NO: 897491 - DNA, 622 bp, Homo sapiens
aaagggcatcatttgtaactctgagaacaagcctcttattcagtggaattcctgktaattaactctgccagaggcattcgtttttgaaaacctgatttgtaaagggtttactaagattttggtaattccagggttcaggaggttcttcaagtcccattctttgtgttgacagaatcttccgccagtctttcctgtatcagcaaatggcaccatcatcaccctgctgctcggaataaaaatagaggagttaccccggatgcctctccattttcaagcatcatattcagcccatcagcaagtcctaggatctgtaatctccaaaatatacccagagttcaaccattcactccgtctccactgccagcacccgagcccagccaccaccatctcctgccagaccgcctgtcctggcctcctgcctggtctccctgttccactcccgtgtcattgtcatctattctccacaccacagccaggccctctatttaattcattaaacagattgtatgagtcccctgatgaaaatctctgttggcttcccattgcattgtgaatgacgccatgacacacacattcttaagtggccgaaagaggtctgtgtgccttctcttgcccaccctct

SEQ ID NO: 897492 - DNA, 543 bp, Homo sapiens
ggaaatatattgtaatgtcttctttgaaggctgtgagcttctacaaggtggagattgatgtttaaccttttctctttccctagtgtctagcctgttacytgtcctcatgtgttaagaattttagttgcaactgacaacccaactcaaactaactttagtaaaacagttaattttgtatacctacatttccaaagataacagacttcaggtatagttggattcaggaacctggaaatctttcccaggaatatttctagctcctactcttgtctgattttctttgtttgggcttcacttgaatctgtctttgtgggccaagggctggaatacctggattgactgtattttggtcatgtgcttttctgcgaagtctgactgggtgttctgggatcagcgccacccagtccacattcactgatggcaggaatcgggtgatacagagagaaaaaaaatgaaacattgtcactaaagaggaaggaagagggatgctcattagacaaaatcaatgcctgcccaccacacacaaaaaatacctgtactgat

SEQ ID NO: 897493 - DNA, 549 bp, Homo sapiens
cattctcatgttgcttaagcttttgcgaacatgcttcaggatatctgaccctttaagtcagtagttctcaaacttttggatgcataggaatcaccgggtgagcttattaaaacagttctggacccaccccatgagagtctgatgctgcaggcctgggaggggcctgagattctgcaggtttaacaagctcccaggagttgaatgctgctggtcctcagatcaatcaccctttgatagcaaggctctgattcttctcacttcccaatagccacaggatctgtggtctcactgatcacgtcccaagttggctgagcacaagacctgagctccctgacccatcacagtagctgctttgtagttctgctaagacacctattcccgttaccactggtcctgggatcaggatcccttacttaccaggtcacacccttttagtcttgctgacccctggcccactggccagtgaaccttccagccaactctagccttgccccrttcattacctccctctagcccagggggactcttcagcctcagctgacccttcag

SEQ ID NO: 897494 - DNA, 568 bp, Homo sapiens
gatatctttctgtgtctggcttgtttcagttaacaaaatgacctccagttccatctacattgctggaaatgacaagattttattattttttaaggctgagtaatattctattgtgtayatgtcccacattttctttatccattcatctgttgatggacacttaggttaattccatgtcttggctattgtgaatagtgctgcaataaacatgagactacagatatatctttgatatacttaaatccttacttttggatatatacccagcaatgggattcctggatcatatagtaattttatttttagtgtttttgaagaacttcaatactgtttttcataatgactgtattactttacattctcaccaacagtgtatgagcatttctctgtatcctctccagcatttattatgtttttttttcttttgtctttttgctaatagcccttttaattgtggtgagataatagttcattgtggctttgatttgcatttttctgatggttagggatgttgagcattttttcatatgtctgttggccatttgtatgtcttcttttgagaaatgtc

SEQ ID NO: 897495 - DNA, 609 bp, Homo sapiens
atatgcggagtagtgaaactggatccttatctctcatcatatgcaaaaattaactcaagatggagcaagacttaaatataagacctgaaattacaggtgaagttttaatggctgttaaagtcataaagcagtcttatgccacaataatgtgccagagacactcacatttagtccacaaagaattatgtttataccttaatccatgtaaattttagtcaaaacttagatgctgacaaaaagccagtatgtaatccatactgcttacgcatttgccccatggcagctgaacaaaaaccaagagtcatgtagcactacaggtcctgaaatagggtgtccagatttagcaaataaatatgaaggatgcccagttaaatttgtacttcagataaacaatgaataacattttagtatacgtgtaccccatttaggacattcttatataaattattaactgtttatctgaagtaggagtttaactgggcatccaatattttatctgaaaattctacccygacaaagctttctacatctctttactaaactgtggtttaaccagttggcataattgactaatgtatttgaatgtatcaatagcttccatgcaggaga

SEQ ID NO: 897496 - DNA, 457 bp, Homo sapiens
ttgtttctctctgcctggttcctctagaatttggaaactatytgtgagtattcttaacttatagcaatatggttatttgcatcagtgcaataagaatccattttcttttgctacaggatgcaattggagaagctggttgttttaccaaggctttgactggaagggtatgctttcctttaaggaatcaagctcaacttgcagagctgataaaagccccttgggaaaactggcctcataccttgtctacacagtccctgtacagggttcctaccctgtatggggagtaaagaatgtcactttctaacaggcccaggaaccccatgtccttgggacctcaagaagaaaggaatttacccaactcataggtatttggggtacaaacacatggctaggctcaactttaaaaggtgttatctgagattccttgtggaacagagttccttcaaagccagtttga

SEQ ID NO: 897497 - DNA, 532 bp, Homo sapiens
gggtccctaggtagtgtcttttatctataccataacatgtttctgtgcccagatattcctgggaatccctagggagaattgtacccgagctccccaaaagggctgcctctttctggtgcagccactgctctagctagaagctcccaggttctggagcctccccaagacatctggtcaagcactaccatctcttactggccgatgatgtctccctgttgttggaagcttttgggatgtcaaagctgcaggatttgtgaagcaaagtggagtagaatccatctttctctgtggccaagcagggcctcagggtggccaagcagggcgggttgtgccccaaggttttacctagtgttagtagacagttctttgtactttaccgacagttctgttctgaatgagatttggrtaggactcatgtgggctgggccaggggatgaatctgaggggcagaatttttctgctgatcatggaggctttgctgctggcttaagttcatcacatctgactcctactacccctgaggttggaccct

SEQ ID NO: 897498 - DNA, 550 bp, Homo sapiens
tgaagggccatccctgcttcaaatctcccagagggcttggatgaggccttggttgagactttgttgcagctcaacttcctcttctttccaacctgcttttttyccttcccttccacaggtgggatgtgaagagctctttctaatacacctcattatgttaatatccatctcagagtctgctcctcaggaaactcatgcctgcaatgtctatcctcctggcttgagaagtctgtagatggtgttgtcattcactgatttgtggaatagagaaagaggaggtaatttggagtgaatgggagggagattgtgagttcaactttagaaaagttgagtttggacttcctgagactttcagagagttgagactaaagttcaagagaaatgtgtagactgaaagtatagatttgggagtcgttagtattctcaggttggttgtcttaaattggcctttattccaatcagaagcacatatcatttttttttggaaatgaagacgacataatgcttgggtctcttggtctttttctttgcatctagctcctgactgcat

SEQ ID NO: 897499 - DNA, 613 bp, Homo sapiens
aacaaactattttatcacctaccacttatcagactttccaacttccttttgctttcagtgcaaatgaacgacatggcgtaaggggagaattgaaagggttctgaaagaatgggattagaagcgggtaaaataaaaatgaaatagatggaggcttaaccaccttgaatgggttatctgacagtaatacctttgtacagctgactgtcaaagtgaaggacaaacattgttcaaagaaacaccaacagaaaacaccaaagaaatcccaaccaggcttaaaaaccaccaatgaaaatcattgtctggggcagggttgagtgagcgtgcaagcgcctgtgtgtatgcacaacagaagaaagatcatggttgaatcttttgctgtcggaagctgtggacatatgtactatggtagagatgatgccttttcggggagtgggggaagcctcttccctggaaatgtttgctttgtcccaaatccccgtcaccagktgatgcaccgggttaatccctttggtgtgcaaatggttttatatcttgctattaagaatagcattgtaataatgtaatgagaatattaataatgctgtctgttgcttaacccatgtgctgatatatt

SEQ ID NO: 897500 - DNA, 664 bp, Homo sapiens
tatggtattttatcaactaaaagctaagtgatgttatgtaagggatttttatatttaaaagtagctatccctctctggaagttacatgaaacagaacttgatcttttaaagccagatgttttttgttattgtttatttgttttcattattcagattctccaaatagctcttcaagtttcagaacgcttttttttctaatgaattctaggatccaaactagctatttttttaatgagaaaattgacttgtttatgaagcacatcttactaaaaagatagattgaggcactgatgagcttaatgatattttgtttggacaaattaggaaactaattcgagatgcaacccctggtgagcaggttcttacctgttctcatgacttctgtttatcccatatggatacctgttcctggcaagttatccagttagtgaatttcttgccaaaatttacatcagatattttgttgtataacttaactacccagaataaatctttgacgctaaggttgtcataggcgactatgaaataatatgagtgggaacatttatataaagcatatttctttcyggaagtttgatctcattttcaagctcagtacctctgacaggaaggaggcagcaggaagcaacttatcaaatcaaagacttgtggatcttctctattg

SEQ ID NO: 897501 - DNA, 559 bp, Homo sapiens
acaccatcacttcattttattctctttgttagaagcgagtcattaggttcagcccacattcaaggggagggaaattaggctctaccttctaagagaaggagcatcaaagaacttgcaaatagattaaaatcaccacagccactatcctttacaactttcagaaaaatctgttaaagctataaatctattaatgtcatatcacttaatgaacacctaaaagatatctcccattatgcacagctacagtcacagtttctttacatagcttacaagactcagtaatctgatccctgagtatgtttacaactttaagtccccattactccttactcatatatgattttctaaaacactgaaacactgaactgcttgttattcactatatactactgtttcttgaccccaagatttttctcagacctatactttctgcatagaatttcttgccctctrtgagtgactaaattatattcatctattaagtcccaatgcatttatcacctttgctttgcaagatttctcagaaatatgactcctagccctaggccaaggactcatc

SEQ ID NO: 897502 - DNA, 598 bp, Homo sapiens
gcatatggtaaacattgtttaataagtggatgtttataaaaataattctgcttttatatacccttccctttgtatccatcccaagacataggtgcataggtgtttaacctgttaatcagagacttggttaatacttgattctagtttgcaattctaaaagaactgtctgacctagggtaaataatatagagctacaggggtcaataaattctgcacatgtgtctgaaagctggaactcttatttatcagcaagcagggtttggaacataagggtagatactggagtgtcagaagcgtgcatattgagcaccaaattcccccaagctgagaactgtaaggtcattattttctgcttctcacagaaagtagagctgatgcctcccaacagtccaaacactgggatacaaacattcatgtactttcaactccaggacagggagtaattccctatggaataattgagaggtggacatgtagcaccyggtatgcaatcaagaagaccatacttccaaagaagaacttcctgaagtggaaaaaagctggagactgttagttgattacattattctcaccataggagagaggctggagcaccgaa

SEQ ID NO: 897503 - DNA, 582 bp, Homo sapiens
agatgtcatttgacaggtggatggtggataagtagagataaagatcctcaaatgtattcccaatgtcatctagaaaactcctaagaaagtcaagrtggggctcagggtttatggtcatcacacttgaccttctttaatgataagatgatgtaaagaaaaaaaataattctatgacagagtatgacaaaaagaacggagagaggagaaagacaaagcagagataaaaaggagagaagagaaacaaacatttactgagttcttatgttacttagtatacgtattattccacttaatcctcaaatcaatccttggtttggatttatcgtcagaaaactaaggatgagaaatggtaagaagtttgtccaaatcaggcacctggtaaatgaaaaacttggaattcacgcccaggttttcctgactctagaggtcaagatatcctaatatccttatccacaaggtatccacaaggtaatgaaaggaacctgatgccaggagggagtgagcacatatgcaggtatctgcacacatgagtcaaacaagatcatggaagggaaacaccaagtgcaataacccaattggcca

SEQ ID NO: 897504 - DNA, 594 bp, Homo sapiens
attttatttttccaacatttgtaaagattttattttctggtttccatagtttctgttaaaaattcagctatcaggttttttttggtcattttttttgaaagtaagatgtttakttctctctggctgaatagaagatttgtttttctttctttctttctttctttttcttccttacttttttttcttttttctttttttttttttttttttgagacagggttcactctgttgtccaggctgatcttgaactcctgagctcaagcaattctttcgccttggcttcccaaagtgctgggattataggtgtggagccaccatgcccagcctgctttttcctttttaagaattatttttcctttgcaagattttctctttaactataaggtatgtgtgtgtgtgtgcatgtgtgctttgtatttatcctgtttgagcttttcaaaattcttaattctgtgtcttgatgtcctttgtcaattttggaaaatttttgaccaattatgctttaaacaagtcttctaaccctgtctttccctcctgtccttatgggatttcaattatacatccattggacctattcatcttgtgctacacatc

SEQ ID NO: 897505 - DNA, 646 bp, Homo sapiens
actaacatgctgggaactgaaattgasggaagaaatcacttatgaatggattaatcaacatcaaatacttaggaataaatcaaataaagatttgcataacctctacatagaagatggaactcaatggacggacatatcatatttgtggactggaaacctcaatatggcattttgaaaatgacagttctcatcaaattgatgtatagattagatgtaatcccaatgactgtcttggcaacctgtatgtatctgtgcatataaactggcaagctacaataactctaaaatttgtatcataatgcatagagtcagtaagagacaagacagtctcggaaaacaaccaagctagaagacttatactactaaagagcaatacttattataaactgtcgtaattcaaacactgtgatgttggtgagagaatagacaagtgtaccaataaaaaagaatagggctccagaaacagagcgacacaatgtcacttggtatatgataaaaataaaactgcataatggatggtcttatcaataccaacactggattaattccccagttataggagaaataaattttgattaaatagccaaaaatctagtctagatgaatttgattattaaaatctagttataaaggtaaaacaagcctc

SEQ ID NO: 897506 - DNA, 575 bp, Homo sapiens
taaatattttagaattctagaatctaataacaaaacttacaacaagcaggggaatgttgaatgaagaaagcagcagctggatttcgataagagagcactgtggtatcattccttacccacttacatcctctaatccccagcttgacagttgccaagaagatggcagtcagcacttttttatgcaggttgctctaaccagagggtgcgtgcaggacttagtttcaaataattgtgtgttttgatctgtcttgtggctccctgagctatcagctccagggatagcccttgttttgcctgcctcaaagattccccagaaaggaagtggtttgctttagtggtgtttgcagaatgaatttaaaggaaaatgagacaagaaatgatatacatggtaagcaatagagagaatgaaaatatttggaaggaaaagtctggggaaggaggtagctgagagagtgggctttaaaatgtaarttaaaactaccaaaagatatccactcatacttgtgaggatggctattactaaaaagtcaaaagataacaagtgtcattcagggtatgaagaaaagagaaccatt

SEQ ID NO: 897507 - DNA, 627 bp, Homo sapiens
ctctagaaatcagttaagagttgtagtatcccagacaatttcaaagacacaaacatccataatgaaatggtcaaatctcagaaaaaaactaagaaggcatatgaagaaatggggcaatatgagctaaacaaaggattaagataaatcttccaaaactgaccctaacataaaggaggtatataaattacttgaaaaagaattcaaaatttgatgacttgaggaaacaaaaaagtagtcaacaaaatgaaaacaccaacaaagaggtattatggaacgtattaaaaagcaaagaattctagacatggggaatacaataactgaactgaaaaattcaccagagtggtttaacagcagacttgatcatggagaagaaagaatcagttaacttgaaaacaagtcattcgaaattatcaagtcagggaagaaaaaagcaaaaggaatgagggaagcaaagaaggcctaaaggacttatgggataccatcaagcataccaagtcatgaattatagaaataccagaaggagaagagagagagagagaatggaacagagagtttatttgaagaactaayggccaaaattctcacaaatatgaggaaggaaatgagaattcaattttaaggagttca

SEQ ID NO: 897508 - DNA, 640 bp, Homo sapiens
ataagagtattaatcattaaacaaacaaaaagtacatgattataatcattaaacaaacaaaaagtacattcatagtacctagtacaataccttaggcatattatttgccaagtaaatagtagctgttcttctyagatttttatcttatatagtaagtcctcacttaacctcatcaagaagttcttggaaattgtgactttaagtgaaacaatgtagtgtgcaaggaaagcagccttaccataggctaattgatataaacaagagttaagtcctatggtagacagtacattgtttcacttaaagttgcagtttccaggaacctatcaacaaaataaaatgaggacttactatattgtgataagcaatcgtacaaataatttactgtctgtattaagaaaaaagatagtgggctacatccacttacttaactgagaaagttacatggaagctgttccaggagccagatacaggttgaggcagtggtaaatgtggactcttcctcactttgattctgaggtgatacagagccagaaagtcaggtggtcagttgtattagtctttacttggatggttacagctttaattatctttattatagatctttaatgttaaattgagtcatcttacagagctatttaga

SEQ ID NO: 897509 - DNA, 585 bp, Homo sapiens
tcctcatttttctatgtaaatagagtgataagctgaataaaaggaatggatcatctgtaaagtttaagaattaaatttctaagatattgaccctggtcaattaattcatacatgagtcttaatttataatggttgctctattttagttctgttcataggtagaaatacaaaccctgaagaaaggacttccagtgacaccctccctgaacctctccatgcagttccttctactcagcactcagccttattgcagagaccgacacaatacttaagagtccttcagatacctactcatctcatgaaaggaatttgcattgtgaggtctctatacctgggattcacatctctggttcagaaacatctaagttgcttctaccaggttcttgtttctttggtcacatccacccagggctcctctgatgtcagctagtgggactacattttggataaattgttaagaagttatctgttttayacagtattttttgttggtttcaaaggaaaatattcactggattcttagatctggtacttggtgggagcacagactccagagaaatcccatacacctgaccggggtggggc

SEQ ID NO: 897510 - DNA, 649 bp, Homo sapiens
gccaactgtttaaattgcagattacataaytgggattaagtgaggtcccctgcttggcttggggacagatctggaggggcaggcgggcatggagcgtgtgccagaggtcccctgccaggaggaggcagctgggaggaagggaggctggcctcccgtgaccttggagcccagagtgagtgcctgtagaacccgctgaccctcccaggcctccagtgaccactgccctggagaagggggagtttcaggagaatgaggaccgctccttgtgggtaccctttctccctgagccccagtcttcccacacttaggattctgcaaagatcacccccctctacccagctctgaaagggtaggattctgaggcttggtcagtgtagtaaacagttcattcactttgttgggggtgggaggcccaggtccttcttttgtgtccacagtcaagaagaggacagatggcatcttttgaacgtcacttgcttcatttataaaatggggccgttaatgtttgccttcccctccttatgtggttagagggaagatctaatgagacatagggactgtcaagggttgtgtgcatctgagggatactctccttcagctctcctggtcccccctggagctgtaagcttcagctccaggaagggagaga

SEQ ID NO: 897511 - DNA, 641 bp, Homo sapiens
ccctgggtatcacacccaggtgtcagcacccctacatgacacccagcagaaacagatggaacctgacatccaaggtgaaaagaaagtgttccctggtctaagccctgtagagagggacaacaccatcttccctgtagtctaaggagaagcattgttagtctcattcaacaaaagtgctccttgcaattcaaaatcacaggatttagaggagtcagcgtttttaatatttacgattttttattttagttccttttagtctagtcattgatacactaaatgcactcttattcccttcctctgactttctctagctctcttctacttccaaagccagagttaactatagtgtagttaagtatattgcatataatgtacacacacacaatgacttttttcttagtgtggtgtaatatcttctgttgtattttaaatgccctctctgagattcttcagcatattcttgaccttgctggctacagcagcaaaactgaagtctttaaggaatacacctcaaacaactctcagattcctaaccccacrttgtaagtgatagttcagtgctcatctttgtgtaattgccatttggatattttcccataaaatttactcactagcccttgcttaaattgaattccagctgt

SEQ ID NO: 897512 - DNA, 709 bp, Homo sapiens
agatatatttggtattcacaactccattacagtataagtgtgttctgtgttttattacataactacttttacyggtgagtttgatatttttgtgttgctccttagtgatcttctcctttagcttgaatgacacattttagcattttttttttgtaaagcaggtctagtggtgatgaattcctttagcttttgtgtgtctgagaaagttttatctcccctacatttttgaaggacaggtttgctgggtataatactattggcagttttgttatttttcttttagctctttgaatatattatcccatttacttctggtcttcagggtttctcttggaaaaatctgctagtagtgttatagaagttcctttgtatgtaacaagtcactttcttatgcagatttttcaatattttctctttgttttcactttagaaacaatattttaacttatttataacaatttgattataatgtgtcttattgtgggtctctggattcatcatattaggtgtccaatgaggttcttggatctggatttctaatttcttccctagacttgggcagttttctgtcattatttctttaaatatggtttgtattcctttttcttttctccctctggtactctgataatgcatagtttattcacttgatggtgttccataattcccttaggttatcttcagtctttttcattcttttttcatttag

SEQ ID NO: 897513 - DNA, 607 bp, Homo sapiens
tgaggaaggagaattgcttgaactcatgaggcggaggttgcagagagccaaggttgtgccactgyactccagcctgggcatttagtgctggatatgaggacatctgctcaattgttattggatatagttctaagcaaaattgtaaagtaggcagagcctacatctccacttccagtctagtcgttctataatttcatcttttttggcctcttctcctaatcattcaagaaccttgtctccttatgttctcttctactgtgttcttctacctctttcccctgtcctagccttgagcctgcaccattgtagtctagtcctcagaaaaggagcttatagataatggtaacagtacaacatatgttatattcaactttagagagaaaagactgactatggacagggtaactggatatgtgtttgggatctcattcccacctcttccaccaacagtaccctggtttcccatgaaagagtttgcttcccactcattcttggtcacgtaatttgtgttggatggaaccccattcccagctctagggatgagccataagatcactttttgctatctggagtcaagtgcctatggaaggccagagttttagtggaa

SEQ ID NO: 897514 - DNA, 459 bp, Homo sapiens
ttgtgactaattcaaattagtcacaaatgtgactrtaagtgtaaaatacacaccagatttcatagatatagtactttaagaagaaaggtaaaatatattaatgatttttatgttggttacataatgacatgatatattttgcatctaatgggttgaattaaatatattattaaatttgttttaaaactggaggaggtgataaaagagtgacaatttatcttttgttcaataaggatataaaaactgaaatcagtgacattaatattttatcaaataatgaacattttgtccacccaattaagtagggaaaacattctaaaataggacagctaacattgtattcaatataaagataaataggtaaatgtagataaagctccttatatattgattacagttttgtttttttttttttttgtaaatttctacagaccaaggggaatacagtcctttctgagg

SEQ ID NO: 897515 - DNA, 636 bp, Homo sapiens
agagtcacactgaccatattcacagatgggcatgtaaccccaaatgccagtatgtaaccatacactgacaactataactatcacttggtcctaaatcctcaagttgacacgaccagcccattttctccctgatactgaagggaagccataacatcatcgggagcatgaagagtgtttggtgagccctgaaccaaggcgaggggtgttggtattacatttcaattgtcaaatcactctaggttgcaattttcttgatttccttgtgcattcatctccaacagagacgcagtccctttagaaattggagtccatggggtggatctctctacccttaactgtgttagggtaatgctgacaactcacgcctctctgaatgattttcttagggctttcatacttagcctctgctgattcccctagaagttcagttccatttgtcaagtactggtctggtctgaaagccattctttccattacagtaacttcacacatttctgctctaattcaattggaattgagtttacagttggagcrgagaaaaaccttattcactattatttgttttccctcatggcaactctcaagtctattgttttaaaataaagcaataaaataagccacccctaaaagtaatag

SEQ ID NO: 897516 - DNA, 655 bp, Homo sapiens
attgatttgtgtagtttaaaaatagcccacaaagaaaactccaggcccaggtagctccattaggaaattctatcaaatatttaaagaagaaattaaaccaattctacacaaactttgccagaaaaatgaagartaaagaacatgttctaagtcattatgaaagataagaattattctgatatcaacaccacacatacacattccaaaaaaggaaaattacaatatatttcatgcacataagtagaaaaatcctcaaaattttagcaaattgaaagtaacaaaatataaaaagataacaaatcataaccaatttagggtcaatgcaagtttagtttaaaattagaaaaatcaagcaatgtaattcaccatattattagatagaaagaaaaatccatacggtcatctcattgcaagctgaaaaacatctgacaaaatccagcattgattcctgctaaagattctcagcaaactagcaatagaagggaacttcctcaaccttataaagggcatgtacaaacaacccacagctaacatactgataaaagaccgaatgtttcccctaagaccaggaacaagacaagaattccactctcgccatttctatgcgacatagtatgggaggttctggtcagtgcaaaaaggcaagaaataagag

SEQ ID NO: 897517 - DNA, 679 bp, Homo sapiens
tgttttaatatacttaatctttgattgttttgggatgtattttggtataaattgtggagtgcagtttcattcttacttttttccaggtatctacttagttgtccccacgttattttttggattcatctttccccattatttgaagtgtcactcgttatatactaaatttctgcatgcatacagaccaatttctaatctttctactatttttcagctaaatggcttcatattatttatttagctaatcgcctattgcttgtgttttcctattttcattattacaaatgaggctgtaataaatatcttttaatatgtatctcttcttttttaggatgaattcctacaatggaattgctgggtccagggtgtgcacacttaagaaatatttttattattgatattgtcaaacatacccaaagactgagtttcaacagttttcaacattttgctgattgtatttcattgatcactcctgcccccaccattttttttcatggaatattgtgaagcaaaacccatatgtcatatcatttcatttataaaatacatcagtctmtctctctagcttaaatcagcatatttctcataattaaatttctctagttatctcaaaaatgtgcatttaagatttgctctgaataaacaaggtctgtatttttgaaggctgttattagttact

SEQ ID NO: 897518 - DNA, 613 bp, Homo sapiens
aacagagcaagactccatctcaaaaaaaaaaaaggatcaacaatctaaaaccatacaattcttcaaaggaagcataggctagtcttaacaactttggatctggcagtggattcttaaataagacattaaaagcatgagcaacaaaagaaaaaatagatacattggatttcatcaaaattaggaactactgtgcatcaaagaatattatcaagaaagtgaaaagaagctatagaatgggagaaaatgtttggaaattatatgtctgataaggatctagtgtccagaatatataaagaacctttatatctcaacaaaaaatacaacctaatttttaaatgggcaaaggacttgaatagaaatttctccaaagaaggccaggcacagtggctcatgcctgtaatcccagcacttttggaggctgagtcagcaggatcgcttgagcccaggagttcgagatcagcctgggcaacaaagtgagaccttgtctcaaatttaaaaaataaaaaaaaagaaatwtacctaaagaagatatacagctagccaacaaacacttgaaaggatactcaacatcattatcagcgaaatgcaaatcaaagccacaaagataccactt

SEQ ID NO: 897519 - DNA, 450 bp, Homo sapiens
gacaaaatggaaaacatactgactgtaaaaccagacacagacatgcagtttgtgctcaataastgctaattattgtcaccattcttactattatataagacaatgaagacgacaagctttagtgcatagcttgcggggcagaaaaaatcaacttaaataatttcaagtagcagtgttgtcaattataaataaattgtactctcttgtgatgtagtttcacaaagtagaggagtctcatgaaattcaagattcttatatgtaaagtccatttgatagatttctatttaagagtatgttacaacagaataaattataaattataattgatctctaatatgctaccagttaatcgtgggagaaaaaccatattttataatgagtcaattttaatttttattctatttatttatctataaatgttcatatttacttttccccccaagagtaatc

SEQ ID NO: 897520 - DNA, 623 bp, Homo sapiens
aatagtaataatgtactattttttatataaaccaaaaagtgactgagacagatctcaatcgactttaaggtttattttgccaaggttagggacatacttggggaaaagaaacagggtctgtgtcctgtgctttttccaaagagattgttgaggacttcaaaatttaaaggggaaagagcaagcaggaggcaaaggagcaaattttaaaaataaataaataaataagtagggggagagtaagcaatgaggcacttggtcacattccagtgatgctctgattagctcaggaaatctacgttttacatgtaaaaagagagaagtggggaaaaagtcaattatgcattcatctcttgctcagtagatctagctttgacatgagctaaaggaagcatgtgaaatgacagctctctgtttgggaacaaaaggaaggcaatttttgcatgactcagttcccttaactttccctttggcttagtgaattggaggtcctgagaatttattttcctttcacatttaataacrtggatgtttttaattctctttactgtcttatgaacatgtttttgttctaaacattgtcaaggatcagtaagtaaactgctctgtcatactttgagttataa

SEQ ID NO: 897521 - DNA, 567 bp, Homo sapiens
gtcagctgtgtctgtaatactttattttctggaatgagatctgaagcacgtgggaaaatatyaacagatttgttaaatctaggtggtagggactgggtctttttttgttttcagtttttttttaatatttcatattttaaaaagaaaaatagcacaaaataatgaaagatagtgctcagatcaagagcagcagtgctcagtgccattctggtcatcgaaacctgagtaacagaagagtgtgcatgtgccctaagtatgtaaagaacatcacatttgcaagttagaagggagatggggaaggtgatgatagtctgtggttgcgaagataggctgggtaagatgaccttgaaacatagcagtcatccaaaatcatgagtgtgaaggtcaaaaagaggtgaggatgacctgcttacgccaactgctgtggcatctgacttttggccatcagtgtctttataaaaaagacactcatgggaaattgcaagtatgaatttttgagggtgaaatgaatgtgaacaacagcacatttttcatgagtcactgatggagttgctactaggaatccat

SEQ ID NO: 897522 - DNA, 567 bp, Homo sapiens
gtcagctgtgtctgtaatactttattttctggaatgagatctgaagcacgtgggaaaatatcaacagatttgttaaatctaggtggtagggactgggtctttttttgttttcagtttttttttaatatttcatattttaaaaagaaaaatagcacaaaataatgaaagatagtgctcagatcaagagcagcagtgctcagtgccattctggtcatcgaaacctgagtaacagaagagtgtgcatgtgccctaagtatgtaaagaacatcacatttgcaagttagaagggagatggggaaggtgatgatagtctgtggttgcgaagataggctgggtaagatgaccttgaaacatagcagtcatccaaaatcatgagtgtgaaggtcaaaaagaggtgaggatgacctgcttacgccaactgctgtggcatctgacttttggccatcagtgtctttataaaaaagacactcatgggaaattscaagtatgaatttttgagggtgaaatgaatgtgaacaacagcacatttttcatgagtcactgatggagttgctactaggaatccat

SEQ ID NO: 897523 - DNA, 651 bp, Homo sapiens
aataaaatgtcatgtaatgtcagaaacataagagcatattttaattaaatctttgaagaccttccagagaatttaagtcttctctatctggcattaggctggaaaaggataagaagcagttggatgttttcaactctttcctctatttagtccctaccttccttattccagaatactttattttagtcatttggtactcaggacatatgctattaggctggatttttttttcctttatagagacagggccctgctctgttactctggctggagtgcaatgatgccatcacggctaactgcagcttccaactcctgggctcaagtgatcctcccattttagcttcccaaatacctgagactacaggtgcgtatcaccatgctcagctaattttttaattcttttgtagagacagagtcttactatgttgcctagactggtcttgaactcctggattcaaacgttcttctcacatcagcctccaaaagtgctaagattacagacacgagccaccacacccagccagaattgattsatttctaagaaccgtgacatgtttattctgatacttccctgtatttactctgatgcttcaccctgttggtgggtgaccttttgcatttctctactccataatttaagtgagcacagtt

SEQ ID NO: 897524 - DNA, 651 bp, Homo sapiens
aataaaatgtcatgtaatgtcagaaacataagagcatattttaattaaatctttgaagaccttccagagaatttaagtcttctctatctggcattaggctggaaaaggataagaagcagttggatgttttcaactctttcctctatttagtccctaccttccttattccagaatactttattttagtcatttggtactcaggacatatgctattaggctggatttttttttcctttatagagacagggccctgctctgttactctggctggagtgcaatgatgccatcacggctaactgcagcttccaactcctgggctcaagtgatcctcccattttagcttcccaaatacctgagactacaggtgcgtatcaccatgctcagctaattttttaattcttttgtagagacagagtcttactatgttgcctagactggtcttgaactcctggattcaaacgttcttctcacatcagcctccaaaagtgctaagattacagacacgagccaccacacccagccagaattgattcatttctaagaaccrtgacatgtttattctgatacttccctgtatttactctgatgcttcaccctgttggtgggtgaccttttgcatttctctactccataatttaagtgagcacagtt

SEQ ID NO: 897525 - DNA, 619 bp, Homo sapiens
ttcttttgagaagtgtatattcatatccttcgcccacttttggatggggttgtttttttcttgtaaatttgtttaagctccttgtagattctggatattagccctttgacagatggatagattgcaaacattttctcccattctgtaggttgcctgttcactctgataggtttttttttgctgtgcagaagctctttagtttcattagatcccatttgccaattttggcttttgctgtcactgctttggtgtgttactcatgaagtctttgcccatgcctatatcctgaatggtactgacctaggttttcctctaaggtttttatggttttaaatgttacatttaagtctttaatctatcttgagttaatttttgtataaagtgtaaggaaagggtctggtttcagttttctgcatctggctagccagttttcacaacaccatttattaaacagggaatcctttccccatttcttgtttttgtcaggtttgtcaaagatcagacgtttttagatatgtggtgtyatttctgaggcctctgttctgttccattggtctatatatctgttttggtaccagtaccacgctgtattggttactgtatccttgtagtattagtt

SEQ ID NO: 897526 - DNA, 631 bp, Homo sapiens
ttcaggagcttttgtaaggaaggccgggtggtgacaaaatttctcagcatttgcttgtctgtaaagcatttyatttctcctttgcttatgaagcttaagttggctggatatgaaattctgggttgaaaattatttaagaatgttgaatattggccccactctcttctggtttctagggtttctgcagagagatgtgctgttagtctaatgggcttccctttgtgggtaacccaacctttctctctggctgcccttaacattttttccttcatttcaatcttggtgaatctgacaattatgtgtcttggtgttgctcttctagaggagtatctttgtggtgttctctgtatttcctgaatttgaatgtcagcctgtcttgctaggttggggaagttctcctgaataatgtcatgaagagtgttttccaacttggttctcttctcccgccgctttcaggtacaccaatcaaatgtaggtttggtcttttcatatagtcccatatttcttggaggctttgtgcaatccttttcttttttctctaatcttttcttcacactttgttccattaagttgatcttcaatctctgatatcctttcttctgcttgatagattgggctatcgatacttgtg

SEQ ID NO: 897527 - DNA, 597 bp, Homo sapiens
tctgcagagagatgtgctgttagtctaatgggcttccctttgtgggtaacccaacctttctctctggctgcccttaacattttttccttcatttcaatcttggtgaatctgacaattatgtgtcttggtgttgctcttctagaggagtatctttgtggtgttctctgtatttcctgaatttgaatgtcagcctgtcttgctaggttggggaagttctcctgaataatgtcatgaagagtgttttccaacttggttctcttctcccgccgctttcaggtacaccaatcaaatgtaggtttggtcttttcatatagtcccatatttcttggaggctttgtgcaatccttttcttttttctctaatcttttcttcacactttgttccattaagttgatcttcaatctctgatatcctttcttctgcttgatagattgggctatcgatacttgtgtatgctttactaagttcttgtgctgtgtttttcagctccatcaggtcatttatgttcttctctaaactggttattccasttagaaattcctctaaccctttttctaagcttttttcaaggttcttagcttccttgcattgggttag

SEQ ID NO: 897528 - DNA, 628 bp, Homo sapiens
aatattatagacttcttttttgagaatattggaacaacaacaacaacaaaatgatagcctcttatcagagactcaaacaccttccaactcactattcaacattctctgggcatgggtttgttattctcaacccaatacgattggtagtgctagctctggttgtcacatgcaagtttcaggcaactatacagagaaagggtgtagataggcacaccttggaagaattatacatttctacttccgtatcactgagctgatatgaccacacttagctgcaagacaggctggctactatggtctgggttagcagcaatgtgtttagctacagttatcttttaaggaataaaagaagaataaaaatttggaaagagtattttttgccataattcttactcaagcatagatggtttcaccttctatttataggtaaaatttaaaaatgtagcacatagaaataaatagcatattcttctgaataattatattacctttagaaagatgcaatgttgtgtcaagatgtcaattgagattgctaattaattatagtcgtgtaaccaggtgaaaacaaaagattagaattgaaatgtgtaaaatattggtattataccrttatagatgacatgtaatt

SEQ ID NO: 897529 - DNA, 647 bp, Homo sapiens
catctatggaaaagggcagttaaacgaaagagatgaccagatagcccttaatcatagtttctattcactgtcttactcgagatacttcagaatctacaaatggtctcaaagggagctscaatctccaggatgctttttgagatggatttgttttttttttttaaagtcctgattttgccttcttcccactctaacattttattatttgactacctgaaataaaaattatctttctataagcataattgcatactgaagtaattttaaaaaggcacatttaagttttagaatagaaaacagaaaaaaatatttctacctccctttttggtacaaagatgagaaggtgtctaaatattattgtctctgaaattattcattaaatgatcttcatattttaagttcaattcgcatattcctttatcattaagggaaggattagaaatgccgcccctcccctcctctctccaccttcaacccacgaattcctcactttctcattttctgattgcatattatgaaccacacactgtgtgaggtactgtagacataaaaaaacaaaagtcctgccctgaaggggcccatattttaatggggatgcagatgtgtaagtggattaattttaaaactatatcttaagtgttgtaatg

SEQ ID NO: 897530 - DNA, 611 bp, Homo sapiens
aaaaacaaaagtcctgccctgaaggggcccatattttaatggggatgcagatgtgtaagtggattaattttaaaactatatcttaagtgttgtaatggagatactgctgagtcatttggatgccataagggataaagggtttaactcttccagaggaattatagaagaaaaaaattcataaatttcacttcattaaagtcagagtaatggtgcctactaagtatcatacagtagaccataatttttgctcacctgattactatctattcttgtatttgctaggtaggagtattagacaggatcaagtcaggaaagcagaaagcactctaggtatgatagaaaggggagggagggagagagagagggagagaaagaaagagatttcacccaactgcagcagaatacaaattcttttcaggtaacacagctagggaatagagaaagctatatttgactccaagtctttccaaaacctctttctatgaatgaatttaaatagtgagaaggctcagaataaagasttaagtttattggattaagtgagaataaataggctttggaaactctgatccttacttactatatgactttttctcagatcactgctgacc

SEQ ID NO: 897531 - DNA, 549 bp, Homo sapiens
catgatgaagccaaaaacatttgctctctggctctttacagaatgaatttgcttatatttcttctaggatgtcaatttgtctgcttaattcacagaaggacaaattttaacatamcttacttctatggcctgaatgtttgcgtacactgaaaattgatttgttgaaatcgatccccaatttgatagtattaggaggtagggctttggagatgtgattagatcatgagggtgtaacctttattaatgggattagtgcttttatatggggttgaagagacccgagctccccttccaccttgtgaggatgcagaaagaagatacattctgtgaactggaaagccggccctcactagacaccaaatatgccagtattttgatcttgggcttcccagccttcagaacttacagcagtccagaaagattaagacacccacctgaaatgttaattttgtcctaaaataatcttgcatttaagatctgaaatatgacctaagtattatctgaggagtcaatgctgatttattggtggtggatactgtgattctgtat

SEQ ID NO: 897532 - DNA, 668 bp, Homo sapiens
tgttcctgcttatagcccctgagtcctcacagttgtcacacastaagcagtctgacaaggagctgctcttcctgaccactgtatctccatgcccaaggaggtagaagccctgggcctttccttccaggagttaacagtgtccttgaagtggtgcgatacataatgtgtgaaccaaggaaggacgccagagcagctgtagtggacactggccttttcagtcttctgtgcacctgcgatctgtctcaactggatcttccttgccttgccaccatggtggaagaatggaagggaaagagagtaggaatgtgggctcagggagaactggacagagcagccagaagatacagagagaagcctcagtaggacttgagtattccccagaggcactcagccacagggatgatctagcatgtgtttgtatccttgcaattatgtgacttaaggtgactcagagacatctatatgtgtgtatgtactccactgactaacaatgaagtaaatatatgaatttgtgggaaataacgtatatacacacaaaagtctgcacagataattataacatctttattcataattgtcaaaacatagaagtaaccaagataagatgcgtttccatagatgaatattttaagttaaaataactcaggtacatccacacaatggaattt

SEQ ID NO: 897533 - DNA, 613 bp, Homo sapiens
ggacaaatacaactccataactaagtgtatttattatgtgtcaattctaaatttaaatattaataatttttgataaaaactaagatacaaaatcactcattagtttacacaaagtcagggtcatcratagctctgtcttccacatctatatcttgtcccactgaaaggtgttcaggggcaataacatgcatggagctgtcatttcctgtgataacaatatcttcttctggaatacctcctgaaggacttgcctgaggctgttttacagtgaactttttagaaacataagtagaggtacactctaacaataaaaagtatagtatagtaaatacataaaccagtaacatagctgtttgtttttaatatcaagtattatataccgtatataattgtatatggaatacttttacagaactgaccatggagcagttttgttcacaccagcatcatcacgtgaggaaaatgttgtgctatgacattacattacaatggctatgatgtcattagacaaaaggaatatttcagcttaattgcaatcttatgcgaccaccatcatatatgtggtcgattgactaaaaacatcattatgcagcacataaccatacatttaaca

SEQ ID NO: 897534 - DNA, 613 bp, Homo sapiens
ggacaaatacaactccataactaagtgtatttattatgtgtcaattctaaatttaaatattaataatttttgataaaaactaagatacaaaatcactcattagtttacacaaagtcagggtcatcgatagctctgtcttccacatctatatcttgtcccactgaaaggtgttcaggggcaataacatgcatggagctgtcatttcctgtgataacaatatcttcttctggaatacctcctgaaggacttgcctgaggctgttttacagtgaactttttagaaacataagtagaggtacactctaacaataaaaagtatagtatagtaaatacataaaccagtaacatagctgtttgtttttaatatcaagtattatataccgtatataattgtatatggaatacttttacagaactgaccatggagcagttttgttcacaccagcatcatcacgtgaggaaaatgttgtgctatgacattacattacaatggctatgatgtcattagacaaaaggaatatttcagcttaattgcaatcttatgcgaccrccatcatatatgtggtcgattgactaaaaacatcattatgcagcacataaccatacatttaaca

SEQ ID NO: 897535 - DNA, 660 bp, Homo sapiens
tgcttttaatgtgtatctttcartaacttattttagctgtagttgttattagtaattttgtcttttaatacttgtactagggatataattgctttatacaccatcattacagtcctagagtattctgagtacggctctgttttacttatattactgaattttctatttttgtaagttatatgttattaattagtaatattttgcttcagattgaataactttctttaataattcttataaggcagacctagtggtgatgagctcccttagcctttgtttgtctgggaaagtttttatttcttttttatttctgaaatgcaggtatttctgggtaaagtatttttgattggcaagttttttactttcagcattttgactatatcatcccaatctttcctggcctgcaggatttctgctgagaaatcggctaagagttgtattgaaactcctttttatgtgatgtgtttcttatctcttgatcctcttagaatccttttctttttgtctttgagtttcaatagtttgattattatgtgttttgctgaactcctttttgggttgaatttgattggagatctttgaacttcttgtgcctggatgttggtttctgtctccagattagggaatttttcagccattatttctttaaatatggttttt

SEQ ID NO: 897536 - DNA, 643 bp, Homo sapiens
acaaatatgaaaaacagtacctctataacactgatggaaagagacagtaaacctgaggaagcacaaaagataggatcatttaaatttttttagaagttttcatttaagcaaaartactaatatcctaagtctacagctcaaagcattttcacaaattgaacacagcccatggaaccagcacctgcatcagaagaaaaagaatcaccagaaactacacccccatgtgcatttccagtcataattctaagagtaacttttgtcctacttcaaacagcagaggtggattttgccagatattttagttaaaaaaatgaattagacaatatgcaattctctgtgtatagcttctttcactcaattttatgtttctgagatctttcctgttgttccatgtagttgtagataacacattcttatcatagtatagtatttcactgtgtgaaaatactattattagtcagaatggtgattattgaaaagtcaagaaacagcagatgctcgtgaggctgtggacaaataggaatgcttttacattgttggtgggaatgtaaattagtgcaaccattgtggaagatattgtggtgattcctcaaggatctagaaccagaaatactatttgacccagcaatcccatcactgggta

SEQ ID NO: 897537 - DNA, 610 bp, Homo sapiens
tggtgaaaccctgtctctactaaaagtacaaaaattagctgggcatggtggtgggcacctgtgatctcagctacttgggaagctgaggcaggagacttgcttgaacctgggaagtacagattgcagtaagccaagatcacgccactgcattccagcctgggcaacagagcgagactctgtctcaaaaacaaaaaaccaaacaaaaaaaaacccaaaaaacccacagatgctgacgaggctgcagagaaaagggaatgtttatacgttgcttctggcaatgtaaattagttcagccattatggagagcaatttgaagatttctcaaagaacttaaaacagaactactattcaacccagcaatcccattattaggtatatattcaaaataaaataaatcattctaccaaaaaggcacatgcacttgtatgttcatcatagtgctattcgcaatagcaaagacagagaatcaacctaggtgyccatcaatagtagattagataacaaaaatgtggcatgtaaacaccatggaatactacacagccaaacaaagaatgaaacaatgtctttttacagcaacatggatacagctgaaggccattatcctaagcaa

SEQ ID NO: 897538 - DNA, 515 bp, Homo sapiens
atgggagagtcaccgagtgttgggatccagtcatcccagtcactctgtctgcgtggaacctggctgatatccagccctgggtcactctgtgcctttcatgaattcatggactacaacaaaatgatatgatataaatgattcaagggtcaaatttttgagccaggaatatgggatctcttcattaaagagtgtgttttgtgttgagggggaatttctcagaacaatccaaagtgctcatcaacatagaaaacccctaaaactggcaagcagccttcgcgtcagcaggtgaggtgaatggctcctcattggttctctcttctgcttagcgcccaagggctgctgcttctgtgggttggctgctgttgatcagaaatcctctgaacaagtgcagaggatttctttgttttgggggatgttctgcaaataaggtgtcatgttgggaccttgaacgtttcccttgggtgtctcctccyatatgtcacttctcctttgttcttctggttctttgtcatttc

SEQ ID NO: 897539 - DNA, 633 bp, Homo sapiens
ttgagcttttggagggaagacatttgtatgatgctgtttcacctttagccccaattttccagtttatgacatctgcacattcctctyggtgccactcagcattcaagtgcccttctccacctccccttccttgactggatgcagggccggtgagcagaccccacagcagggctttgggaagagataacagtggcgattgtttaccctgtatgagatgctacattatgtgacacatagagcccatgatgtctgcacagcaccccttatcttccactgctatgaactgaatgtctgtgtcccccacaaattcctatgctaaaaccctaatcaccaatgtaatggcatgagaaggggggcctttggggattattaggtctttaggatggagccctcatgagtgggattaatgcccttataaaaaggggccctaacgagctctctggttcttcccacttgggaggatataaggagaagttggcagactgctaccgagacgagtgccctcaccagagcctgaccttgttgccagcctgggctcaggcttctggtctccagacctgggagatacaaatttcagttgtttataagccacccagtctatggtatgttagagcatcccaatatgacaaagac

SEQ ID NO: 897540 - DNA, 567 bp, Homo sapiens
tcttatgtttttacaatagtttagtacaatttttttatcctgatgatagtaagactgctataacagaactatcagcaaacttcaagaagaagcttatgtttaaagttttcttcartaaagttcccaagtttcccagacctgcacatagttaggagtgtgaaaagaagctttatggaaagccaagtaggtatcataaaataggtgaactggaacacggttttaattatgccagagtgaggtagtttatagctcacagcttagcaccctaacaatggacatgaagtactgactaattgtaattttgtcagtaataaccttgagacatggataaacaaaagtatggaagcctctacttggatctctgaagggccaagggggttaatctaatttagattaaacaatgagttatataaatttaatacttcatgtgcatcttaatttagaattgccaaagaatgtataaaaacttagcaaaagagtttttttttaatccttaatttaaagataatcatcagattcaagggattttcaaggtacaaaggaataaaagttttcatttagttaaga

SEQ ID NO: 897541 - DNA, 554 bp, Homo sapiens
tttgcatctcaatagttatatctgtttagctgttaattctgagggaaaaccaaaacaaygatataatgggaaaaatgtgcaggatttgaatctgtgtacttgctgttatttattaaatatatatttaaaacacttgtaatttttttgatatgaagacttacttgaaagcacacccttcgccttgtaatttatgaatcttttagaacatttttttctgcagtgtcaaaaaaatatgttgtgttaatagctgagagaatgctaatgtacagattttagctgtttcgttgcctctctagtagacttcattagaagtaaagatattaaactgagcgttgtaatgacatgtacttttttgtggatgacttgaaagacaagggttggtgggtagaggactggaaagaagaaaataaggaacatttcttgagtagctggcattgcgtttagactgtttcatttaatcctcaccaaaaaactgtattttcactagtaaactgataagtaaaattcagttctaagaggttcagaaacttaaccaaagttgcacaactagcatg

SEQ ID NO: 897542 - DNA, 625 bp, Homo sapiens
gttaatttaagtgggctgcttacacactggcagtgggtgaattgaaatagcttttgctctattcttgaaaaaaaactgcaggaaatggaaattctatagctttctttattttgcatctcttttatttccatctggcaggtgaaattcggagggaatacacctgccatcatcctatttctgacatatatatggttcctaggtgacatcaatgatccccttccatttctcctcctaagtagtgttgtcaataccattttaaataggagctcattggcaaataatcataggtttgatctcagcccaagaagatcttacttgacagattttacttgacattccttatgcttttggcagtttctctcttaattttttttaattttctttttcttcttcagctcaggtacctgacaatgatgagcagtttgtaccagactatcaggctgaaagttgtaagtatagtatgactcatctcttgtatttttctgtctttctsgtttccttctttcttctttctctttggttggttttcacgtccagtgtcttgtcttacattgtaccagcacctttttaacttacagccataagatgatttgatttgttaggttgtgacatcagcagaaactct

SEQ ID NO: 897543 - DNA, 625 bp, Homo sapiens
gttaatttaagtgggctgcttacacactggcagtgggtgaattgaaatagcttttgctctattcttgaaaaaaaactgcaggaaatggaaattctatagctttctttattttgcatctcttttatttccatctggcaggtgaaattcggagggaatacacctgccatcatcctatttctgacatatatatggttcctaggtgacatcaatgatccccttccatttctcctcctaagtagtgttgtcaataccattttaaataggagctcattggcaaataatcataggtttgatctcagcccaagaagatcttacttgacagattttacttgacattccttatgcttttggcagtttctctcttaattttttttaattttctttttcttcttcagctcaggtacctgacaatgatgagcagtttgtaccagactatcaggctgaaagttgtaagtatagtatgactcatctcttgtatttttctgtctttctgrtttccttctttcttctttctctttggttggttttcacgtccagtgtcttgtcttacattgtaccagcacctttttaacttacagccataagatgatttgatttgttaggttgtgacatcagcagaaactct

SEQ ID NO: 897544 - DNA, 686 bp, Homo sapiens
ggcattcataatttgaaatttttcttttggatttggcatacaaatgtgaaacattaattttatggtgtggtttgtgggaaatacaaagagaaaaattatagatayttaagcattgagtgtataacagtattatttgtgtgttcacattatatgggaaacatgcaaattttggaacagattttaagatggttaaaaaggagagagtgggtctctttaaatggaacccaggtgttactgtagctactttgaggcagactgacgtgttttatcggtggtcttgaatgcagttgatcaagttgctgttagcatgtaaaataagtttctttgttttgctgatagtctagttctccaaagagctttttcaatctttatcaatctttaaagttaaatagctttcctaatagtcctttgaaaggatgattgtatttatatgttaatgaaggtaagacttactgaaagttttggctatatttaaggatcattttgctagtctgtgtaaatgaaacttactgcaatacattactttttattgcaacataagtcatattcagatacaagtttttcaaggaaaatttgcatggagattcttgtattaacttatgcctattagttttgcaaagtcaaaggttgtgagaacattacctttatgagagaatttatttgcttctccaaaataacttaaaata

SEQ ID NO: 897545 - DNA, 601 bp, Homo sapiens
acctaatagtgagaaaagagatctttttaacttcttgtttctagactccactttttttttgttttgagaaattaaatatattattttgcactgatattttaacttgacttatcccacctcttgaacggtattagctaagaagagatccccaaattaccctagtttatttgtagtgagatgtgtccatttatgtctttctggacatccagaaattaaaacattgccaaattggcagaccatgaaccgtttacatatttcttttcataatgctccatagccaagaaagtgaccatggaattttaagacatcttgacccttttaaaaaagatcattggcagttaatcaagtttctcgcatgagttagaattccactgggaagttaaacaggtctaaaaaccttattagacataagagtcaagttagttgtcatatgtcatatgataattgtgtttttgaaaaattataaaagtcctcaaatatttgtgaaatgatatcttagcatgtttagtttktttttttctgtaagactattcataaattttaccccaaatgcaacatatggattagtcatgggtaattattatggattataaaatttctt

SEQ ID NO: 897546 - DNA, 650 bp, Homo sapiens
gtctgaaaaagctaacgtgcataccttaattaaaaaataatttattgctraaaaatgctaacctccatctccggggtcaagggatcctcccatctgagccttcagcaagttataatctttttgctggtagagggtcttgcctcaatgttgatggctgctgattgatcacagtggttacagaaggctaaggtggctgtagcaatttcttctcataaaacaaccgtgaattttgctgcatcaattgactctttcataaaagatttctctgtagcatgctatgctgtttgatagcattatccccaccgtcaaacttctttcaaaatcggagtcaaatcctgctgctgctttatcaactaagtttgtataatcacctaaatagtttgctgtaacttcaacaatgttcacaatatattcaccaggagcagattccatctcaggagaccactttctttgctcatccataaggagcaagtcctcatacagtcaagttctatcatgaggttgcagcaattcagtcacatcttcaggctccatttctatggctagtctcttatttccatcacatctgccgctacttcctgcactcaagtcttaaacccctcaaagtcatccaagaaggtggaaatcaacttctttcaaacttctgttaa

SEQ ID NO: 897547 - DNA, 610 bp, Homo sapiens
atacccccttttctgctgacagccctttatatgggattatgttkcacggcaggtacataacttaaatacatgcacttattcatagaggaaaacagttttgtaagctattaatgttatattccttgctgtgataagagcacttaagatacctgagaaaaaatatatttggaaatgacctggaagagtttcctttgtctgtaatctttgcaggctggcagttactttctgctgactcttagctgttccgtcactgcagtcactgcaagcagcctggtgcagtccaaagggagcagagctggaataggagctcaaggtcagaggtctagctccaggtttcccacggatgccttcagtgaccttggtgtggggaggcaatattattactttcagtattctcatctgaatatttgcaagcggaaggacaaagaggggcaggaaaaaaaaccctccaagtttcattttcatttttaatatgtaagattatgtaaaatcagctgactgcagtggctcacacctataatcccagcactttaggaggccaaggcaggaggattacttgagcccagaagtttgagaccagcagcctgggcagtatagtgaaaccccatct

SEQ ID NO: 897548 - DNA, 633 bp, Homo sapiens
aataagagaattacgtcttctagttaggccaggacaatcccaactgttctttgtaccaccgtaattaataatagtgttctgctttattttaaaaaatgtctttgctgggtctttaaatgacatgcttagcccagccacaatgttctcttgaaaaagagagaagattttatgtgtcatactaggcagtagtgatgagagtggagacaaaacctgagacagctggaggaggcgagaagagttaccagatggaggctgcaatctgggaagcatatctcagggaatcccaaaaaggagaaggcctaccacctagcaagagccatatggaggatcattgcacagaatgaacacgaagggctttgctcgactgcccagcaatctctgaagaggttgatactcacactgaagacatcccatccatcctcttgtgagctgaatgatattccctcctgcctcaattacttccctgctgcattgctacctttcaataacgcttcactattttttctctttcttactgagtaattaacgcaaacaagcaccattaaaaatcatttactcctggccataggggagtcgaattgccatcagcttccagtaaratgtaagtataccattctctctatttgaggttat

SEQ ID NO: 897549 - DNA, 685 bp, Homo sapiens
atgatttgaacttgtaatcattggtattgattttagtagcaaaaccaaatgagaaagaaagaaaaagagattcaactccagtactaattcttttattctataatagttacctttgcatgcaagtattggaaattaacggcaagaaaaatattcatttgaaaccatattatcccctggcataaataaaaacactcatttaattaactatacttttgaggtataattgcatactgtataattccttaaagtgtaaaattcaaagaatacatagctgtgaaaccaagaacacaatcaaaatccagattgtttccatctccctccaaacttccctagtgcttcactgcagccccttcccgccatcagctctagcaacaggaaccaatgatttgctcagtgacaccgtaagattagatttcattttctagaatttgttataaaaataatgtatacaagtagtatgatctgcctttcactaagtgaaatgtatccatgtttctgcacaataaagtaatattttccatttattgctgagtagtattctattgggaaataactcatattgtttatccatttacttattcatgcctatttcagtcttttcctgtttccagttttttcstactatgaataaaaccactaggaacatttatttctaatttttggtaaaaccatgattcaactgatc

SEQ ID NO: 897550 - DNA, 555 bp, Homo sapiens
ctctattacaaatgtatgaaacgaygtgacaaaggcagtgaggaaaaaggtgcccacctacattaactttgaaagtgagtggagactggtaagaccaacagcaaaaagaactgtacataagcacccttattatggttggcgaagtgatttcctacatggctacagttaacaattccaatatttctatactatatactggtattgaattactaattaaatgcatatggaaaataggaatctgctttctcactttcagcatgaaagtttacagataaaggagaggctaaaatgatccatgtgatgatgtatcagagttcaagagatcatcagtacaaactcatcagtaccaagtcatcagtacaaacttacctgtatagatacacatgattatatatggaaatatttataaataagtttttataaaaaggttgtaggtatatgtcattccttttctagaagctgaggggcctatgatcaatcatactctattaaaaatgagtgcacttaatgaccaggtcttgctttcaaatatcggactccactagacccagggtt

SEQ ID NO: 897551 - DNA, 555 bp, Homo sapiens
ctctattacaaatgtatgaaacgatgtgacaaaggcagtgaggaaaaaggtgcccacctacattaactttgaaagtgagtrgagactggtaagaccaacagcaaaaagaactgtacataagcacccttattatggttggcgaagtgatttcctacatggctacagttaacaattccaatatttctatactatatactggtattgaattactaattaaatgcatatggaaaataggaatctgctttctcactttcagcatgaaagtttacagataaaggagaggctaaaatgatccatgtgatgatgtatcagagttcaagagatcatcagtacaaactcatcagtaccaagtcatcagtacaaacttacctgtatagatacacatgattatatatggaaatatttataaataagtttttataaaaaggttgtaggtatatgtcattccttttctagaagctgaggggcctatgatcaatcatactctattaaaaatgagtgcacttaatgaccaggtcttgctttcaaatatcggactccactagacccagggtt

SEQ ID NO: 897552 - DNA, 555 bp, Homo sapiens
ctctattacaaatgtatgaaacgatgtgacaaaggcagtgaggaaaaaggtgcccacctacattaactttgaaagtgagtggagactggtaagaccaacagcaaaaagaactgtacataagcacccttattatggttggcgaagtgatttcctacatggctacagttaacaattccaatatttctatactatatactggtattgaattactaattaaatgcatatggaaaataggaatctgctttctcactttcagcatgaaagtttacagataaaggagaggctaaaatgatccatgtgatgatgtatcagagttcaagagatcatcagtacaaactcatcagtaccaagtcatcagtacaaacttacctgtatagatacacatgattatatatggaaatatttataaataagtttttataaaaaggttgtaggtatatgtcattccttttctagaagctgaggggcctatgatcaatsatactctattaaaaatgagtgcacttaatgaccaggtcttgctttcaaatatcggactccactagacccagggtt

SEQ ID NO: 897553 - DNA, 609 bp, Homo sapiens
aagacaatttactaaccaagaaaacctatgcatgcacgcagcacagataccaacaaaacctccacagaggttcaatcagcacaaaggtctctctgatctcaagtatgtgaccacctcatacctaccactgatgctcaaaactaattggttaataatgataatccgttatcaacattttcccaactctccatagtaataaagtacaaaatccaatgaataaaatcaaatttacagaacttctggtaccattttgcgtcaaatagcaaccatcatgtatttacaaactaatcaggaggatgaatttggatgtgggagatgagtttctcctccttccttttgtggatggaatcatggttcacaaaatgtagagactggtaagggcagtggaaacattaaaaaaaattgttgttagccacaaggcccttgaaaagtttagagttaggcacatttcagagtaattttgaacattaattaaaatctttgtcataaaaaaacctttaaaactgcattaatttgatattcagtgtgtaagtggatacctagtggaagggttcggwtttagtagaaaatttttgaaatatattggtgaacaaggataggactcagttc

SEQ ID NO: 897554 - DNA, 626 bp, Homo sapiens
attcaaaacataaaattgatcatgccatcctttaattaaagctgcctctccattgcctacagcctaaaatctaagtcccttggcactgactgcaagatccagcatgatctggccctaatctatttttacagactcatccctcatcattcccttgtttgcaaaacactacaagaaacattttatacttctctgaactcaccaatctatttaaagactctaggtacagtctagaaaactccagtattcactacctggaataattttgttatgttccaaatcaaatgctattttgtgatttttttctacttcctacaagcagtgctttttcgtagctcttttttgacttctttacagcatatatttttctctttaatacatttcccttattgaattatggacttaaaattatggacttaaaatagtgacctgtgtaatagtgtatggacttaaaatagtgtaagatagtgtgtagctgtgtaaaatagtgtagcctstctatgtgaatgtgtgcacacatgggtaggatgtcagtgtgtgtatgcacacatgcatgtgtacctgaggcacttagtgccaaccgcatgacaggcctcagtcaagttcattgaatgaaactgttgacatgt

SEQ ID NO: 897555 - DNA, 561 bp, Homo sapiens
ctagctctatcacttaccagttaactacagctacatttgatttcttgaagcttagtttttgttatccaaataaacgaaatatcttctctaaatacattacattttgttgtcaatatacggaaataaacaaatgggtgtggattcctttgcaagcagcctagtgtgacatgcatagaagctgttagcaatgtaatattaatacattgcaaattcctgcttctctatttcctagacttacagtaacagttatatactaggtgttttaagaaccaaaaattccctattaatagtgctgtgggaatgtacattagattgggaatcagatttttgtttctgtgctacaagtaattgcttataatatcttggttgtttgggctctacatccatatttataaaattatgaggttgaattagaagttttaagcattgctcttagcactcaaaactaaaattttattttattttcttttttttwaaagacagggtattgttcagtcactccggctggagtagagtggtgtgatcttggctcactgcagccttgacctcccaggctcaagc

SEQ ID NO: 897556 - DNA, 633 bp, Homo sapiens
tgatttgtgcattcaaagtccacagttttccaaaccaaatatttaaatgcttttctgctaataaaaaataatttcatgaatgctacttagagggaaattaaccaaatcattctggcagtaattcagattaattttaaaaaacacaggagagattaaaagaatgcatgaatggtaatctaatgagtacagaaattactagactaacttaaatccatgtattccaatgttacagtaggaggtctggggagttgcagagaaatagctgcttgtagttacacatacacaggctgttttttttttttttaagcaaattgtaaatttaattagctgattacaactttgtaaccaaattgtttacttggtacttcatagaaaggagtatagttttcattctcatttaaccttctctgagtgaaggaatgtggaagtgatgattcattttttgtggtcctacatttataactggggagcgctttgcttcctgtgaagcagatcggttccaatgtttgtgggaacattttgactacaactgtttmctagtataaaaatctgtgttataaaatgtgagaatcactgttttctatgtaagatgtcaatagttttaaaatggcaataaatatttaagggggaagg

SEQ ID NO: 897557 - DNA, 673 bp, Homo sapiens
tcattgtttgctagaaaattgactctgaggagcatgcaggtgtttctgtgttctaaactttgttgtgcataaaaaccacttcccatgcaaattaaaagtgtasatttctgggaaccattttgattcagtagagacagaaatgggcccagacacctgcatttttatagtgtccatatggttctgatgtatgtgatctgaggaccatacttgaaaaaacaataaattagtctttaccaaaagcattcaagagtttcacagttttagaggtactttctgagttgaactccaaaatatccttgaggaacttagagagatttttaaaaacaattttattgaagtataatttatctattataaaatttacctattttagtgcacaattcaatatttctaatacatttgttgagttgtgcaactgttgttgcaatgatttttacctcctcttccttgcctggattgaaggaattctgttactccaagggaagaccaaagagtcaaagacccaagtttgagttttggctacatcatccagtgtcctgagacctaggagcaagggacatgggtctttccatgtcttagtcacctcatttataaaatggggatgctattaatatttcctttataggatacttgtgaagattaagtgagaaaagatgtttggagtgcaatttgt

SEQ ID NO: 897558 - DNA, 614 bp, Homo sapiens
tctaagaaccacatgtcttatgcacagactaaactgaatgcttaaatggaattgtctattcatttgtttcacaaatagatattgaatgccgaagtgccaggttctattttagacctgaaacacataaatgaacaaacaaaggttcttgacatcatatagttcatattctaaagaatcttgccctttgcaattttcaggtttggaggaagacaccagcccttgagatttaccattttggtagtgacagagaccaccaggagcttccagctgccctgtcttgctgtaatggcactcactccatgcacttgtcctcaatgtgggtggtatcatctgaaaggacattttggaaatttgtgggtacatttctcattactgcaatgattatctgtgctgctagattttgtggataagggccagggatgtcatatacaagacagacctaagcaagagagaatcatcctactgctgtacaaattgcagtagcattccagatattccatcgactaagacctaactccatctttcatggaatgctattgtgcttycattgtttcaatattcttcaaattttcctgtagtggaactcccatgcaaattggggtttggtcttactt

SEQ ID NO: 897559 - DNA, 655 bp, Homo sapiens
cagtaattaatacttattttgggggaggttctttgaagctattcaactattctgtttctyattgaaattttacccactaattttaacatgcctgactgaatcttatcagcagcaattattactgcagtattttgatggagattttctgtttcactccttcctgcctggctttactcatagcgaggcaactatataagaaagatttgtttcttctctatttacttatttattcaatcatttgtttatgtcagtatagatccatgaatctttgttttatattttgggttataaatcagtgctattgctatttattttattgctcaatttctttcagctttggtcattgagaaccctttcaagttgacttctgtgtccttttgacaggtttttattctccctccctccttcctttcctcctcctttctctgtctgtctctttcttcctttccacattcttattttctgtaattacaagattttccaggttcatcttgtattatccctgccccagacctacactcagccatttcttcaaggcgcactggttccttttattggagaatagtattcagaaaccaagatctggatgctagataagaaaattagttttaagaaagagtatatgtgaatgttgaggatctagaaatgaatttcc

SEQ ID NO: 897560 - DNA, 634 bp, Homo sapiens
gcgctgaaggactgtaataattgaccacaattagagccctttacaaatcacatcattgttggaatcaagaagagtgtgaatttttacattaaaaatgatgcatatgatcagatttctttctcttctgactatggctttgcttagtaaaaatccaagtgcagttttgtcatgagtgaaatagaatttatgcagtgcttactaggcaataacttttcaaaacaaattacactggggaaacaacatccttttgtttgggagctcctattttcaaattttgttgctcctccaagtcatggtcttagtctggttaacagtcatcaactcattgtaaagcatccacaggaaaatatacttgatagtcacctccctagtgactgacaatttcccattttgtgcaggttttttatttttttaaattttttatcttaaagagttactgtaaatcttggagcatagtagagcatatgaaaggtgaaggctgtttcttcaccctccatttgctcacattgtaaaaaagaatgaaaaatgcctgctgcagaagctcatatttttcaygtctcatctttactcctcaatgagaaaactcattttgtaatcgtttcatcgagggctatttttgttcattttcattgaa

SEQ ID NO: 897561 - DNA, 620 bp, Homo sapiens
aaaagtgataaaattattctttgttgagctgccccaygtatgatatttcgtatagcagcctgagctggctagtacaacggttcaaaattagggtactttcatagaaggtctgttgtcacattgaacaagatgccttacttatttaaaaactaactgattaattataaattataatgaattagacaactgctacagagaaaaacaacacttttccttataattataggataaaaaaaatcttttataatgtcactcctgtatttaacaaaagttctaaaatactatggttattatatgtatgtctgtaagaatcttgaaatatttgtaacagtagttacaaatccttaagttcaataattgtatagtaataacaaagatacatcatatttattgagaacttactatgttctaagagacataattacatgatatgttttaaactcaacactatgaagtagatactgtatttttcccatttcacagatgatgaaattgaccacagatatgggaacacaaggatttcatcaaatagtcttaatgtctcaataaaccacagcgcccagtgctgcaccttggccatggagatacgtctgcaacatgcatcatagcctggtatccat

SEQ ID NO: 897562 - DNA, 618 bp, Homo sapiens
gatatttaatctccttgcatgtgtgtgtgtatatatatatatacatgctttccacctcaatattgtggcttgatgtgttaaatagaaaataaaacccacatggttttcatttccaagacaytatatgaggtaatgtgtaataggaaacacatgaaatgatgaaggcttgagagaataggtattagaatgataagtccaaggataaaatgactttgtggaagaatcaagagagccctgggataaaagaaacctcagtgagcagattcttttggtggatacttaaaggaaacgtaattaatggtgtgaaatgctaggatacaatttatcaaagaacatgactctgagaaaataggatctttacaattagaaagctactaatagttactgtgaccaacacttatgacttgagttataaatacctgaccctgttgcaattttattatatttaggtaacatcaatcttaccaactcacaaaggatcctcttcaactagaatagagaaaggcattgagatcatataccctggttctcaactgtcttaattcgcagtgcaattcttttgacaaagtattatcctaggtttaagtacataaatatactcaaagatatatgagcaag

SEQ ID NO: 897563 - DNA, 618 bp, Homo sapiens
gatatttaatctccttgcatgtgtgtgtgtatatatatatatacatgctttccacctcaatattgtggcttgatgtgttaaatagaaaataaaacccacatggttttcatttccaagacattatatgakgtaatgtgtaataggaaacacatgaaatgatgaaggcttgagagaataggtattagaatgataagtccaaggataaaatgactttgtggaagaatcaagagagccctgggataaaagaaacctcagtgagcagattcttttggtggatacttaaaggaaacgtaattaatggtgtgaaatgctaggatacaatttatcaaagaacatgactctgagaaaataggatctttacaattagaaagctactaatagttactgtgaccaacacttatgacttgagttataaatacctgaccctgttgcaattttattatatttaggtaacatcaatcttaccaactcacaaaggatcctcttcaactagaatagagaaaggcattgagatcatataccctggttctcaactgtcttaattcgcagtgcaattcttttgacaaagtattatcctaggtttaagtacataaatatactcaaagatatatgagcaag

SEQ ID NO: 897564 - DNA, 657 bp, Homo sapiens
cagtttactgtacatttaaaaggactggctttggcgtcagaagcmtctgggttcagatcctggctttgccattttctagctatgtgatctagggcatgtaacttaacttataggtgccactgtttccttatttgtataaaatagttcctactctgacaatactagtatttctcttttccacatttattttgcctcctactatccaagcattctcttatctcctaacactgctggctgtcccttctgcccctggagtaactatacgggctacaaaactgcctccattattccagttgtgttagaagccacagtttactaaacactaagatttatctatgcaagagctatggaggaggttcagactcctccagcacgttcagactcagatgaagagtgctttcgcgtatgtggttcatctcgaagagcagaggctttaatgccctgtggggagaaattagtctagtgacagagaagaggcagaaagagcccacagataaattcctttcccttaatctatccaacgacagttttgaagtattctgtcatgaatggtggaggatatcccccatgactgaacaatcagctggtttccttgtgaatccatgaccagctcagtaataacaactgtaactgtcagctacctttgctgtccctcct

SEQ ID NO: 897565 - DNA, 629 bp, Homo sapiens
ttatcctctccaggacctcaacagatkcgtgttactaaaatacctacaaaaatggtaagtcaaataaagtaatttacagaaaattagctctctgagccatgtatatttccacaagacagaatggagaattctatccatactctttcataatcaaggacatggcttagaaagaatccctaatcaggatcaaggagatgaactgttttgaacaaggataagtatcatgcaaatatcagacagaatcagaaaacaggagtgtgaaagaaattcctgctctacccctttgtgtctagtggagccattgctataaggatacagatgaaaatgctcaggctacaccatggcatgtgctgttctcagaatatggactataacaatagtgcttcaggaacacggaagacacagctagcacctgactctgccaaggctatgtcagggaaggatttggaaaagacaggacaatggaaagatgagtgagagttccttagcaaaggaaagagggtgttttcatccagaaagaaatccatgggcagtgtacaaagaccaccttgggcttttggcatggctcaaactcaggatgttttcgggaagagatgacagatttgactggaaggaaattaagaccaggt

SEQ ID NO: 897566 - DNA, 632 bp, Homo sapiens
aattggcctgtagctagcttgctttctttctctttctttctttctttctttctttctttctttctttctttctttctttctttctttctttttttctttttctttctttctttctttctctytctttctttctctctttctttctcttttcctttctttctccctctgtttctccctctttgttcctccctccttccctccttcccttccttccttccttccttccttccttacttccttcctcccttcctcccttcctcccttcctctcctccttctttctttcccaccttccttctttttgtgtctttgtctgcttttgctatcaggatgatcctggtctcatagaattcatttggaattattctctccttgtttattttttgaaatagtttgagtaggattagtattagttcatccttaaatgtttggtagaattcagcagtgaagccatcaggtcctggatttttctggtctctgtacttatgtgccacatgcctctttctctgtcacccattgtgacccacagcaaatcacacaccaagtctgatggcactgggctggagaaagtatgatcatcttatgatcctacaatatcctgaattggcaaaggctttactacagtttcacctg

SEQ ID NO: 897567 - DNA, 554 bp, Homo sapiens
ttagtatgagtagataccttcactaactgggtagaggcatttccatgccagacagaaaagacctctggggtaataaaagtaataattaatgaaataattccttgttttggattccccaattatgtccaatgtgacaatggcctctcatttaaagtggctattacacagggggtctcaaaagtgctaggcatacagaaccaacttcattgtacctggaaaccacaatcctcaggaaaggcagagaaaacaaatgatattatcaaaagacacctcagaaaatgttccaaagtaactcacctgccttgggttacccttcttcctatagcttcactaaggataaggaacacctgttcaaagttagttttaagcccattagaaattatgtatgggtggcctttcctcaccaataaccttttattagaccaagaaacttmtgagttagttaaacatgtaacttgctggctcacttccaacaagaattaacacagccaacaaaagctcaaccccagaaaataggaccacctttatttaatccagaagacttagtactggtg

SEQ ID NO: 897568 - DNA, 652 bp, Homo sapiens
actgaaaccggaagtcttctatagtttcctttaaaaaatgttcatgtcaccaatttctctacaagttacattgataaaaggagggatgaaagaatttttttkttgttgttgttattttgtttttgaaaatcaagaactaatatttcagaagatcaggtctattttccatctgaatataagcaggtagggaaattgcaatagcatagaattaacttgtctttcacttacagaagtttgacataacccaagacaacatgttcgttaaatttcatagatgcaaaagagagaatgtgagttgaaattatttttttctaaatgctttctatatatttgtttctctaagatcttaatcattcattaataatgtttagtttctaagatttctcactaaagcttgctttactttctaagtttgtaattttaaattcaggcagtttaaatcctttggaacatatttataaaagtatccaacaaaatcaattagagaatgaatattttcatgtcctgatctgtaaacagttaaatgtcaaatttttccaaaacaaacaaacaaaaacaaacaaacaaagaaatcgcctttgagtaaaaactgacaatggaaaatttcaaccaaaggaaaattattcataaaattcaagtgtcttcaaattaa

SEQ ID NO: 897569 - DNA, 652 bp, Homo sapiens
actgaaaccggaagtcttctatagtttcctttaaaaaatgttcatgtcaccaatttctctacaagttacattgataaaaggagggatgaaagaattttttttttgttgttgttattttgtttttgaaaatcaagaactaatatttcagaagatcaggtctattttccatctgaatataagcaggtagggaaattgcaatagcatagaattaacttgtctttcacttacagaagtttgacataacccaagacaacatgttcgttaaatttcatagatgcaaaagagagaatgtgagttgaaattatttttttctaaatgctttctatatatttgtttctctaagatcttaatcattcattaataatgtttagtttctaagatttctcactaaagcttgctttactttctaagtttgtaattttaaattcaggcagtttaaatcctttggaacatatttataaaagtatccaacaaaatcaattagagaatgaatattttcatgtcctgatctgtaaacagttaaatgtcaaatttttccaaaacaaacaaacaaaaacaaacaaacaaagaaatcgcctttgagtaaaaactgacaatggaaaatttcaaccaaaggaaaattatwcataaaattcaagtgtcttcaaattaa

SEQ ID NO: 897570 - DNA, 665 bp, Homo sapiens
aggaatttttggttgttgtgtttattggagggtgaagtttgagcaatcatttgtggaaaatcttccctaagcatgaaagaaagactgattgaaactgaaagaacactggactagaaatcaaaatcccaggtttgaattctggttctgtaggtagtgatgtgtgaccttaattaaatcgttgcctttgtttcctcatttgttttctatgtgtgttacaacataaatgccacataagttttgctcacttctatacctctagcaccagaaaagtgcctggcacataataagcgcacaataaatatttgttaatacatttgttgaatgggtgaaacagcacaagatttacaaagtaaaaagattcggtgaatataaaatatcttataaatatgggggtaagtggtggtggaattagaacataattatcttattttcacatgtagcctgcttgggctactataacaaaatcccacagaataggtagctttaacaacagaaatttatttcttacagttctggaggctgtaaaattcaagatcaaggctcttgaagagtttggtttctggcgagaactcttttcttggttttcaggaagaagtrtggtgccttttataagaacacaaatcctatcatatccaggctctgcctttatgacctcatttaacctt

SEQ ID NO: 897571 - DNA, 594 bp, Homo sapiens
tagaacagacaaggttttgtttttctcctgtraacaggatgttcccgcataaggaggtactaccctctctactcagcctttattccctccttgcaaaatatgctgctccactgtttcccagtgggtttcacaaacatataagtacatttatgatagtgatcataacattaatgactaaggttttggtcaatctctcaaatttgagaaaatgaccaaaaggggggaattgttaaagcaaactacatatggtctgagaaggacttcatacttttgtattagagtccttgtggatgaactgtaagctagcttaatagtcagacaaaattgaaaacctaacttaatactatgtactgtaacaacagctgagtgttagccaatcccagcggccatgcttcaaccactcatagactgccaagtgttcaaactgcattcaaataaggcaaacgccgagctgtagccaatctcactgtttctacacctcacttccgattcctgtacgtcactttatcttttttgtctataatttttttctgaccatgaggcactcctggagtctccgtgaatctgctgtgattctgggggctgcccaattca

SEQ ID NO: 897572 - DNA, 387 bp, Homo sapiens
cttactttgtaaatcctggtccaggactttaacttggaataaatatctattgttttgcaacctaaacttccattccatttcatcatcctgttacaaggtattgcgaatcttctatctttagtattttccatttctgcatacaacccaatttttctaggcttcaccagattggaaatataaaataaagttgcagtctacttttatgcccaaattatgatggcaagagcttcaactcttttgatgactagcaattagcgcatctccaagtgtccccaagatattttaaggagttctccaaaagggtgccrcacacaacccacagcccagtctgtaacttcatggtatctgctttttccttcctttcctactctggcttataattttcca

SEQ ID NO: 897573 - DNA, 387 bp, Homo sapiens
cttactttgtaaatcctggtccaggactttaacttggaataaatatctattgttttgcaacctaaacttccattccatttcatcatcctgttacaaggtattgcgaatcttctatctttagtattttccatttctgcatacaacccaatttttctaggcttcaccagattggaaatataaaataaagttgcagtctacttttatgcccaaattatgatggcaagagcttcaactcttttgatgactagcaattagcgcatctccaagtgtccccaagatattttaaggagttctccaaaagggtgccgcacacaacccacagcccagtctgtaactkcatggtatctgctttttccttcctttcctactctggcttataattttcca

SEQ ID NO: 897574 - DNA, 558 bp, Homo sapiens
tggcagcagccatcacgtttggtgtcttccttagcacaaggcggggaacctgtgtgctctgggcgtggggtccccactcacgacggggttgtcgaagatctgccagaggtcggggtgcaggtgctccgtgtcgtatctggaagtggccaggagccggccaaattcatgctgattgctcagatggaggaagatgccctgtagtggggtgggggtgtccgtgatgcaggcgatgcctggagtctgggggactgcccccaggccagaccgtgcacccgcgctcaccttgtctcgaaagctcttacagaaggccatgtccgggtctgtgtcactgcccgagaacacatccctctggggcagctccatccgcagggtatcaccccggatcacataggcctgggagatgtatggtacattccacacacccctggaggcaccgacaccgcggtcagctkggaggacagccccccaaattctgcccagctcatcccgggaagtccttcttccctcagggtatcccagtccctgaacataaggcccctgcatgtcccttgtcaagca

SEQ ID NO: 897575 - DNA, 603 bp, Homo sapiens
gggaatgacaatgacacacgccagacacacacgaactgcggacataggggtgctcgtgggcacacgcagggcacccgcaccctgagactctggaaaccaaggtcagggctgtctgtcagggtcttagagactctttcagaaacggtcctcgcccccctcctcacctcttcctggcactgaccctccttctaacctccccctccctacacacacactcacgtgctttctctctataaccagcagtggcttctcgcttccatcagtggctcgactttcccagaagaaagcccatcagctctgcggggaaagaaatggggaggagtggagagggagaaaagagagaagagatgggggcaggggaggaggaaggaatgaagggatctggaacaggtagaaggagcaggctaaaggagaaaaaaaaactgagaaccaaggtgacagtggagattccaaagaaaggagggaaaagagggggtaggagaccccgaggcratgcctcccatccccacgcacaactaaccacggcctcccctccttcctctccccgcccccatgtccccttcatcttcccagcctggatacagagagcagtgggatggggag

SEQ ID NO: 897576 - DNA, 601 bp, Homo sapiens
acagcgagtgaattctgcatttccaactgtggtgccyggattctctcactgggactgactaggcagttcctgcaaggaaaagcaggatggggcgatggttcacccaggagctgcacaggacaaagggacctccctcccctagacaagggagatggggaagaattgtgttacctgcctggggaatgcttttcccatgaactttttgcaacccgtggatcaggagattccctcgtgagcccacaccatcagggccttgggtcccatacacaaagctgtgcggacctacagcagccactgagattggtggccgcttggacaggcactgagctcgaggagtttttgcatactcctccagctcctggaactccaatgaggtagatgatctgtctagtcccaagggaagagggctgaagccagggagccaaccagcctccctcagtgcgtcccacccagacagaatcccacaagctaaagacccactggcttgggttcccagctggccagcacaggagcctcgagtctacctaagactattgagttcccaagggaaggggcgatcaccattactgcagatcgaatcagcagttttcccctgccagtg

SEQ ID NO: 897577 - DNA, 601 bp, Homo sapiens
acagcgagtgaattctgcatttccaactgtggtgcctggattctctcactgggactgactaggcagttcctgcaaggaaaagcaggatggggcgatggttcacccaggagctgcacaggrcaaagggacctccctcccctagacaagggagatggggaagaattgtgttacctgcctggggaatgcttttcccatgaactttttgcaacccgtggatcaggagattccctcgtgagcccacaccatcagggccttgggtcccatacacaaagctgtgcggacctacagcagccactgagattggtggccgcttggacaggcactgagctcgaggagtttttgcatactcctccagctcctggaactccaatgaggtagatgatctgtctagtcccaagggaagagggctgaagccagggagccaaccagcctccctcagtgcgtcccacccagacagaatcccacaagctaaagacccactggcttgggttcccagctggccagcacaggagcctcgagtctacctaagactattgagttcccaagggaaggggcgatcaccattactgcagatcgaatcagcagttttcccctgccagtg

SEQ ID NO: 897578 - DNA, 596 bp, Homo sapiens
tctcttccaaatgattgcaacacctctccagcaagggcacagaactgggctgaagctgagttggatgaactgacagaagtaggcttcagaaagtggkcaataatgaactttgctgagctaaagggttgtattctaacccaatgcaaagaagctaagaaccatgataaaagattatgggagctgttaattagaataagcagtttagagaggaaaataaatgacttgatggagctgaaaaacacagcatgagaacttcatgatgcaaacaccagtatcaatagctgaactgaccaagcggaagaaagaatatcagaccttgaagactatcttgctgaattaaggcatgcagataagattagagaaaaaagaatgaaaaggaacgaacaaaacctctgagaattatggaatgatgtaaaaagactgaacctaggactgattggagtacctgaaagagatgggaagaatggaatcaagttggaaaacacattccaggatatcatccaggagaacttccccaacctagcaagacaggccaacattcaaattcagaaatccagagaaccccagtaagatactccataagaagatcaacccca

SEQ ID NO: 897579 - DNA, 596 bp, Homo sapiens
tctcttccaaatgattgcaacacctctccagcaagggcacagaactgggctgaagctgagttggatgaactgacagaagtaggcttcagaaagtgggcaataatgaactttgctgagctaaagggttgtrttctaacccaatgcaaagaagctaagaaccatgataaaagattatgggagctgttaattagaataagcagtttagagaggaaaataaatgacttgatggagctgaaaaacacagcatgagaacttcatgatgcaaacaccagtatcaatagctgaactgaccaagcggaagaaagaatatcagaccttgaagactatcttgctgaattaaggcatgcagataagattagagaaaaaagaatgaaaaggaacgaacaaaacctctgagaattatggaatgatgtaaaaagactgaacctaggactgattggagtacctgaaagagatgggaagaatggaatcaagttggaaaacacattccaggatatcatccaggagaacttccccaacctagcaagacaggccaacattcaaattcagaaatccagagaaccccagtaagatactccataagaagatcaacccca

SEQ ID NO: 897580 - DNA, 718 bp, Homo sapiens
actgaaataaagacacagggcacttcaaaaagggggagttttgaaggaaggtgaaggttaaaaaaattacctataaggtacaatgtttactttttgggtgagaggaaccctggaagcccaaacctcaccattacacaatatatccatgtaacaacatatatccatgtaacaaacctgacatgtaccccctgaatctataaaaatgagtaaataataataacaataattaagtctttagatagtttaaacaatagacagattcacctgaaagagatatttgtgaactagaagttagatttgaagctattactctgaaaacagcaaaaaacatgttcttttcccattttctcttttatgtagagaaaaaatgaggaagagatattgaggataaaaggttaagggtgactgtaaatccaggtgtaactcccaatagaaaaaaaaatagagaaaatggaatcttgacatatttgaaaaaacagtagatgaagattatttggaaaggacaaaacacttgaatgtacagacatcaaaagcagaatatatttgaaacaaagtaaataaaaatatttccaaaaataaaaacttcrgaaaagcaaatataaagaaaaggtatttcaatgtacccaaaagaaaaaaatgtaaaaaataaagactattaggcaatattctcaacagcaacaacagagaccagaagacataaactacacaagagaaaatg

SEQ ID NO: 897581 - DNA, 642 bp, Homo sapiens
ggtagagttttgcctcttctacagtgggaaataaaagctgttagatttagatttatttataaagactagtaaagtttagaacacaytgatgcaacatgagattggataagtacaaatttcctataaaaacagaagtgctttgggcatttggcattaagtaatgagaaataaatgtcagggtaaacctcaattcttccccagtataactcccattaaaattatatgttcagaggaaacattttattttataaatacatttacccctttcccagacctattctgtaaataattactcactttacctgttggagccttttttttttctttttcttttatttttatttttttgagacggagtctcgctctgtcgcccaggctggagtgcagtggtgtgatcccggctcactgcaagctccgcctcccgcgttcacgccattctcctgcctcagcctccccagcagttgggactacaggcgcctgttggagcttttgaggctcagaatacaacattacattgagaaggcctcaaaagcagcatcagaagcaaagtttatctctgacgttttcctgctctcctgtcactcacctctcattctcccagaggcaagacatagaaactcaaagctctctttcctaaggcag

SEQ ID NO: 897582 - DNA, 642 bp, Homo sapiens
ggtagagttttgcctcttctacagtgggaaataaaagctgttagatttagatttatttataaagactagtaaagtttagaacacattgatgmaacatgagattggataagtacaaatttcctataaaaacagaagtgctttgggcatttggcattaagtaatgagaaataaatgtcagggtaaacctcaattcttccccagtataactcccattaaaattatatgttcagaggaaacattttattttataaatacatttacccctttcccagacctattctgtaaataattactcactttacctgttggagccttttttttttctttttcttttatttttatttttttgagacggagtctcgctctgtcgcccaggctggagtgcagtggtgtgatcccggctcactgcaagctccgcctcccgcgttcacgccattctcctgcctcagcctccccagcagttgggactacaggcgcctgttggagcttttgaggctcagaatacaacattacattgagaaggcctcaaaagcagcatcagaagcaaagtttatctctgacgttttcctgctctcctgtcactcacctctcattctcccagaggcaagacatagaaactcaaagctctctttcctaaggcag

SEQ ID NO: 897583 - DNA, 595 bp, Homo sapiens
tttaaacatattattaaaatgttgagttccagttttcaagctgacatagaaagagcttggaagccatcgccactgtcctcaaaacaagaaaaaagctgagcaaactgaaagtcartctgtcttcttagatccattggagaaacgaggtcatagggcaaactgctgtcctgaaaactcgaaaaacaaacagacagatacaaaaattacagttcactgagaatagaagtcctggagcaaaaacttccaactgaatcctgtattagtaggagtacttcaaactgaaattgacaaattctggatgttcaatatgggctagtttgatagttaaaaactgtgagagaccagtcttagcatctctgccttattcaattttcataagttttacatctaagagccctaccaggttctcactgtgagaagatcagtgaaaaatcacctcatgctctggcagacggaagagaagagtaatcatctagaaatatgcccaaagctctctgtttttcttaaagatggcctgtcctcagtggaaactattttaacgaggtataactgactgtggttttaccaaaccctaacaatctagggaaaggaaaat

SEQ ID NO: 897584 - DNA, 635 bp, Homo sapiens
ctttattaagtgtttacaaattaaatatctgaaggtctgcagtaggcccagctcagttaaatgggccagggtgagatgtgtgacgggacccacagggatgtgttgaatctaggaagcctgggtaaatgacaggacaggacctactcccttgactgctgcactggcttttccagaatgtcaagatgctgtaagagaaattccatagaagcaatttgctgttgttttaaagcttgcttaaaagttgaccacaggagttgaccacaaactcatgacgtggcatttattcatgtcagaacatggacgttcaatgaaagcaccaacttcggcctcccttggttagggctccagaagacagaatcctgctccttcgggtttctccctgcactgtgctttctaagcaaacctgcaatctgacacacaagcatgagcccttcattttacatttgtcctgagagctgaaccagtttaactgctttccttgcctcccttccctgctcagaactatttaaaaggctctaggtttctcygccaggcattcaacacttgccacagtctgtactgggtgtgcctctcacagtgtttttcaacatgagccttcaactctcactaaactcatctcagagcctttacacatg

SEQ ID NO: 897585 - DNA, 642 bp, Homo sapiens
ccttgatcattcatctgtttttcaatattttggacatgctaacttagcatgaaagatcagatagagatatttaaacagtgggaaacagttaaacctttaaatgaacaacagasctgaaccacagattaaatatttcaatgctatttttttgtataatgttccaatatttaatagtttttaaaaagaaacattttcctaaggccgatccattccagatactcaattcccatgtaatctaagattatacacatataaaaatgtaattatacattaaagatactttcatctgcatgcttttacaggacaggaatttcaaggaaataagttcccagtagaagctggccagggacaaaagacaagaaatacacctttcctctcccatcttcatagaaattgaaatacaatgtaaatgttttaaattctgcttgactaggagacagaaggaagaggtcaacatgactaagaccagaaaaggaagtctgttggtaatttggcactggtgacaattggccaaaggcaaatttggcagaggctgaattagagtgaaagtgctattatttggaggtttcttggtttctgaatggatcggattctttgcttcatattctggaccttccaagctgcctcaatcttatgcacaca

SEQ ID NO: 897586 - DNA, 575 bp, Homo sapiens
catactttcaaaaaaaaaaaaggtagttgctgagtatctacaactactctgcctgtcaatctctcctcccttcagcccacaccttcctactttagccaatcagttcagtgtttttacagtatttttgatgcaactcacagtaagacatacattttaaatcataaccagtacacccctccagacacaaacatacgaaagtttcacaaaacattactaaacttcaccatatgtgatgtaccctgataataccattgcttttttttttttttgagacagagtctcgctctgtcgcccaggctggagtgcagtggcacgatctcggctcactgcaacctccgcctcccaggttcaagcaattctcctgcctcagcctcccgagtaggtgggactacaggcgcatgtcaccacgcccagctaagtttttgtatttttagtagagacggggtttcaccgtgttagccaggctggtctcgatctcctgacctcgtgatctgcctgcctcagcctcccaaagtgctgggatcacaggcgtgagccaccacacccacacccrgtcaccattgcgttttttaaaa

SEQ ID NO: 897587 - DNA, 585 bp, Homo sapiens
ctcctttgcctcaacaactctattaagcgttggtgaataacatwacgcaactattcattcaaccaatatgtactaagtgtctattaaatgccagccattgctcaggatgatggggatgcaaaagtgaattaagtataaagacaaaaatccttgccattatggacttctccctgtagtggagagaaaacttgatattatacagtaaaaactttactcattaaagttataacttaaaaataataatttcacttttagatggttttcatggtacatggaaactcatgagtttctcaaatttattccttcatcctaggagaaaaaattattttgcagatgatttaacataatatacctaacttaaagcaaaatcatgcagacatcttttgttaatatccacattcctgacatcttccttgaagtttttcacttctaagggctgcagtgattcaagggactgcgccgaatgcttcttagaggatggccccggggaggaataggattcccagcacaggactcattcttgtgatgttctgccaagtcaaatttacttcctacaaaaccaacaattcacttttatgctggatc

SEQ ID NO: 897588 - DNA, 599 bp, Homo sapiens
caagggtttcagggacaggcaatgttcctttttttggcctgtgtggcggtttcatggctgttcacttttaatcagcttataactttgcatagttgcagtttcaatattacatatatagttttwttgtttgtatgttagatgtgaaaatgtaaaatattatacaaatgtaaaaaattacttttagcaagaatatacacattattatattcacctaacaagtatgtctacgtgagcagacatagcaagaaatttattaaatgattctcaaaaatatgttctctgcttaattttgacattatattggtctataattatatattatttaaaccattattactatgtacccagtagaccaaaaccataaatctgtatatgttagtaacattaaattagaaacaagaatgtccttaaagatatgaatatttcatttacatatttttgggctggacgcattactttaaatatatcctcaaagaatattagtttgataaattaggtggaaaagactattctcagtgcccgtggaaacagtagtgttgataataaatattcctgcttgttaattactaaacaagctgccctgtttattatatagttta

SEQ ID NO: 897589 - DNA, 598 bp, Homo sapiens
aatgttaaactatactccagaccaaatggacctaacacacatayacagaccttccataaacagctgcagaatacacattcttcttaactgcacatgaaacaatgtcaatgtctagaataaatcatatgttaaagcacaaaacaattcataataaatttaagaagattgaagtatcaaggagctcttctgaccatgatggtatcaaaatagaaatgaataacagaaggaacttcagaaaaaatacatggaaattaaataatatgctccctgacaaccaatgggtcaatgaagaaataaagaaagatgtttaaaatctttttagccaaatgaaaacagaagcacaccataccaaaacacatgggatacagaaaaaacagttctaagagggaagtttaaagcaataaatgcttacatcaaaaaagaagaaatattgcataccaacaatctctgttgtgccttaaggaactagaaaaacaagactaaactaagccccaaattagtagaataaataaaataataacgatcagagcagaaataaatgaaaactaacaacaataaaagcatcaaaaaagtcttctttttgaaacgttaaacaaaa

SEQ ID NO: 897590 - DNA, 622 bp, Homo sapiens
acttcagaaaaaatacatggaaattaaataatatgctccctgacaaccaatgggtcaatgaagaaataaagaaagatgtttaaaatctttttagccaaatgaaaacagaagcacaccataccaaaacacatgggatacagaaaaaacagttctaagagggaagtttaaagcaataaatgcttacatcaaaaaagaagaaatattgcataccaacaatctctgttgtgccttaaggaactagaaaaacaagactaaactaagccccaaattagtagaataaataaaataataacgatcagagcagaaataaatgaaaactaacaacaataaaagcatcaaaaaagtcttctttttgaaacgttaaacaaaatcaacaaactattagctagtcttaaaaaaggagagaagactgagataaagaaaatcagaattgaaaaaggagaccttacaatgatcataagaaacaattataaacaattatgcaccaaaaaattggataatctagaagaaattgacaaatttmttgatacgttttatttaccaagattgaattatgaagaaataaaaaatctgaaaagatcatgatcgggtaaagagattgattccacaataaaaaatctct

SEQ ID NO: 897591 - DNA, 620 bp, Homo sapiens
cacctgtctgtttataccgaacagtcaagtactagacagctgactgcaatctggagtgtgtgtgtctgggatggtggtggatttgatgtttgggcttcatgatcacatggagagtcccctgtcccattgaagggactccgaatgtcagtatctgtgacttgttttggtcactgaatgttcaatatcttgagagaagaatccgctactttcctcatgaggaatatatgtctgttgctcagtgcttgggaagctgacaggaagaaggctaaggagaggggtcaaccttattaagtcaatttcctctgtttttattaaggagctttacccccattttttggtgcctggtgtctggagtgtgaacccccacttcctgcatgggtagagtaggacagtcactggcagggtcatagcggggagctggggtgtgactgaccctcacatagacgttccgccattcctccggctctgagcccggcccttgcctgcctscggttcctgggcctcttggagctccacagcttgcttcccacctgcctgtcaacagcctggacttacagattttcctttactgccagtagtgaagtaactgaacttgtgatgtgctgaagttctttcgtgga

SEQ ID NO: 897592 - DNA, 620 bp, Homo sapiens
cacctgtctgtttataccgaacagtcaagtactagacagctgactgcaatctggagtgtgtgtgtctgggatggtggtggatttgatgtttgggcttcatgatcacatggagagtcccctgtcccattgaagggactccgaatgtcagtatctgtgacttgttttggtcactgaatgttcaatatcttgagagaagaatccgctactttcctcatgaggaatatatgtctgttgctcagtgcttgggaagctgacaggaagaaggctaaggagaggggtcaaccttattaagtcaatttcctctgtttttattaaggagctttacccccattttttggtgcctggtgtctggagtgtgaacccccacttcctgcatgggtagagtaggacagtcactggcagggtcatagcggggagctggggtgtgactgaccctcacatagacgttccgccattcctccggctctgagcccggcccttgcctgcctcyggttcctgggcctcttggagctccacagcttgcttcccacctgcctgtcaacagcctggacttacagattttcctttactgccagtagtgaagtaactgaacttgtgatgtgctgaagttctttcgtgga

SEQ ID NO: 897593 - DNA, 627 bp, Homo sapiens
gctggagccatttctaagatttttttcagcatcaaamtgttatacatcaattgcatatttactaacagaatgtagaataggtattatttcttaatacaaacctacctattccttcactccatcaagagaccatcaatctttcttcacaggcactcatgatgcaatttgaaagattctaaatcataacttaagcaaggcaacttaaccaaagacatgttgatcccctctcattattgtgctataggttagcaagcccacccttataaagatgactaaacactgtttatatgttttacttatgcttgctaaaaaatttttgcagccacattacagataaatcttataatgtacaaggtataatgtaaggatacagattaactctttttgatagctatcattttcttacaactgatttcatgccagattatgggaaataaaaatctcataatacaaatacaatttctctttctagcctaagctttaagggagtgtaatatatgcaaaacatataaataaaacttgctgaaataaagccagtcatttatttttcgatctgtggccaagtgaaaaataaaactttcgcctcatagcttctggagtgtgtcctatagatttcaacctgatctg

SEQ ID NO: 897594 - DNA, 627 bp, Homo sapiens
gctggagccatttctaagatttttttcagcatcaaaatkttatacatcaattgcatatttactaacagaatgtagaataggtattatttcttaatacaaacctacctattccttcactccatcaagagaccatcaatctttcttcacaggcactcatgatgcaatttgaaagattctaaatcataacttaagcaaggcaacttaaccaaagacatgttgatcccctctcattattgtgctataggttagcaagcccacccttataaagatgactaaacactgtttatatgttttacttatgcttgctaaaaaatttttgcagccacattacagataaatcttataatgtacaaggtataatgtaaggatacagattaactctttttgatagctatcattttcttacaactgatttcatgccagattatgggaaataaaaatctcataatacaaatacaatttctctttctagcctaagctttaagggagtgtaatatatgcaaaacatataaataaaacttgctgaaataaagccagtcatttatttttcgatctgtggccaagtgaaaaataaaactttcgcctcatagcttctggagtgtgtcctatagatttcaacctgatctg

SEQ ID NO: 897595 - DNA, 519 bp, Homo sapiens
ggaagaataacaactaacaggatatacagtgagagatatagatatgtttatatgtgtatgtgttacaactaaaaamcaaaacaataatgaaacttatgtattattttaaccatcctatatataatattctttagagaataaacatctttttttaaccatataacattagactcatttataaagacaaacaaaaacaaggaatacatttattgaatggaatttaaacatagttataaaattgcaaaaactccctttcctggtaggccaggtgattgtaaatgttcgcaacaggagcattacaagatttttaggcagaacaagtcctcttctatgggagtatccctggccccacccactaaatgccaccaggtttcactgtgacaatcaaaacaccctcacatattttcaaaaacttggggtggggagctggtaggtgtcagagggtattatatcagcccctggctgagcacatgatcgctcccaggtctcagaatggagcaggctgaattcagtaaacat

SEQ ID NO: 897596 - DNA, 639 bp, Homo sapiens
atataaaatacagaaaaatattagaattcctatttgcacaaggacaaacaatgattttatattaccttggcacttattacttatccaaagtcatgttagtaatttaaaatatgttttaaaatcttggatacagattagtacaactgaaaggtgttattatagagatcaatatagagcctagaatatataaagttgaaaaataaaacaataaaatggtatccattccccactatgtgagtgagttcaaatttatccattctcaatgagttcaggaatttcagtctgaaagaacaagtcttcaaggttgggaagacttgaaaacaaatctgctgaaactattactatggtctcaaatgattcacagagagcagaaaagaggctttaagagccgagatacacaagtgcaactgatctgaaagaaatagaaaataaattgtataatgacaaagttgacaacttggtaatgattttgggcaaggctctacactttgggccctgagaagataaaacagagtcatgtatcagattagtgattagtttaggaagctattaaaatttcttccaactctgaaaatatggacttatcartaatagtgactagtttggattctctggataaacatgtccctagaatgtaga

SEQ ID NO: 897597 - DNA, 553 bp, Homo sapiens
actgatctatttgcaagaagaatctatgaggttttttgagaagaggaatcttggatcttgacttagacacttttgtatcktcagtgttatctgtatgtctgttacacagaagtcactcttaaatgtttattgaaatgaaaactgtcatcacataatgccacacctagagttggctctgatggatctgtccttgcaaatagactagatattgcttgggaataaacggggcaattggattccttcattttattattctcaaaactaatcacaatatctgacccaagatagatatgcaacaatctttattgaatgaaaataaaatcattgagtagatgaatggtatattgggatatgggcattttgaggtaagtaatatattcaactgatgaaaagaaaatagcaaccaatagaaactagtaatgactgtgcttatctttacaatgaattttagttacattcatttctccctttttctctaatatctttaagaaaaacagaatattattttagaaatactactatgccaagaaaataagaatatgaatcagtacgc

SEQ ID NO: 897598 - DNA, 609 bp, Homo sapiens
gtcagaaaactatctgaattcacaagtgtcattaaatgttcccggccagaagggtttcttcattggaaagttcccagacagcaccaagcttttcagggctaagggaggtacaggaacatgcrttcagaaactcgcaattctaaacagttgcagcaggacgaggcattctcattttcaaatgggctttttgctcaacaagtattttccactctaagaatgattaattattctcctgattaataatttcaacacaatctacagtcagaagggagcacagctttactgaccaagatgtgtttctaattaacacaaaagcctgtcatttctaacagggggtacaaaagagacacctcattcatttgcaggtaatatatttccagtctcattataggtactgagtcatacattaaacatagtcttggaaaatcagacaggaagtttattctcagatgaaacaaatcatgaataaaaaggaactaaatattaccaaaaatcatattaggtagtaatgctattctaaaaggaaataaaaagcaaaagaaaaaaagaaacttaactctgttatggggtggggggggggtctctctaacctgggctcagatgtatggc

SEQ ID NO: 897599 - DNA, 607 bp, Homo sapiens
ttatttatttatttgagatggagtctstgtcacccaggctggagtatagtggcacgatcttggctcactgcaacctccgactcctgggtttaagcgattctcctgcctcagcctcctgagtagctgggattacaagcgcacaccaccatgtcagcctaatttttgtatttttagtagagactgggtttcaccgtgttggtcaggctggtctcgaactcctgacctcaagcgatccacctgccttggcctttcaaagtgctgggattacaggtgtgagccacagcccccagccatttgttccctctttaataggtgaatgtatgcaactccttctgtttgaataaccaataacggcatttctcagttatggactgaatgtgaggacactgtgagaaggcagccatctaccaggccagaagagggccctcaccagcacctgagcatgctttgaagtcaggtggatgctggcaccctgctcttgggcttcctacctatattagtcctttctcacactgctatgaagaactgccggagtctgggtaatttataaagataagaagtttaattgactcaccgttctgcatggcttggaaggcctcaggaaact

SEQ ID NO: 897600 - DNA, 607 bp, Homo sapiens
ttatttatttatttgagatggagtctctgtcacccaggctggagtatagtggcacgatcttggctcactgcaacctccgactcctgggtttaagcgattctcctgcctcagcctcctgagtagctgggattacargcgcacaccaccatgtcagcctaatttttgtatttttagtagagactgggtttcaccgtgttggtcaggctggtctcgaactcctgacctcaagcgatccacctgccttggcctttcaaagtgctgggattacaggtgtgagccacagcccccagccatttgttccctctttaataggtgaatgtatgcaactccttctgtttgaataaccaataacggcatttctcagttatggactgaatgtgaggacactgtgagaaggcagccatctaccaggccagaagagggccctcaccagcacctgagcatgctttgaagtcaggtggatgctggcaccctgctcttgggcttcctacctatattagtcctttctcacactgctatgaagaactgccggagtctgggtaatttataaagataagaagtttaattgactcaccgttctgcatggcttggaaggcctcaggaaact

SEQ ID NO: 897601 - DNA, 615 bp, Homo sapiens
gctgggatataaagcattagattttaatggataatgtcaaatgaaccatttagtaaaacwtgaaatgcaaaatgactatatacaatttaaaactgcaaatgattaataatctcttctcttttataaaactgccaagtcttttgtgacattagattaaaataattttttttctgcacaattttctttctttccaaaaatgcttcactactatcacatctatttaaaataactaccatcagaattctattcattttattcaatgatcacttttaggacattgcaatttgaaaagctaggataattatgtaacatatttaagtctatagatctatcttggaatgcattggcgctaatacttaacatttgtattattattatttacaaaacacattcagtataaaaatgtcttggaatctgcagcaaggcatgggagggagagatgatgagtcagtcctcgttcagaaacatggtcatggaaagacagccaaaagtctctagcgagacacacaatctccaaaaatctttttgtaaacttcctttctgcctatcttcagctttttctccctaaatacctctgtgcctcaccattgctacttcctgttcaattaacatctt

SEQ ID NO: 897602 - DNA, 615 bp, Homo sapiens
tctcatcttaactttattacatatggacagacactttttttttttttttcaaataaggttaaatttacaggtacctgagggctaaracttcaacattattttcttaggggacacaattcaacctaaaacaggcaaactagaagaagccagtttccgcttttaaaattcctcctggaaatcttcccagctagattggcaagcttactaggtaccctttctattttctttttattgcaggtaccagtactgccaaacttttcttattctgccacaagaatccccttctctccatcttatactcacattttcaaacctttaccaactgtcttctcaaggttcttccaacttctgcctaccactcagtttcaaagtcaatgccacgtttggtgttttgatacaacagtctctctctctccacacatacgtacatgctcagttgtatatatatatttacacacacacaaatacacatacacagacatacatatatatatatatatatatatatatatatatatatatatatatatacatggtaagacttatttttggacatgaagatactaatgatactgcataaaaatcatccttcagtactttggcaaatgtgatcta

SEQ ID NO: 897603 - DNA, 582 bp, Homo sapiens
tagtctcagaccacagtggaaaaaaaagtagaaattaataccaaaaagatctctcaaaatccrcaattacatggaaattaaacaatttgctcctgaatgacttttgggtaaacaagaaaataaaagcagaaataaaaaattttaaaataaatgaaaacacaaacaacaacaacaacaaaaaacaggtgttgcagagaaaaaggaatgcttatacactgttggctggagtgtaaattagctcaattattgtggaaaacagtgtggagattccccaaaaatctaaaaacagaactaccattcaacccagcaatcccattactggctatatgctcaaaggaatatacattgttccatcataaagacacatgcacatgtatgttcattgcagcactattcacaatagcaaagacatggaataaacttaaatgcccatcaatggtagaatggataaagaaaatgtagtacatagacactatggaatcctatgcagccataaaaaagcacaagatcatgtccttttcaaaaacatggatggaactggagaccattatccttagcatactaacacaggaacagaaaacc

SEQ ID NO: 897604 - DNA, 642 bp, Homo sapiens
ttaactggaatagtaacatttaaagacattctggaagtgggaatgggaggaggactagagggtattaattatgctacataagccgtccaaaatataaaggagatttaattcatcagaaacaatgcaactggagattttttaaaaacaaaatattttctttataatgtttaagatgtcttcacaacttaactcctacattttacccatatatttctctaaaagcataacagatctagtacccccaagaactggacaaaagttcagggattagacgtgagaataagagagcaggaggcagaatgaaaaggtagacataatttctttcttcattttagattctagacacaaaggagagaaccaatcttgaaacagtttatattccttggagacgaacaatatgtaaatgaatagcattctactactattaagtttatcggggccaggtacaagttatatatggaaaaagatccaattttattcttagtttagcaagaataagaagctaaaatggggtcatttttagttatttaaatttaaataactttgctaatgctgccctccatttctcacattatgaatattcacagttttgtgcgccatgktgtcaactctagtttcagcaagtatcatttataacttaaa

SEQ ID NO: 897605 - DNA, 621 bp, Homo sapiens
aaatcacattcccccaattccactgcagctaccactctgaactaagctaccttcacctttagacttctaactagttacccttttttagtctrctctttcttttcctccatctacttcagctacagtccccacctcaatgttcctagaatacactaggcatgttcccagtttaggacttttgtacttactattttctctgccttgaacaccatttcctgtgttagccatatggcctattcccttgttctcttcaagtctttacagatgtatagaaaagagtatgaaagattatatatcaatatcttatcattaaagtttatagaatacacacgcatacgtacttaatttggctctcttcagagagtggaatttaaggtgattttttgaagtttctattttaatacataaatagtttcttagtttctcagttctaatgaacgtaacaataataaagttctaccacgcttcaaaaaatgctttcttcaaatggagttaaatagtgccatgacttataaacttgctattcactcttcctcattgatatgattagtctttagtaaatgttatatgtgatatcttcatcgcgctcatcttttcttctccattagtttcgtttgatat

SEQ ID NO: 897606 - DNA, 621 bp, Homo sapiens
aaatcacattcccccaattccactgcagctaccactctgaactaagctaccttcacctttagacttctaactagttacccttttttagtctgctctttcttttcctccatctacttcagctacagtccccacctcaatgttcctagaatacactaggcatgttcccagtttaggacttttgtacttactattttctctgccttgaacaccatttcctgtgttagccatatggcctattcccttgttctcttcaagtctttacagatgtatagaaaagagtatgaaagattatatatcaatatcttatcattaaagtttatagaatacacacgcatacgtacttaatttggctctcttcagagagtggaatttaaggtgattttttgaagtttctattttaatacataaatagtttcttagtttctcagttctaatgaacgtaacaataataaagttctaccacgcttcaaaaaatgctttcttcaaatggagttaaatagtgccatgacttataaacttgctattcactcttcctcattgatatgattagtctttagtaaatgttatatgtgatatcttcatygcgctcatcttttcttctccattagtttcgtttgatat

SEQ ID NO: 897607 - DNA, 546 bp, Homo sapiens
cagtgaaagctctctaattctaggaccatgcaattatttttaattagtacaatataagcttcacaatacctaagtcctcattaacacttgaatattaacctcatatgttctctgtctgtttggattttttttttttagagcttgaatgaataccctgagtaaactacattatttcccttaggaaccattgtctcattatcagcacacagcaaatgaagatggtagagagaatgtggatttaaaaacagatattctgtatgctaatattgtgtcatgatctttccctgcatataatttctgtatgagatgttattcattatagccccctaatgggtttatttacctgtccaagcctcaaggggagggaggaaattaggatttttttaaaaaagacaaagtttcaatttcttgttgaaattacaatagcttgtagttcttttacttgataagyccttcaaaaagtttctgaaagccagagtatatctacatttattatttcatttctactctctcccttccccatacccagcccattttttcttttgt

SEQ ID NO: 897608 - DNA, 653 bp, Homo sapiens
ataatgacattgggtagtctttgtcaactctcctccttgtgaggaggatgtaaaaacacttcagaaacatactggaaatcttcatgagtaggtaggttgtttctcattgtttatcatttaaaatgaaggcacaatgaaaagttttataaatatttgatggaaacttacaattctcattatcaggattatagggttaaaggagttgcatgttattgagactcctaataccaaactgcacctagaatgcctctactaatttatacactctctcacattagtgtctgagtatgctaatctttacataccattgctagcactgaaaaactaccatgaatgttattttcattcgctctctttaactcaaaaatcaaaatcaaatcaaaacaaaacaaagcctttcatatgtttattagccatttgaatttagtcatttgtggattatttttgtgtctcctttgcccttttcacttctggacattagtacattagtgctttcctattcatgtatataaattctatgtatttttagaatactctcccaatgcttgtatttgtcctctkcatgaattttaattatctttatgttgcttttcatgtacagtgctttttaatttttttaatcatccatttctttaatttattttataattttc

SEQ ID NO: 897609 - DNA, 579 bp, Homo sapiens
gagcattttatgtgacaattaaatgctgagcatggttagatgcttttgagaatacactgtaccatcctggtggcttatgagctttaggggagaatgatgcataaatatgaragaatatcaagaactaagagattcatagaagtgctaagtgcaggcccattatggaacatatcagcttacaggccagacactgaaataatgggattatgataggtaagagtgtccagtccaggccaggttattttagaggaatcatgagaagagcccactctgtcctggagcctacatggatggaatttttctgaaacatttcaaataaaagtaaaataagcaatctatcaattgccattaagtaacagaaaatttctttatattattccaaaagtatatcattagagctggaatttagtaggtgacctataatactggtgtttctggtcagctatcctggccaacccccagtctgcttttctaacatgtaacattagcagagaccatcatttatccggatctgtgaagcctcccagaagagactgcaaggtgaacagcagccaaaaatcagtgctgtggaaaaatgtg

SEQ ID NO: 897610 - DNA, 639 bp, Homo sapiens
agtttatcataaccaccagaaaaaatatttctaaagaatcatattttcatagataaaacacttagtgccatagsaagacctgctcatgatgactagacacttcagaggcaaaggaaacaagccttggtgtagccttgtgccctttcagagtgagcctttccaccctcttctgctggaaaaacttccactcaagcttaacatctaggcttaactaaagcttaacttccactcaagcttaactaaagcattacctttcccctgaagacagacaggtggtggctctttcctccgtgtcctcaggatttggactgcttgtagaatatttctgcacccccaacacctagctcagacactagaacacaaaagaaatgtgataagtatgtgaaagaagaaaaaaggtgagatgctgatcactgcaagccttgacaacagtagccatatgccatgacatccatttgtcaacaatttattttcctattattttcttatttaaattcccccccgttaatgagaagcacttcagttaagtgcttaataaacaagcaattactaaatagacattaatggcctgttgtattattgcctgtaacataaagggatagtgagaggtacaaataaaaccccaacattcatacatca

SEQ ID NO: 897611 - DNA, 656 bp, Homo sapiens
tcctattgaatttccttgccatccttgtcaaaaatcagtttaccatatatgtttgggtttattctgtactctcaatctatttsattaatctatatgtctatccttatgccagtaccacagtgtcctaattattttaggtttggagtatgtttcaaaattgggaaatctcagttctccaactttgttatttttttcaagacagttttggatattcaagataactagtgtttcaaaatgaattttagaattgatttctccatctctgcaaaaatcacatttggaattttgatagggattacatactgaatctgtagatcaaattgaggatattccaattttaatagtattatgtctttctgtccatgaaattagtatgcctctccatattattaggttttctttggtttctttcaacatgtttagcagtttgcagtgtacaagtcttacactttttttagttgcatttagtcataactattttattattttgggtgttattttaaaatgatttttttcttaattttaattttagattatttattgctagtatatagaaattggttttcatatatttgtttatcttgcaactttgctgaacttgttttctctctctaatagattttgtgtgtgtgtatgaaggggctatgtgtggatcc

SEQ ID NO: 897612 - DNA, 591 bp, Homo sapiens
atcttgtaaagatgttaatctccaaccacagcgaggggttgcttctgtgattgattttgctttgctacttgacaggttgaagagcttgcagaatctctgtgccacgcttgccaaggttcttgcatccctcatctgtcatagagaaagtggtggagataaaattgtgccagcagcaccttgtcaaacccctgctacaggcatccattgtgagtcatgggataaaggataagagagcagccagaggcttcagcatcatatgtctgagttctgcagaaaggtttggaatccacagactttcactacactgttgccactaagttgcactctgcccccagcacaggaagatctggtccaaaatgtacataaaacagcaaatgggatatagaagttgggttctgcacttgcagacacttcctgtttcgtactatggccctaggccagctcttgttcctatctgcatgttccgctcactcagatccatagtcccatcatgtgattctagttctagtcacctggtcttctcataaatggagctctggrgatgggcactggggtgacactgtctctgaagcccgtgctcttgatcactgt

SEQ ID NO: 897613 - DNA, 605 bp, Homo sapiens
aacatattttaaaattggttataaaatacatactaatcaataggatagactggaagtgttacccaaaaaacaatcttaaaaagtgtagggtaacatattacattcttaacctagtcttggattacaataatctgtagatatgtttcataaagacatcaaaaatgctatcttacaatataaattatgtttagggatacttgcaatgaatgtttcatgaagatgaaaatgtatttctagtgaatgtatcaacttgtttataaaaagtaactttatgttaattaactaaatgattcatcctaactgaggagtaattactgtgtgaagaaaagataatttttatcttgtaactttactgaataattttcaacatcctttttcatactatttgctggagttactagtaacagaaacttatgcaggttgttcttttatcaatacatttcaacttacacatgtcctttggatgagattgaggtgagaaactaaaaacatgaggactagaaagaaaaataatatttaagaacatagaaatttctttaggataataaaccaacrtacgaatgttttctaatatcaacaaagagagtcaaactctgtaagatatt

SEQ ID NO: 897614 - DNA, 547 bp, Homo sapiens
tccagtaagaataaggaaagaggcaagtaatcttatttttgggaccaagcggccacgaggtcataagacctaaaaatgtttacactcccaggcagcacctgctcgttaattatctgggagactggtaaggatttaaaagtaattttttccttaagcccaggaatcatttaaaaaatctgtataacatttttttctcatgtagtcttagccccgaagaatattaagtctatcaattaggttataattcaaatcttatcaagaaataaatgcttatataaatcaagattaaaaaaattttcaaagcagcgttttttaaacagtgacgttttaaaatccccatcaaaatggtaaaattcattgtgatgttgacctctcatgctgtcagccacaggaaggggcaaaacgacttgaggcttgaagccgtgtctttccmgaagctcaggttcaccaaacatggtctccagatggagtctgttcctcagaacctgggctttacttctcgatgggagaaggaagcagtgttaaaacttgtctattctgaactagc

SEQ ID NO: 897615 - DNA, 620 bp, Homo sapiens
aaagggaaggagtctctgggtttcaagatgaaatagaagtcacgagaactctataaatttcaattcaagttcactgaagagagctaggagtcagctactgtttgctacagataatattcagtaaggagctaactgctaatgcactggcctggggaagtgtttaatgtcaaatagaaaccaacactagtaaaatacttccaggaggtaagaattttttttttttttttgagacagggtcttgctctggcccacaggctggagtgcagtggcatgatcttggctcactgcaacctccacttcctgagttcaagcaattctcctgcctcagcctccctagtagctgagattacaggcacacaccacgacacccggctgatttttctatttttagtagagtcgcggtttcaccatgttggccaggctggtcttgaactctcgacctcaggtgatcctccccccttggcctctcaaaatactgggattacaggtgtgagccacggcccctggctgctgctcctttttttgtaatggamctgggagatctttaggaatgagggaaatgatcgtttctttgaataaggcagaatactaaagactagccagccctcaggctcatggtg

SEQ ID NO: 897616 - DNA, 658 bp, Homo sapiens
agaaataggtaactgaaatgttttctaaaacggaagccatatcttaattataccaagaaatattatttaatatgcagataactgattttcctcagactttgttttgccatttttttggaggcgacacrcatgtatagactgacggtttttgttttctttgaagaaatgaacgtgctcatttttgttgtatctttttgctctgtaggagtctctacagaccggacactgttgcacagcctgtgacagaggatgagtttgctttggaatctgcggtagagtactctcttgtgaaattaattttctcactctgaatctcagtttttatattattttcttctaaaacttaacagttgtctacctatcattgttttatgttagtattaaaacttttattagagataaccattttaaagaaatgggaggggttaattttatttttttttttactttggcaaataataaatagttgataaattctttgagaggtgtgatctgaaaaaaaattgctggaaaatacacagtgacagaaaaatgatgtttgggaatgctttcccacaagagaggagatacaaattttggtctaggcttatttgagtgtttttactttgagttgtatatcatatgagtatgactaataatacctctgtttaaatgaatc

SEQ ID NO: 897617 - DNA, 679 bp, Homo sapiens
ccaatgagaccactgatgtagcaattattttactctagcaagagggattgtgaggcaggaaggagggaaaagaagaagttatttatgtaattttggggtttctgctgaggaaacctgagtcaactcacttcagatgcatttagcatgtttacacaaaaaggattttattttggcagctccaggaactactggatgaagcaaagaaagctagaattgggataaaccacattgactaattacttctcttcgttactattaggcataagacatatcttttgttgatttttgttataaaaattagataaacttgaatatcaatacattggcttcattcatccaagtgctatctcatggctaaaatagctatttaatgaatatgatttagaggatagcataatcctcctaatgagacaaaaacaactataatgttgagttcatcaactgactcttaaaatggttcacaggcgtgaaccaccgtgcctggcctaaaaatataaggttttattcagatgtttctacttttacattttgatactctgaagtttccaatttggaatttcaatagtttttagagwtttaaagagatcaattttgacactgtaaaatatttgttttgctttaaaagtcaattcaaattatggccactttggtctcatatattgtgaggctggtttgttat

SEQ ID NO: 897618 - DNA, 605 bp, Homo sapiens
actcatgaatgcttcataacctttctcatctaccactccttccctggtctcgtcctgactgctttctgttgtagtagttgttgctgttgttattactgttagactttttaagtggtttcatcatcaaaaaaataagtgtggaagccagaaccagcttctgccagacttcatgccaagtttaaaaaatgaaaacaatgaataactctaaccacaaataaaaatgcttaaggaatacatgcattattttagtaataaaggcaatcaggtctagataaggttcagtcaaatgagaagcacagatatttgttagtgccaggaggcgttctccctgttgtgttctgacttgagtagtttccagctctcatggaatctaatcacacctgaattaatcatttccacaaatggattattgttttctataaaagtcagcaaagtgaatatataaaaagaagacttatttcaaggaagtaacaagcagaaagtcatgagattcatcacaataaatgttcaagttagaacaggtaagtctaaaaatgcagacrcttaatgggaaatacccaaatcctctcaacaattgattgatggagaagggtaggacagaaaaa

SEQ ID NO: 897619 - DNA, 582 bp, Homo sapiens
tgtgtccatcaacagaggaatggataaacaaaatatggtctatgcatacaatggcatattattcagccttaaaaaggaaggaaattctgatacatgttacaacatagatgaaactggagtgaaataagccagacacaaaaagataaaaactatatgattctacttacatgaagtacctagagtagtaaaattcaaagagatagaagtagaatggtggttgttggggctgggagaggagaaaatggggagttttttttaacaggtatggagttttggattgggaagatgaaaaagttatggaaatagatgatggtgatggttgcacaacaatatcaatgtacttgatgccacttaaaattgttaaagtggtaaattttatgttatgtatatttataccattaaaaaataattttttttttctggagatggagtttggctctgtcacccasgttgcagtgcagtggtgtgatctcggctcactgcaacctctgcctcctgagttcaagcgattctcctgccttaggctcctgagtagctgggactactggcatacaccaccatgcctggctaatttttgaattt

SEQ ID NO: 897620 - DNA, 578 bp, Homo sapiens
tcaaaagaatctgtatcattggaatgctgcccaaagcaatccacagattcaatacaatccctatcaaagtactaatatcatttttcacagaattaataaaaaacaatcctataattcatatggaaccaaaaaaaaaaaaaaaatagagccagaatagccaaagcaattctaagtaaaaggaacaaagctggaggcatcaacattacctaacttcaaattatactacaaggctgcagtaaccaaaacagaatggtactagtataaaaatagatacacagaccaatggaacagaatagagaacctggaaataaagtaacatacctaaagccaactgatttttgacaaagtcaacaaaaacatatactggggaagggacaccctattcaataaatggttctggaaaaactggagagccatatgcagaaaaatgaaatgaccctctctctcaccatatacaaaarttaactcaagatcgattaaagacttaaatataagacccaaaactatttaaatactagaagaaaaccttcaaaaacctcatctggatgttgactttggcaaagaattcatgactaaga

SEQ ID NO: 897621 - DNA, 525 bp, Homo sapiens
attcagcctaatacaggatgtattttctgttaagttggaaaaatgataacaggctacatgtataaaccaagactctcaggcgataccatatgactaaaacatggtaaaacactttcgtgtaagaaatacactaccatgtaaatatataaaatatgtacttaaaatgctacttcctgaccattatcttatgaatatagttattaaaatggagttttattgtttgtgtgtgtgtgtttatactctactaggagagtataaaccaggaatatattctgtggggcatgcctgtaatgagaatgttgttttctgagaattgcctatagctgtgtcataatgacaaacatgataaatgggagagaagcagttgttccttagagagaaagaatgaacagatgaccaatgtgacaagattgtaggttttacatccaccaagatgtatctgggagtctttaaaccattaagaaaaaaaaaaaattaaagtcygatggtgggagagtcaatcctaaaactgatctgcctttcact

SEQ ID NO: 897622 - DNA, 535 bp, Homo sapiens
ggaattatgggagctacaattcaagatgagatttgagtggggacacatcctaaccatatcacccaccctcaatgtgggtgggcaccctccaatttgctgccagtttgactaaaacaaaggaggctgaagaagagggataagcaggttgctgagtcctctatttttctgtcttcccatggcttcctctcctcctgcccttggacatcatactctgggttcttaagctttagtactctggcacttgtaccagtagcctccggggggctcttgagcctctagcctcagactgagggctgcactgtcaacttccctggttttcaggctttgggacttggactgagccatgctgctggtttctctctttcccaatttgaagatggactatcctgggacatagccttgtaactgtgagtcaattctctctaataaaatctcatatatatatacacacatatatacacataaatacacatatatatatacatatatctacacatatatatayacacacacacatacatatatatacatacat

SEQ ID NO: 897623 - DNA, 660 bp, Homo sapiens
cactaaaaaagcaatgaatatgtaagaatcatcagctgtagcgttaacactaaatacaccaaggacaaacatactacaggaatattatgtctgtaatcagtgtggaaaagcctttatttatatttaccactttgctcaacctaaatgaattcaaggtagagagaatccagatgtatttaatgtttatggcacaaacttcagactctaggctgaccatatacaacgtgagagaatgaaactatagatcaaaggaatgtggaggagtcttcatccacagctctgttaaataaatgggagaaatcacatcacgaaaattctgtgcctgtcgtcagtgtgaaaatgcctttgctgataatttatcctctaaacaaatgagtaaaatccacaggcaagcaaccatatgtctgtaattgctgtgcactctcattcagctaagcaccaattttggtgtgtgcaagaaaattcattataaggtaactgataaaaacaggaaatatgtgaaaatattttttattaggtggatgaggcctcttgaacaattccagacattcatagtggagaagttattcaatgaaaactcatgagaaatccttttcttaatacagcagcayttctataatagatcagaattcacatggtgtagaactctcaatgacatga

SEQ ID NO: 897624 - DNA, 647 bp, Homo sapiens
gagtgagccaggaaacaagaaagacaaaacaaacaatayaaggttgcattactgagttggccactatttggagtcaagcacaactagttgctctgtctcacagtgctgtcttcaaaaagtctagtcttggagaaaaaaatggagttaagattcatccattaatgcctatgctctattggtttctcatcgagagttaatactaccaaacttttggttttcaaatgcttgaaaatgtacagtatcttataccttattatcaagagggaagccatgaagtttgaggcaaggagtgaacagtgggggacattatgcaagactggggacaggtgaaccacagaggacctaaagtggcacataggacaagtctaatacaattggtataaacattggaaaagaagagatacaactaccttgtttgcagaatgtgcgattgcctggttagaaatgtaaggcactccagaatttgataagtggttacctctgagaagatagcaactggggggactgaaggaggatttttatattttgttctaaatatatgagtttctttcctataatgaaaaatctcactgtacaattatcattaaatgtgaaaaaattttaatatatattttaaaagtaagaaaaggtacatcttcacaaccttc

SEQ ID NO: 897625 - DNA, 621 bp, Homo sapiens
aacagcaaaaagaccattttaacttgagctaagtgagagagcaaatgatggtaactgaggtcaggacttgatgactatgccaaggactttgggtgttattctaagtgtgacaaacacaattggaggcttttgagcagacagttgattcaatctttcttccatacatatatgtataaggcaccatgctagataaaataagtaagacataaatttttctcatcacttagggaaacaggagagtgtagacagacacattaagcaaggaaatgctatgaaagctgacacttttgtaccgcaatgaaaacatctgactgcaccagatacaggctgcaatcctggaacttgagaaagtgctgattgaagagggagacaggatgacaactgacactgattgcccaataaaaaatgtcagaaggaaaaaaaatagactgaaaatgtccacataaagaggaagaagatgacacgaatctagaagacatcaagagtgtgaacagagacggaagagctcagggtaccatgtcacggaaaccaagcgaaagatagtttgaggtaggaggattgttcaacyactcaagtcatataagcctagaataaaggctgggaagaaccaaaggggcatta

SEQ ID NO: 897626 - DNA, 622 bp, Homo sapiens
tgtgttttcccaaattttttaaaataattttttattttttgattttcgtgggtgcacagtaggtatatatatttatggggtacytgagatgttttgatacagacatgcaatgcataataatgacatcatggagaatggggcatccattccctcaagcatttattttttgtgttataaacaatccagttatgctcttagttattttaaaatgtacaattaagttactgttggctatagtcaccctggtctgctatcaaatagtaggtcttatggtaggtcttattcattcacactattttctttctttatttttatttatttatttatttatttatttatttatttatttatttatttttttgagacagagtcttgctctgtcacccaggctggagtgcagtggcgcaatctcagctcacctcaacctccgcctcctgggttcaagtgattcttctgcctcagcctcttgagtagctgggattacaggtgcccgctaccatgcccagttaatttttgcatttttagtagagatggagtttctccaactattttcttttagtacccaataaccatccccaccaccccctcagcccccactacccttccaagcctttggtaacca

SEQ ID NO: 897627 - DNA, 645 bp, Homo sapiens
acaaaaattagcctggtgtggtggcaggcatctgtaaccccagctactcgagaggcaggagaattacttgaacccgggaggcggaggttgyggtgagttgagatcatgccactgcactccagcctaggtgacagagcaagactctgtctctaaaataaataaataaataaataaataaataaataaaaagtaaataaacatttatttgatgaaagccacaatatggagcattttgtcaatatttgttaattgggcaatatgtgcctcaacttggcctttgcttccagagtttttacacagagggtgaatcagagatgctgtcaggcagctccactgagcaactgcttctctagctcagctctgagcaatgcctgagggctgcaaccaggtgctctggtgcccaggtgcagcgtttacaggaagaaggaggagcagagaaggggatcatgaaccacacacaaaaaagcagctccaggcaagaaacctttgtttctcacttaccagaagatcatggtgcccattattaggactcagaataagcatcagacttggggagtaagattcgagtgtaagcacccttaggaggctaatgccaaggagcatacggagggcccttcgggaggggtcatggacatggctcttaca

SEQ ID NO: 897628 - DNA, 645 bp, Homo sapiens
acaaaaattagcctggtgtggtggcaggcatctgtaaccccagctactcgagaggcaggagaattacttgaacccgggaggcggaggttgcggtgagttgagatcatgccactgcactccagcctaggtgacagagcaagactctgtctctaaaataaataaataaataaataaataaataaataaaaagtaaataaacatttatttgatgaaagccacaatatggagcattttgtcaatatttgttaattgggcaatatgtgcctcaacttggcctttgcttccagagtttttacacagagggtgaatcagagatgctgtcaggcagctccactgagcaactgcttctctagctcagctctgagcaatgcctgagggctgcaaccaggtgctctggtgcccaggtgcagcgtttacaggaagaaggaggagcagagaaggggatcatgaaccacacacaaaaaagcagctccaggcaagaaacctttgtttctcacttaccagaagatcatggtgcccattattrggactcagaataagcatcagacttggggagtaagattcgagtgtaagcacccttaggaggctaatgccaaggagcatacggagggcccttcgggaggggtcatggacatggctcttaca

SEQ ID NO: 897629 - DNA, 528 bp, Homo sapiens
gtgtagttttaatagtattctaagtattgatttctatttttattgtactgccrtccaagagtgtgcttgatatggttttgattttttaaatttattaagatttgctttacagcaaagcatgtggttgagcatagaatatgttgatgtatggatgagaagactgcatattttgttgctgttggatacagtattttgcagatatgtattagggtctgagtggtcaagtgtcaagtttaaacccagaatttgttagttttctgcctcaatgatctgtctaacactgacagtggggtgttaaagtcccccctattattgtatggctgtctaagtcttttcataggtaaagaaaaacttgttttataaatctgggtggtgctatgttgggtgcatatatatttagaatagttaagtcttctggttgaattgaaccctttatcattatgtagtacccttctttgtccttcccaattgttgttcatttaaaatctattttatctgataaaataataacaactcctgctctttttg

SEQ ID NO: 897630 - DNA, 594 bp, Homo sapiens
ttaaaatagtttcttatagttctgtgaagaatgtcacaggtcttttratatgaagagcatttaatctgtaaattgctttgggcagtatggccactttaatgaaattaattcttcctatacatgagcttcttcactgaaatttatttctatgggttttattctttttgatactattgtaagtggaattgttgtcttaaattcctttttagatagtttgttgttagtgtatagaaacacaactgatttttgtatgttgattttgtattatgcaaattgcttgaatttgttttttagttctaagagttttttgtttagtcattagagttttccacatataagatcaggtcttgtgcaaacaagtaattttattttattcctggtttatatgtcttttatttctttttcttgcttcattgttctgataaggtcttccagaaccatgttgaataaaagtggtgatagtgggcatccttgtctaactcctgatcttagagaaaaatattttagtttttcactattgaggatgatgttagctgtgggcttgtcatatatggccattattatgttaaagtaaattccttctagacctggttt

SEQ ID NO: 897631 - DNA, 603 bp, Homo sapiens
ctggctgtaattcccatctatttgttcaagaaaaaggtagaatgtttcttctttcctaagttgtataaatatgaggagcaaaggagtactgctttgagataaataataaagaaatttaaaattgcatatgatcytgtccaaaaaacaaagtttttccaaatgtaattttttaaagtaaggatatggtggcttcttggaaatggaagtggtctcactaaactgcagcagagaggaggcagcttgcttttagatttttagattaaaaaactcacttttcaaaataaagttcaagaaggtcttccggttttaagacggtaaaaatatctgtttcttccttttcttggaaatcatctcaagataacaaagaaaaagaaaattttctttggtaaaactatatctccgtaactctgcactttaatgaatgagacaggacggttcattgctcaggatgatctgacacgggttgtggatatgctgtagacgatacatttgtggctgtaagcctcagacaaagcctgcagagccctgctctccaaagtgggaaacactagctccttggcaaagaaaacccatcaactctcgtttagaataatggaaaagggt

SEQ ID NO: 897632 - DNA, 644 bp, Homo sapiens
cttaaagcaaaagctttcagtctttcaccattgggcatgttcactgtagatttttcatatatggcttttattatgttaagggagtttccttctattcctagtttattgakaattttttttatcatgaaaaggtgttcaattttgtcaaatgctttttctgcatcaattgagatgatcatgtgtttttttcccttcatcctattaatgcaatatattgcattaactgatttttatatattgaataatctttgccatgcaggaataaatcctacttggtcatggtatataatccttttaatatactactggatttgatttgctagtattttattgagaatttctgcatcagtgtttataagggatattggtctacggttttcttgtgtctttgctggctttggtatcaggataatgctggtctcatagaatagataaaaagcgttccctcctcttcaattttttggaaagcttttagagggattgggttagttctttgaacgtttggcagaattcaccagtgaagccatgaagcccagagctcttcttttttgggagatatttgattaatggttaaatgtccttactagttataagtctattcagattttctatttctttttttttgtgggtacatagtaggtgta

SEQ ID NO: 897633 - DNA, 587 bp, Homo sapiens
agaaattatcctctcatcattctggagttcagaattctgaggtcaagacatcagcagggccatgctccctctgaagacacgaagggagcyccttccttgcctctgtccatctcctggtagttgctggcaatccatggtctttggcttgtagatgcatccctctaatctccgccttggtcatcacagtgttctcgcctgtgtgactatatctacatgtcgtcctccctctgtccatctcagcatccaaatttcactcttcttataaggatgccagtcactggattagggaccaccgtcatccagtaggacctcatcttaacttgattaccgctgtaaagaccctatttccaaatcaggtcacattcagaggttttaatggacatgaatttgggggcgaggggacactactcagcccagtgcaaagaccatcagaactgacagaagtccctggaaaaggcccaaataataccccatgtgtgggtgtgggtggggaaggatcttccacaccaccctagggtcacagaggatgtgagatggagagaaactgaccttgatgaaagaagacactaattcaaaaacttcttttt

SEQ ID NO: 897634 - DNA, 610 bp, Homo sapiens
agtgagcaaatacaaagtcctctttcaagtcactaggctgggaagagaaggataagtggagtggtgcctggggtggagtcaaagaagaggcggttagtgagttggttggttgattggttggttggttggttggttggttagttggctggctcagttgtttgttttatgataggagagaattgaacctgcaaagaaacatttgcagtgacaccatcattgaaaatgatgtgggtaagggcttggatgagagtgagcaggaaacaaaagatctggtcaacaggcgagaatagagtatggcttagcggggcttatttactgatgtgctatgcctcattgatacttcaagttctcaagtccaagggcaaggcaaatgtcaaccaatgaagcaaagaccagatgaaaattagaatggtactcttactgttaaaatcagaaaataaatgtaaattttgtcatgggaaaatttgaaaaatttctggaaaacaaattgagtttaaagcttgatttattgtgcacttttcaagaaatagattttctttaattttgaagcacctacaactgagaggtaaacagatgccatcaatrgactaatagcaatatatgttggtgt

SEQ ID NO: 897635 - DNA, 575 bp, Homo sapiens
tttgcaaatttatcctactttcattgcagatgaattttgtggttgtattccktgacatccttgttaatttgttaagatttttttttcacagatgaggtgggaagcagtatctcttttccatgacattgaaaccagaagcttggacaggaattaaaaaatttatttttctattttttatgaagcatctcttgtcattttggcattctttcttgtcaaatcattgtgaggtgggaattcaaaaattacttcaaaataaagatacattgttaaaaattaatatagacaactataattcttaaagaaatatcaaagatggtggaggatttagggcctatttttaattaatttgaaatatatttgaggataaaaataacactaatataatcctttggttatataccaaaggattataccaaatatatacccaaatatatatatttgggtatatatcaaatataacccaaagaataatattagtgttatttttatcctatattaataattgtctatattaatttttaacaacatatctttactttataaatcatgctgctataaagacacatgcgtacata

SEQ ID NO: 897636 - DNA, 642 bp, Homo sapiens
ttttgagatgattctgtggttagtcctctgtagtctaatataggaaaagatattgactgatttttyaatgtttgaataatggaattcctggaagatattccatttagtaatgtgggttatcctttctatatgtatttctatttgctttgctaaaattttgttatataaatgttggtcagtaattacatttctttgtaatatcttttaggatttctgtttgttttattgttgtactgattttgatattggggtaacactagccttgtagaattcgttgggaagtattttctccttttcaattttctggaagggattgtgtggaacagatgttatatcctccttaagtgcttgctagaattcaccagtgaggacatctggtccttaagttttatttattctgggatgttttacatttaatataatttgttattatatatgcaactattcaggttacctatttctttcttcctttattctccttctcctctttttgttagccaaactaaaatccttatttggaattcatgtgaccatcaatttcctttgttctgttccagtagcagtccagagtattatttgccacatctgcttaatctcctccaatctctgccagtttcttagtctttccttgtttcacaggac

SEQ ID NO: 897637 - DNA, 680 bp, Homo sapiens
ttttggtacagggatgtcagccatgaacccttcaagaggtgagagaaagatattactttttatcccctataaaaacaaatgatttatttagtttatattctagttgagtgtgtacagctgctgtctcctggcttccttgacctattgcttgctataagcattagactcaaaccatgattttttttaaagatgaatctgattatcgttgactcatttcttccttcttagtagcttaaaaaggcagggtgggagggtatgtttgagtaatctcgttttaaatcagactgatgaaattatctgctctgtaaagctcgtttcctaacaaggtcattattgtaacaaggaagctctatctaccttccctgaagtttgttaagaattataggtaaaggattccttttccatgaaacatagtttatactgcatacaatctatgcccagacttagcatgcacctctgtgtgataaattagttcctcctttatcttgtgcaccatgagctgcctccactttcaagttttatttgatagacactatttcatattgaaaaatatgtctccagtattgtggtcatgcctccttttcaaactatatatatatatatatatatatatatatatatatatwttttatattcataaaggaacaggggttcactccagttctagacttcaagcagta

SEQ ID NO: 897638 - DNA, 640 bp, Homo sapiens
aaatcatgtagattcattcaagstaaggtgaagggttggaacattattccaaatgtcattaaaagccttgggggatttgggatataagaatgtgatgagatggtcatcacattacatcagaaatggtcaatgtaaattctctataaagaataaactgcagcatgctactcataaaatgaatgtgaaagtgtcctattcacctaattttggggggaagaaattaagaaggattggcattacttctttaaatgttcatcaccagtgaaggcaactggccctggactttcctttgttgggaggttttcaattactcatttaatattcttgctagttatgggtacagtcagattttctatttctttataatttcatcttggaaggttgtgtgtttctaagaagttatttcatctagattatctaattttttgccatataattgttcatagtagccttgtaggattctttttcaattctgtggatgagtggcaatgttttctctttcacttcctattttatttattcgagttttctcttttttacttaatctagctcattacttatcaatttattatatttcaattttatattttgtttctttgattattttctattttttattcttcattttgtttatttctgt

SEQ ID NO: 897639 - DNA, 592 bp, Homo sapiens
cagccactccaagcacctgtgcctggaacccagtgctactgcagctgcttacaggctatgtcagacttgagaaggatactctcaatttgaaaagtggaaatagaaggacacaaaaaacccttgacactgaggacattaacaacttataccgccactgatgctcccacaaacttccacagcataggccactgaggcacctgaagtcattggtgagattgaatgcagctgcaaaagctgcacagagaccacactactgcacctatccagaaatgcttatcatacccttcacaagcagcatactaaaacccaaatgcaaatgaaagtctttctctacaaagaacactcaagaaagttttgaagccataattgctctaccagatgcacagacattgacaaagaaacatgagaaaaataaaaaataaaggaaatgtggtgccatcaaaggaataaaataactccttagtaacagatcccaatgaaaatagaatcaatgaactttcagaaaataaattaaaataattgtcttaatgcaacttygtgaggttcaataacaatacagatggacaagtcaatgaaattcaggaaagaaaaa

SEQ ID NO: 897640 - DNA, 671 bp, Homo sapiens
ctgtctctacaacaaatataaatattagccaggcatggtggcgagtgcctgtaatcccagctactcaggaggctgaggcaggagaatcacttgaatctgggaggctgcggttgcagcgagcygagattgcacctctgcactacagcctgggtgacagagtgagactgcatctcaaaaaagaaaaaagatatactttgggtgtggatagatgtaatatttctgagagaaaagatcttttttgctcactttaaaaattgttcctccaccgcatctcaccactccacagcctaaaatcacctgatattgatccctgttctatccagagtattagtgatgtgtagtatctattcaaaaagtgctccaatactgtctttgaggtttcctcccaggctaccggcacccattctgtagcttttgctgctctcaaatcttgagtttaccagaaattgtcaataaaagtttattatacaagaatcaggaccatattccttcctcaaatggccctttaatgattgttgaataaaatatcaaggagttgctgtggtctactcatatcgtcctaaaaaccaagtttgtacaagtagataacaatcactatgttagaacaacttcttggctgaaagcaagtacaagacaccattgattataagacgcatcccaattttagacat

SEQ ID NO: 897641 - DNA, 610 bp, Homo sapiens
atgtggaggagaggggattgcctggaacgtcattgtagggaaaggtcctttccggctgcagaagctgagtcatctggggacagaaccatcrtctcacttccagccagatgagaacaactgtctttggttgctcacagggcacactgtagctttagacagtgacaaactatttgaccggccaacaccaaaaaagtattttgagcttatggaaagttagtatgagatcatgcactgctaaaatataaaaggggagctcagataatgcctgcagtgacaggcacacaaatggccggtgtcatatatcgcctttatttgcagacaggcttttccttcagcctgatcaggctggtgtctgatgttagcacttgggatcagctttagaaaaagctgaactggggaggagattcattggtcataactattgaaaagaagacaaaaagattcagagtctgtaattttcccacccacattaagttatttggataaaagtccgccgtcataaccagtctgaattcactaaaaataacgtacatctgagaatatttccacaggtttgaccactggttccctaagaaaaagagcagagaatacagtccagtaccagaaagtt

SEQ ID NO: 897642 - DNA, 611 bp, Homo sapiens
ctttaggtatatacgcagtaatgggattgctgggtcacatggtagttctgttctgarctctttgaggaattgccacactgctttctataatggttgaactaattacactcccaccaatagtatgtaagcattcctttttcttcataaccaagccagagtctgttattttttgactttttttttttttttttttttttttgacggaggctcactctgtcccccaggctggagtgcagtggcacaatcttggctcactgcaacctccgcctcccaggttcaagtgattctcctgcctcagcctcccaagtagctgggattataggggcccaccaccacactcggctaatttttttttgttttttgtagagacggggtttcaccatgttggccaggctggtctcgaattcctgacctcgagtgatcctttctccttggcctcccaaagtgctgggattacaggtgtgagccactgtggcaggcctgtttttgactttttaataatagtcattctgactggtgtgagatggtgtctcattgtggttttgatttgcatttcttaaatgatcaatgaagttgagctcttttttcatatgcttcttggctacatgtat

SEQ ID NO: 897643 - DNA, 613 bp, Homo sapiens
tcaaagcccagcctgggtttgagaagggagatgtttatcttggaaccatggcaaaggcaaggccacaaaatttgaagagccaaacaaagaccattgaatgagcttatccaccttcctctaatcttacacatgcttgaaaaagacctctggtgttttcttaagatcacagctaagttttatcaaaagaaaagcacaaacaggagagtgttgcaacaactattaattacgtattaaactggttattttctttataaatacattactttctatttagaacacctggtattatataataaattcattttcttatataagatttttactttgcatacctcaaataattgtttaagaatatgatgtaatgctttatttgaaagacatgaaaatttaatttagttttacataatgagtatttcttccaagaaaggaactttataagattttccataggaaatggcttacgcattttgtatcatcagataccggcctattttaatgttttcctagtgtaataattttgtagtgatcataaaatatgttaccctawatattctttattgtaaaaagattttctttagctctagatccacatagcacctaaagcatctgataa

SEQ ID NO: 897644 - DNA, 634 bp, Homo sapiens
aactatcagatttttcatattttaatacattattagaactgttaattgcactgcatattcttagagaaatatacatatamatagaaagtaaaagtatgtataaatatgcataggaagacaaatgaatttaggtgcctcaatttaggaggaccataaagcaatcagattaaatgcataaagaaaaagggtaaatatacacttttgtatacatatatgtatgtataatataaaagtacacatatgtgtatttcacatatatgtgtatttctggaatactctacaattaaaattttaaaaagaaaataattgcgaaaaacttaccatcatctaaatctttgtaagaaattaacactgtttaattaaaaccttctctacctagccatctaatttaaaatggcaatcatcacacacacacacacacacacacacacacacacacaccccaacacagcaacacacacacacacacactcaacatagtgctctttcttgccatattttttccataactcttaattacatgttaacagcctagaagctctatttattttggttttgttttttcaattaataatcactagattgtgagatcctattgtatcataaacaacctatctagtttttgtgtctggtt

SEQ ID NO: 897645 - DNA, 614 bp, Homo sapiens
ctattatatgtatgcttgatagtatcccactattctctgagatgttcttcatttgtatttattctttctggtctttagattgcatgatttctattgtcctatcttcaagtttgcttattctttcttctgccatatgatatactcttttaagcctctctaatgaagttttatttgttgttatatcttttaaccccagaatctctgtttaaaaatatttttattgatactacctatttgatgagtcattgtcatactttaaaaattcattaaatatggtttcctttaattctttgagcatatttataatagttactttgaagtctgtctggtgattccagaacctgtttagagtcattttatattgactgcttctttttcgccttgagtgtgggtcacactttcctatttctttgcatatctcataatttttggtgaaaactggaaattttagataatatattgtaagaactctaggctctgatttttccwtggggattgtcactgttgcttgttgttagtttaatgacttgtctgggctaagtaaaatctgtctccccgacaatacgtagctactaatgtttctgcttaattctttacttctcatttttattttt

SEQ ID NO: 897646 - DNA, 565 bp, Homo sapiens
tttgcccttatcccaaccattacaacccatgtgaaacctctttctttagagatggtrtggtaacttaaagagccagctgaagataatcattcacgtggtagacatggcctggctatcatattgtttgaagacagagatgctggcttctcaagacccttccaagcttgggtcatttgctgtccatgcgagcctgtccaacctcggggagaatcacacttaccactggtctccacagacaagaggaccctaagtcttcccaaagcagtgccctggacagactgcatagaggatgtgtgaccctgagccagcactagaaagaagaatgtggagagtcctccagagtttgttgtgttggtatttggcttgtctataattaatctgtacagaacattgcttaaaataatcaggccaacgttagagactgaggatacttttacagttctgggacttttaatgacatttattcaaatttgaattacaaataatctagactagaaagttaggggagttcttggaggttatatattaaatgtaactgtaagaaagtccttgactcgcttgttta

SEQ ID NO: 897647 - DNA, 636 bp, Homo sapiens
ttcccccagttctatcaccgtttgttgggaaaaggattttgcagacttctcaccaccattccagaagtccctccccatccttgtattttggtcatctctgactctgccacttttgtgtaaaatcatctccctacctcatccttaggaagcaggtaatggtcaagtaatcttatttatgcagcacagggcaacccaggccccatctggaatatggtgaaataaacatggtgcatcttctagaagtttctattttacttgaagatttggagtgaatgttatgtaggtggtaagtaatttaaaaaaacattattttcaaattaataaatctagatacagagtagaaaacaaaattcacaaaaaatattctttttaaagataaaaccatgtaagatatcagaggaattttacacttactggggccactttggagtaaccccacaggtatcacttcatgctcagaagtatttccattggaaaattacagaaatattatagagattaggcttaaaacagttaataaaagataatataggctttatggtaagaaagctttaggattcattaaacttaaaaagaccattttgtaataatataaatgataacccmagatcagccttagtgactgaaaagaattgt

SEQ ID NO: 897648 - DNA, 556 bp, Homo sapiens
tgtgaaggctcaggaattccagtagtatgatgagtatttgagagttaattaatgagtcttcctctgggagggaagcagaacaagaatgttttcttctaagtttaraagggctgtcctggagatgacggtgcagattttattcagtgcatcctcaggaggctgtgagtagaaatcaaaggaaggtgtatttcatcttcatagaagaaaaggggactgggcacggtggctcatgcctgtcatcccagcactgtgggaggctgaggcgggtggatcacttgaggtcaggagtttgagaccagcctggccaacatggtgaaatcccatcgttactaaaaagacaaaaagccaggtgtggtggtgtgcacctgtaatcccagctactcaggagactgaggcaggagaatcgcttgaacctaggaggtgaggttgcagtgggccgagattgcaccactgcactccagcctgggggaccgagtaagacttcatctcaaaaaaaaaaaaaaagaagaggaagaagaagaaaaaggtttctaatgatcaggactgcctaacattg

SEQ ID NO: 897649 - DNA, 518 bp, Homo sapiens
tgagcggtcagaaggaatttacaaaggaactgagaagaagagccaatgagaaagggaacttcttttttttcacagtgagtgcttgtgaactttaaaggaatgtgtgatgaggagacttttttttwaaataactggaattatatctttcttttctaatggtctagtaggaaaaactgtttcctttaggggagagggcaattgctggagtaatatccttaagtaatatcacaatttatttatagtaacaggagagaatgtcaggtattcaggtgcataggcagatagattggtacatgtggttgtgggagcatgaggaacttctctcttctttctttttaattctcactgacgcaggaagtagactccttgctggcatgactatgaaggcagaagattaaaggtttttttctttttttaatttaaaatttttaatttttgtgagtacatggaagattaaaatttgaagaagacagcttagaaatctgggaaaatagaccatcctggctaacacagtgaaa

SEQ ID NO: 897650 - DNA, 518 bp, Homo sapiens
tgagcggtcagaaggaatttacaaaggaactgagaagaagagccaatgagaaagggaacttcttttttttcacagtgagtgcttgtgaactttaaaggaatgtgtgatgaggagactttttttttaaataactggaattatatctttcttttctaatggtctagtaggaaaaactgtttcctttaggggagagggcaattgctggagtaatatccttaagtaatatcacaatttatttatagtaacaggagagaatgtcaggtattcaggtgcataggcagatagattggtacatgtggttgtgggagcatgaggaacttctctcttctttctttttaattctcactgacgcaggaagtagactccttgctggcatgactatgaaggcagaagattaaaggtttttttcttyttttaatttaaaatttttaatttttgtgagtacatggaagattaaaatttgaagaagacagcttagaaatctgggaaaatagaccatcctggctaacacagtgaaa

SEQ ID NO: 897651 - DNA, 570 bp, Homo sapiens
aatgaacaaaagataatgaggataaaacatttgtagctggttggtcagcaatattatactatagtattattgggaaggttttctaccaagtgccttaaaatacactatgtcacatcctcttggaaaatctctaagattcacttcccttctttccatttatttctcacaatttctctgcctaactttctcttttccctaggttttatttttctccccaacacacacttccaacttgaacttgtcttatgcaagctcccctttgggctagggaagccaatgacccctatactctgcctgaattttaaaaagtttaaaagtaagtaaatcagaaaacatccttttctttcaagcagtaacagtctagtcagaagtatgtttttattgtggtaaaacacacataacatgggatctacttacatacatgtactgcagatctctccccatttctgcctctccccagccctggcaaccaccattatactttctgcttctacacacttgactactttagatacctcacrtaagcagaataatgcaatgttatgtccttctggcttacttcacttagca

SEQ ID NO: 897652 - DNA, 661 bp, Homo sapiens
tgaatatacatctcaataattcatcatgaagaaagtattctcatttaactgtctccaaggtacacatgataatgatttctaatatcatagtctgtttttccctagtgtttggctccatgaataagtgtctactcacatttttgttggtatatactaggaaatgggatttgctgcttcacagtgcaggtttagattcagttttaaaacataataccaaaccatattgcaacattggttgtttaattttacactcctactacagggtaggagagtttccatcactcatatccttgccaaccttcttataagtaacacagggctgagttttattattgtatcactatgacacagtgatattgtattcttttaatttgggacatttcatacctttacattcaatatagttattgatatgatgtaaatctgtaatctcactccttgcttcatatatgattcacctagcttttcctctggttaatgaggatcagaccctatgttttgcttccttgcctttgcctttccatcttctattctagcttcatcaagggccctagggaaaaagcwccctcacatataatttttttaaattcagcaactcagactttattccagatcttctgcaaaacaaaaacaaaaacaaaaacaaaaacaaaaaaaaccc

SEQ ID NO: 897653 - DNA, 611 bp, Homo sapiens
tttttaaaatttatttttatttcaataggtttttagggaacaggtggtatttgattacatgaataagttctttagtggtgacttctgagattctggtgmacctatcactcaagtagtgtacattgtacccaatgtgtattcttttctccctcaccacccttccaccctttcccccgagtgcccaaagtccattgtatcattcttatgcctttgcatcctcatagcttagcgcccacttatgaatgagaacctatgatgtttcattttccattcctgagttactttacttagaataatagtctccaatttcatccaagttgctgtgaattccattattttattcctttttatggctgagtagtattccattatatataaacacacatgtatatacacatatatatacacaccacattttctttatccattcattgactgatgggcattttgtagatcaactagtagtgggattgacgcatcaaatggtagctctacttttagttctttaagaaatctccacactgttttccatagtggttgtactagttcacattttcaccagcagtattaaaaatgttcccttttcaccacatccacaccaacatctattt

SEQ ID NO: 897654 - DNA, 611 bp, Homo sapiens
tttttaaaatttatttttatttcaataggtttttagggaacaggtggtatttgattacatgaataagttctttagtggtgacttctgagattctggtgcacctatcactcaagtagtgtacattgtacccaatgtgtattcttttctccctcaccacccttccaccctttcccccgagtgcccaaagtccattgtatcattcttatgcctttgcatcctcatagcttagcgcccacttatgaatgagaacctatgatgtttcattttccattcctgagttactttacttagaataatagtctccaatttcatccaagttgctgtgaattccattattttattcctttttatggctgagtagtattccattatatataaacacacatgtatatacacatatatatacacaccacattttctttatccattcattgactgatgggcattttgtagatcaactagtagtgggattgacgcatcaaatggtagctctacttttagttctttaagaaatctccacactgttttccatagtggttgtactagttcacatttycaccagcagtattaaaaatgttcccttttcaccacatccacaccaacatctattt

SEQ ID NO: 897655 - DNA, 600 bp, Homo sapiens
ccttttggcagttcttgtactgttggcttggtagtggtgaattctcttaacatttatttgtctggaaaagactgtgtctttcctgcatttatgaagcttagttttgctggacatgaaattcttggctgataataattgtttcctttaagaaggctaaaaataggaccctaatcccttctagctgcagggtttatgctgatgaatctgctgttactttgatagactttcctttatagtttacctgatgcttttgcatcatagcttttaagattatttcattcatctagacttcagataacctgatgaccatttacctaggcaatgatcttcctgtgatgaatttcccaggtgttctttgagcttcttgtatttgaaggtctagatctctagcaaggctgggaaagttttccttaattattccctcaaatatgttttccaagcttgtagatttctcttcttcctcagaaacaccaattattcttaggtttggacatttracgtagtcctaaacttcttggaggctttgttcattttttaaaaaattattttgtctttgtctttgacagattgggttaattagaaagccttgtcttcaagctc

SEQ ID NO: 897656 - DNA, 586 bp, Homo sapiens
tgatggattcaccagcttttctgaaaatcaggctgatagaacaccctatgcacctctgtagacctcagactttccacacatacgttttttgygggcatatctgagtttccagtttctggctcttgttcagacttgaacatatgctatatacagtgaaaagtggttggattctagaaggtgtcgaagtttactagctcagataaagatcggcctgttgcttttttgttgattaccttttcttcccctttaattcccttttatacttgttcctgtaatctaaggaagaacatttcatttttctatagaaggagatgcttatgcagagccaaatgaaccattgccctgttctattttctgatgatatgcatttttagtgacataagaagagaaaatcttattgatttagcattcaataagagtaaaatgataaaatattcaaataaatatttcagtgtttgaaaatggtatagaatctattgtttggaaaaatctttgggcttatctgaaataactttctattttatttctttaaaaacttgacaaacgtttacttcttttgcattacaggtcataggaaatgaaacag

SEQ ID NO: 897657 - DNA, 605 bp, Homo sapiens
catgtcactcctccgcctatttcactcacagtaaaaatttaagttcttctttggcctacaaggcccttcatgttttagaatccttttgtgtccctgaccttgtatgctttctcctttttatgcattgggcacaatctgttttacatctaacagtcatgctcctacttcaaggctgttgcactgcctggaatgctttcccttagcgaatctgcaaatctctccccttcatcttcttcttgttctgcttataaccattttagggaaatacatagactaaatgtattacctactttttagtaaaaaacaatcaaaagctgatatcagaatattcagagcactatatgttagtgttttttatgttatgaactgttttcaaaactcccaagttgtaggttcatttattttcaataaatcatttattccttttcatcaaattccaagataaagaattcataattgttataactttgccacatttagatactttcctgaatactatttgaattttggcgctcrgtgggcacaaaacaggaaagtagtatttcttacttagtaaatatagataaaagtttatttttgccagggtaaattagatgttgtattta

SEQ ID NO: 897658 - DNA, 639 bp, Homo sapiens
aaggctggctggcttcaccacctgctgattgtagagccccagagccttgagtgaacatagagggtagccaggtagtggttacaacagggcatgggggacatccagtgctgtgctggcttcaggtttgacacagtgtagtcatagtggtagtggccacaagggagcttgtgtcaccccttccccaccttcaggcagctcaacacagggacagagactccatttgggggtgaaagtaagggaagagaacaagagtctctgactggtaatccagatagttcttccatatcttatctaagaccaccatgggcaatacttctatgagtctgcaagagccacagtgtaactggacttggggtgtccactagtgtggatatggctgcagtgaccaaaaacttagatcacaacactcaagtccttcaaataccgggaaattcttcctgataaagatgtgtacaaacaagcccagtgtgcaaagactacaataaatacttaacttctcaatgcccagccaccaatgaacatttgcaaacatcaagaccatccaggaaaacaagacytgaccaaaaaaactgaataaaacaccagtgactagtccaggagagacagagatatgtgactgttcagacaaaaaattcaaaa

SEQ ID NO: 897659 - DNA, 639 bp, Homo sapiens
aaggctggctggcttcaccacctgctgattgtagagccccagagccttgagtgaacatagagggtagccaggtagtggttacaacagggcatgggggacatccagtgctgtgctggcttcaggtttgacacagtgtagtcatagtggtagtggccacaagggagcttgtgtcaccccttccccaccttcaggcagctcaacacagggacagagactccatttgggggtgaaagtaagggaagagaacaagagtctctgactggtaatccagatagttcttccatatcttatctaagaccaccatgggcaatacttctatgagtctgcaagagccacagtgtaactggacttggggtgtccactagtgtggatatggctgcagtgaccaaaaacttagatcacaacactcaagtccttcaaataccgggaaattcttcctgataaagatgtgtacaaacaagcccagtgtgcaaagactacaataaatacttaacttctcaatgcccagccaccaatgaacatttgcaaacatcaagaccatccaggaaaacaagacctgaccaaaaaaastgaataaaacaccagtgactagtccaggagagacagagatatgtgactgttcagacaaaaaattcaaaa

SEQ ID NO: 897660 - DNA, 653 bp, Homo sapiens
tgccatttaggaactctacatttacatgctcctctctcaagaaaaaaaatagttgcctttcacttaaaatttctctaaaatttttgtaaaattcctctaaaagaggaatatccaataccttctgtcttaggatgttcttagtatctcaatctaacaatcaggaattttttttaattcctcatgtttaacttaagtacataattaggttgccttaggaacctacaatggctcttaattctttctactcaaagcccctattacagtgtttggtatatagtaggtgttcagcatatatttaatgagagaaaaaaatgaacagagggaggaaaggaagaaagtgagaggaaggaaaaaagaaaagaagggagggaaggagagaacaaataaacactaaaaggaatcaaacatgaatccactactaaggaaattaacaacagagtagcaagaatgttaaatggacataaataactacaatataaagtagaaagtattaaagggccacagacacaatgttggaggaaatycgaagagaggtatgaaatttctagctaggagaaatcagaagcaagtcaacagaggaggtaagacttgaggtgggatttgaagaacaggtagatttcagacaagtgatcagaggggataagtgtcccaag

SEQ ID NO: 897661 - DNA, 633 bp, Homo sapiens
gggcataagtgctattgacagtcctgaaaatgcacttcggtcttattaggcaatctaagaaacttactctcaaaaccattttggcaaaacaccgccaaacagccaaatgatgcacaaccacacagatamctgaatatcaaatattcagaatgatccaccctgagcaaatacatctgatactgtactaagcacctccaggattaatggcttgagtagaggaaacacagagattgaagcactgattaaagctaaaatactctcagtgtttccacccaaagcttgagttccatgttgcagggactaaaaaaagaaaagaaaggcagagtcaatgatttaagcaattatgtacttactgattcttgccatgcatgccatctgtcttgctgacctcacaggcctctacaccggccagtgtgagggtcaaatgagagtctacgtgtgggagtatgcagtgaactgcaaagccatttgaaagtatgagtcacaatccaaacttatttacccagagttccacctagtaactatgacgttagttctgacccatgatagaaatatatgaaggatcccaatctgatttattcataaaatcaatgcacatttaataaagatctgtcatgcccaatgcttttgggg

SEQ ID NO: 897662 - DNA, 633 bp, Homo sapiens
gggcataagtgctattgacagtcctgaaaatgcacttcggtcttattaggcaatctaagaaacttactctcaaaaccattttggcaaaacaccgccaaacagccaaatgatgcacaaccacacagatacctgaatatcaaatattcagaatgatccaccctgagcaaatacatctgatactgtactaagcacctccaggattaatggcttgagtagaggaaacacagagattgaagcactgattaaagctaaaatactctcagtgtttccacccaaagcttgagttccatgttgcagggactaaaaaaagaaaagaaaggcagagtcaatgatttaagcaattatgtacttactgattcttgccatgcatgccatctgtcttgctgacctcacaggcctctacaccggccagtgtgagggtcaaatgagagtctacgtgtgggagtatgcagtgaactgcaaagccatttgaaagtatgagtcacaatccaaacttatttacccasagttccacctagtaactatgacgttagttctgacccatgatagaaatatatgaaggatcccaatctgatttattcataaaatcaatgcacatttaataaagatctgtcatgcccaatgcttttgggg

SEQ ID NO: 897663 - DNA, 563 bp, Homo sapiens
tagataaaaccaaaataaaattaataacaataaaacatactgcattctgtccaccaaaatgcaggaaatgagctggaaaaaaaaccccagtttattcttggccttctatttttaagaacttcaacagaatccctgactcgcaatctgaaagacaaagggaatttttttttgctttgttttgtttttgagagggaatctcactctgtcgcccaggctggagcgcagtggcgcaatctcggctcactgcaacctcctcctcctgggttcaagcgattctcctgcctcagcctctgagtagctgggattacaggtgcatgccaccatgcccagctaagttttgtatttttagtagagatggggtttcaccatgttggccaggctggtctggaactcctgacctcaagtgatctgtctgcctcagcctctcaaagtgttgsgattacaggcatgagccaccattcctggcttgtttttaaaatttgtttctaaaacttaatttaaatttgtaatattttgaaacttgaaacaacacactacaaatctcaagatttcatgtagctaga

SEQ ID NO: 897664 - DNA, 594 bp, Homo sapiens
cagaatgtctagagaatatgcttggagaaaagccatatttttaaaccacactagatatctgatgccaaatgactgatgaaagtagtatctagtagtmatggaaggtgtctttgggacctgcccagtgactgaggagcaagctgtgaatatacagctatccctcaagctcctgactggagtgaccagcagttcactgatgatgaaatatttttacagaaaataccatgtattttcaggtcacctctcctcagtacccaaaaacagacagaacccaatgaagtgaatgaaattcagagatctccatccatcagggcaactagaattctggccactctatttcattgttcaaatattgcaagaaaaccccaatatcgtttctgccccccctttctccacaagagcctttccttctagtaaacatttctccaccaaaaagaaccccaggaaatatcagaagttcgactgggctaaggagagggaaaaaagaaatgtagcagccagaatgcatgttgaattttaactgttggtaagttcttggaccacctgcccaagtgtatgcaagcagtttgcagagaaaaattcttccttcaatta

SEQ ID NO: 897665 - DNA, 649 bp, Homo sapiens
tcccagcaatgtggacattagaaggttacggactgtgtggcattttcacagaaagagcaaagggaaccaatttagaaggtaagaaaattttgctatgccagtggatagtactgatttcctttttgtagtatcaaaagtggaggagttgtaactgcttggggggtgctgcttacatggcatcagcatctttccatttgaaatcagccacaatttgctctccaggtaatgacaaccaagcatccctttactcgactaccacagtgccaggaaacactgtgccaccgaaaatcagagtcttctgaaaaactctatttcacagcaccgcactgtgcctttggttttggaaaacaatataacaaatctactgaaataacaccctctgtcaatgccactgtgtctatgaaatcagctagtccttctgtccttattaagtgagcatgaattttgggctattctccttcaggctaaggttagcagatggctattcagacgcatcctcaactcaaacccatggctccttgttcttattttcttctgtaacagytttgattactttctctttcaccttactccgacctatttggctttttggggggttctgcttccaacttgcttaaaactgcttcaagcattttgtgttttctcattt

SEQ ID NO: 897666 - DNA, 587 bp, Homo sapiens
ataaatcagcaatctattctgcaaattttcttcttgtcccatctgttgtatgtccccgtgtgcctcatatggatgataatccattatttgaacgtcacttttttattttcagtgactctttttggaagctgaagtttatcttccactcggagcttcctaaagtaactatcagaaattacagaaaactgttatctttgatcctgcacccaatgttagaataaaacttcctaatatctgaattcacagatgttctaattcaccttcagcaccaccattgatttcttgggtatggtaatatacaacagacactcagaagaattttattacttgcaagcatcttttacacattagttcttctccgcatatttagggaagcagagaatctgaaaaatcatggtgctcttcatagggcaccatgaaatatttgcttctgttatacagagcaaaaataatttgtcaatagaacgtgtttaatggtatacatatgaaatatcaggycatatgtacaaacactcatgaaaaatatattttatcaagcatggccaactatttacatatttttctgtgaaaatgaagttgatattatt

SEQ ID NO: 897667 - DNA, 583 bp, Homo sapiens
ctgttggagtctcagccatggaaaatgctgtttcaaaaacttcctagtcattttcaactttatgttattacaggtttgactatttttaaaygattctgattctgttcccttcatgacactgggacagaggacaggctgaggggacttctccctggtgttctcctcagcagacattctgcagcttgagcttttccaggccctggggtgcaaccgtaatgacccagttacagtgcctccacctcctccagtgaaattcctgtagcccaaggactcttgagatccctctctggtgagtcaatggctctgtgggatttcctgtgcactttaatggatgtgcagaatattctggtctatttctcccaccccttggtatcctctcttttcttcatgaccctccaggcgctctttgtcttctgagatacactactgctattcctttgaatgctgggatgatctcaaggcactctggtgaaggactaactccatttatttcttctatgttgttggagtggcactattttgttctgctacaaataacacaaatgtgtcctggggctaatcttaccagttattacatattcta

SEQ ID NO: 897668 - DNA, 576 bp, Homo sapiens
aaaccctctagtggagtacctcaatcaagcgaaagctgcgtccttaygactcagggccctacacatgctggtcctttttcctttttgctttcatttcttactactctctctgtggcttcctccattgcagccatccaggtcccattgccttttcttgctcatggtaagcggacacctacctgcaccattttctttgcactttctctgcttttctagtgaaaggctcttttcccaggaattaactgattttacttcctcaggaatttggggccttcattcaatgttaccttctcggtagaatctttctgcccattctagttaaaattgtaaccatctgccctcaatgccattgtctttccctgctttttctctacagtgcttaccactcgcagatgtgctatgcactgttaattattttctgtgttcattgtgtagctctcatctctagaacggaaactacataagaaaagggatttttgcttgcttcttttctctgctctactgcagtgcctgtaatactgcatgatacacatatatatgctcaatatgtatttgtcgagtgtccagagagtaaag

SEQ ID NO: 897669 - DNA, 632 bp, Homo sapiens
ttttttttttctaatcaaacctcaatgctatcttgatgttggacagttctatatcccaggcatctccctccagtgctaagtgggggtgtgagtaaggtaggatgaagagttgatatttgttatattccccaaatacgtaaattccttccctcttgctagtgattattttgagcatcgtcatgtggtctgctgattaatgcgctctactgaacagacttctagcaacattttcttccctcttaaacagtgacccagtacaggcactggactcttcctgcctttggacattgtctgtgaggacatagttttgagacttctgtggccaaccatgagggcaaggacaagagaactgaggagaagccccctttgaatccttagcttctgagctcaccaactctggaaacaacccgcctccagacatcttgccatgtgagataaatcccatttcatttaagtcataagtaattgaatattctatgactgccaaatatattccaattaaatatgacatctaaactatgattttagaatctctggactggtatagaaartggtaggaccacttgatgtgaaattgtccattcagtggcaaaacttgagttttcaccttttatagttaagagcctagtgag

SEQ ID NO: 897670 - DNA, 632 bp, Homo sapiens
ttttttttttctaatcaaacctcaatgctatcttgatgttggacagttctatatcccaggcatctccctccagtgctaagtgggggtgtgagtaaggtaggatgaagagttgatatttgttatattccccaaatacgtaaattccttccctcttgctagtgattattttgagcatcgtcatgtggtctgctgattaatgcgctctactgaacagacttctagcaacattttcttccctcttaaacagtgacccagtacaggcactggactcttcctgcctttggacattgtctgtgaggacatagttttgagacttctgtggccaaccatgagggcaaggacaagagaactgaggagaagccccctttgaatccttagcttctgagctcaccaactctggaaacaacccgcctccagacatcttgccatgtgagataaatcccatttcatttaagtcataagtaattgaatattctatgactgccaaatatattccaattaaatatgacatctaaactatgattttagaatctctggactggtatagaaagtggtaggaccacttgatrtgaaattgtccattcagtggcaaaacttgagttttcaccttttatagttaagagcctagtgag

SEQ ID NO: 897671 - DNA, 613 bp, Homo sapiens
ccagactgtgaccttatttggaaaaagggttcttgcacatacaactagttaggatgaagttgtaccagagtattaaacctgtagtggtcccctaatccaacatgagtgaggtccctactagaagcagaaacttggacatagacacagagttgcatagaagaaagacaatatgaagagacaccgggtgaacatggcaatctgtaagccagggagggaagcctggaacagattcttattttatagccctcagagggaactaactctgtagagaacttgattgtgaacttcttgtctccaaaactggaagacaataattttctgacattttatcaaaccagtttgtgctaatttgttagggcagccctattaaactaataaaatatataaaaatcaatataatttctatctactagcaagaaactatttgaaatttaaattaaatacacagaaccatttaagtagcaccagtaagatataatgcttataaatcyaaatatgcatttagatatatgccagatgtgcatagtgaaaatgacacaagactgataaaagaaataaaaaaagacctgaatcaatagatatttcgtgttcatgtatttgaagacttaagttg

SEQ ID NO: 897672 - DNA, 544 bp, Homo sapiens
gaagcagaaacttggacatagacacagagttgcatagaagaaagacaatatgaagagacaccgggtgaacatggcaatctgtaagccagggagggaagcctggaacagattcttattttatagccctcagagggaactaactctgtagagaacttgattgtgaacttcttgtctccaaaactggaagacaataattttctgacattttatcaaaccagtttgtgctaatttgttagggcagccctattaaactaataaaatatataaaaatcaatataatttctatctactagcaagaaactatttgaaatttaaattaaatacacagaaccatttaagtagcaccagtaagatataatgcttataaatccaaatatgcatttagatatatgccagatgtgcatagtgaaaatgacacaagactgataaaagaaataaaaaaagacctgaatcaatagatatttygtgttcatgtatttgaagacttaagttgccaaattctcctaaactgattctaattttaataatatcccaatcaaatcat

SEQ ID NO: 897673 - DNA, 624 bp, Homo sapiens
caatcatgtcatctgcaaacggagacgatttgacttcctctcttcctatttgaaaacctttcatttctttctcctgcttattgccatggccagaacttccaatactatgttaaataggagtggtgagagaggacatccttgtcttatgccagttttcaaagggaatgattccagcttttgcctattcagtatgataatggctgtgggtttgtcataaatagctcttattcttttgagatacgtccatcaatacctagtttattgagagtttttagcctgaagcggtgttgaattttatcgaaggcctttctgcgtctattgagataatcatgtggtttttttcattggttctgtttatgtgatggattatgtttattgatttgcatatgttgaaccagccttgcatcccagggatgaagccaacttgattgtgttgattaagctttttgatgtgctgctggatttggttcgccagtttttaatggaggattttctcatcgatgttcrtcaacctgacaaaaacaagcaactgggaaaggattccctatttaataaatggtgttgggaaaattggctagccatatgcagaaacctgaaactggaccccttcctaacatcttattc

SEQ ID NO: 897674 - DNA, 642 bp, Homo sapiens
catctgttgaaaacatgagataactaagattacatatttattcagccagtatgattatacttcaggcatttgcatagcattttcacaatttttgttaaatctcaccatcagtactataacttgcttaatatttatctttaaattgattcacatttttacttacatttattttaaaaagaaaaccttctacctgtatcattaattaaaacgaacaccatcaattgtcccatatgaaaataaatattaaaataatgcaattaaaccataaagtgtaaaaaattaattataagcacaattttaaatgattttagtaatttatccaaaatattttatgcctgaaaatttttttctcagtaagaataaaactctttaaggagtgatatttaactttgtctttcttggtttaaaatgaagatgaggctctatgctcacataataattctactacttagttcagaaagtcatgacactgagaaaatgtatccatggtaagaaagggtgacattattagtcagatcgtaatttcagtttttactaagtactgggaactctttgaacagtcatgaaggaggctagargcaacctggtgcctgtcttcattttctccccaggaaaagagatttcaagaaacttaatgaatta

SEQ ID NO: 897675 - DNA, 554 bp, Homo sapiens
ctgaggatgtatagatatagatatatgcatacagtgaaaagcacccataattgcatattttagaaataaaatgttgcactttggagtatttccttaactttttttctatgcatatgtactcaattttagaaaaatgggatcattctccactgtcacctgtttaatgtattgttgataatttatctatatagagattgatataataattttactggctaatttgtattctatagtaaagatgtgtcacactttacattacaaagactttattggtgaatatttggattgcttgtttttcacaatcactaatgatagctattttaacattctaaaataatagctatttaacatgttgtaattgtgctacaacattacaatggctacaaatttactaggcaattggaatttttcagctccattataatcttatgggacaactgtagtgagaatgtgcgtgtgtgtgtgtgtgtgtgtgygcgcgcatatcccattgattttgtttctctagagagcaatgactaacacatattttaaccctgagagtaggtctagaa

SEQ ID NO: 897676 - DNA, 620 bp, Homo sapiens
gaagtttcctatgcagttgacagacaaatagaagccttgggcctggtttataaatctgcataatatgcaggcatcccctgaaaatggacagctatagtactacagtcccttcctgggacatcctaaaggatagtggtgaagggaactcctcccagtgaatataaatttaagcagttcccttgttacacactttacttagaaggagaaatatccagacttatgattatatgcaaattcatggactgtgtttaattgtttggctggatggtcagggcttagaagggatataatagaaaaactgatgacaaagaaaattgggaaacaaattgggggacgaggtaagtagatacatctctttaaatggaaaacaacatgaagatatttgtatcccatgtgaatactcaccaaagggtgatttcagatgaagaggatttcagtaatcaagcagataggattacctattctgtggataccagacagcatgtttccccagctactcctgtcgttgcccggtgtgttcatgaacaaagtggctatggaagcaggaatagagattatgcatgagctcagcaacattgacwgtcacgcaccaatgccaaatttcctatggttacctttga

SEQ ID NO: 897677 - DNA, 620 bp, Homo sapiens
gaagtttcctatgcagttgacagacaaatagaagccttgggcctggtttataaatctgcataatatgcaggcatcccctgaaaatggacagctatagtactacagtcccttcctgggacatcctaaaggatagtggtgaagggaactcctcccagtgaatataaatttaagcagttcccttgttacacactttacttagaaggagaaatatccagacttatgattatatgcaaattcatggactgtgtttaattgtttggctggatggtcagggcttagaagggatataatagaaaaactgatgacaaagaaaattgggaaacaaattgggggacgaggtaagtagatacatctctttaaatggaaaacaacatgaagatatttgtatcccatgtgaatactcaccaaagggtgatttcagatgaagaggatttcagtaatcaagcagataggattacctattctgtggataccagacagcatgtttccccagctactcctgtcgttgcccggtgtgttcatgaacaaagtggctatggaagcaggaatagagattatgcatgagctcagcaacattgacagtcackcaccaatgccaaatttcctatggttacctttga

SEQ ID NO: 897678 - DNA, 614 bp, Homo sapiens
ttaagcatcctttcagctgcactctcttaatccaaatgtataagcaagcacttattccatttaatctgatctttcattgaggatacaatwtctctgaaggtaaggcagacaatttctatctggagaaaaaaaatcttaaagcacattttacattaaaaaccactgaagcataatgggctaagctgcacatggacccaatttcaacatctgccaaaattatcagtaaatttaagacttgttctaattttctcagtcattattttaaactccagtagtaccaggacctgatttaatcagtgagtgaggcatatagcattcaggtcaagtagacacgcatacaaatattttttgattcctttcattctcatcccttgaaggccctttgtcaccaagggtaacagtgcttgggttctaaaattatttctccttccaaaccatgccatcataaagtgctttaagatggtaagaaaacgaatgaaactactgaagaactaaatatggaaacacaaaagtaatttatgtccatcagtagccttatttttttcatctttaccccttgatttttattccatttcttccccagcccctgcatgtaacataatgccttagcatct

SEQ ID NO: 897679 - DNA, 514 bp, Homo sapiens
gggtttatatctgggttctctattcttttccactgatgtattccatcattgttcttctttttgtttttgctttggctaggacttcaagcgctatgttgaataaaaatggcgggtgagcttctttgcctcatttctggttttagaggaaaaagcttttagttttgctgtatagtttggattattgtagctttgtactacattttgaaattagaaagtgtgatatctcctttctttcttctcaagcttattagttttctacttctggaagaaatttcctttgggattttgataggaattgcaatggatagctttggatactttgaacattttaacaatagtaagccttctaatccatgaacacataatgtctttctatttgtgtgtgtatttattaattcytttcatcagtgttttgtagtgttcagtatggaagtgtttcacctccttagttaggtttattcctgagtattttactctttttgctgttactgtaaatgtgactgttttcctaatt

SEQ ID NO: 897680 - DNA, 658 bp, Homo sapiens
aaatatcagtgcccataaataaagttttattggaacagcaatgctcattcatttacgtctttggctgctttcaagctactgatataacagaagagttgrgaagttgggaaagaaacagtatagaccacaaagcctaaaataatttctgactctttacagaaaaagttatatatatataacatagatattatataatatatattgtatagttttatatatatataactgttatgtatatataacagagtttgcaactgttatgtatatataacagcgtttgtaactgttatgtatgtataacagagtttgcaactgttatgtatatataacagagtttgcaactgttatatataacagacacacacacacacacacatatatataaacagagtttacaacttttgaatacatataactatgttatgtatatataacagactgttttacctcaatggtacttgaacatttttctaacattatttcttcttttccatgcttcatccctactccaaatagaaatgtaatgactgagaaggacttttatcttcaaggttcagaaactctgtcagatgagcaatttctctggactactaaacaaatggttgaacaattattacaaaatttcaaggcaaaagaatactcagaaatgtgttccatt

SEQ ID NO: 897681 - DNA, 694 bp, Homo sapiens
atttaattgtgtatatataccacatgttcttcattcacttacccactgatgaacacttaggctgaatccatatcttggctattataaataatgctgcaaggaacatgggagtgcaggtatctcttcaacatacggattttatttcctttggatatgtacccggtagattggtggatcataaaaactgttatctttataatgttcagtcattctatccaagaatggaagattcctttccatttgttcaagtctacttttgtatctatcagaagtgttttaaaatttcgctgattaggtttgtacattgcttcttaagtttattcctaatattttatctttttgttagttctctaaatgggttttctttatcataatgtcctctaattggttattgcttatatataaagtctattgattttcatttgttaattttataatctaccactttattaaattattgttgttggtttgaatgttggttctatagggtttttctatttatgctatcatgtctgcaaacagataggttttttttacccattcttatgcctcgaattgatttattgtgtctaattgcattggctaatactctaatacaatttctagtaacagggattctaacaggcatccttkccttgttataatcttagtgaaaacaccttgaatgtatttccattaaataagatgtcagcgt

SEQ ID NO: 897682 - DNA, 662 bp, Homo sapiens
aaaataaataaataaataaataaataaataaaagtggggatttactaccagttttacagaartaaaaacggttgtattttacaatcctttgtattatgaacaattgtatgccaagacaatgtataaccaagataaaatggacaaatttctaaaaacacaaaacttattaagactaaatcactaaaaattagaaaatctatatagacccatgactagtaaggagatttaatcagtgatcaaaatatctctcaaaagagaaaagccttgaacctgattcactggtgaattctactaaaatatttaaagatgaattaacaccaaccctttttaaacttttccaaaaaaattgaagaggaggtcataccttctaaattattttatgagctcagtattactgcaataccaaagccaaataaggacactagaagggaaggaaactaaagaccaatatatcttgtgcacttttgtattactttgttttcacactgctgataaagacatacctgagactgagtaatttatagggaaaagaggtttaatggaatcacagttccacatggctggggaggcctcacaatcatggcagaaggcagaagtcatgtcttacatggtggcaggtgagagagaatgacagccaagtgcaaggggtttccccttataaa

SEQ ID NO: 897683 - DNA, 614 bp, Homo sapiens
tgtgcaggggatctcctctttttaaaactatcagatctcataagacttattcactatcatgagaacagtatgggaaagatctgccctcatgattcagttacctcccacatggtgcctcccatagggtccctctcataacaggtgggaattcaaggtgagatttgcgtaaggacacatccaaaccacataatgcacctaacaatggagtactcagatatataaagcaaatattcatagatataaaaggatagatagactccagcaagatagtagttgaggattccaaaactccactccttggaatagattgattagacagaaaatcagcaaacattggattcaaactgcattagcctaaatggatctaaacagacatttacagaccatttcatccaacagatgcaggaatacacattcttctcatcagcatatgataaataccccaagagatatcatatgttagacaagataagtctcaasaatttttttaaaaatcgaaatcctctcagatatcttctcagaccacaatagcatacaacaagaaatcagcaacatgtgaaactttgaaaactccgcaaatacatggaaattaagcaacatgctcttgaacaatc

SEQ ID NO: 897684 - DNA, 614 bp, Homo sapiens
tgtgcaggggatctcctctttttaaaactatcagatctcataagacttattcactatcatgagaacagtatgggaaagatctgccctcatgattcagttacctcccacatggtgcctcccatagggtccctctcataacaggtgggaattcaaggtgagatttgcgtaaggacacatccaaaccacataatgcacctaacaatggagtactcagatatataaagcaaatattcatagatataaaaggatagatagactccagcaagatagtagttgaggattccaaaactccactccttggaatagattgattagacagaaaatcagcaaacattggattcaaactgcattagcctaaatggatctaaacagacatttacagaccatttcatccaacagatgcaggaatacacattcttctcatcagcatatgataaataccccaagagatatcatatgttagacaagataagtctcaagaatttttttaaaaatcgaaatcctctcagatatcttctcagaccacaatagcatacaacaagaaatcagcaacatgwgaaactttgaaaactccgcaaatacatggaaattaagcaacatgctcttgaacaatc

SEQ ID NO: 897685 - DNA, 640 bp, Homo sapiens
tttataatttcaaggtcattacattttacataagtggtattatgactaaggtagagtaatctttaataaaagaatattataaggcctgaaacaaatctaataaatatgtacaaagatgggtagcttgaggagagattaaaattgaatgttaaattaattaacaacacaaaagaaagtggagatagaagaacagaaggaaaaaggcagatgaagaaaacaaataccaagattatagacataaatcaaaacacaccaataattgcattgaatataaatggatctgtcatttcaattagaagacagaagttttcagaataggtacatacaaaagaaacaagttctaagtatattctgtccacagtagacactttaagtagaaagacacaaactagatgtaaggtattgaaattatttcatgcagatagaaataattctactattgttcactaatatgaaacaaactagaattcaaagcaaatataagcaaatataaggtattgaaattatttcatggagatrgaaataattctactattgttctattaatatgaaacaaactagacttaaaatataagcagaatgaagaggaatataacgataaaaattaaagggagaaatgcaaaaatctacaaacatagtt

SEQ ID NO: 897686 - DNA, 640 bp, Homo sapiens
tttataatttcaaggtcattacattttacataagtggtattatgactaaggtagagtaatctttaataaaagaatattataaggcctgaaacaaatctaataaatatgtacaaagatgggtagcttgaggagagattaaaattgaatgttaaattaattaacaacacaaaagaaagtggagatagaagaacagaaggaaaaaggcagatgaagaaaacaaataccaagattatagacataaatcaaaacacaccaataattgcattgaatataaatggatctgtcatttcaattagaagacagaagttttcagaataggtacatacaaaagaaacaagttctaagtatattctgtccacagtagacactttaagtagaaagacacaaactagatgtaaggtattgaaattatttcatgcagatagaaataattctactattgttcactaatatgaaacaaactagaattcaaagcaaatataagcaaatataaggtattgaaattatttcatggagatagaaataattctactattgttctattaatatgaaacaaactagacttmaaatataagcagaatgaagaggaatataacgataaaaattaaagggagaaatgcaaaaatctacaaacatagtt

SEQ ID NO: 897687 - DNA, 646 bp, Homo sapiens
cttttcacagttttctgggcttgagaattccaaggttaaggtgctgccatatttagtgtttgctgaaggcctgcttcttggctgacagacagctgtcttttwgctctgtcctcatacagaagaaaggaccaggcagttctctcgggtctctttaatgagggggtaaaattcattcatgagtgatccaccatcatgacctaattacatcacgaaggccccattgtctaacaccatcaaaatggggatttggtttcagcctatgaatttgtgggggtacatgaacattcagcctatagcgtgttttttcctggtttgtagacagatgccttctcactttgtcctcacatggcagaaagagagagagacagagaaagagagaacagtttgctgtctcttcttataaggggacttgcaagaagtttagggataattttgaaaggcagtggaaaagggaaatatttccagtgggaagagcaaaaggtctggggaagatatgtacatggattctcgggagtggggataaagtgcttggatttttgatgttagtcagccattatcctcagccacctctgggatggtacattcagctcatgaatagagtgctcttaataacagggctggagacaacgtgtgggcccacgagcat

SEQ ID NO: 897688 - DNA, 548 bp, Homo sapiens
tcagtcttctgcaccttcttacaatttatgtgaactttgaaattttcttcgtggtgtgtccataaaatatacatctaattgttgaattagagggacaatggatggctcactcaatatccatttcctccttctttttacttgtaaacccttaattctgtccctgtgcccaccctcccaacacagatgtatacacagcaaggatgatgctgtgtccagtttcagggtgattcaataagccaatcatgggagtcccatgactgttgtcagccatgtagttaggagggacccagtgatttcgaggggtcatactggaatattcttccttgttcttgaaagagagacaatgatgtatcagtcttcttttctggacatttttgtgtctgccatcctcagagctgtggttattctttgacactggggaggtagactgaggagaggctctagggtgaacataatagagcaaaaaatagaatctggaggtttgattcttcatgacaccatggagtctctrtgttcatcagcctgggaactgctggacatgtgatctg

SEQ ID NO: 897689 - DNA, 573 bp, Homo sapiens
ccaaaaggggcataagtcatctattttgacttaaaacaatctttaagaaatggaaccccatcacttcccacaagcctaaaataggacctaagtgtatatacctaccattgccatttactggcttagaaatgttgcatatgccatctaacctctttgaattttattttttaactataaaaaaaccttgtctcctatgtttatgtaacgtaactaagtatgagcatgtgcatgaaaatacttgcaaatcataaaaatgcaaataaaattattaagctggatctcttatttaattacttatttatctatttcaaattgagtgcattctgttttgttcaggaccttgatttgtaggacaataggtgagccttgaaaccctatttaagtgtttgaaatcaacatattaatatttaaaagaaatgtattattaatgagctactaggtccctacattaaaaaaaaagaacctttctctatgaaaatatcctctgctgttgtagttatagtaactttcctctttttttccccacctaacgccaacacttcccccyacccctgcacacacaggtgagaaaaa

SEQ ID NO: 897690 - DNA, 631 bp, Homo sapiens
aattaaaaaaaagttgagtattctgttattttaataagatatctagtgcccatattctaattctgccccttatttttaatataattttattgttgatttaaaatgacaacagtttcaattcccagaaagtgaaaggaaacaaaggaataatattataggcttaatttttatcagtgaacttgtaggtgaagaaaagatttggggaaggaaatgaacatattatattgcaaaatagtaaggaacaatcagatgtgttttctagtctctggaaaagcatgtttcaagaaattcaatgaaaagttcatcatgcttgcttagattgttgagaagcaaaaacactgatgaacatttggaagcaatgagaatgtaattctaatcatactcttttaataatgttgcaaaactctccaaacactactctgtgtggatgtctttcagaatatgatgaatactagtagtcttattctgcccttttctctctatcacaatatatacattctatattgcatacmcatattttccaaatattacatataatttcatgtaatttatagacctattaaggcccaaccattttcttggataggggattctttagaagtccagcttaaataaagcccgtatagaaagt

SEQ ID NO: 897691 - DNA, 560 bp, Homo sapiens
gttgttgctgttgaactgggcccagctgatacaacactcaagcatcagaggcaagtcaggtgaaattgctagacttgccatcaatttgtcttggccttctcacctgtggtaatagttaatggrtcatggtgttcttagaaatgagatagatagacatgagaaagagggaaggaagagatgatgggcagaaggctgacatcagctgctaaattggaaaactctggttccatacccaatttccaatgtaatttagttcgcaaatgtagaagtaattgattgaagagtatggtccccttgagaaaaaaaagaacctgcaatgccatctgaagtatatacagtaaatattcccttgattattctccaaggggatctgaaaccatttccagggtaacagtgctggggaatgggacaacacagacatttctaggacatttagatataagttctgagctgacactgatgtcacgggatctgaagcacaattgcagtactctggttaaatgggagtttacagaggccaggtagagtttgacccaagtccatttcacagtgcatccaag

SEQ ID NO: 897692 - DNA, 622 bp, Homo sapiens
tgagctacagatacgtcttcctttaggaaaacaaaaacaaaaaaaaaacttggtttgaaaaagctgatttatagtcttaaaaaatcaatattgtaaaacattaaaattccacgctcctaccccyggtcaggattttttatcctccttctctaacaaatttcgcagtttttttttttgttttttgttttttgtttgttttttttttttgagacagagtctcgctctgtcttgctctgtcgccacgctgcagtgcagtggcgtgagctcggctcactgcaacctctgcgtcccgggttcaagctattctctgcctcagccccccaagtagctgggactaaagggggcgtcactatacccagctaatttttgtatttttaatagagacagggtttcatcttgttcgccaggatgctaccaatctcttgacctcgatttcacatattttaaatatgggttttaaacaaaaactcagatcacttggaaccgtttaaaaatgtagccggccattctatataaatgatataaatatgagaaaatagacacagtaaagtctagatcagtgttgctcagtggaaataatgttaaccataaatgtgagccacatatgtaacttaaatttttc

SEQ ID NO: 897693 - DNA, 601 bp, Homo sapiens
gtttggcttatgcagatgatcagattgtatgacttttttttttctttttaaataagctttcacaggttgaaagattgtatgactattgttgagataagaactacctattgggtcaggctcactacttgggtaacaggatcattaccctgaacatgcttcagcatcacacaatatactcaagaaatttgcacatgtaacccctgaatctaaaataaaagttgagattgtttttctaaaaagaaacactggagggatcagcttttgagataagaacctcagtattccatacgtcacattctgaatattcctgcgatggttttagttacattaagcctctgctaggaaatgtgattgcaaaatgatcgttggcttttattggcttttacagtgaccaggagaaaaaataaggagaaaaatattgtaccaggataaaaataaaaaaaaaatcttctatgatgactccctttcacaactaggattcaaaactatatgaatgagaaaataatttacwatttatttggtgtgaaatcttttagaaatgagtaaaatctatgttaaaagctcagtaatatgaagcttaatgctatgatttatttgtact

SEQ ID NO: 897694 - DNA, 679 bp, Homo sapiens
tgagtggttagtaaataattagagacatctgctccacattgtgtaaacctcagagatcaatggtagaaaccacacagaccactttagtgtcctcttttatcacagagaataatttgatacccttcatacamcattagtcaggaaactgggttcaattttattactattgatctattctacaagctaagacaagctattttaactattttcaccttcttaactaaattttcccactaattacctagaggaaatgaaattaggatgatgtttatatgcaactgagagacaaggtattcagctgccatttagtggttagcgttttcattaaatttataagtaaatatgattttataatttcatgatacttttatataaatattaaccctgtcccttaattccacacaaaatcaccaaaaggctatatgtaagtacccaattttactgaattcctggtggtttattaaagggaaccacactgtaggaagaagattatcagaaactaaatattaccttatccacagtttccaaagagtttacagcttcacaggaggtctcctcacaggcaaatattggatttagaaacattatttctctatcttgaaataatctgtttaatctctgttctctcaaatgaagagactggaaagggatgcatcaagaagcaatagtgtctatgagt

SEQ ID NO: 897695 - DNA, 637 bp, Homo sapiens
aatgaagcatcgttatcttttgagcaaaaaaagaaaaaccacattaagcaacacttcaggattataggactactaaaaataaaccttyggattttcataaactcctcacaaagctcagaatatcaattatgcgaagttagacatggatgactcggagaatgcacaaacagctttgtctcatttgggaaaatattaactgaaaggaaattttggaaatggtggtcaaccaagcagagaccactttgaaaacattctctctattggtagagtccaaaaagacagctttctaaaagtcctggttttcttgaaaatgtttcagactggtcagagattggtaggaaggtctcttagaggtcatgtagctcaggattccaggcagttctgaaatgtgtaaacaaggagaagcccagactctgctaagcagaagcatgagggggaaggtgcagtttgcaatctggctgtaagccccactcacactgggatctctgttcccatagtgctattattactggaggactaatctgggcaacatataatgtcaggtagaatttaataaaacattattcacaaagaaggtatagtaaccattggtctcagatccaagacaacctcatcccaacagatgaggttaagagta

SEQ ID NO: 897696 - DNA, 582 bp, Homo sapiens
aatgacaagcttatgttaaaaatgcacttctatgtgagtgctgtgtaccgaaatatatatggggaaatgatatgatgtctgagatttgctttaaagtactctagagatcagagaaaatgtggtgaagacagataaaataaattggaaaaatacagataattgttgaaagtaggacacagggtacacagaggtccattgtttcttttttcttttcttttctttttctttttctttttttttttttgaggtggagtcttgctctgttatccaggcttccaggctggagtgcagtggcgcaatctcagctcactgcaacctccacctcctatgttcaagcgattatcctgccttagcctcccaagtagctgggactacaggcacccgccaccatgcctgaaaaatttttgtattttagtagagacggagtttcaccgtattggctaggctggtctcttactcckgatcttgtgatctgcccacctcagcctcccaaagtgctggaattacaggcatgagccaccatgcccggcctgttctttctacttgtgcatgtgattaaatgttctataataaaaaagttaa

SEQ ID NO: 897697 - DNA, 604 bp, Homo sapiens
gagcaaccataaatggtgaaaaacaaactcatgaaacataagaattaaaaaagaaaaagaaatacaggtagataaattcacaagattgcgttacatggctgcccaattaaattattgccataatttgtatgtcrtgtaataaccataatgtcttctaacattatagcactctcctagaaccaacataaaaaggtaaaaataaatatacgtattggtactttttagtcagtctctttagaagtattttgaaatcgttgtacacatcatcaataaaaactatatttattatttgtaaacagattatcattttaatcttcaacaccactaggaattagacattaacatctctgttttagagataaagacacagatactgagaaacagtcagcaatttgccccagatccaaaatcatctgatttcaaagttctcttttcatttaatattaattgtgatgaaatacatattatacatttcacctaattaggaataattcaaagatgtaatactaaatatctactcaatatccagccctctactactatgtcctagattggggatataaattaagtatggacataatctaagaatagtttttgtgaggag

SEQ ID NO: 897698 - DNA, 599 bp, Homo sapiens
ctgatccctgcttatagaaattagaaaacagtttgtgcaaatcagcatttacaggcaaagagagctttccatgagaaagaagaaaaagattcgaagcagccaagccaaaaggctctgmgtaggaaacctgggtaggccccagtaataaatacatttattgcgtggacagtaaaaagtactggagagtttaaaataaattcagagttatttaaacttaatttatgaccaggaaaataaaccctctctttcaccattaatgttttctatctgggccatcaaatgtcacacgctactgattttggatgtaaggtcactggaaacaacatatcaaaggtgtcagcacaacaaatcaagtgaaattcccttaaaaataaaaatgtcaggagtaaaataataggcaatagttatttcatgctattaaagacttgtcatatatcaaagggttcacctttttctacctttatgatgtatcactttgaacactgaatatacttctgcttaacagataaagtaaagaaaacaagcatcggaatgctgatgataataagaatgatgacatataataagactatctggaggcgcataaacattagcaggca

SEQ ID NO: 897699 - DNA, 532 bp, Homo sapiens
atttctctgggacccctctctgctgcagagagctcttctctttatttcacctattaaacttccactcctaacctcactctctgtgtgtccacatccttgatttcctagacatgagatgatgaacctcaagtaccaccccagacaacaaggctgcttcatcaggacacaaacctgcctgtaccaggacctctgacctgtgtgcaggtatgtgaatgtatagataaatgcatttttgctttaagaaattggtgtgctacatggcaagatatatgtaagttttggtggaaaataatcatttcaatatataatggtaaggaaatacaacatattataaagagaagatttagtcagatatatgatcatgaagactttgacaaatcagatttcataatttaagagaaaatgtaactatgttacttttatgggatgaataatgttccccccaaacctatatgttgagggtctaacttctagtacctcaaaawctgactgtatttggtgataaatcttttaaaggaaattaagttaaaac

SEQ ID NO: 897700 - DNA, 586 bp, Homo sapiens
acccatttaatgaagcactttgtcckttggtggagagggtgtgttttgctgggggaaacccactcatctgggctcaacaagtactgctgtgctctaaactcatagacattcttttagttctctgaaagagcggtgctcactcttgtctcagataatccacacattgttttctactctctatctgaccaattccaactcatgtttcagatctcagttcagatgtcattttctcagagaattttccgtgacagcttctatctaaattaagtcttttttgttattcttttccatagtactcctttacatttctttgtggcacttatcaagctttagtgttgtgagggcgtgcatgtgtgtatctgtgtgtctgtgtttatttgctcaactctactctttacttcactacttacctcttagtccataggctccatgaaggcaggaatcatttctgtcttgttcagcattatagtgcaagatgtcagtatgatcttttgctcatagtaggcacctaataaatgtttttttggatgaataaataaacagccattttcttctttgtatcagttatcaagcttatgacacttta

SEQ ID NO: 897701 - DNA, 548 bp, Homo sapiens
acagcctacccaaactgaataagtaaacaacatgaacagaaaaataatgagtaaggagattgaatcagtaataaaaagtctcccaaccatgaaaagcccaagaccttatagcttcactgtgaaattctgccaaatattcaaataattaataccaatttttctcaaactcttccaaaaaactgaagaggaagaaaaatgatgaaactcatttaccaaggccagcattaccctaataccaaagcccgataaggacactataagaaattacaagctcatatatctgatgaatgtaggtgcaaaaattctcaacagaatactagtaaaccaaatttaatagcacattaaaaagattattcgtcatgattaagagggacttatcactgggatgcatggatggttcaacatatctaaatcaataagtgtgatgcaccacastaatgaaatgaagaacagaaaacatatcattatctcaacagatgctgaaaggggatatgacaaaatttaacatcctttcattataaaaactctcaacgaactaggtagagaag

SEQ ID NO: 897702 - DNA, 596 bp, Homo sapiens
atggggaaaggatctcctattcagtaaatgctgctgggaaaactggctagtcatatgcagaaaactgaaactgaaccccttccttacaccttacacaaaactaaytcaagatggattaaagacttaaaaggtaaaatccataagcataaaaaccctagaagaaaacctaggcaataccattcaagacacaggcaaagacttcatgacaaaaacgttaaaagcaattgctacaaatccaaagttgacaaatggaacctaattaaaccaaagagcttctgcacagcaaaagaaactatcatcagagtgaacaggcaacctacagaatgggagaacatttttgcaatcaagccatctgacaaaggtctaatatccagaatttacaaggaacttaaacgtatttacaagaaagaaacaaccccatcaaaaagtgtgcaaaggatatgaacagacacttctcaaaagaagacatttatgtagccaacaaacataaaaaaagctcaatgccactgatcatcagagaaatgcaaatcaaaaccacaatgagataccatctcatgccagtcagaaaggcaattattaaaaagtcaggaaacaat

SEQ ID NO: 897703 - DNA, 584 bp, Homo sapiens
tttctgtgagttcaaattttttagaattacatataagtgagattatgcagtrtttgcctttctgtgcctagcttatttcacttaaggtaatgtctttcagatccacccaagttgttgaaaatggcagaattttccttttttttttaggctgaataatattccattgtatatatacactacatttgctttatccattaattcatcagcaggcacttaggttggttacatattttggctattgtgaataatgctgcaggaaacatggaagtgtaagtatctctttgacatactaattttatttcctttggaaggagtatacccagagtgggtttgctggataacataatagttctgtttttcatcttttgagggacctctgtactgttttccatagtggttgtaccagtttgcattctcaccagcacggtacataggttcccttccttcacgtcttcaccaacttttgttatcgcttgtttttttctataatagtcatcctaaaaagtgcaaattgatatctcattgtggttttaatgaacttttcccatatgattagtgatgtttatcatcttttcacaccctgg

SEQ ID NO: 897704 - DNA, 604 bp, Homo sapiens
ctgaactgctgcagactagggctggaatagagtctcagggatacttcaaggttggtccacagtcaattcatagactgacctcagggtccacagccaagaggaggtaggtgtgtatgctaccagggacacagatggtcattgctgggtcttgaggtgggcaggagtaagaatagggtgagatgggccacaggaccacttcaggatccgtagttgggcctgaggttatcattagcaggcctgtacccaggggctctcatcacgaccctgtacaggaaggaatgactctggactggtggtagagcagagctggagctgggtcacaaggctgtttcgggattcacagtggtgtccatggctgaaagatgtgcacagtgtttcttgggggtagtctttggacaaatacatcatatttctttggctaaaaaagtcacaaggcttgaatgaagttaagagataggagatagattttctctcttcttgggaggagctgcagtcacattgatcatagcattgatataggaagaatgtgcaaacacactatcayaaaaattgaaaaaagacattccaataaaagggcaaataagtcaatctataagaaaactca

SEQ ID NO: 897705 - DNA, 641 bp, Homo sapiens
ctggtggaggagataggcaaaggaggggagttaaatgcaataaaaaggagaatgtgtgcatatatgtgtgcccacaagtaataactgctaattttattcaattttgcaatctaggagtacggtagtagccagtagcctcaagcctcttccttgtagccttgtttttttttggccatgtatctctaaaactaatttttaaaaaagttaccctttacacattttagatcttcatattttataataaattgaaaaaaattgaaaataatgagaaagtatgttaagttcagtatggtcttctctcagtatccatcagggattggttccaggacccccttggataccaaaatccacagctgctcaagtcccttatatgaaatggtgttgtatttgcatatgacttttgcatattctcctgtatattttaagtcatctctagaccacatgtaatatctaaaacaatgtaaatactatgtaaatagttgctatactatattttttatttgtattatttttattgcyatattgttattttttatttttaatattttgatccacaattggttgggtccgtggatatgaagtcacagatacagagggctgacagtatattataaatactgacagcaagaggtaaaattttc

SEQ ID NO: 897706 - DNA, 632 bp, Homo sapiens
cctacaataatttattccaccatctttatttgaaaaattatattctactaatttccctattcaatttcatctgctaccttctccaagagggtttccgattaaccagaagaaatttctgccacctgaacatttttgattacaacacttgtaacattctatactatcgtcttctctcctaatacactatgaagcccctaagagcagaaaccatgtctcaattacagattgagattctttctcacaaatgaggacagtgaaacagagaaaaatagttgattaattagaaggcagcacaataacttagtaacagaattgaaaccaaatcttatatctcctgactcttggtagcatatagttctgcagagaatttaaaataatagatgcctaaaaatatttgatgaatatattatcaaacaaataatagaattaaactgatttttaaataataaagataatataaattttcaagatataatcttctaagaaaaaattagatctaatgtaccatttatattactttgagattaacattaagataaataatttttattcacatttattgctgagtgaaaaacctgggttttaagaatttcccatacatttctaacttmatagggtcagatgcgcaacta

SEQ ID NO: 897707 - DNA, 571 bp, Homo sapiens
gtcacatccttgcaatgtgtgcttatacttgcttttaagtctaagtccctatagaaatagtccttcctctcaaaaaaattttcaaaaaagacaaaaggtcataatatcatccatcttcttttaataccagagaatttaaaaaacaaagaaataaaaaacaactcagtctacttaatttttattttctagatagtggaaatgttccccaaaaatctaattaattttgactttcttcctctgcaatcatttatttgtcaaatatttactaattatatacctgcgctattcactctagtagactcaaaatctagtctaaacaagagtaaagatagtaaaaagatattattaaatgattattacaaaatgaattttgtgaaggattttgctataatttctggtgattctgcactaaatgcccatggcaaatatgaatgataatrgcctttttttcagtaggcacagccttgtttgtacaaaacctccaagttcacatatattgcaaattttgctaacttcaattgagtattttctacagattttttttttaactttccaagggaaaaaaaaatcc

SEQ ID NO: 897708 - DNA, 599 bp, Homo sapiens
tagactttcctcaacttactaaattataatgttctgaatgtatatagatttttaaaaataattttcccatcgctcttgttttactcttatagaaatgaatcagaactsgggaataaaattaaggactggctttgctcagatgtagaaataaatgcaccacaagaatttaaactattttgttatttaacattttttccttgactaaagttgtttttgtgttttgtttaagcaaatatctgaagaaccaacttttgtcgaaacttgaattatttgatcagacgagaccactttcactggtagaagcctatacgtgccccatatcatccccaaatgaaaagatccaccaactaaaacagacaaaagctgtcattttgagacaagttctcttgtttctgagtttagagacatctaaaaattacacttaaatgtgagaaactaactttaattaggtcagggccccagtataggtgttaggcctggaacaatgcaatgttacctgaaacctgtattattccacacagggaagtaatgaatagaaaaacaaattccaaaatataagggtttataagagggaggaggtggtaattaactgggttgcc

SEQ ID NO: 897709 - DNA, 606 bp, Homo sapiens
tgggaaaaatgtataaaactgaaactatgcagaaattataggaaatgattggatttccttatcttcacaaatatgtgggattacatcggtattaacatgagtagaatttattgtagcacttgcatataattaatgtagaacttacacatgcagcatgatgtcccttgaaatttcagtgtcctgtcaaacctacaaaatgattgaattgaatttataatttaaaaaataacatagtggtacaaagtgtagagaatcttctctctagagagaaaatgagaactcagtgattcgaaaccgaaaagcagaacagttaaaaggaataccaatatgaaggagagagttgcttataaagctttcctcaatcactcaaatgggagaaggggttccatgagctgattgttgttcacttgtttacagagtttaattaaaagaaaaaagagcagaataataaaatagaacataatgataaaagaagtgtaaaaggggtataaataaatatggcaattcattgtcataatgcagaaatgcataggaaaacccacttcagatatgaaaaacatcatccaagtgttgacaggtatgrctatttgaaatggccaataggta

SEQ ID NO: 897710 - DNA, 642 bp, Homo sapiens
aaaatttgtatgtattaaggcttaagtattcatctagttctatgacttttggctcaattattactgtcatggtaatgtctggacatagattgtgaaatcaagggttagggttggagcaaatattaagatgtctcttgttacagtatctcttaatgagaaaaatgttggggctcatgatatcctcaaactttacgagaatcaaatttctctaaaacttcctctccttttacatttcctttttcccctataatagtgaatgtttgatagtttcattacattcactgaggatttcccttccttgtccatataagaagtgttaccatccaaagacagcatattccagatgttttcctgggtttgaaacaggactgcatctcttgtctctttatctgagaagaggagcaaccctgttttaggagccttttaccaagactgcagggggtagtttgtcagattcctgttcttggaatgtgaggcctagacaaaaaaatataaatttgaagcagatttyttcagagatattatctcaaggaatgaatttatccattaattccacaaatacatatctattaaatgctaggcattgtgctaagtgcagtgtatacagtagttaacactatagacatgctcactgacagatat

SEQ ID NO: 897711 - DNA, 604 bp, Homo sapiens
aaccttaaatgtctagttggtgttctatagtattaggactgagctggaactcaaacctcaagacacagtcattcctactcttccctcccctttccaaaggcagargaacctcatcccatagccaccaccaccccaagccatgaggagtactgccagactaccaccaatgttttcttatggcccaaggtcttttaagtcagctttttgggaatcctttctggcctggtactcaccctttacagcagtgtgctgccctctggcccagggcaggtccagaaatgccatccaagagtcaagtcctaaaattgtggacccaggagcccactaagtgctctacacccccgtggctgagctggtacctaacttgcaagacaaagtacctttacatttccctttgcttttctcaagcaggagttttgcaccatagccagcatagctggtaatgtgctgagtatcaacttcagccagcaagtctcagaggctcaaccaaggcccttgatgcaatacctagttattgctgctgttattcaggacccaagtgctctttagttagcaggtgatgaatgctgccaggactgggttctttccttcaaggcaacaggtt

SEQ ID NO: 897712 - DNA, 604 bp, Homo sapiens
aaccttaaatgtctagttggtgttctatagtattaggactgagctggaactcaaacctcaagacacagtcattcctactcttccctcccctttccaaaggcagaagaacctcatcccatagccaccaccaccccaagccatgaggagtactgccagactaccaccaatgttttcttatggcccaaggtcttttaagtcagctttttgggaatcctttctggcctggtactcaccctttacagcagtgtgctgccctctggcccagggcaggtccagaaatgccatccaagagtcaagtcctaaaattgtggacccaggagcccactaagtgctctacacccccgtggctgagctggtacctaacttgcaagacaaagtacctttacatttccctttgcttttctcaagcaggagttttgcaccatagccagcatagctggtaatgtgctgagtatcaacttcagccagcaagtctcagaggctcaaccaaggcccttgatgcaatacctrgttattgctgctgttattcaggacccaagtgctctttagttagcaggtgatgaatgctgccaggactgggttctttccttcaaggcaacaggtt

SEQ ID NO: 897713 - DNA, 668 bp, Homo sapiens
ctaagaaatatgggattatgtaaagagaccaaacctatgaagcactggcatccctaaaacagagggagagaaagcaagcaacttagaaaacatatttgaggttattgtccatgaaaatttccccaaccttgttggagaggccaacattcaaattcaggaaatgcagagaacctgtgcacaatactgtataagacaaccatacccaaaacacatggtaaacaggtttttcaaggttgaaataaaagcaaaaatgttaaaggcaactacagagaaggaccaagtcaactacaaagagaactccattaggctaacagaggaaatctcagcagaaaccctacaagcccaaagggattagggtactaaactcggcatttttaaagaaaagatatttcaaccaaaaatatcataaccatccaaactaagcttcataagcaaggagaaagaagaaccttttcagacaagcaaatactaagggaatctgttaccacaagacctgttttaaaagaggtcattaagggaatgctaaatatggaaagaaaagactgttaatggcacccacaaaaacacatttaagtacacagaccattgacactataaagcaaatacacaatsaagcctgcacaataatcagctaaaaacataatgactggatcaaatatgcacatatc

SEQ ID NO: 897714 - DNA, 553 bp, Homo sapiens
ttggcataatgatattagggaatgccttagtgtttaacaattatttaatccraagtatctgttaatattttacaatcagttttaagtgaaactaaacatgaatttaagtttgctgcatgcatccatgtgttaactaatgcagggaagcagaagaagccacataattccatgttataaaatattgctagtaaaaaattatatttaagtaaaataatttggtattttaaaatataagaagttttgagcatacttaactttgcattggcatcatttcttgataaatgtcattaaaataattttcttgaagttccgtaaggggtatacagcacccaggaactcacagcatttgtgttttgtaccattaaatcagcaaaaagagaataaataccatcatcctctgtccaaaaaattcttattgactcagcttctcaattttattaataaaatgttaactgaattttcctatttccaaagaactcaagctagccactgattctattattagagtacatgattgactatatattgtccaccttctgagttagagcctata

SEQ ID NO: 897715 - DNA, 439 bp, Homo sapiens
caggataaccttgtaacttgctttggccaatagaatgaggaggaagtgatcatgtaccagctctgagcctgagtttcaagaggcctatgacaatctgtccttttgaaaccctgccattgctgtaagaacaaacctacactggctcactggaggttggaagaccttgtgaaggagagctgagtcatcctggccagatggcagccgacttgccagcctacctcaattatgctagcccaaccaaaaatattcaaacccagtccagcttagcagttgtgctcacctaacctataggcttatagggcaaaatcaatgtttwctgtttatattccactgagatgtaatggctatttctgacattgtttattgtgacattatataattgacagtatatgactgtgacaatatataattgatgcgataagccaatacatttaccctt

SEQ ID NO: 897716 - DNA, 549 bp, Homo sapiens
agattgtgccattgcactccagcttggacaacaagagtgaaactccatctcaaaaaaaaaaaaaaaaaaaaaaagagtacctaaaccacacatacatacacacacaaaaaatcagaagggaaacagttggtttattatacctaactggtgtagaacaatggaaagactaatacaatttaaaaagcaatgagtggaaccaacccaatctatgcagagaaacactgtcacaggagtcatcttttattttaaaggacaaaacacatgattcaatttccttggaacacagtgttttactctgaaaggcttccagattcttcagttatttattgttgtccaaagtattaagagttgtccaaaacatttccttttattagcaggtctagattgagagagatttacctcggcagtaccatagygtggataatattcagttaggtttgttcagaggaacttccccatcattctgctatagtgaaatatatgaaaatcaatccatgccctcttaattatatattttactctaggtgctggtgcctgatcttatgtagg

SEQ ID NO: 897717 - DNA, 520 bp, Homo sapiens
ttactcccctaatgactttgtgatgctgcacacatttccgatctttttctctctctgtggttttttaaattttcttgataacattagaatgtttaggctcttgccataagtaaaaatgttttctrtggatgtgtgtatttgcatatttatcacagtcaaaataatcagtctccaaaaatgcaaaagattgggtaggattatgtaacacattcttaaaatattaaaacctgcacacattaaagcatcaagttaaatagttgttaacctgtctcactaataatcgcctgcttagatccagtctgtgagaggaaaaggaagcaataaatttgaccttcacttaccgcatgttttaattgcacagtactcccagcgggtgtgagggtcaagagtatagcaccatggcctcggctggccatcgggattgcggcaataattatcatcaaagcccttgtcgggatatctgcaaaccacaccaagaaaagtgtcacgtaaatctgcctggaaacaccacccacccctc

SEQ ID NO: 897718 - DNA, 643 bp, Homo sapiens
cttttcaagctttgggaattctcagattcttctaatttttcttaaagtcaagcagttcaggtgaaaccaagtccatgtattcaaggaaacaggtgaacatataaacgatgtaacagtttatatgtaggartgccctttggctctgtctattgctgtcagtacattatttacctgctccagcaagttctcctctaaaacaaaacaaaacaaaacaaaacaaaacaagctaactactgccctagatagatcacaaaaactcacagagtaatggtttctgttcatcggttcaatatttgttctaagtacagttctggactgaataatagtagaatactacaaaaactgtatatgaattagaaaacacagaggattaatttaacagctttctcatcatactaaccaaccaaactttaaaaatgtgtttcatttttctccgtcataaaacaggagtgatatgagtatacagactaaaagagttattttgaaagtatctgaatctatttttaattagtgtttgttttattccattaaagacagtctcagaaaaatccatacaggtgattacttcaacaaaactgaatgtttaaaatataaatagtctcacaaattaacatatataaataaaagtttgtcaaataaatta

SEQ ID NO: 897719 - DNA, 702 bp, Homo sapiens
tctcaccaagacttgatattgtgatactgactttytgattatagccatctcagtaggtgtgagtggtatctcaggtggttttgatttgcatttatctaaggattaaggatgttgagcagttttttgtttgcttattagccatgcatatcttctttgaagaaatgtgtattcagattctttggccattttgtaattgggttatttctctttttattcagctgcaagagttctctcattaagatctgacaggttaatacaacaccaatgcaatgataaatgcaaaaaacagggactctgaaattgcgtggttgtactcagttataaggtggtcatccatgagatccagaatcaaatttgatgaaatggttaagattataatgttttataatttgtttatttgaaaatatacattttaaatgtttgctagagagctctaatatcctcaagaatacctacaatgtaaacactgttctatgcatagactaaatccttagcaatagacagaaggaactgagtgctctttgagtgagggaatgggcttgaccagtgtttgaagatttaaaaatgaatatgaagacatgttgtgacactagggtatgattatatttttatatttaagtagaatctgattatcatcagaaaaactctaattttaaaatccatagctggcaatatccatgaattcagcccaggtcatcaaat

SEQ ID NO: 897720 - DNA, 358 bp, Homo sapiens
ttctattatgaattcatatttcaataagtaacacatattatctagctatccatattgcaaacttcttaaaggcaaggacaatggcttatatttcttttcattctgtgagagacgtagcttgcatttaataaacatttattatatatctggataattataaatatgaatatagatattagtgtcactatactatggcactcagttttaaaaagaaaccttcaacacactagcttcaaccaaagtccacaccagacaagagctgttcagtaattagaaagacactacaattctaaaacgatgtgcactkactactacatagctgcagaaaatgagttgctacttttcaaaatgaacggga

SEQ ID NO: 897721 - DNA, 624 bp, Homo sapiens
ataaatccaaaattgggaattcatattctgcaaaatccaaacatccccagaaaagracaaatttgtttggtgggggtgggtctaatccacatatggcttgcacacgctctggggatatctgttgggattgaaccgtcccccagtgattgaggatgcagccaagggggaagtcgggtgagattgaaactgagtttcttgtcttctgtctgtagagaacaaggaaaacttgaaatttagagcgttctggcctagggccacacactggggcgtcccccattgaagggcctatgctggggttgagggccaagagggcatcccctgcttgggcctcttcatgacatgccacatgtctctggccttagatgggcatcagcaccacttgaagaaggattccgccatatttggtgacctatgattaagtttccctttagtccccaggtgctgccctcagcttttggcatctctgtagctggccaaaatagttttcttccccaaatggtttccttaactattgtggtaactgtagtttgaagggcaaggaattgcagactccccagcttgaatttgttaaagattggcctcttgataagggaagagaatgccctctgaccagataaactacat

SEQ ID NO: 897722 - DNA, 624 bp, Homo sapiens
ataaatccaaaattgggaattcatattctgcaaaatccaaacatccccagaaaaggacaaatttgtttggtgggggtgggtctaatccacatatggcttgcacacgctctggggatatctgttgggattgaaccgtcccccagtgattgaggatgcagccaagggggaagtcgggtgagattgaaactgagtttcttgtcttctgtctgtagagaacaaggaaaacttgaaatttagagcgttctggcctagggccacacactggggcgtcccccattgaagggcctatgctggggttgagggccaagagggcatcccctgcttgggcctcttcatgacatgccacatgtctctggccttagatgggcatcagcaccacttgaagaaggattccgccatatttggtgacctatgattaagtttccctttagtccccaggtgctgccctcagcttttggcatctctgtagctggccaaaatagttttcttccccaaatggtttccttaactattgtggtaactgtagtttgaagggcaaggaattgcagactcccyagcttgaatttgttaaagattggcctcttgataagggaagagaatgccctctgaccagataaactacat

SEQ ID NO: 897723 - DNA, 623 bp, Homo sapiens
cagatgaggaaacctgattagaaaggcagcaacccaaggccagatgcaatggctcacgcctgtattcccagcactttgggaggctgaagcaggaggatcacctgaggtcaggagtttgagacgagcctggscaacatagtgagataccaagactccgtctctccaaaatatttttttaaaactagctaggcatggacaacagagcaagatcttgtctttaaaaaaataaaaaataaataaaaaaaaaacaaacaaaaaacagaaaggctgcaaccacaccatatatgatcactttttagaattgtaattacttgatagtcacatacaagaatgaagctttaatgatattcagcatagatccaacatctaaatccatttaaattataggagacctgtgtaacttgacaggaatctgtactgatttagtgaacagaaaggatatggagcaaacagccatcttcagcttcagacaaaagccatgacacaagcataaaaaatcttaaacataacctcaggacgataagcaaggaaccatctgttgcattttatttatttattttatgacttggacctccctttcccactcccattccagagattttcccctagtgttctaatcagat

SEQ ID NO: 897724 - DNA, 641 bp, Homo sapiens
gggcactacagcaattaaagagcatctccgaggccaagtgcgggggaagtccacgctacctcggcaagcctgaaattacctrtttgtaaattacccaaccaaaacataactttttattgaactgggttgaatcagagcgggtgagctggctggaaacttttttccccagtacggctgcactctgaagtctagagaatcccgttagagacgggctgagacgccgcgagtcgtcggcgggcgcttcccgggacagtcggcccccagtgcccggccccgtggaggcgcccgagacgccggttcgggacgcattccagcggcgagcggcgcgcaccgcctgcccggcgtctccgcatccgagcctggctccccggccgctcgctccccacccccacgggcggaaaagccccgcgactcgggaaccgacccccacccccaactcccgcggcgcccctcggccggcgctccctgcccggcccgccgacttacgtgacggccgaagggaacggctcctccgacgaggggccgatgagcaaagattggaaaagtgtcagagtcaaggccagcaggcagccagcagccatcttcgcgatcgaagatcaatgccccctccctgcccaagcgggggaaggagcggcgctgga

SEQ ID NO: 897725 - DNA, 656 bp, Homo sapiens
catgttgacaaatcataaggattgttgttaagctgttatagtaaatgatgtaaatgtgcagtaaatacagttaatatattacaggttataaatgarcaagaagtcgcaaatcagtatctactattcatttaagaagaaatattttaattagtaagttagtgaagtattgcaggagatttttgcatttaatcatttctagaacaaagtttaaagagatttaattcatgcaaatcactgacctttacctacaacaaacttgcgattggcaccttttggctaaatctcagtttttaattcatatatttaatttgttcatatacatttcattttttagtaactaaaagtgaataaagaacaataaaaacttgattgccatgaaatgtttattcttcctttttttaggtgatactgtgaatgttggcagcataaaattatgtttttgttgtagtttttatatgagtatatgtatgtacaaacatttttctgtgatttttttcagtaaatcaaatctaatttcttcaacattttgcctgaaaaaatgagacagagtaacctaattgaaattatttaatctttctctctttttgttctcatgtacaaacaggcaaacccaaacactgaaaaggaaaataattatccttagccaaaaaaattta

SEQ ID NO: 897726 - DNA, 590 bp, Homo sapiens
gctttcaccatctccccctcctccaacttgacacctaattaagcatcaatacaaaacaatataattgaccagatgtactagtcattaacaggaatcacccattctcctaycaaatcagagcgtacagacacggctctatttgtaataggttgacttaattgcctgagaattccccagagaaatgtacaaatggatcaagacatctcacacatccacacgcacacaccccacagacaaacacatgcgctcctcctaagctttgatccatgcttttgtcactgtttcatccatctttgcaaatgagaatttatggtggccacaatcagtactagaagatcaattaaataaatggaaaaataaataaagccgaatgaaaggtaccagcattcagatttagcaacaccttaataataaaagctttttatacagcagtgctttgcacaatgtagttgcttaaattttgttggtaaaaacaaagcacatacctgctttgaaaatttaaaaaaagaacacactaaacaaacaaaaatgccccccaaaaaaagaaaaaagactacaaaagaattctttcccctggcaacacccctctt

SEQ ID NO: 897727 - DNA, 551 bp, Homo sapiens
gtgtgtgtgtgtgtgtgtgtgtgcacacttcgaagtccctagcatattgcattgcacatagaggaacttggtaaatgtgtgtagaaattaatacgtttccatggtgaatattttagtgaatatatgcataatgaaagaaacatatttatgacatatagtttcttaagagtagaaatgtgagaatttaggaaagctattttaaatttttccagtaagtttatttctaattctttcagccatgccttcttacttatctcaattaccctattcttagtacaacagagtcttggaaaataaatggatttagagcaaaaacaccctttgacagcaatagcctacaattttattttgattaccgtattacttaaaaataagacaaattgtctagattttattttcattaaaattgtactcttttgaatttttacttaytaactcgttttgctcatttaatgtcattgtgttctgtaagaaattcccgtcatcaaatgcttttgaacaaatttgcatgccataagaaagaatgatgttaattccattttaattttctt

SEQ ID NO: 897728 - DNA, 551 bp, Homo sapiens
gtgtgtgtgtgtgtgtgtgtgtgcacacttcgaagtccctagcatattgcattgcacatagaggaacttggtaaatgtgtgtagaaattaatacgtttccatggtgaatattttagtgaatatatgcataatgaaagaaacatatttatgacatatagtttcttaagagtagaaatgtgagaatttaggaaagctattttaaatttttccagtaagtttatttctaattctttcagccatgccttcttacttatctcaattaccctattcttagtacaacagagtcttggaaaataaatggatttagagcaaaaacaccctttgacagcaatagcctacaattttattttgattaccgtattacttaaaaataagacaaattgtctagattttattttcattaaaattgtactcttttgaatttttacttactaactcgttttgctcatttaatgtcattgtgttctgtaagaaattcccgtcatcaaatrcttttgaacaaatttgcatgccataagaaagaatgatgttaattccattttaattttctt

SEQ ID NO: 897729 - DNA, 619 bp, Homo sapiens
tcccaggagagaaatctaccttgaaacatgatggagctctccactgtctgtagtttcctactgtctcctaaaaacctatcactcttgatgttatccagaaaattaatggcaaaggtaaamccaggttcatctttagaaaaacaatgctctctatatagtcatgagatcaccaaacatctcatacaatggctggtaaattctaggtactcaagcagaagtatttctttttcctataattttaagtccgtgccctgatattcactcaacaaatatccattattccataaatatttgaggcatcattctacatgctgaaaatactgccctaaaaatgtttatatttactttgagagacagacaataaacaaacatatgatgtaagagtatcactacatacttaggctttaaattcaataaaatatttttttacctatgtcacctggaatgccaacaagaatattacttctaaaagtgagtttttggtgtaaaaatcatgagacaactgatttaagtatcacaaaccaacacttaataattacctacgatgtaagttagcaatattcattttccagcaaattggaagcattttcacttcaatggatttatatatttctaaaaa

SEQ ID NO: 897730 - DNA, 545 bp, Homo sapiens
cttaatgttaaacacagttaacactttttaaaaaattaacagctttattggggtrtaatttacataccataaaaatagcctgtcttaagtgtacagttcaatgatgtttagtatatttacagagttgtgcaaccaccaccacaaaccaattttagaacattttcatcactccaaaataagtctcatgctcatttacctcactcccattctaacctcagcccaggcaaccactcctctactttctgtctattgatttaccttttctattctttatcttattctgagaaaatgacgcagtgtgcaggtactgtgacagcagtctccaagcaggtgaaatgacttctggaaaagcctgaggtgaggatggggtggcaggagtggtgctttagggctgctaaccccactgtttgcagattctccaggaggggagggccttgccatatttgccttctatcttaaggcatgcttgcactcagctccactggtagcctggaaatcattaagctcttgatgctaggggaacccatctctctcgtctgatttag

SEQ ID NO: 897731 - DNA, 670 bp, Homo sapiens
tgctattcctagcaagaaaccctaaggtttctaggcttgttctggaaaagaggatattgccagagttggtaagtagaggaaagtgattagtatttaagaaactgaatcaagaatggttccaaaaatcttaaratccagggaaaccagcttaaggtcaaaggcaagtgctagataatgaaattaacaccatatgagtacaaatttacaaaatactgtacttcaccataggctatggaactcagtggaaagccaaaaaagcactggacaggtggtgggagtgcttgacttgtggtgaatttatttcatctgcttatacatttgtacacagcacagttcttctccagaatgttgtttctgtggctgggaccattggactgtggctccaaaagaacaacagtctgaagatgggatgttgacaagttttggaatgtcaattggggaatcataatttgtatttatttaggttttttttggtgttcataaaatgcttatgtaatatttacatatgtcaaataaatcttaaaattttataaattacatgacttttctcattctggccaccagaatcttgactgcaatattcagtaaaaattacccaagccaatattttgtgctatgaaacctggaggtattcatcatgttaaatcctaagagagataaaaggattact

SEQ ID NO: 897732 - DNA, 636 bp, Homo sapiens
gagggctaaaagagtggtaggaagacagggaggattaagtaggataaaaggaaaccgatgtcctatggagaactgtagacccaagattgaaatagatatatatttatcctttgctagagaatccattaagcacaccaatcacatttctttcagagatttctgcatactagcttgacaaatgccaaccattggatgttcaaaatcttactactttttcagtatatctctaagattgtggttaacagcttcaaatatggatcccaataatctactatatctggtagtcatagtcacatctattgtggaatcttttcccctttagtattggctagacctagtgacttgtttctattggattgactatagcaaaagtgatgggctgctactctgagttaagttacaaaagaccgtaacttgcaccttttctcttgccttctctcttgcttgttttgataaagcaaactgccatgttgtgagctgccctttgtggaggcccacatggcaaggaactgagagtgacctccagtcaacagccagtgaggaactgaggccctcygttcaacagtacaggagaaactgaatcatgccagcaaccatgtgaaggggcttggaaatagatacacactagtaaaacct

SEQ ID NO: 897733 - DNA, 425 bp, Homo sapiens
ggaatcacagaatgaagaatgtaattaatagcctggaatgacagtattgttgagtgctaagaaagctatggtcttcagactggcgaaagtggcaaaaccgcatctctacaaaaaatataaaaattagtcgggcgtggtggcacacaactgtggtcccagctacacaggaagctgaggcaggataatcgcttgaacctgggaagcagaggttgcagtgagtcactgcactccagcctaggcgacgaagcaagactgtgtctcaaaacaaaacaaaatgacaaaacaaacaaacaaaaacacctatgatcttgttttggttctaaaagtttcaaactttacctttcccaggakgccttagttttctcattggtaaatgaggtaactgggtgttctgttcgttatgtaactcacagttttaaattatt

SEQ ID NO: 897734 - DNA, 635 bp, Homo sapiens
aatggtgtgatctctgctcactgcaacctccacctcctggtattgtacagtttcatcaaaattcttcctgmaaatcatcctccattggttggttcattttgttttcctaagatttaacttataaaatgctggttttatttctccatattttccttttctaacatgatactctacagtggaaatcacaactttctgttctttagttagctccttgtcctagaattataacacattgtttgattcctgttaaaagaccaatgtttgaagagttgatagttgcatataatggatcattggtttctttacaaattgagaatatatgtattttacagttaatgtctattcttagaaaaatgtctgctgtttgaccttactaatcactgtgagacctaacaagcaaatgcaacaaaacccaaaaatagacaaatgggacttaattaaactaaaaagctgtgtgtgtgtgtccatatatatatacacacacacatatctcaacagcgtgaacacacagcctgcagaataggaaaaaatatttgcaaactatacatctgacaaaggactaatatccagactctacaaggtactcaaatgactcaacatgtaaaaacaaataacttcattaaaaagcaggcaag

SEQ ID NO: 897735 - DNA, 558 bp, Homo sapiens
ttagatcccatttgtcaattttggcttttgttaccattccttttggtgttttagtyatgaagtctttgcacattcctatgtcctgaatgatatcgcctagcttttcttctagcatttttatggttttatgtcttacatttaagtatttaatccatcttgggttattttttgtataagatgtaaggaaggggtccagtttcagttttctgcatatgactagctagttttcccaacaccatttattaaatatggaatcttttcccattgcttgtttttgtcaagtttgtcaaagatcagatggctatattagtgtggcattatttctgaggcctctgttctgttccattggtctatatatctgttttggtatcagcaccatgctattttggttactgtagccttgtagtatagtttgaagtcaggtagcctgatgcctccagcatttttctttttgcttaggattgccttggctatacgggctcttttttggttccatatgaaatttaaagtagctttatctaattctgtgaagaaagtcaatggtagtttgatggggat

SEQ ID NO: 897736 - DNA, 585 bp, Homo sapiens
tagaaaaccacttccagaaaaaaataatcctctggattccaaagtttctaaaatgtaagtatcactactaaaggatatctcattctctctatttaaatttattttattacctaatgaaattaaatgtgcttttacttttttctttactagttttgtttcctctcttgaaaattgtgttcagaaattaactcagtgtactgtagaaattaacccaatgtccattacatttgatgcaaatatttcctgatatttctatttctttaatattccttccttatattaggacattctcatgctgctaacaaagacacacctgagactgggtagtttataaagcaaagaggtttaatggactcacagttccacagtgctggggagacctcataatcatggaggaaggtgaagcaggaacaaagccacatcttacatggtgacaggcaagagagcttatgtaggggaacttccccttataaaaccatcagatctcatgtgacttactcrctatcacaagaacagcatgggaaagacccgccccctatgatttaattacctcccaccagtctctcccaccacatgtgggaatca

SEQ ID NO: 897737 - DNA, 624 bp, Homo sapiens
caacaaagaatgttaccttccttccctcaccaacagaagaaactaagccaggcctcgtaactcctaacccctaacctaycatagaaggcagtccaggcaggctcatcccttacctgagctgaacaggagtcccactgacaacagaaggtaagcctggcagcacaggcaagggatcaaccaactggcagcccactgagaatcaggagacagaaggatgttccttccccactagacatgagactcctttctcaccaacacacacaaggcagctgggcagccacagcaagggggaatctctccacaacaagtgcccaggctgggaagcctctctactccactcagacgttgctggtgagaatgtaaaatgctacaggcactctggaaagcaattttacaatttcttaggaaactaaacatatagctaccacacaacgcagcaactatactctgagatttttatctcagataaatgaaaacttatgtttatgtaaaaacctgtgcatgaatgttcacagaagcccaaaactgtaaatatcccaggtgtccttcaataggtgaatggcgaaacaaactgtggtacatccataccatgacccattacttagcaatacaaatgaatgagtt

SEQ ID NO: 897738 - DNA, 608 bp, Homo sapiens
aggactgagaatactgaaattctaaaggaggaagagaacagtaaataagtgattgagtggataattaaatgaaagagartttcttccacttagcaaatgatctgtctaatcagtagttctgtttagcacagtgtcatgtaataaaatgtccttgaaaaaaactgattctttatctccgtgtctaagaagccacttttatctgggaaggatatcaaagaaatatgttgacgtacttaggtaactatgacataggagaacaaggtacttttatctaatatgcaccaaagaccataatttgtttttaaaaattaccattatacatgtctgtcgtccctttttttgttttaaaatattcagatttaatagctatattatagatacatgggttttcaattattggtgactgaaaacctttctgctggcaggtatattatcttaatcttagttaaatactaaaatgcaaatagtttaaattactttaaaaataaatggcataatatgtaaaaacatgaaaaattattttgaaagtccaaaattatccagatattcaatttactagaagcagctacattttggactctagaaaatcatgctagatgttcatcaac

SEQ ID NO: 897739 - DNA, 507 bp, Homo sapiens
atttgtgtttggaagttgaattccagactatattattagaagtatgacaataaccacatttttcaacctttctctgtatgtaccttattgtatcaggtaatggattgctattaggatraataaattaatgtgtgtatagtacctctcactttcagtggctgctcccttcctttcttcgtgtccacaatttgatataggaagaactggcttccaggcagaatactgctaatgaatactactactatactaaagaaatgatccctccaggaaaatagcaaccctcttttctagggtcttgctttttgtcccatcagtgttcttctcccaccctgactacagcagatggggatcaaagtcacactttaaaaagctttcagtctctgccacaaactacttcctctccagggagaaaggcttttaagtaatttgaaggcttttatgggttatatttgtatgggttatattttcatatatataacaaatcagtaaacattatctaatttttta

SEQ ID NO: 897740 - DNA, 607 bp, Homo sapiens
ttccactctttgcacctgatccaaaatgagaccagtagaatagtcaccctagttggcctgcagcctgaagtagagctgtcccacctaaagtgtgggaacaaaggcttattgttgtgtgcactgagattctgtggttggttggtgtattagtccattttcatactgctaagaggaaatacccaagactggataatttataaaaaaaaataggtttaatggactcacagttccacatggctggggaggcctcacaatcacagcagaaggcaaaggagaagcgaaggtacatcttacgtggtggcagacaagagagtgtgtgcagagggactgcccttagtgaaaccatcagatcttgtgggacttattcactatcacaagaagagcatgggaaaaacccactgccatgattcaattacttcctaccaggtccctcccatgacatgtggggatctacaattcaagatgagatttgggtggggacacagccaaactgtatcattccacccctggyccctcccaagtttcatgtcgtcacattttaaaactaatcatgccttcccaacagtccccagagtcttaactcatttcagcattaattcaaaagtcc

SEQ ID NO: 897741 - DNA, 554 bp, Homo sapiens
ggttcaaaggactaaactcggtatcctcagtactcaktgtgataatgggaaaacaataaattcctcttcaagtctatgcttaaaggatggtgttttcctgagacaacaacttttttcacagtttggtcaggaaaacattattatccgttaggactcatgagcaaagcctcccaaagacaagaatacaactttgcatttctttcttttctttttttttttgttttgagatggagtttcactctgttgcccaggctggagtgcagtggcctgatctgggctcactgcaacttctgccttccaggttcaagcgattctcctgccttagcttcccgagtagctgggactacaggcgcctgccaccacacctagctaattttttgtatttttagtagagatggggtttcactatgttagccaggatggtctcgatctcctgacctcataatctgcctgcctgggcctcccaaagtgctgggattacaggcctgagacaccactctcggccacaactttgcatttcttcaccgtaccttgtatttgtgaaagtacatcac

SEQ ID NO: 897742 - DNA, 688 bp, Homo sapiens
tgttcctgttgcatgcttttttcataagttactccatggcttacatcagttaatggctggggctgcactctctgagcctggagcggagtccctgcacctgggctcaccctrctaatagatcacccagggcctggtgatggcctgcgaggacagctggaatggctcaactcccccactcatctgtcatgattaccatgcgttgggggtttgcctggcttgttccactcatttcctttgtcagcatgacaaagatcaaagtgcaagtaggatacataaatgataacctagaactttgcccaaacacataggctgcaatctgggtgacatcttccatcacactttccccataggcatggaaggaaaagggcaaattatgttttaagtgtagcctttcttgcccagccccttccagccccccatccccacccccaccacccagctttgtttcctgaacccatcatcgttgtattaatcaattggttcagggatttgagatttcctgacataatcacaggattggagaaatcctgatttctgtttatatgaagctgtggctgtgattgcagaccttgtacctggctgagcttgcatctttcgttccctattcagagtttgagatgcttctggccattctcctaaagaatgggagtgaatgatctttgcatgtctgttgagcagaagatattta

SEQ ID NO: 897743 - DNA, 631 bp, Homo sapiens
tacagattgcaaagtgttttcccagccattatctcatttgaccatcacaacactccatcaaagtaattaaggacagtgttaccccagtttacagatgaataaactgatgacaggagaaactaaggaattaaatgaggtgatagagctagatggtgatagagctgggattggcatatggatattgttccaaatcccatgttgtatatacagtaacataaggctccactgtggcgaactatttacactggatacttttctcctgccattatagctgccttgggagtgatagtaatgactctgacttcccagggtatcttaacattctgcttcctctcaggaggatctcctgacattcttgtgtaaatggaaaagtagaaaaccaggatcttctaaggcaagtgcattgtaaatgataatttcatgccttaatcttttcaaaacatttaaactggctttgatgattcacctttaaactcacccttcaatagttctcagaatcctccttgagaagatgaaattggaatgatcccatcagctctggcagttgtaggtggattctaatggtaagggactgtagtggggaaaatggsgaattcttaatgagctccctttctattgctgacttgaacca

SEQ ID NO: 897744 - DNA, 569 bp, Homo sapiens
tttaatgcacagttgtaccaccttgagtaaactatacaattgcacagacttctagttttcaggaatgaggtggagaaaacattatgtacaatagctagggttgtgaaaattaaaatatgctatacttaacgtataacaggcacgccataaacagtaataactagtatgttttggtacatactaacaatatctatttgttaatgaatgaaagagtgtgtgaatatatgaactgtacctctctgttggatatttttaagttggaaataattttcatcatatctgaccaagtacaaatggtagaacatttccttttctttccttcaaccaacaatgataggcggtggatgggtatcatctgaatcagagagatttcatccattcaaatgtccatttaatcctgtttttagtttaacttcaagttctgtgataaaatcaccccttttaatggagaygttctgaagagcgtggtgtaaatactggcccaatttttagataagtcctttaagtcagtgaatatcactatgaagcttcttgttaagtatttcccaatgtatgtgcttcattttcta

SEQ ID NO: 897745 - DNA, 558 bp, Homo sapiens
ggctttctgaaatgatttaaaactgcatcagaactcaatgcatgcatgccaaacatcatcatcagaaggcaggtctgacaagatttaattacttagaaacwtatcagatttttaatcctcaacaataaaactataaatgacttttcagtaagatgtaataccaaaatgcatatttctcaaaacacaaaattagacatgttaagaataaactcaatttaattttaaaccagtagttactctgatgtaaacattgatgttatactgaaatgaattttaccattcttcccaaaacgcatttgccttcatattaatcttactcatggttttaaaagaatcctttactttcttgtcagtttgcattctgtatcaaactgacggaagccaagatctttcacattatttgtcagtttcactgccctttccaaatatatctgtagcaaaaccttttcatttgtctgatccagttgaaaatcttttatattcattttactgagacatcagtcttcaatttttcccttccattcactattcctagatgtgacacttctaacaatttgt

SEQ ID NO: 897746 - DNA, 755 bp, Homo sapiens
tgatcaagcaagaactttctctattgtggacctcacatcctacaattgtatattgtcctgcatgtccctcagacacttttcrtttttcttcagtcttttttctttttgtcctttagattggataatttctgatcttctgagaatttttttattatctgcaacttgctgggtttttcttagaatttcagtttattttttgtatttttttaaattttagttattgtggtttcagttctagaatttccatttggttcttcatacatttcatttatctgcagattccccatctttgtttattaagaccatattcttctcttatgttttgaacatatttactgtatgagggctgctttaaagtcttctagtattaaagccaacatttgggatatatgaaggtcaatttctattggctgtgggccatgttatcctgtttctttgtctagtaatttatatatttggagacaaggtcttactgtcatccaggctggagtgcagtggtacaatttcagctcacagcatcctcaacctcttgggctcaggtgagcctcccactcagcctgttaagtagctgggactacaggcatgcactaccacgcctggctaatttttgtatattttgtagagatgcagtttcaccatgttgcccaggctggtctcaaactcctggactcaaaggatccacccacctcggcctcccaaagtgctgggattatggatgtgagccactgtgcccaaccgtctagtaatttttttac

SEQ ID NO: 897747 - DNA, 640 bp, Homo sapiens
gtgctgggcagaggcagcgagccccagctcccagtcagccatgagatctggagggtaaatcaatactctacagtgcagtgtgttgccaaacgattttacccagttgaaggctaatgtaagygttctgaacacatttaaggtaggctagcctaagctacaatgttcagtagtttaggtatatcaaatgcattttcaacttgcaatatcttcaacttataatgtgtttatcaagatgtaactccaccgtaagtcaaggaacatctcaaatctggaaaacaagttttacagaaataaagagttgatcataatgaaaatcaataaccagctagatgataagaagaaacacttctagaaactgaacacagccttgggtgtttataattagacacatttattgagtcttaggcaaaattaagaagtaacaatttatattttataataccttgatgaattttttaaccaaaacacttctattttagtcttcgaagaaactcttttcttcttttccaagataatcatgattaacttacaaaaatgggtatacatcttcaaaacatttcccttaataggaaacttagctttacaggatctaaacactaaaaggcaaaaaaaaaaaaaatctattttcttttcattacaa

SEQ ID NO: 897748 - DNA, 590 bp, Homo sapiens
gttgttttccataattgctcaaaggycaagtttcatggaacacagacatgattccctgatttcggaagagattttaattttcttcaaaacattttgaaaacgtgttttgatagcattaataatgttcaaagaacaactgggaacatacctgcattctctgaaatgcatttgtttgtgcctcattctgcttttccctctctctggtacgcagttacgtgtctggtcagttgcctctgcattctttgtgtgctaaggagtgacagcagacaaactgatgcaattgcattcaagttgaactgaattcctttatttcatgtcaatatagaacctgattatttctcagtagcaccattaaacagacatcagcaggttttgggatagaattatttcataccactttatgtaatttatctagcacatgtagggtcatgtgtatctcataaagctggtacacttcaataagaaaaaggagttagctagtagaatgaataggagcccagaagaagttatcaaattgaattgatggagactcatttaggtgcaagttgcataaatttactgaaactggcttaaagggagaaaggtatctt

SEQ ID NO: 897749 - DNA, 590 bp, Homo sapiens
gttgttttccataattgctcaaaggtcaagtttcatggaacacagacatgattccctgatttcggaagagattttaattttcttcaaaacattttgaaaacgtgttttgatagcattaataatgttcaaagaacaactgggaacatacctgcattctctgaaatgcatttgtttgtgcctcattctgcttttccctctctctggtacgcagttacgtgtctggtcagttgcctctgcattctttgtgtgctaaggagtgacagcagacaaactgatgcaattgcattcaagttgaactgaattcctttatttcatgtcaatatagaacctgattatttctcagtagcaccattaaacagacatcagcaggttttgggatagaattatttcataccactttatgtaatttatctagcacatgtagggtcatgtgtatctcataaagctggtacacttcaataagaaaaaggagttagctagtagaatgaataggagcccagaagaagttaycaaattgaattgatggagactcatttaggtgcaagttgcataaatttactgaaactggcttaaagggagaaaggtatctt

SEQ ID NO: 897750 - DNA, 641 bp, Homo sapiens
tcaagtgctcttttcttcttccctttaatccctgtgaaatcttctttgaaacaatgaatttacatcaatgggttgtttttatcaggtggctgtagatttgggagacacatcycaacatttaaatactaatacttgcaaaactcatagaaaagtgcctaacattgtaagacttatgtaactgcttgttaattctagaatgatacaacattttttcttctctaggaagattgcttaagtggacttgtgtcctggctctcacaaaatatagtcctaaaggaaactatttactcacatttaacaccaaactggttaccatcatattggttagctttatgatgaagtataaacagttacatgccaacatgaagaaaaccttccaaaaatagtaaataaatagtttaggtatcacgataaggggcaactccttggaaatgataatttgcaaaatgatacataagcgcccttctgactttgtgtttctgacaattataaattttccttgaagtgcattggctattctttataattaggcctttacattaattgtggcttattactgattaactcaagtatttattgcaaaaagttttctatgttgtaattacctctttattaccaacgacttaaaagggcaaagactt

SEQ ID NO: 897751 - DNA, 619 bp, Homo sapiens
tttgtaacctaatgtaagaatgacataccatgttcataacttctgccatttctttttctttttttttgagagagtctcactttgtcacccatgctggagtgcaatggcgcaatgtcggttcactgcaacctctgcctcctgggttcaagcagttctcctgcctcagcctcctgagtagctgggattacaggcatgcgccaccacacccagctaatttttttgtatttttagtagagacggggtttcgccatgttggccaggctggtcttggactcctgacctcagggaatactcccatctcagcctctcaaagtgctaggattacaggcgtgagccactgtgcccggcccagttctgccatattttactggtgacacagatcaaacatggtcaaacatggaagagggctgtacaaagatgtgtataccaggaaatggagcttattaggggtcgatttggaggctggctaccataacaggtttctgtccctatcttcacaattattatgctaaaggatcccttttccaaaatatagagtgcctgagccaattctcaaaagttttgatgtcaggagtggaacattktcatgatgcattctagtgaaggaaattaaaatatt

SEQ ID NO: 897752 - DNA, 498 bp, Homo sapiens
atatatttaagtttacttcaaagatctaytttatccttatccttagaaactgtgaggaaaaaaaaactatgttaacaaagctgatgacaaagattctttattatataagagatcctattatctgatcatattacctaataaattatatatgaatgttcaataataaaaataatgttcaccaatatgtcacatgcatggttagtgttttattctttgaagactgcttctaaaacatcgcactaagtaaagctgaaaggataaagtttaaaatagtttttaaaggataagttataacatatgtaatgactgtccactctacaaaatcttgatcttagagcttatgatacacccagttggcagtagcacccaggttttccaaatagccagtcatcacttttctcttgtctgcatagacttcttctcattagctgccttctgcttttcttgcatgatctcagagtccctacaatgagggaaaagtctataagttgttacaga

SEQ ID NO: 897753 - DNA, 657 bp, Homo sapiens
aattcaataaatggttctgggataactggctcaacawatgcagaagactgaagttgcaccccttccttacaccttatacaaaaatgaactcaaaatggattaaagacttaaattaaaaaaacccaaaactataaaaaccctggaagataacctaggcaatatcctcctagacataggaatggacaaacatttcatgtggaagatatcaaaagcaattgcaccaaattaaaaattgacaaatgggattgaattaaactaaagagattctgcaaagcaaaagaaactgtcaacagagtaaacaagcaacctatataatgggagaaaattttcgcaaactatgcgtctgacaaaggtctaatatccaccatctgtaaggtacataaacaaatttacaagaaaaaaacaaacagcctcattaaaaagtgggcaaaggacatgaacacttttcaaaagaagacatacatgtggccaaaaagcatatgaataaaagctcaacatcactgataattagagaaatgcaaatcaaaaccactatgagatgccatctcacagcagtcataatggttattagtaaaaagccaaaaaaaataacagatgctgttgagattgcagagaaaaggaaatgcttatacactgttgatgggagtgtaaattagt

SEQ ID NO: 897754 - DNA, 657 bp, Homo sapiens
aattcaataaatggttctgggataactggctcaacaaatgcagaagactgaagttgcaccccttccttacaccttatacaaaaatgaactcaaaatggattaaagacttaaattaaaaaaacccaaaactataaaaaccctggaagataacctaggcaatatcctcctagacataggaatggacaaacatttcatgtggaagatatcaaaagcaattgcaccaaattaaaaattgacaaatgggattgaattaaactaaagagattctgcaaagcaaaagaaactgtcaacagagtaaacaagcaacctatataatgggagaaaattttcgcaaactatgcgtctgacaaaggtctaatatccaccatctgtaaggtacataaacaaatttacaagaaaaaaacaaacagcctcattaaaaagtgggcaaaggacatgaacacttttcaaaagaagacatacatgtggccaaaaagcatatgaataaaagctcaacatcactgataattagagaaatgcaaatcaaaaccacwatgagatgccatctcacagcagtcataatggttattagtaaaaagccaaaaaaaataacagatgctgttgagattgcagagaaaaggaaatgcttatacactgttgatgggagtgtaaattagt

SEQ ID NO: 897755 - DNA, 505 bp, Homo sapiens
agataaattatgagaacacatggacacatggggggagcaacacacactgaggcctgttggagggcggggggtgggagaagggagagcatcaggaagaatagctagtgggtgctggcattaaaatctgggaaatcaccactaaagaacttatctatgcaaccaaacaccacctgttcccaaaaaatatattgaaataaaatttttaaaagtgccctttgaagaacaaaaaacaaaaccaaaaaaaagggaatttcaaaaattaaaaaaaaaatacctgggtgatatgatcatctgtgcagcaaaccaccatggcacacgtttccctatgtaacaaacctgcatattctgcacaagtacccctgaacttaaaataaaagctgcaaattaaaaaagaaaaaccaaaaaggaagaaacaatgttcctagataagaaayatataccatttatctatattaaatctaaaacctgaagcatcaaaaaaaacggaatacattaatcaccttaa

SEQ ID NO: 897756 - DNA, 673 bp, Homo sapiens
tagatttcagctcaacgtaagtaaattttgaaacatgaaagttkcctaaaaaccacacaggcttccccaggagatagtgtttgagcaggcaccaggtgaccttttcacaggaatgtcataaaaaatgacttaagaataaatgtggtatagaggaatctagtattttttctgacttctaatagtccatgattctattattttctaaatggtctctagcaagtaactttatctgaatatgttcttctctgctactgccagtccattcagtcatttctactgaacctacttctccctatagctcttaggctagctataccactggactggtctttgcgctaataggaaacatacacggtgtttgctagctgggacaggtaaaattcaaattgccttttactattcctcaagagtgttttctaattcattttgccttgtcattgcttgaggctcttctgacattgaccttttgaccagctgttgggtttgcttttcagtagtttggtccttcagtgtattactttccccagattgctgactcattgctctgatgctttatttgcatgagtttttgaactctagattttctatataatttgcaacatttaaatatgtgggctctaaaaacaaactgcctgagtttaaatccaggctgctctgccatttaccagttctg

SEQ ID NO: 897757 - DNA, 577 bp, Homo sapiens
caatgacccagctcaacagtcaggcagttaatttaatcttcctctgtctttttgccctcttcargccctcaacagattggatgatgcccacccaatctgtttcagtcattccaccaattcaaatgcatatctctttcagaaacaccctcgaagacatacccagaaacaatttttaacgagctatttgggcatcccatggtccagtcttgttgatgcattaaattaatcacagtgggaaaaatttaaagtggcctgtctctgataagattattctcttgacataaggcagggtttctcaacctcaacagtactgacactttgggttgaataattatttgttgtaaaggactgtcttttgcatttgtaggttatttagcagcattcatggcctttacccacttgatggcagtaacacaactccccaagttgtggcaactaaaactgtatacaaactttgccaaatattgcctgggaggcaaaatcactgacacagggttttcatggatgtaatagagcagtttcacgtaaatgacacaagattttcatgctcacatgcactcccctattgacacatgat

SEQ ID NO: 897758 - DNA, 694 bp, Homo sapiens
ttcacctgaatgcccctactcacacacacacacacacacacacacacaggtttgccacctcaaagtaccttcacttgccattttccccaccatccttatttcagtcaatgtaccctatagctcattycagaaacctccactgcaaagtcctatcaattccatgacttattatcccttctatatatccccatgcctccatccacacaattaccattcatatcttgactagactactacattcgcctcctaactattcttcccacttttattccctatatgctccattgattctcctcaaagctttcaaattgatcctttttaaaagattaatcagattgcatctgttacctgcttaacccttccaagggcttccacttgaattcaagatataaaccagatcctatataatggccttcaaggtcctataaaatttggccccagactacctctctggcctcatttcctaccacttctttcaatctcgaccaccaattccccattccttgattataactggtctctctgcttccattcttatctaccttaacacagatgttttatcaacgtattagcctagtcatcacaaagtgttaaaatgcaagattgctataattgcctagttatttaactacagcactttaaaaaatctatatttccacagactattataaatacttcaaaaccatttctaaag

SEQ ID NO: 897759 - DNA, 694 bp, Homo sapiens
ttcacctgaatgcccctactcacacacacacacacacacacacacacaggtttgccacctcaaagtaccttcacttgccattttccccaccatccttatttcagtcaatgtaccctatagctcatttcagaaacctccactgcaaagtcctatcaattccatgacttattatcccttctatatatccccatgcctccatccacacaattaccattcatatcttgactagactactacattcgcctcctaactattcttcccacttttattccctatatgctccattgattctcctcaaagctttcaaattgatcctttttaaaagattaatcagattgcatctgttacctgcttaacccttccaagggcttccacttgaattcaagatataaaccagatcctatataatggccttcaaggtcctataaaatttggccccagactacctctctggcctcatttcctaccacttctttcaatctcgaccaccaattccccattccttgattataactggtctctctgcttccattcttatctaccttaacacagatgttttatcaacrtattagcctagtcatcacaaagtgttaaaatgcaagattgctataattgcctagttatttaactacagcactttaaaaaatctatatttccacagactattataaatacttcaaaaccatttctaaag

SEQ ID NO: 897760 - DNA, 706 bp, Homo sapiens
tataaatacaaaatccaggtatataagaataatatataaaaatatacacaggtaatgtgattatagggtacataatgaaaaaacattcagaaatactcctctaagagtgactactatgaatataatatttaaggcaatttaatgtatcctgtaagtataagaacacatttaacaatgctatatgtttaagtgaaccaacatgagattcaacactgattaaaaaggtggttttgccagctgcagtggctcactcccataatcccagcacttcaggagactgaggcaggatgactgctcacaacatagtgagagactgtcttcacaaaaaaaaaaagaaaattaactaggcttggtggcacacgcctataatcccagctactcaggaagctgaagtgaaagagtcacttgagcccaggaggtggaggctgcagtgagctatgatctcaacactgcactccagcctgggtaacatgagcaagaccctgtcttaaataataataataatttacctttggaaagcatgacttttctttaaatgacatatactgtgatacctgaaaatcaaagtccttcaaggaccctaacactactccttgtcacagttatcatatcttttaattgtagtcartgacaacttgtgctgaatatactacttaaagaaactatacaaacagactccaagaagtgttgggggaaaaaaaaggtc

SEQ ID NO: 897761 - DNA, 576 bp, Homo sapiens
ccaggatacaagtgcagaacatacaggtttcttgcacaggtaaacatgtgccatggtggtttgctgcacctatcaacgcatcatctaggtattaagccccacatrcattagctattgatcctggtgttctccctccccctgcaccccgacaggccccagtgtgtgttctcattgttcagcttccacttataactgagaacatgtggtgtttggtttcctgttcctgtgttagtttgctgaggacaatggctttcatgtccatgcaaaggacatgatctcgttccattttttggctgcatagtattccatggtgtatatgtaccacatttatttttatccagtctgtcattgatgggcatttgggttggttccatgtctttgctatagtgaatagtgttgcaatggacagaatgatttacatttctttggatatatacccagtaatgagattgctgggtcaaatggtatttctggttcaaggtctttgaggaattgccacactgtcttccacaatggttgatctaatttacattcccaccaatagtgtaaaagcattcctatttctccaaagccttg

SEQ ID NO: 897762 - DNA, 598 bp, Homo sapiens
ggacccaaacctcctataactaaggcctctattgtgatgggatagtgaaaattaagtcagaaacaacttggacaccagaattttaggaaatattcttcttttgacattaggggtcagttaatgtcctagtccagattgactcaggataagacgtgcccagcccccttctaacaaaactcagtacaacaggagaggatcaagggagtaaggatgctaacattttctggagaaacagaatatatcaactgagtgtgagcacatgtgtccttttgaggagaaggagatgatcactttccatcttctcctggcatattatggtatttagcacccataaacactaaacaattcagaatttactggagaccttggaactttgattccctcattgcatcatccgcacagccagcagttccccaagatcacacaccaccttacacctcaatgagaagaaaggcagaatgctagctgatggggatcatttggagagtccagaacamccccaatttcattagagtcattgataaattatcctcactccaacaattttaataatagctaacagttattgagctaatgttatgttttgtttcatttaatc

SEQ ID NO: 897763 - DNA, 573 bp, Homo sapiens
aagcaaccctgtgccttagcagccgcctgccctctcacctaccctgatgctgggaatcaacaatctgtyttccattttgagatctgcctgttctgcacacttcatatgaatgaaattgtacattggtggtcttttgtgactggcttctttcccatggcataaggttttgaaggcccttccctggtgcagcacgtttctgggcttaattggttttaattgctgaaaacatttccattgtgcggtacagcccccatgtttgtccattcatccgtcgggcagcattgaggtcgtctccactttttggcaactatgaatgatgtcgctgtaagcattcttacacaggcttttgcctggatgtgttttcatttctcttggatgtgcacctcggagtagactcactggggcttttggtgactctgtgttcagcctttttaggaccctccagcctgttctcccttccccagcagcgtgcgaggttccagtttctctgcatcttcatcaagctttggaactgtgtccttttccctctgtccactccagggggcttgagtggtaccgcactgtggttttgat

SEQ ID NO: 897764 - DNA, 567 bp, Homo sapiens
ctatcaacagagtcaacagacaagctaccattgaatgggagaaaatatttgcaaactgtgcatctgacaaagcatctgtaaggaacttaaatttayaagagaaaaacaaacaaccccattaaaaagtgggcaaaggacatgcacagacacttttcaaaagaattacacaaatgtttcaattaactagaaaaagaggaggagaagggttaccataattccattacctgaatcctctgattggttatggcttaagcagaaatgccttgtgtctgaaacttcttaatcaaacaatttgttgccctgtgtaaatactactaccactgctacatctcatatttactgaacatctgtggtgtatctggcgttgttgaatgctacttacccatttatgcctcacaatagcactatgcaatcaggattcttaggctgctcattttaactgatgaggaagctgaggtagaaattaggtaaaaagaatgaatgcaaccctctaatgactaagtgccttcatcacttccttaccatcattcccaactttcatgatgctatactttctgaggatggtga

SEQ ID NO: 897765 - DNA, 622 bp, Homo sapiens
gggagaaatcatacttgcccactgtaagagttttgtaaaatgtatgtgaaactgcttagaacacaacaaatggtatgaacatagaattgttgccaacatttcaacctcatgcgtgttttttcaatgagaatctgaggtccttgagggcagaaccaagtcttttgcacagtttcgtagtgttctctgtaacatccaacatagggtcttttctgaaactgtaggtctttaataaatgttaggttcagcaaaaaacaaggaggaggaagccacattcccaggtaactggctttactgtctttccttgtacatctgtttccatcttattatggtttcatagcccttctccaggccacctgggcccagagcacacatcttcggcccacaggttctctctggatagctgcatagacaggcctggattctgggccagctctgcagtcattgagctcacagggcaaatcacttgacggtgctggacattagtttcttgctgtctgatgtaatgtccatgatgatacatcaatgtttgcccagaaggttcttgtcatcatyagtggcccttgagttatgaaaagatgacatgtaaaggaaaggagccagtagtcagactggccctcaatac

SEQ ID NO: 897766 - DNA, 653 bp, Homo sapiens
catgttgtcatttctcacatctggaaagaataattccttaatggacttcacttgccctttcaactactgccccatttgtgtgctcccttttgcatcaaaacttctagaaaaatgatgtataaactccatgtcttcatttttcttttcatcctctcaagtattctccagttaggactttcagccttgctactttaccaaaactgctcttagcaagtcactgatgactgttgctatatctagtggtgagtacttggcctttgtcttactctgcttgagcagcctttgatagagctgatccattcttggaccactgtcttcacttggctttgatgataccaccccctcttctgaccttagctgctccttccaactctctgttgctgatttgttcctgtatccatgatgtcttgatgttggtgtgcctgggacccagtctttggaccttgtcccttctgtgctccctccatcagtgatctactgtaatcacatggcattaaatactgtttctaccctaaagacacccaaattgtccgtggccttggtgtctctcttaaasgcaaggcttgtgtcttgtgctacctacttgatgtctctactcaaataccatagagaaatctcaaattaaacatgtctaaaatttggtcttgtcccta

SEQ ID NO: 897767 - DNA, 616 bp, Homo sapiens
ttggccacatggatggtgctaagatggactattcccactgtgacagaaagctctatgggacagtgttgcctgcaatataaaaccaatgtctggtttcactagataaagcactgaccactacagcatgcctcaaactgacttctgtgggacaaattcagtggttcccattaaaggctaaaagtcatgtctagaaataaaactccagtcttctctcctatgcccaaactagtcatgttattttagactagattctacctctctttggcttctgctttcttttccaaaatgtgacaggattaaaccaaagggtctcgcaaggactgtttacatctaacattgcctagatctgaaataaataacactaggaggaagtggctcattatctcagtagcccacggggaggtgttctagtggcaaactaagtgtgcttgggttgggagggaaccagccgttccccacactgctggatctgcctggttccagcccattcagcytcaatactgatgctgatgatacagaaaggacccaaagactcactctccttgtcagcgacaggctgcacacacagggcttgaatgaaaagacaacagaggagaataaataggaagcagttttt

SEQ ID NO: 897768 - DNA, 670 bp, Homo sapiens
tgaggaactggatctgtttttctttcaagttacctcctttgatgttctatatctttatattttcaagtgacatgaaaacttctttcttctcttgatcaaacagttgccatgacagagccgtctgtttgcctcactggcacttatgtactaaatatgatgatccctttagaaacttactcggatttgtattgtttattatttgctgaataaggacaatttagaaatactgtctacaattaagtgggattatctgtaattggtgcagctctttgaaaaatacagaagtaatatccttgtactttgaagataataatctatattttcataatcctggaacccagaagcacttctaagcattatataaaccacagaatccaaaaaggacaatattgataaaaatttaacattttcatttgtaggatataccataaatagagttaaaatacaaatgaaaaactaaaaatctgtattatatgtcttaaaagattatattgtgaaatattaaaagttcttttagctgggcacagtggctcacacctgtaatcccagcactttgggaggccaaggcgggctgattgcttgagcccaggagttcggaccatcctaggcaacaccrtgagaccccgtctctaccaaaataacaaatattagccagggacagtggcgcacg

SEQ ID NO: 897769 - DNA, 640 bp, Homo sapiens
tttttttattattatactttaagttctgggatacatgtacagaacgtgcagrcttgttacatgggtatatatgtgccatggtggtttgctgcacccatcaacgcatcatctacattaggtatttctcctaatgctatccctcccctatccccccaccccctgacaagccccagtgtgtgatgttcccctccctgtgttcatgtgttctcattgttcaactcctgcttatgagtgagaacacacggtgtttggttttctgttcttgtgttagtttgctgagaatgatggtttccagcttcatacatgtccctgcaaaggacatgaactcatcctttttttggctgcatagtattccatggtgtatatgtgccacattttcttaatccagtctatcattgatgggcatttgtgttggttccaagtctttgctattgtgaacagtgctgcaataaacatacgtgtgcatgtatctttatagtagaatgatttataaccctttgggtatatacccagtaatggaattgctgggtcaaatggtatttctggttctagatccttgaggaattgccacactgtcttccacaatggttgaactaatttacactcccaccaacagtgtaaaaggattcctatttctcca

SEQ ID NO: 897770 - DNA, 623 bp, Homo sapiens
aatagcttattgtagcatttaggtttctaatgtgcttctagctaaatattcgagaagatgacagtacagcccttctcctggtaaacagagctagtctgagaatcacttttcaagtacttacagataaaaatcytaattcaaactcatcaaatgcatggccaagtaccagacacactcctcttttggatttaccagaaagtgtgctctcatgcactgttaggtctaataatcagtgaccttctctgttttgccaaaataattcctaaagactggctagccaatgcattgatttttattaaaaaaacaaaataacaaaataaaattctctgcctttgactggaatgatttttatccattgtctccttcctctagcagacagaggcaacattactatttaggaaaagtaagtggaggttccacttcatttctagatgaaaatggaggattttgatgttaagtatttcatgtgacctcagacagtctgtagcagccacagctcatcagtggttaataaattagtagattgtatataaaagtagtttgttttcagtttagtgaactgatagttggggcagttagcaaatcaagtaaaagtttgggccctgaaatgataatgaattcct

SEQ ID NO: 897771 - DNA, 570 bp, Homo sapiens
aaagttgaaaatgactcatcagctttcccttctttcttgctaaaaaatcacaaaaataaatgtgcaaacagtattccacaggtgaaaaaaattcgagtaacragtaagacaaacagaattgcattatcagaaaagaacagagaagactgaaaaagtacagtttaatgcatatgagtaaagtgtatgtttcaaaacatttgtattattggttacattttttacctcttactttttatttttgacctttcataggtgtagccaaaatgaactttgatgaataggaaaaaaagtcagaacaagatttttatttatttttgtagtctttatagattttaatatcttacaatgcgcaggatttcatatagatactctaacctatatttttattctttgcaattcctccttggttaatagccataaggatcatttatgtacttatgcagtgtttttactgtttctatataccacccaaccttgctggttttcccctatccctatgaattttcccctatccatttggattttccccattacctcaaaattttcaatgctttatcttgcagaatcgtt

SEQ ID NO: 897772 - DNA, 478 bp, Homo sapiens
tcacctgagttaaatatgtatcttgtaaacatatttgttgttagcacagtggtttcccatgacaaatccctatastatcaatacattcctttccatgtccactgcacataatttagcatttccaaaatggatataaaatgaaatcattttagaatacatttcagtcacccagacaaaattgatttaaactaatatctctgactatataaaatacatttactattattccaacatgcattaaaagcttagaactatgtgataaggaagatgaagagaaagagaatgaggaacaggttgggaggaggagatgagggcatggggaggacaagaggaagaagaaaaagaagtcaaaagaaaaagacagttatatgtgtgtgtcttcggttcataacaaggttagtttcaaaatggtatttaaatccattgtttaaaatgtggacacctttctccataaaagtaagagaaaagtatgggcaga

SEQ ID NO: 897773 - DNA, 602 bp, Homo sapiens
tagagtgaagtattgaagatgatttttttttttcaagtttggttaagaagagtcacataaatatttggaaaaagaggcaatttggtgaagttactgctacactttgaatatatggaaktttaggttgaaaaaggaatatttatgcttttttttctaatgtctgctaatttgttacaatccttacataatttagcaattgtacaatttaagaaaagaatgatacctcacaagtgaaaagtagttgtagataaattctaggataaattgaatatgaagtaatagtgttgtacaattgtcttgaaatttagcttagtgtagttgtttttaaatttctatcttgaaaaatgataaactttaaatgattatagaaagagttaaaatcatgacaactattcaccatttgatgattgttctgtttatgtccctattttttaaactggtaaggaaaccacagtaaataaaaataagatgtaaataaagatgattaaattatatctaatttattttatataaatatatattatgcttaattattactataaatacagctacaaattacttgtaacctggtacatttgtatctgtgtgatgaatcctcaaaa

SEQ ID NO: 897774 - DNA, 613 bp, Homo sapiens
gcgtgaaccaccatgcccagccatagctccatttcttgagctaacactgactgtctttgtcccacgcatcctatcctaaacctcttgcagtcctgcagtggtctttgggacacagtcaccttccatgtagcagactgccatactctttcctgattttctggattgtgctggatgctaatccagggtcatgtccttgcgctgatccctgcacttcttcattgttttttgcccacttgcatggtgcctcactttgaagccagagttctgtggatgcctttctgttctcaagtcccttctgtgagattttggcatcctttctaacaagctgaggagtttctcagctctgactttggactaagaagaccacagccttgctgtcaccttgccctttcccctactccaagcgttggcactatccatcaagaacttgggctaagaatgtcattcctactcttaccagcagtaggagtatcctactaccagagaagagttggatttggtgagagtatttggctaaaactttggcccttgaactcargtctggatttatcacttactagatggtgacctgaatatcagcttcctcacctcagagatggagataataataagg

SEQ ID NO: 897775 - DNA, 561 bp, Homo sapiens
ggtcattgaacaaaaactaatatgtgaaaggtgaaatatatacatgcccagtgaaaaagggctgtttaactacaagttaattcttactttttcctactaaccttggagtattaatatracaaaagtctgtttttttctttttttaatttggttgtgttgtgttttcccctctacacttaaagaacagagctctaagtgacttactatctttaataaaaactcctgtaggctgggggatataatattgttccggttagattttctgtggtttaacacagatggcgaaagtattttaagaagcttagctattttgttaaatgtttatgacttgtaaattcccagccttttaggattatctaaatgtgttgacattgatggtgaatttgaagggaaattagccaaatatgtttttgtctaattaaccagtggggcctaataatagcagggtttatgggtaaagcagggctacttatttattacatggagatatgttcatattattttcatttgaagtttaaattttcaaattctttcccaccactttctggagtcattgaatga

SEQ ID NO: 897776 - DNA, 562 bp, Homo sapiens
gatgggaaggtttgaagtactaagagctctctattttttgttggcataaaatctagatcatttactcatagtaggataaagtatttaggaagaccaaaagccattatatagactcgtttaatatttaagtttttttaaatgggtacttgtaacctataagcatgtagatatataagaaaaaataacaactctcaattatttaagatttgctccttagagacaatagattatcttacaatagattgaacctttctatattaaagaagtaatgttgccatgtatttaagtaagaagagaaatttcaaaaccgttagtgctgtaaaattgtatccagtcagccttgagcaacatacataatcataagaaagctgctcatctgccaaaaattggacagctttaccaaatgcaagtttaattaactggaaaaaaattaaattttaataaataattagggtgattattaagcattatggtgcacttaaaatgtgttgtgtaaacactagtgsgaatatcttccaagtttgatttcctactcattttaagtcattatcttttgagaata

SEQ ID NO: 897777 - DNA, 534 bp, Homo sapiens
tactagtgtggggcatgaatttattcatgtatgcattgcatataaaatattttaatataaatttaaagaaaaataaaaaaggcttctattttccatgttarcatttatataacatttttctacattcaaataagtcatgtatattaatagcttaagattgtttctctgttttcattttcattttttttgtgttggtggggcaggagaatgaggatggtaaaatcagttaccatactttaaaattttacattatgctaacttttctgttatgtttaaagaaatacacacatgctttcatcattattcctacattctaaaatctatcctggtgatctccatcttcaggttgcacagtcctgcattaggcacagataaagatgcgctaattgtggacagtgttcttattagtcataatatccattctgattggttggagccaaggctatgttgtttaccatatattttcagtatcttctcttcttatactttcactctcactactaactttttgaaaagtatgttgacccatgcaaa

SEQ ID NO: 897778 - DNA, 615 bp, Homo sapiens
gccagagaggcaatgtcctctatctagccatgcttcaaaccccagagcctgactggatttccaaacttcccattggtgtgaattaatacataatccacttttctttccaaggtaacatgagttggtcttctactactggcaatctaatgagctaaatttgatgttgtaaacacaaatcaaatcatttacaatgttattctatctgagaccaggaaattgccttgctttagataaaagcttaatataggagacaggaagacaggaatttacatctgaactgataagataaaggcatcaacatagcaacaaggtgaataggaaaatattttttcaagagacccaaaccacaaccacaaaaagatatatttctatatatactattctggtgacttactcatttcacagataaatggaagaatgaatttcatttaccagggcagactggaaggggaaggatcttttagagctagctattcagacttcagtgggcagtgaggtagagaaatacaaggaaaaggaaatgtggacccagttggataytggtaagaaattccagtctattaaatataataataatggtggccatttttattggctattatggcttttaatgcc

SEQ ID NO: 897779 - DNA, 632 bp, Homo sapiens
ccagggtgcagagaatggagggagagtcagctgagacctgggacagcccagcaaggtttcatggaaagcaactgacctgaacttagcccagaaaaatgggcacaggggatgtgagtggatggctggaggggatgtaagaattatgagggatgatgtgagcaaataagtcatgttgaaatttttcttaagtggattcaaaataaccaacaaaatattgtccttaagcccagatttttatccacctctgaaaaaaatgtgagatttttggtcgtttagtagctttttccccaacatttgtttctccagctataaaaatgaagatatcactttccatattcctcccccatagagacgttgaaagggttaaagtattctgtaaagctttgagggcctccttaaagaagttatgcaaaacaaaattataatcatcatttttttttgttggtttttattatctttattgtaaaactgccccaggggaagcatcacttttagtgtggtcacagwctgctcaaacacttaaccatctcattgtgacccacctgactggaaaggcgcagcagatccttggcctccacacacccttcttcccgcaatccctactgtttcagaggctttccagaggccaaggc

SEQ ID NO: 897780 - DNA, 543 bp, Homo sapiens
gctcaatatgccaaattccagtttggatagaagcttagaaagtttcaacttccttatagagtaggattttaactagctagatctttaattcttgcattcaatgaatgcacaagcaatttagctaagtaaakagtttcatgtaaccatttcctataaaaatgtgtttaaatttgtttttgaggttgcaagagcattgatgaacttttggaggggggattttgtttatttgctttttgccttctttttaaaaatacttactaatgagattggtaaagatagctggtctacccttgagaaaaacccaagaacaggaaaaagagatccactgaaattcttacctggaaactaagcaattgaactgcggagcccttctggtcaaacataaaatgtatcaaaatgagacttgttcttctttcatgttctcttacaaagattttgtaagctggactcagctaaaaattaaaaaaataagtttctttatggaaaacttcctgtgtcccttaatgtccaatgaagtatataaaaagctcatttgtaattagg

SEQ ID NO: 897781 - DNA, 515 bp, Homo sapiens
gggatattgggagttttttcctccctaaaaggggaaacttgagagctgatgggagtgcaggaaaagatccctttgctactgacaagcagctgcctgaacttttcattgtcagcttcaatgagtaggtcttttctctggcctccctaagctcttcaccttccctaccctgccacaggaagtaccttccttctctacttttcctttcctgtattttcctcttgcccagaggccatgtgttgaaactccaagtcaaaggttggattaaaaatgacagggcccatctgggggcaaatttaagccttgacagtttaataatgggtgctaagcagagtggataatatctatgtttcaacatacatattttgctctgaccataatgaaaaaaaaataattttcctttatgatgtggcttggccccagggtgatggtttcgcaagcccratcactagggccacccagggaaagggaacccagaagcctggcatgccagcaaaagggtaaaatttcttaccagt

SEQ ID NO: 897782 - DNA, 628 bp, Homo sapiens
ttttaaagaagcaaattttaggatgataattgcccattcacatgattatttatatctcttctagcatcacaactaaacttgttttcttttcctggtgccttttttcccctcctgcttcttyattgctcttattctcattgccagtgtttcattttctcaccagtgcccctccaatgaaaggagcccttcatattttactacaaataacttctctgtctttggccccctagagaccttcttcatattctctgtagttaacattttcttaactttggcagctctataagccctcaaaagagctcttgagaatctctctttttgaggttattacctggtaatcaatgtcactgccttacattgtaaaaggcataaagtctatgagcatctttataaactcctgatcatttcagcaataagcaactataacttctcactatcttctaaactacaggttttctctttagaaaaagaaaaaaatgtttctgggatattagatggctggatgctttgctttgctaactcttaccatttggttatttattggaaaatatttatcaagtgctggctatgtgtcaggtactggtgtcaatacttcgaatagaaaatggggaatttactagctctggct

SEQ ID NO: 897783 - DNA, 585 bp, Homo sapiens
ttaaattcctctttgatctacgttagctgagtaatcaccacattatcacaacatgcgggggctccaagcatccgaaacagtacagatgtcatcccagcagacgccataccttctgcctctgtgcaagctgatgaacccatccaaactggctttcctcatctgtaaaatgggtagatattgggattttcttcatagattttaaggattaatgatcatgcaggaaacaggcttagcacagggtccagcacttaggaagtccttggtgggtgctaaggatgattcctaactcaggcaggcaggtattgaggcagtgcctccagcgtctggtccctacatcctatccacaaaatcagtgcagagggaacatgcattacagcagcagacctagaagccaagagaaagaaggaatgttttagttcttctgaagttgagaccctggatatgttgagaaaactagcatggaataagagcggtcaaagaaaggctttaagaaataaagtcrctagaatttattgtttctgtctaacactaaataatccctgagaggactaacagcatcactggccgtcccaagtgatcaatttg

SEQ ID NO: 897784 - DNA, 623 bp, Homo sapiens
cagtagagaagccaattttctgaataattcccagcaatgcccaagttaaaatcttctggtgtgttggaagctaaaaccacggatgaatcatcctattgatgaatggccacacaaattcagaccacacaagacttcacactgggcctagcataggtcaaagatttgtcaagaattttgatttccttgtgaaaaaattgatgaattaatattttaaatttataatctggaagaattgacatgacaatatctcttcatagattttttccgttctctgacttaattaatggttggattcagttgaatgataatagttactagagagttgttttaaaagtaaattgtgtttaaataaattaaatgttttcctttcctcaaaaagtttgcttagtaatatacactaaaatatatatcatgttgtaacatatttgaagcctttttaaaatgagacaacaaactattgagattcccaatagtcatttccggagagatrtcaggattattattattgctgttaccaatgacagtttgcatcatactacttactaactggaaaacactatttataagttgtattctaaaacaattgactgtaactcttattttcattaagagtttatgaatca

SEQ ID NO: 897785 - DNA, 594 bp, Homo sapiens
taaccttttgggacaacataaaagaccactgaattaagtcctggctatttgcttctagtcatgatgtccctgcaatatatgagcctcttggttctgagctcaggcatctttcagtccactgacccttttggagcctccatgtaacaccactaaaatgggatatagaaatgtctgtgtttcctgcatatcattcaaaatttgtgagaagttagaatcattgcctgagctcgtatgtttgtagttaatttatttagtctttttatgtctttagatacctttatttgtctttactcatacatgagagtttaggtataaaattctagtttaatgattatttttccttggcatttaaaaagatataatttcattttcttctggaatctattgttgctaatgaatctctagtggtagtcaaattgttccttggaaagtaatctctcttttctttatattatttattttttcctaaaatttcccaaagatatgcctagctgttggtttaattaarttaattatttttattttttttcccacccatttctccttaattttatttaacttcctcagtactcagagtacattttccctataaaa

SEQ ID NO: 897786 - DNA, 633 bp, Homo sapiens
tgggttagaacatgctcctttagctcggagaagtttgttattaccgaccttccgaagcctacttctctcaactcatcaaagtcattcttcatccagctttgttccattgctggccaggagctgcgatcctttggaggagaagaggcactttgctttttagaattttctgcttttctgctctggtttctccccatctttgtggttttatctacctttggtctttgttgttggtgacctacagatggggttttggattggatgtcctttttgttgatgttgatgctattcctttccgtttgttagtttttcttctaacagtcaggtccctcagctgcagatctgttggagtttgctggaggtccactgcagaccctgttttcctgggtatcaccagcagaggctgcagaacagcaaatattgctgcctgatccttctgctggaagcttcatcccagaggggcacctacctgtatgaggtgtctttcggcccctactgggaggtgtctcccagttaggctacatgggagtcagggacccayttgaggaggcagtgtgtcctttcttagcactcaaatgccatgcttggagaatcactgctctctttggggctgtcagacagcgatgtttaagtctg

SEQ ID NO: 897787 - DNA, 645 bp, Homo sapiens
gagctgcacactacctctctaacmggctgttcaatgagatagttacttgaccacactactttcaatgaggtaatggtcccacatgcaccctctttccttggtagaaggtacataaaatagaaataaatgatcaagttacagaaagaactctgaatgaccaattctggttcaagtaaaggccttcccctaccctgcagttccctgatgataaatctttcagcaacaggctgatccctttcagaaaataggctgactagcaatgttttcaccttctgtacttgtcaggatggagtgagtgtgagatggagacctgaacacacacacaaccgcagacaaatggccgtgaatgggtttcctcattcagggccatttggccgatcctctggcggctgctgggagggagagaaaagggaacaggttgcaatgtcaataataatagcaaatgcaatagaccatctgtaaaaggaagctgttgatctgacttccagagcatgctggcgacaaggttgaagggacaggacagagctcctactactaaaatgaatggcaatgtcattttccatttcttcattctcttagttttcccttgggggtagattatttaaagtctgtcatgagtctttgcgaatttgcaaagcaacttgt

SEQ ID NO: 897788 - DNA, 645 bp, Homo sapiens
gagctgcacactacctctctaacaggctgttcaatgagatagttacttgaccacactactttcaatgaggtaatggtcccacatgcaccctctttccttggtagaaggtrcataaaatagaaataaatgatcaagttacagaaagaactctgaatgaccaattctggttcaagtaaaggccttcccctaccctgcagttccctgatgataaatctttcagcaacaggctgatccctttcagaaaataggctgactagcaatgttttcaccttctgtacttgtcaggatggagtgagtgtgagatggagacctgaacacacacacaaccgcagacaaatggccgtgaatgggtttcctcattcagggccatttggccgatcctctggcggctgctgggagggagagaaaagggaacaggttgcaatgtcaataataatagcaaatgcaatagaccatctgtaaaaggaagctgttgatctgacttccagagcatgctggcgacaaggttgaagggacaggacagagctcctactactaaaatgaatggcaatgtcattttccatttcttcattctcttagttttcccttgggggtagattatttaaagtctgtcatgagtctttgcgaatttgcaaagcaacttgt

SEQ ID NO: 897789 - DNA, 639 bp, Homo sapiens
aaatcagaatatgtgaatgtggacttctttaagacatgtcaaaatgaataagagttttagtgagctgttctatttcttgtacaagccagtgaaataacaatgagcaagtcttcagtgttgagatggggaaatacgaaaaccatcccagcttactccactcatcaccatggtttcatcatctattacacagtaaaacaaacagagccactgactataacccttaatgagcatatgtgactccgataatatttatcgggtttatttgtttgaggccaactgaaatgaaaagaaaacagtgcgggattgggtcattactctcttctgacgtgtgctgtaattctaaggaaaacattagtagcctatttttagcaagtaccttcatccactgaagagataatggcccaaggagtaatcgctgagatggaaagcagaaattcccagaattaaactgtcttgctcatctgttctatggtcataggaaatctatcagcactgtcatttctcatcaacaacgaggaatgttttaaatcaggccattatgcaattctccctaactgractacctttcaccttcatctctgctaagtcaggatcctccagccaaaagaaataaaaaaacctcacctcctccagaaagtc

SEQ ID NO: 897790 - DNA, 479 bp, Homo sapiens
caattagtgcctttcacatctttatctgatcattcaaacttcttacaacagggcttctcatacttgggctttgacttaacggtgatctttgaacttytgaaacttgatgataaatttgtgagtatgggttcttcagcagttcctgggagaggacctcagctttcatcaagctctcactggtggtaatgcccaaaacagttacaaacccaaggctgctcggtcagcaatatgaagaccatccaaaatgtggaagctacttttttcattgatctcagacttaactgccctcatgtttgttgtggttgtttttttttttttttttttttttcatcttctgaaaactaatttctggctaaaattcacacacatatatgcatactgctatacccacccactggtgacttattcttaaaatgatgacttctttcagaccagtattttcagttttatcagccaataacacttaataggatgtgtgt

SEQ ID NO: 897791 - DNA, 368 bp, Homo sapiens
tgaaaccatgttgctgtcccctggggaatggttatgacttaccgcccagtggacataagtgggtactcaggggaagattattaattagctactccttcaaacaaccttaaaaaaaaatctttatttcatgggtggttgggagtgggggcagatagacaaaacacatttcctattaactagatgttatatttacttcctgacacggtttggatgtttgctccctccaaatctcatgttgaaatgtgattccccatgttgcgggcagggcctagtggaaggcgattgtgtcatggtttggkggggcaggcaggggggatcccctcatgaatggcttagcatcatccccatgatgataagtgagttcttgc

SEQ ID NO: 897792 - DNA, 561 bp, Homo sapiens
agaaaaagaggttgaagtggacttatagttccacatggctggggaggccttagaatcatggagagaggcgaaaggcagttcctacatggcggtggcaagagaaaaatgaagaggaagcaaaagtggaaacccctgataaacccatcagatctcatgagacttattcactatcacgagaatagaacaggaaagactggcccccatgattccattacctcccctgggtccctcccacaacacatgggaattctgagacacattatgcaagttgagatttgagtgggggcacagccaaaccatataattccaacattggcccctccaaatctcatgtcctcacgtttcaaaaccaatcatgcctttccaactgtcccccaaagtcttaactcatttcagcattaacccaaacgtccgcagtccaaagtttcgtctgagacaaggcaagtcccttccacctatgagcctataaaatcaaaagyaagttggttgcttcctagatacaatgggggtacaggtattgggtaaaatagccattccaaatgggagaaattggccaaaaca

SEQ ID NO: 897793 - DNA, 594 bp, Homo sapiens
tctttaaaccatttgaagtatattttgtgtagggtttaaaggcagagtctaattcagctatttttaattatggacatccagttgtcctagcaccatagattgaatggggcattctttatttttttaattttgtttgtttatttataacatgatgaatattacccaacccaagaactagatcactaacaataatttaatctacctgtgtattattccttgaacaggacactcttgctttctgctttgcaatactatgtctgtcatgttctccatattgtttctctggcctatttgtctatctttggaccaatgtcacacagtctcattactagatctttaaaataaatcttaatatctggtggagcaagttcttatcttgttttcaaattgtcttggatattcttaacctttagctttttcatatgaatttcatgtagtattttgtttagaatgtttccatttttgttttgagtgaaattggtctacacattgttttttttcctgcactattcttgtctggtttggtatcrgggattttaaagcctcattcaataatgtgaacagcgtttcctcttcttctattatatgaaatat

SEQ ID NO: 897794 - DNA, 588 bp, Homo sapiens
cttctccctgattcctgtcacatgccttatctatggctgggtggatttgtaatgggggaagctccttcacttctaccagctactataggttggggcaatgcagaggtaacagagraaggggcagagaactttatacttactaattcaccattgtaatcctttcttatacactgcagcttccccagccagcaatgggcagttagtcccttctctgtgtaaatatgtaggtgttcttctctctagggacttaagcatggttctttcaaggcccttgcaggaaggcctccaaactgcatagttgccactacagacctctggcttctcctcttctaccccatttccctgtccctgcctctcagccgtcaccctgtagtctcttgtttcttgattctacttgtctaatactaaggcagttcaggcacagctaccttgaatatatacccacctgatccaatgggactgacacagctttgctatgacaaaaggtgggactataagccttcctcttgtcattcccattttgtcctgccacatctcaccaactcccatctcctctagctcaaataggcacaggagggcttatgagca

SEQ ID NO: 897795 - DNA, 588 bp, Homo sapiens
cttctccctgattcctgtcacatgccttatctatggctgggtggatttgtaatgggggaagctccttcacttctaccagctactataggttggggcaatgcagaggtaacagagaaaggggcagagaactttatacttactaattcaccattgtaatcctttcttatacactgcagcttccccagccagcaatgggcagttagtcccttctctgtgtaaatatgtaggtgttcttctctctagggacttaagcatggttctttcaaggcccttgcaggaaggcctccaaactgcatagttgccactacagacctctggcttctcctcttctaccccatttccctgtccctgcctctcagccgtcaccctgtagtctcttgtttcttgattctacttgtctaatactaaggcagttcaggcacagctaccttgaatatatacccacctgatccaatgggactgacacagctttgctatgacaaaaggtgggactataagccttcctcttgtcwttcccattttgtcctgccacatctcaccaactcccatctcctctagctcaaataggcacaggagggcttatgagca

SEQ ID NO: 897796 - DNA, 615 bp, Homo sapiens
ctgcaaatcaggaagacagccctcatcagaacccagccatgctggcactctaatctcaaacatcccagcctccagaacagtgagaaataaaagtctgttatttaagttaagaagaaggagacagaggaggagaatgaggaggagacaaacaatgcaatacgaaaatagacaaattttctaaagaaataattaatagaaataaaaatatagaaacagtttaacctctctactaattgaagaaatgaaaattgaaatgaaatatttttacctttgagttaaatgtttcttaatataaaatgatggcaaaaataaggggaaatagttgttacataatgattcagacaatttggagggagattgggaaatatctgctaaaattaaagttttagattctttgacaaagccatttcattgctctgtatcaattctagagaaacattcacatctgtacagagtcatgtgtataaaaacatttgtggccacattwttgtaataataaaatcttagaaataaccttagtgtctgtgagtagggtaattattaaataatatggcacatgcatattatagaaaataaacagacagaatgagttttctccatttataccaatatgga

SEQ ID NO: 897797 - DNA, 589 bp, Homo sapiens
aaccagggggcaggggggcacaaacatggaagtggggaggctggagccaagctaagtaatatgctcagttcccacattcttaagaagaacagaaatagaaaacatgggtaagactgaacttttagctagatggaagcagaactgggagtgcagctggcttgtgccaggtgcaattatgagatcacgccgcacatccattacataccaagtttcacctctgcattctcagtcagcaacacattctggcccttgatatcccggtgaatcacatgatgaatgtgaagatgtgccagtccctgaataggaaagacagacctgaattttagttttctgtgactataagtaaacagccaggaacacaccttttataagaaagtgcacatgtggaccaaaggtgtttgtgagctcatgaacattaacttcgtcttagtgcattcccaggaagacagcaccaatactaccacacacacagaaagaagtcctccccaccctccacattcccagtgggttaggttccccgtgtgagcaacgtgaycacttctagctgtgcctttaagatacactgcagattaccatctgcagtttctgt

SEQ ID NO: 897798 - DNA, 570 bp, Homo sapiens
agatgggttaagccctttgctcatctcaggccctctcagtgtggctgccttggcccactcgggctgctacaacaaaaggctatagactggtactkcataggcaacagagaggtatttctcacagttctggagggtggaagcccaagatcaaggcaccgtcatattgggtgtctgctgaggtcccacttcctgcttcagagatggttctgcccacatgacctaatcaccttccaaagaccccacctcctaataccatcatctaacgtgtgaggatttcaacagaggaatttgggggagacataaacattcagactgtagcagtagcaaaaacaaattgtatcagatgctagaggagctccaaaagtgaactctgttacaaaccaagggactcaattcacccagtttcaaccaaagtggaagcttttccactgtgaatgattggccagaagtgggaagtgaaaatgggggtagggtggggagctgggagtgaaggaaaatgtagcaccaaggccaggaggcaggaagggtccacagaagcctgtggacaaaatttgaagagacaccaatcag

SEQ ID NO: 897799 - DNA, 599 bp, Homo sapiens
tatcatctttctacagctgttgctcaaaaattaggacatttttctcataagtttcataaacttgyctgaagttccattgcccagagttgttcctgtgcccatttctgatcacccacctgcagaaacgggacaacctcacccatccaaaccaagccagaggtgactgggagcagcttcttctgtagccatgggctgcctggggtcacatacctgaatcaaatcagttcagtttggaaggagaaaaggcaggcaaccagaaatgtcctacattagtccattctcacactgctataaagaagtgcctggaactgggtaattaataaagaaaagaggtttaattggctccagttctgcaggctgtatgggaagcatggctggggaggcctcaggaaacttacaattgtggcagaaggtgaaggggaagcaggcattttcttacatggtcagagcaagaggaagggtgttggggaggtgttacactcttttaaacaaccatatcttgcaataactcactcaccatcaggagaacagcaccaaaggagaaacctgcccccatgtgccagtcaccttccaccaggctccacctccaacactgggga

SEQ ID NO: 897800 - DNA, 513 bp, Homo sapiens
ttctttgtctgcctgttgagccatttgtctgcttgctacgtggacatctgtggccagtgaacttgagctctgttttcccttggggtggatctccctgccatgatcatctacctattctcagccactctgcagtggtcgtggcctccccatcttgtactagaagtctgcccagcagacacaaggtcacttaaagcccacctctaaaaagtatgcctccctgttgctcaaattcacccattagtgccattagttattttttgcatctataagttttactttaatatagctgccaaagtggtgttgagaccaccctctgagatgaatcccaagtgggaactgagacaaactcctctcagcttttgccttcccttcagtctttccagtgcagccctcrccctaagactgtgtcatggactgaggttggagtaaatgtgtagagcacacacctctgtctgcctctcgaaactctgtgctcttttcctccccataacccaccagtgttatcaccatacc

SEQ ID NO: 897801 - DNA, 513 bp, Homo sapiens
ttctttgtctgcctgttgagccatttgtctgcttgctacgtggacatctgtggccagtgaacttgagctctgttttcccttggggtggatctccctgccatgatcatctacctattctcagccactctgcagtggtcgtggcctccccatcttgtactagaagtctgcccagcagacacaaggtcacttaaagcccacctctaaaaagtatgcctccctgttgctcaaattcacccattagtgccattagttattttttgcatctataagttttactttaatatagctgccaaagtggtgttgagaccaccctctgagatgaatcccaagtgggaactgagacaaactcctctcagcttttgccttcccttcagtctttccagtgcagccctcaccctaagactgtgtcatggactgaggttgragtaaatgtgtagagcacacacctctgtctgcctctcgaaactctgtgctcttttcctccccataacccaccagtgttatcaccatacc

SEQ ID NO: 897802 - DNA, 692 bp, Homo sapiens
aaatttagaatttatactttgtagagttggttttaagtacagcagtctattttcttttccatgctgaaatctcataattcagtagtgactttgatctacaataaaatattgttgacttgcctcagaaagattttcatttgagtctctctaagaaacaccaaacatggtgaactgcaaaattaaaactctctgttgaaagagcatggaagtttttactcttgacattctagaaactctcatagataaacaaatctccttttgggtcattccattaactcacttattcatttaggtattcactcatcaggctatgaacatcaagtatacccaaaaatataggctctttcccaaagtggtgaaacctagtggcagaagtcatataagttaacaatcaaaataccaagtaataagtcttatgatagagttgctcacagttttctctgttagcacaaaagagggatagctgactatccagggagtaacgagtgtcagcaaggtctccctgaaagaaggtagcatttcatctgcatcttgaaaagcaagtagaagtgatccagttgatgaacrcgaagtcaagagctttaaagagaagaaaatgcaagcacagtctctaggtcagacaaaacacagcctcttcctggaaccgctagagtcgagtgtattcagggaaaagtaatgagagaagagactgg

SEQ ID NO: 897803 - DNA, 568 bp, Homo sapiens
ataacaatgaaaacaaatcctagtaggtaaaaccacagtggatttgtttgtgtcaggtcacatctgccgagcccagaaagcctgctgaggacactggttaatagtaaacacctwtttggagctgcctgtcacaaggaccacatcagggaattccccttaataaaatcagtaactttatttaaaaaaaaaaaaaaactaaaaactaaagtcatcaacttatatttaaatttcaaaaagagaactagctttttaaaaaaattacaaacaaatgtataaatctagattttgtatgctatactggatctgcttaaggtgccacatgcctgtatttagaatatgtcccacaaataaaaataatattctatgaatgcaataaaaaacagagatattggctagctgttttgcttaatctgtaaagtgagatatgaaaagctgatataaaaagaataaccatagcattaacaatactgatgtcatggcagctggcatacctacaatgttttaggccctaaactacattttctaccgtcactgtcacgtggcgagccacatattgtgcaatatgctt

SEQ ID NO: 897804 - DNA, 613 bp, Homo sapiens
ctcaaaggcattgtctgatttgytttttaaatgtctttattagaatttaaaataagatatttgagtgtttgatacggtattctttaaagaataccatactgagagaatacacctaagtggctggtactggatttagagtatgtctttctacaattcatttaatttcgtttatataaactctgatgttgattcctgcaacgactatagattctgaagctggccccccagtcatcaacacaagttatgcacaccgagcaatctggccttgaaggagcataatggctttaatgagtaggaaatcacttaggaattttgacacatggtgatatgcttaagcaattaggcctgtccttcgctaggaggctctgctgttaatatgacaatgaaattgactatgtcacttcaaccttctaatggcttgaagcaactttgctcattgcccatcaacaccagtctgaatcttactttctagggaaagcgcttggctgcaggctgacttgaatttgtgttggggatcagctgtaatcacatgggcgtgatttattggttttctatctagtgctttctgtttgtactgaaaatatgcaatttgttttccttctgaaacaatcaa

SEQ ID NO: 897805 - DNA, 647 bp, Homo sapiens
ttttccttccttcttgcctttgatggggtcaaggacatgccaccccaaaaataactgtagaagaccagaatatgccaagtacgcctcttcagcacaagaattacttgagctggctatttgagaaacagcagacacagaagaagctctaaaaaatcactcttttaaaaaagaaatttatatctataaaggaaatctccatttgtaaggatgtctctctctctctgtaccaggaagagaaacatgactaaatcactagagactcttagtcaatgaagacagcaccgatttaaatctgcataacaagccttacccttgtttcacagtgcttttcctgcttcagagatcaatgggatttaagatgtctaagacaactctttgggatctactctagatatctactcatttctctgggttatctcccatgtatacaggatatatacatgttattaaatttctgatgttttttctgttattaatcttttttttgctgggagtcccagatgagaactcatgaaaagtgaaagagaaaattatttttcctcccctacrccttcttttcttccttccttcctttttccctacatattcgctggagttcagaggaagtgcacagctgctttaggcaactgactgagacgtatcagttt

SEQ ID NO: 897806 - DNA, 613 bp, Homo sapiens
cttggtccttatggctctacatggacgacagccaacctgtaagcagaaatacacactaggagtttaggtgaggacaaaacaaaattctacagcatctgagcccttttacrtgtggggatctatttgctgccacagctcagactctctactaagactggtatctactgtttcagcagcttgaaccacaagctgatgttcctccatgctccagccaacaccaaaggtcattttctatttcctctggttctcccacactggaatggctgaaatcccacaggctgtggaagctactgaagatcaaagctattccatgccagacaaatgcttcttcaaaccagcatctaacgattctacttcagggattagggaaagaatacattttgtgattgcttttaattggtacctgtcgtctgcttgatagaattttattaacagaagtgtaaacattcattgcaatctcagaacacaggaatcttaagcagcttatgaaattcaatcaaagttctttttatctttagtgtttgctgataactcattaaatgtttctcaatgttacaagttctacagcagaaatatgccttgcaaataaaagtgataatgtagagatgttaac

SEQ ID NO: 897807 - DNA, 624 bp, Homo sapiens
attttgagttaataatcttttcctgaaaccactttatatttcacaattatttctggcattattccctctttcccaaaggaaatttccttaagtttattgctagcacatacataaaatggtcattctaaaatgctatgatattgtttgactttttagtttactcaaactaatttaaaaacagcataaattagtttacttaaactaatttataacatttgttatgttttaatataaggatttaaagaacaattatgaaataggaaaattttcagaagtacttggtcttaattaccaagttatttaatctaaacaaagccataaatttatctgtttacttctcttcctccatttcatttcaacaacaaatacatgggttcagtgggatgattttagtttggtttagattcattctccatcatacaactgttaaattcttcaaaatattaacgacttgggcacctcaggtattccatattacttagaaattgggactttctaaaaaacccttctcatttaaataaaatttatcctattgtagattgacatagttgwgaattatgacctagactgctttcatttctatgtctttggctttgaaattttacctaagtagctcatatgtga

SEQ ID NO: 897808 - DNA, 590 bp, Homo sapiens
tcatgttgatgagtagggtggatctaatccagaaaagcataaacaccagcctcagctaattcagaaagggcgtgcccagtgaggttgggagattggtggtctcctttgtcagcagatgagaatagctgaaatttmcattctttccacaggctgccaaatacacagacacacgcattcacctattatgtgggtttatatgtgcaaataggcaggccaaaagtaggattagatgaacctgaatcagaggaatgatcaaaactggataagtgattcttttaaaacattaaagtgtgtgtgtgtgtgtgtgtgttttattttgccatgtatagtgaagtggagcagacactggatttttcatcttagaaaacctagattttaatcttaccttgaccatttctaggtgtgctttcagtggcacattatttaagcgctctcatttcatttctttttttgtaaattggctttagtattaatacccagttcacacacatctttttaaaaggattaaacatacctggtggaatgcctgcctcttaaagggcatgcagtcaagttcagctactgtgtttagtaatgtatctgatgatagg

SEQ ID NO: 897809 - DNA, 593 bp, Homo sapiens
aaaaaatgttacattgttttcaaaaagtttgtaaacacagtgcagagatgtggatctgttgttacctcagtctacattttgaagtgcttttctgagttagtgactctttgctgygaatttgattctgctgtttaaacttccaattttgggttataacaaggtccctggaagtaaaccaatatcaatcactccaatattggtagatatcctggaaatatttgacatatttagacccacaagatgttagtccctaaaaattgtactttcttttatttttatttttattttattttataattattatattttaagttttagggtacatgtgcacaacgtgcaggtttgttacataggtatacatgtgccatgttagtgtgctgcacccattaactcgtcattttgcattaggtatatctcctaatgctatccctcccccctaccccaccccacaacagtccccggtgtgtgatgttccccttcttgtgtccatgtgttcttattgttcaattcccacctacgagtgagaacatgcagtgtttggttttttgtccttgcgatagtttgctgagaatgatggtttccagcttcttcca

SEQ ID NO: 897810 - DNA, 591 bp, Homo sapiens
gtttgttccatcctctcacattatcaaaacaattctttctgacataaaattgttgagacaatgggtaatatataaagcccacagatggttgaaaggaaaaactgtaaaacaccaattaaaaaatattctaaagttgtaaatagaaaattcagagaagaaaagcaatgtgaaaattgttagtaaacacaaacatagtttccttcatcaataataaatggcatgcaaattaaaataatcaccaggcaccattttttccatttcaaaacaagcaaaatttaaaaatcatgtcctcctgtaatcccagcactttcggaggccgaggcgggcagatcacgaggtcaggagatcgagaccattctggctaacacgatgaaaccctgtctctactaaaaatacaaaaaatttagctgggcatggtggcgggcccctgtagtcccagctacttgggaggctgagacaggagaatggcatgaacccgggaggtggagtttgcagtgagctgaggtcacgccactgcactccagcctgggtgacagagcragactccatataaaaaaaaaaacaaaaaaacatgtcagtactggtaaaggt

SEQ ID NO: 897811 - DNA, 591 bp, Homo sapiens
gtttgttccatcctctcacattatcaaaacaattctttctgacataaaattgttgagacaatgggtaatatataaagcccacagatggttgaaaggaaaaactgtaaaacaccaattaaaaaatattctaaagttgtaaatagaaaattcagagaagaaaagcaatgtgaaaattgttagtaaacacaaacatagtttccttcatcaataataaatggcatgcaaattaaaataatcaccaggcaccattttttccatttcaaaacaagcaaaatttaaaaatcatgtcctcctgtaatcccagcactttcggaggccgaggcgggcagatcacgaggtcaggagatcgagaccattctggctaacacgatgaaaccctgtctctactaaaaatacaaaaaatttagctgggcatggtggcgggcccctgtagtcccagctacttgggaggctgagacaggagaatggcatgaacccgggaggtggagtttgcagtgagctgaggtcacgccactgcactccagcctgggtgacagagcaagactccatataaaaaaaaaaamaaaaaaacatgtcagtactggtaaaggt

SEQ ID NO: 897812 - DNA, 591 bp, Homo sapiens
gtttgttccatcctctcacattatcaaaacaattctttctgacataaaattgttgagacaatgggtaatatataaagcccacagatggttgaaaggaaaaactgtaaaacaccaattaaaaaatattctaaagttgtaaatagaaaattcagagaagaaaagcaatgtgaaaattgttagtaaacacaaacatagtttccttcatcaataataaatggcatgcaaattaaaataatcaccaggcaccattttttccatttcaaaacaagcaaaatttaaaaatcatgtcctcctgtaatcccagcactttcggaggccgaggcgggcagatcacgaggtcaggagatcgagaccattctggctaacacgatgaaaccctgtctctactaaaaatacaaaaaatttagctgggcatggtggcgggcccctgtagtcccagctacttgggaggctgagacaggagaatggcatgaacccgggaggtggagtttgcagtgagctgaggtcacgccactgcactccagcctgggtgacagagcaagactccatataaaaaaaaaaacmaaaaaacatgtcagtactggtaaaggt

SEQ ID NO: 897813 - DNA, 622 bp, Homo sapiens
ctgtggatccaaagtccacccatggatttagcctatgtatcagtttcctggactgccataataaattgggcaacagaaatttattctctcacagctctagagggctagaagtccaaaatcaaattgtcaccagggccatgctctcttcaaaggctctgacggggatcctttctttcctcttacagcttctgagggcctcaggcgtttcttgactcgtggcagcaaaactgcaatctctgcctccgtcttcacatggccttcctccctgtgaacctctctgtcttctcctcttcttataagaaccctagtcaggcctggaccagcccattcccccttcccgctggctccatgaggccaactgtgagcagccgaacagacaggcgggtgcacacaagaactgacaggtgcacacagggagggcagcgggcatgcagggcccggactggcactcaaggccctccctggagggctagggcagggctcaggtactgggaagaatggagggaggtcctactaactaattttcctgagagyggtcagagagttcaacagaattttgatttggctgctaccttgaaatccaagccctaaaaatgccagcttgtttggacttagaagatga

SEQ ID NO: 897814 - DNA, 614 bp, Homo sapiens
ctatgagacaaccaaagaaaagagaaatttaaggcccagaatgccagctgatgtcagtgagaatgtggagaagctgaaactctcatttrttactggctggaacataaattagtacaactactttgaaaagtaacctgacaatcattatcaagcaaaactgaagatgtgtgtacctttcgaccaagcaattccacttctaggtctctttgctctggagaagtatgattcatgtgcacaagatggtttatacaagaaagcttattttacagaatgtttatgattacataaagttgggaacaacccaaggttcatgatgagaacatataaagacattatgtgatagccgtgcaatggaatactattgggcagtgaaaatagattagctagatctacatgtattgatgttaataaatctcaaaatcatgttgcagtaaaagcaatctgcaaaaactgtacaatataccaattgcataaattgtgtggacatacaaaacaatgctgtatctgttgccatttatggctctctaaataggtagtagtaatataaaatactcatgtgaatattaagcaccaaatttagggtaatgattccttctagggagggaagaaaagag

SEQ ID NO: 897815 - DNA, 590 bp, Homo sapiens
tttttgctccaacaaaaaagagttatttcaaacaactatttaattgaggtctttgggtttacyaataactaattgttagtgatgttgttgaagctacccaaatagtcctcacctactgagggacattccaactgaagcacctttaatttaaactttgatgcctctggaattttccaacatacctgagactttactttctaattttctggatatataataatttaagtaatgtaagcagaacatttttaacaatattttggaatattttggaaatataagtctatctataaatctacttagacacactaattgcttcttattacaaataacctacacaatgatccatttaaatgcataaaaatattatggtatatttttttttttttaaacagggtctcactgttgcccaggctggagtcagtggcatgatagtggctcactgcagcctcaacctcccaagatcaagggatcctcctgcctcactctcctgagtagctgggacttcaggtgcacaccatcacacccagctaatatttttatttttatttttagtagagacaagtcctcactatgttgcccaagctggtctc

SEQ ID NO: 897816 - DNA, 618 bp, Homo sapiens
ccaagtccaaaagcctcaaaagcagggaagccaacagtgcagccttgggtctgtggccgaaagcccaagagcccctggcaaaccactgatgtaagtccgagastccaaaggccaaagagtctgatatccaagggcgggaagcatctagcacagaagaaagataaaagccagaagactcagcaagccagcttatcccaccttcttccacctgctttgttctagccgagctggcagctgggtggatgaggcccacccgcattgaggatgggtcttcctctcccagtccactgactcaaatatcaatctcctctggcaacaccctcacagacacacctagaaacaatactttaccagctatctaggtttccttcagtccaatcaagctgacacctaatattaaccatcacacttgccatattgctgacttttcagctaagtgcaagtttgagattttaatgatggaagagcttgacacacgtagctaccttttgaagactgaagatgcagggttagtttgcctacagttatcactggttggaaatgcaaggagacagaagtctttgtattgagctggttaatttcgaggcttatagtgagctccaaagagagaatcaaaac

SEQ ID NO: 897817 - DNA, 588 bp, Homo sapiens
cttgaatgttcaaggtgtcctgtcattttccaggattcttccccacgcagcctcttcagcaggaaagctggattttaagagagcaaaagtggaagctgccaggcctgtgaagagctgggcccaaactggcacagtgtaacttctgcctcattctgttggccaaagtaaaccacaaaaccagcctgattttaaggagaggaaaggcagattctatgtcttgatggggaaggtaatataaatgtacaggaaggacttgctggaaggcatctttagagacaatatatcatgcacagtattttagacataatatttgatttaatgaataggtgaacaaaagtgcctgcctgccagctctggagagagcagcagatctcccagcacagaggactggtcaaagaactaccgaagaaaacattcctttggggccaccagtgaatgaaaatgtgagtctagctatctcaggtagcacagaacataaatatagaacyatcagtgcactgtgaagaactgctcactcagctggcttgactggggcctagtggccactcgagcatagtctggtactcactgttcacaaacatttccatc

SEQ ID NO: 897818 - DNA, 603 bp, Homo sapiens
gctccaagaaaaccttgttaatctgacacagggtcttgcrtcagtgtgcctttgacattaatggttaatttatagagaaactgaacttattttatctctcaaaatcagcccttacaatctcatgtgcccacctcttctgcaaggtgcctgggccttgaggaattgaatagttttaatttctgcccctgtgtctcatgaaggcagtttattttgactgctgtcttctacctggcctaaagatgaggctttaattgctgtcagtgtttaagacttagcaggatttggtgtccattttagacccagcagtcagagccctataactcaatggcacaaggtttttaaaagcacatacagaaagatacatagatgtaataacattaatttaaaaaacatttttttaaatctcaggttttttttaagcaaaccaaaacagaataataatgacataggaattacttccataaaacatgaaatctgttaggccagttaccaaaaggcaatagaaaagatcttctgcagtgcatagaatattattttggaagaaaacatttccttagacctttaagaaaacatttttagcatcaagtcacaataaacagttgg

SEQ ID NO: 897819 - DNA, 583 bp, Homo sapiens
ttacaacaatcataggtagaagttattatcatcctcttttatagatgagactctagagacctaagacataaaaataagaataaaaatkgatactaatattagctactgtttactgagcatttactaagtaccagacactatgttaagacatatataacctcaatgagtctttacaacaatcctacatagaggttattattctctttgatacatgaggagtctgaggctttgagaggtttaggaaactgtccaaagtctcacagctggtaaatgctgatgcatggtttgctttattgccatgcagtgtatgctttttttctagtcatgaattgtaatataaatgtatctttttcgaaaaacccatgactttctccatcacagactgcttgggtttgagtctttgctcaggcacttcctggctttcacctggaacaagcaattcaaactctccttatctgtaacatgaagagatattaatatctacttcctcagattgttggggtgattaaattacctaaggtatttaaagtaccttaccttgaccctagcatgacaagggttagtccttacctgtgttgatgac

SEQ ID NO: 897820 - DNA, 582 bp, Homo sapiens
cactccattccagtcaaagccttggtaaaataaccagtttctccagttgtgtcctgttacaaaagaaaacagattctggctaggcatggtggctcacgtctgtaatcctaccactttgggaggccaaggcaggtggatcacctgaggtcaggagttcgagaccagcctggctaacatggcaaaaccccgttcctactaaaaatacaaaaattagccaggtgtggtggcgtgcgcctgtaatctcagctacttgggaggctgaggcaggaaaataacttgaatccaggaggcagacgttgcagtgagccaagatcacgccactgcactccagcctgggcaacagagtgatattccatctcaaaaaaaaaaaaagaaagaaaataaaacagtttcttattgcacttaagcaaataactatattgccataagttaagagtacttgggttggcacagtggctcatacttgtaatcccagcattttgggaggcygaggcgggtgatcacctgaggtcaggagtttgagaccagtctggccaatgtggtgaaatcctgtctctattaaaaatacaaaaattagctgag

SEQ ID NO: 897821 - DNA, 459 bp, Homo sapiens
ctcgctctgtcacccaggctggagtgaagtggcgcaatcttggctcactgcaaactccacctcccaggctcacgccgttctcctgcctcagcctcccaagtagctaggactacaggcrcccgccaccacgcctggctaattttttgtatttttagtagagacggggtttcaccgtgtcagccaggatggtatcgatctcctctcctcgtgatccgcctgcctcggcctcccaaagtgctgggattacaggggtgagccaccgcgctcggccaaaatatctgaattttattctcagttactagtttgtgtgatgttttccaggtagcctgccctataaattcacacatttccaggtttatttaacataagcaatcctagacagaccagatacatgtgcaaaagttctccacatgtaagaattctcccactattaaatagcagcagatctttctttagaat

SEQ ID NO: 897822 - DNA, 570 bp, Homo sapiens
gtgatttaaaatcaaaatgaaagtatataatgcattttaatgactttaagattaaaatattcatttctgttaccaactattacttttttagcatactctctattagaatctacaacttcaactcagatttttgctacattaaaccagtcttaagaaatatttttttacccaaatacaaaagtggtcaatcaaaccacccactcatttactacctcttgaggatacttttaaaaggctcagttagccaaaaagccacttttcttctagcaggatatatatagacattgaatctgaataaattactggactaaacctgcataggcaagtaacttagtgcttttatgtagcaaagtgtttgctatatattgtacaacgtatttgacaaaatcatttgattctgttagatgtgctcatcttgctatggcagacttcagatattwcatcattgattacatcatcattacaatcactttaggtttgtctccaaccttgcctatttaattcctttgacccaaaatcaaaaaaataaaaacagaatattacaatgcaacgaagagggagaaattcacc

SEQ ID NO: 897823 - DNA, 607 bp, Homo sapiens
gttatgaacttactagaaaaatacagtaacactgctgggctcatctgatttgtggtcatgaatttataatcaagtctgtccaatcgtgatttttttctattctaccggctcttctgatgtaggaakagaaaaggcaaagagatatttgaattcaaccaggaatgtaatttaggcaagtgagaacaataggcaacagagcaatgttgttcaaagttttaccggagaatgattattatggtccagaaagtcagagtaaggatggacgtgaatacagaaagggtactgtttttcagattttgaaatatctgcagtacacttaacagctgagcatccccaattcaaaaatctgaagactgaaatgccctagtgagcatttcctttgcgtgtcatgtttgtgctcaaaaagtttcagattttggagcattttggattttcagatagtcaacttttacttataatttattaaagaaataaagctagtttaaattttttctgaggaacctgtaactttcagaaaattactacaatgtacactgttgaaacttaacatatcattactttattgtgactcaagattattttcatctgtattaaattaagtatttgc

SEQ ID NO: 897824 - DNA, 606 bp, Homo sapiens
acatgaaagtaagatcatgtggtatttgtctttctgtgcctggcttatttcactaaacataatgtcctccaggttcatccatgttgtcgtgaatgacaggatcttattctttttatggctrtatagtattctattgtatatatagactgcattttctttatccattcatccatagataaacacttcggttgatccatgtcttggctattgtgaatagtgctgctatgaacacaggagttcagatactgatttcattttttttggacatatgcccagttggattgttggatcatatggtagttctatttttaattttctgaggagccacaatactactttccataattgctgtactactttacattctcaccaacagtgaacaagtgttctcttttctccacatccttgccaatacttcctacctttcatctttttgataatagtcattctaacaggtgtgaggtgatatctcactgtggttttaatttacatttccctgatgattagtatgttgagcactttttcatatatctgttgcccatttgtatgtcttcttctgaaaaatgtctattcaggtgctttgcccatttttttatttgggctgtc

SEQ ID NO: 897825 - DNA, 582 bp, Homo sapiens
cacttagaaatagtttaatggcatatcttatgtcatatatattttacaataaaaaacttagcaaaaacatwttttaaataaacatattgcatttgctgccccatttaaagacaacctgataatgaaggatttacagttgctgacgctgaaggctgagccattcccctatttccttcctcaggtagccttcaattttaagagaaaaaataaaaatttgtcaattcattttggtacatcttcctattcttagaaacttcagtcaaactcatagaagcagagagtagaatggtgattgctagtgggtaggggaattggggagatgagatgttctcaccacacatacacaaattaactgtgtgaggtgatagatgtgtttattagtttgattgtggtaatcatttcacaatgtatacatatatcaaaatatcatgttgtacatattaaatgtatacaacttttacttgtcaattatatctcattaatgctgtgggggggggaagaaacttcagcctttgatcccaatagaggctgttttaaacagaaggagcttttcatttgccaaggcagtaaaatgtttaagta

SEQ ID NO: 897826 - DNA, 263 bp, Homo sapiens
cctccaaggtgctggggcaagattcaggaatgaaaaagaaacaggttcatccttcarggtcttgactaccccagtggtctgttctaacttcaatttgaacttgccccgtcagctcacagcatctgcatgcaagtgagcagccttcttttccttctccttctactgccatcctctcctccttctccagccaaatgtgctctggcctcacagagcctccctcggttcctgaaccagcatgatatctggctgctgggtcattgcac

SEQ ID NO: 897827 - DNA, 263 bp, Homo sapiens
cctccaaggtgctggggcaagattcaggaatgaaaaagaaacaggttcatccttcaaggtcttgactaccccagtggtctgttctaacttcartttgaacttgccccgtcagctcacagcatctgcatgcaagtgagcagccttcttttccttctccttctactgccatcctctcctccttctccagccaaatgtgctctggcctcacagagcctccctcggttcctgaaccagcatgatatctggctgctgggtcattgcac

SEQ ID NO: 897828 - DNA, 652 bp, Homo sapiens
aaatgtagtgggatgtcacttcttctattggattacaaatcactctggtttctgtcttgctgtcttgctcttttgcttgcttgcctgctgccctgttgtaagctgccatatggagaggagaggttctcatgacaaggaactgaggagatcctgtggccaacagcctgtgaggaactgaggttctcagtccatcagcccaaaagcatctgaatcttgccacagctatgtgaatgaactcgaaagcagatatggtgctggataaagtagcaactgtaggacagacgagacatcggtatgacttgaccaaagttaacctcagcagctcttagctccataccccagggtcacactgagctcctagagccaggcctgggttcacccttcactgtactctaccaagagctggtcctttttcctcttggaaaagttctcgctggcccatacctcttgcagactcacagtgggtgatttattactcactatggattaggatatgtgcctatgtatttgtaatatataaataataggatgtgcagtttcatatgtcacctgatcagtaagcaatggaaagtttccacagatgcaaaacaccawttgctctcccatgcttctcctcaccatctgccacaccgccacagaattctatttgcca

SEQ ID NO: 897829 - DNA, 553 bp, Homo sapiens
actgccctagactcctgcagatgacaatcttggctagcttcttgttccagtagtgctcagtggccagtagtttccccagcacctgacaggttctgaagctcagcaccgtcctgtggaaggtctcccttgccacccttgagggcagatttccagcaagccccaccagcaaggtaccacagcaactgctctgccatccagtgaaccacagctgtgccctttccattgaggcctgcctctccgccttgctgggagagaagaaagggatcatcgatgggtgctgtatttcactccagcggtagtggggtgctacttttatctgctacttctgtattctttagaggtgtcttaactttcttttattattattattattattttattattatactttaagttctagggtacatgtgcacaacgtgcaggtttgttacatatgtatacatgtgccatgttggtgtgctgyacccattaactcgtcatttaccttaggtatatctcctaatgctatccctcccccctctccccaccccaccacagaccctggtgtgtgatg

SEQ ID NO: 897830 - DNA, 604 bp, Homo sapiens
gcaattttgttattgtgtgaatatcatagggtgtacttacaaaaacctagacagtatagcctattgctcctaggctacaaatctgtgcagcatgctactgtgctgaatactgtaggcaactgtaacacaacggtaagtatttatctgctagacatatctaaacatagaaaaggtacagtaaaaatatggtattataatcttatggaaccaccattatatatgttctattgttgacctaaacattgttatgtggcacatgactttcaaacaggtggttgagcacagctagagtattttcagactcactttgaggaggacaaagagtaaagacaggatttttgcagaagtatttctttggaactctaccccaaaaaactattagaactaatacacaaattcagtaaaattgcaggataaaaaatcaatatacaaaaacctgcagcatttctatacatgaacaacaaggtagctaaaaatgaaattaaggaggcaatgtcatttacaataaataaaaaatacaaasttacctgagaataaatttaaccaaggagatgaaagacatctacaaggaaagctacaaaatactgatgaaagaaatcaaaaa

SEQ ID NO: 897831 - DNA, 677 bp, Homo sapiens
tcctcagtctcccttgtcatctgggtgtggccatgtcactgagctctaaccagtggattttaagcaggagtgatgcatgctacttcccatacacatgttccaaaaatctctcactttcttttcccttcttcacttaattcagataagaataacaatcttggaatatgctgaagatggcagactacaaagtagaaggagacaaagtttgtgaaagaccaggtggaggaaagtcatccactaatcaggagcccttttatggaatctacgtaaacaagaaataaacaaaggtttagtccattatacctttcaagtcaacagcaaagcagacagcctactctaattaatgtatccattctaagggaaaattatattaaatgttatattttgaaatgtggtggccaccagggattcctgttaatagaatgcagtcatgcttaatgatagggttacatacatcacagagtgtacatacacaggcctagatggtatagcctattacacacctaggcgatacggcatagcctattgctcctaggctacaaractatacagcacattatactgtactgaatactgttggcaagtgtactacaataagtatttgtatatccaaacatagctaaatatagaagatgtacagtaaaaatatggtataaaagaaaaaaaatggtacccct

SEQ ID NO: 897832 - DNA, 621 bp, Homo sapiens
aatgatataggtcagaaacacatatctacrtaaaaaaggaagagcattagagaaggaataaatgaaggtaaacaaaagcttttatttttcttattcttagttggtctaatagataacattttgttcataaagtaatagcaacaatgtatttcattatgtatgcttacacatatatctttgtgtgtgtgtgtgtgtgtgtgtgtgtctgcattagttcgttcttgtactgttacaaataaatacctgaaactgggtaatttataaaggaaagaggtttaattggcttatggttctacaggctgtacaggcttctgcttctgaggaggcctcgggaaacttacaagaatgatggatggtgaaggggaagctggaacgtcttacctggcaagagcaggaggaagagggagaagggggaggtgctatacacttttaaacaaccagatctcatgagaactcactcactatcatgagaaaagcaaggagaaatcggcccctctgagccaatcaccacccaccaggtccttccttcaacattggggattacaattcctcatgagatttgtgtggggacacaaattcaaaccatatcagtatctaagaacagtatatatgcttagatgt

SEQ ID NO: 897833 - DNA, 563 bp, Homo sapiens
aacacatagaagggattcagaattctatcagataaatttaacaaagagattgaaataattaaaaagaatcaagcagaaattctggagctgataaatgcaattggcacatggaagaatgcatcagagtcctttaatagcagaattgatcaaacagaagaaagaattaatgagcttgaagacaggctatgtgaaaatacactgtcagaggagacaaaagaaaaaagaataaaaaccaatgaagcatagctacaggatcttgaaaatagcctcaaaaggacaaatctgttattggcctttaaaaggatgtagagaaagaggtaggggtacaaagtttattcaaagggataatgacacagaacatcccaaacctaaagaaagatgtcagtatccaagtacaagaaggtcatagaacaccaagaagacaacccaaagaacacacctcaaggcatctaatartcaaactcccaaaggtcaagaataaagaaaggatcctaaaagcagcaagagaaaagaaacaaataacatacaatggaggtccaatacaattggcggccgccttttca

SEQ ID NO: 897834 - DNA, 630 bp, Homo sapiens
ctacagacttaaacgtccctgtctgatagctctgaagagagcagtggttctcccagcayggtgtttgagctctgagaacggacagactgcttccttaagtgggtccctaacccctgtgtagcctaactgggagacacctcccagtaggggctgactgacagctcataaagccgggtgcccctctgagacaaagcttccagaggaaggatcaggcagcaatatttgctgtgctgttctgcagcctccgctggtagtacccaggcaaacagggtctggagtggacctccagcaaactccaacagacctgcagctgagggacctgactattagaagtaaaactaacaaacagaaaggaatagtatcaacatcaacagaaaggacatccacaccaaaactccaactgtaggtcaccatcatcaaacagtaaaggtagataaaaccacaaagatggggacaaaccagagcaaaaaagctgaaaattctaaaaagcagagtgcctcttctgctccagaggattgcagctcctcgccagcaaaggaacaaagctggatggagaatgactttgataagttgacagaagtaggcttcagaagatcagcaataacaaacttctctgagctaaaggaggat

SEQ ID NO: 897835 - DNA, 630 bp, Homo sapiens
ctacagacttaaacgtccctgtctgatagctctgaagagagcagtggttctcccagcatggtgtttgagctctgagaacggacagactgcttccttaagtgggtccctaacccctgtgtagcctaactgggagacacctcccagtaggggctgactgacagctcataaagccgggtgcccctctgagacaaagcttccagaggaaggatcaggcagcaatatttgctgtgctgttctgcagcctccgctggtagtacccaggcaaacagggtctggagtggacctccagcaaactccaacagacctgcagctgagggacctgactattagaagtaaaactaacaaacagaaaggaatagtatcaacatcaacagaaaggacatccacaccaaaactccaactgtaggtcaccatcatcaaacagtaaaggtagataaaaccacaaagatggggacaaaccagagcaaaaaagctgaaaattctaaaaagcagagtgcctcttctgctccagaggattgcagctcctcgccagcaaaggaacaaagctggatggagaatgactttgayaagttgacagaagtaggcttcagaagatcagcaataacaaacttctctgagctaaaggaggat

SEQ ID NO: 897836 - DNA, 562 bp, Homo sapiens
accataaccctagcagagtagacatgaaagtgtctaaaaacacatcacgacttaagtgtacatggaacatccacagaaccactcctccccttccacaattaaatatgactcagaattttaaaaacctacaaatcactgcaagggagtgtcagcaaacagaacaagcagaagaatcagatccccaagaatttaaaacaatggaaatagatgaacaagatcagaagtgtgttaaaaattattgaaagaataaagagaattgaaaacaaaagggaaaatgcaacactatgaaattagaacaagttgatttcaaaaagtatagaaatgaaaaatataggctttaaatatttttaaaaaattaatgtcctacttaatgtattagagccaaaagtagattattaaactggaagttaaatctgagaagactatctgtaatcaacccaatgagataaaaagctgtaaaatgtaagaggttaaagcacacaatgacasgagaagctccaacaaatgtcaaatagaaattccagaaggaaagagaaaagggagaataaatcagtatatattg

SEQ ID NO: 897837 - DNA, 604 bp, Homo sapiens
atatctggattgctctaagacagtttccattaagtcaagaaagatgagcaagaaatatttggtgctggctacatgctcgtggaatttgttggaaacaaatacattagaaagctattaagtttcyagagggctatattgacaaaggacttcaatcctggatgccaaaggatgagtgacctaagcaatgcctgtgccaccagaagtgcaacagcagacacatgactataaaagctgtttggccgccaagaagggaaaactctccattgttcacatcaaatgtggtcatcaaggataacgaacaggaaggaccttccaggggaaaatgcagggacctgtggacaatgtggaaggtaatcctccaagaaaacagaaccaggggtttggagatgaaacggacaaaaactttactcagctgtcaaggcaggaacatatttgcaatttccagccagtgggatttgatcattataatgaaaacagaactgctatgtctgtcccattccttccttctctgaatgtaatcctttagaaaaattatcttgttctgactccacagttttatacaagttatttcatgtgtgtttgtgagtaggaggagatttgcata

SEQ ID NO: 897838 - DNA, 644 bp, Homo sapiens
ttgtgggaggaacctggtggaaaataattgaatcatgggggcaagtctttcctgtgctgttctcatgataggaataagtctcatgagatctgatggttttaaaaagaggaattctcctgaacaagctctcctctctttgcctgctgccatccgtgtaagacatgacttgctcctccttgacttctgccatgattgtgaggcttccccagccatgtggaaatataagtccagttaaatctctttcttttgtaaattgcccaatcttgggtatgtctttattagcagtgagaaaatgaactaatacagtaaattgatatcaggagagtggggtgttgctaaaaacataacaaaaaatatggatacgactttggaactgcgtaacaggcagaggttggatcagtttggggggcttagaagaagataggaaaatctgggaaagtttggaactccctagagacttgttaaatggctttggtgaaaatgttgatagcaatatagacaataagtccaggctgagatgctctcagatggaaatgatgagcttgtcaggaactggagcagaggtgattcttgttatgttttagcaaagggactggcagcrttttgcccttgtcctagagacttgtggaactttgaacttgaaa

SEQ ID NO: 897839 - DNA, 614 bp, Homo sapiens
aggaactccatcagtaatgacctaggctcagaagacacattcatatgaaacaaaacatctgtgctttggcaccatagttctgtagacaatgttrtgtggagtcatctgtaagtcactttaggtaaataaatattcaaaaatttatcagctaggattctaaaaattgatatgattttgaaaagataatatatattaacttcaggtctaaaaaagtagcattgattgagcatttgttatatctcaataaagcatatatttttaatctgtatagtaaccatgtgaaattgctatcgctccgcatattctactaatgacaaaactaggcccatcatggtctaaagcctgtacttctaaccacctcactaatttgttgttatagttggtgttgttttcattgttttttcttttattttaggttcagagggtacatgtgcaggtttgttacatgggtaaattgcatgttgctgaggtttggtgtagggatacttctgtcacccaggtagtgagcatagtaccagatagtttttcgactcttgcctctttcccactgtcctccatctagtagttcctaatatctactgttctcatctttgtgtctgtgtgtactcattatt

SEQ ID NO: 897840 - DNA, 426 bp, Homo sapiens
taggtattctcagagaaaaatgctttagaagcaaatttatttatttatttatttatttgagatggagtcttcctctgtcacccaggctgtaatgcagtggtgcaatctcgacttactgcaacctctgcttcccagattcaaacgagtctcctgcctcagcctcctgagtagctgggattacaggcatgtgctaccacgcccggctaaacttttttttctttcctttttttttttttttgagagatggggtttgctgtgttagccaggctggtcttgaactcctgacctcaggtgatccrcccacctcggcctcccaaagtgctggaattataggcgtgagccaccgcgcccggccagaaggtaaattttgatgtaggttgctaaatgggtttagcagggccctcatgaatacatgataggcgggtg

SEQ ID NO: 897841 - DNA, 627 bp, Homo sapiens
caatgattttcaactaaaaagaacttaagagtggtgcatcatgaccaagttgacttaggtcagttcactataatggtgatacgtggtttagttttagctgagggactcttaygtgactcaccccctcatctcattcgagtctgtctgttcaaatgtcatctcttccaagcagccttccctaatgaatctaactaatcaaaggacacacacacacacacacacacacacacacacacacaccattacttgtcactgtgcctgaatcctgctttactttttgtattatcaaacctaagttatatttattaatttgtttatttgtttctgtttctttcctccaccagcatgtaagccttataagggcaggtaccttgtgcagtgctgtattcctagagcctgaaagcatgctggacacatgtcagaagttaattgttatctgttgattgagtacatgaatgcaactatgcaaaaaaatctacctctgtcaagtggcagctatggagcactggggctttaaggcatctacagaagtggccagcagtcaaatttgggtcctataactctgcttggtggccctcttccccttgacattcccaccctcttgaccaccttgattcctgttctttc

SEQ ID NO: 897842 - DNA, 607 bp, Homo sapiens
aaagtaagtgaatacagacttaggagtaaacaatattgttaaaaatgattcaaatatgtctttaaaagttcatttttgcaataccaaggaaatctgtattaagaagtctccaataccaacgatatctgacgagatatcaagaacccgttaatgtctttggtgagttttaaggttatgtttaaaagttcatatttttttcaaagattcacaatgacacagaagtaaaaggacatgacttctaggatttgctctataataattcagcaagaaaagatagatggatcaattatggccagaccatgacaattattaaacttgagtgacgaatttacaacaatttactgtagtatgatctctttcttatatgtttgaaatttctcccaataagtttgtaaagaaaaacaataaaggtattttcgatcaagcactggcttatgtcagatttatcaaggagtatagaaaatgcagagtatagaaaatgcatcattttacttttccttaacttttgcaatatagataaccaggaataaaatcaagaaaaccaaaatgtttccataytcacctgacagaaagatgagcctctgcaggacaattatttgaaaggctc

SEQ ID NO: 897843 - DNA, 593 bp, Homo sapiens
aaaatattatttcctaacatctcagaaaaaatccgttttctggtttccaaaacaaagtcatttaaggggctcagtcagcaggccaagaagcgctctgcagtcaggcctgatcctsgtgcccacactgacttccctcccaggaggtgccataggggcctgctgtgcccatatttgttcttatgaggctgggaaaggaactggtttttttatttgcgaagtgacaggagtgtgtaaaggcctttttgacttttaacctcattctctctagcaagcaagtagctactcttccaccagtgagcgcgggctggacctcttagattctacagagctggatattgaggtgagtgtccccagagcaggagttatgtatccttcggaaatgctggcaggcaacccgtgcactcatcaaattgacaggccatagcctgggggtggccctctgggctgtctctggggctttgagggtaacccaggggaggatggtctgcccattggcccgttgctgtgtcctgtgtattcctttcatctttctcattataggatttctgacaggactctgggcccctccccagctccactccctacctcaagaa

SEQ ID NO: 897844 - DNA, 586 bp, Homo sapiens
acttatttatctatctaatgtgttcaattttcttttcatgatttatataatctgaaaagaaaccagagtattcaatttcctttttaagtgctttaatcttatgatgtgaaaaatttctttgtattcaaataactaatttaagtttaataagttaaaatgtaaatatagtaaaccttaaattttctttaatatttcaacttaaaatcatattctgctgatccttgatgatgatgttccagtccacaggcctggggtttttctccatttggaaggcctgcagcttgtgctaggcattctgggcattacctcatttcatagcacatttttcctcatggatcaaacttaggtaactcaaagttttgggaattagaatcaaaattttagacatttaccccatgccttttaatggacttgcctttgttccataagttaatatatgtcaaacactcaaagtagtacctggcccacagtaagcamtatgtaattgtttgctattattatcacttaacatggtcttaaaccaattgcaccaaaggaaacatctttatagtgtacatggtaattgcttgtgaggtcaaaaccatca

SEQ ID NO: 897845 - DNA, 563 bp, Homo sapiens
tttccacatttagatctttaatccatctggaatccatgtacgtgtttgatgtgaaataggaaygtaattttactgtatgctgtgtaggtaaccaagaacccgtcctttcccagttaatttagtaatataatgtcaatgaagacaaggaagatgatgattcagaaactcactaagaaccaggacatttatcagaatgtggcagaaatgtttattaagtccactagaactgaactgaacacataattggcagacaatctgttctatgcttcggaaactgagcaaactggcctgctttcaatagagggaatgtctttagtttttttgccactgtatttcagaaagtcaaagtctattggccagtcataggcactgtcttttgaggcagccattgtgcttttcccatttttccaactgccaaccccatcaatttactcttgttaaaattccttctcacaatatatatcttattcacttttgtatccccaagtgccatttatactatttaactcatacttttgagtaaatgttttttgcataaatatcttaaaagaatcagtcccttt

SEQ ID NO: 897846 - DNA, 606 bp, Homo sapiens
aggaggttatcatagtactcaaggccccgtgcctagctttgggtactggccatgggcatgataaagctatggccaaagatggttgctggaatggccgatagaaaattcctaaaaggaagtgattatrcaggactagaaggtgggagaggtgagaagtcctgggaaactgcaggcagtggaaatgcagaatacagaaggggaaaggagcactaactcctcttctgagctgtaaggaagacaagatattgaaaagttccaggtggaggaaaggaagctcatacctttgtctttttctttcttttcagtgtatggtacagtgggaagtaatctattggcatggctgggggcatgagttttgcagccagacagaatgattttttagtcataaagttttacttcaattctcccatgagaatatttttagaaaacacacgactaaaatttaaaaagaaaaattgctggattaaactaaagggggagaaaactgttaaaaatacaatgaagagttggcaagaaaaaggaattttcagaggcagaataagtgaaaataagaatcagagaattaagcagagaaatgaaaccaggtttcactttgaggattttaat

SEQ ID NO: 897847 - DNA, 618 bp, Homo sapiens
agtgctgggattacaggtgtgagcyaccgcgcctgaccaggcttttgcattcctgtcagattattccactcagaccagctactcttctgtggccctatccagaagtggactcaatgcaagaggaccattttccacatccacaggaatgcatccccaaccaaagtttgagaccagcctgaccaacatggagaaaccccgtccctactaagaatgcaaaattagccgggtgtggtggcacatgcctgtaatcccagttatcgggaggctgaggcaggagaatcgcttgaacctgggaggtggaggctgcagtgagctgagatcgcaccattgtactccagcctgcgcaagaagaatgaaactccatctcaaaaaaaaaaaaaaaaaaggaatgcatccccaaccaatcagcagctcccattccctagtcacctcccccatcgacccaccaaactatccttgaaaaactctagcctctgaatttttggagaggctgatttgagtaataataaaactctggtctcccatttagtcggctctacgtgcattaaactccttgcatattgcaattcccctgtcttgataaattggctctatctgggcagcaggcaaggagaatcc

SEQ ID NO: 897848 - DNA, 642 bp, Homo sapiens
tttagttgaattaattaatgaatgaaagatttgtcaccaaaatcattttgcctatatgtagtggttaggtgaagcaaagtttgatatcaagtaaaagttaaatgtagtctgcctgcagagaatggtgtcacataagtaatatcatctgaactgtcctggctcaagaccaacttttgtagggtgaagaagtatcttctaccaccaatctgaaaataatttaaatgaacctaaagtcataactcatgcatggggtggtagaaggatgctctcagctggtttggaagatggtggggcaagctctccctgcaaacaccgatcacctccttctgcccagtttataggccataatccaatgacatagggacgtcaaagtaaaagcaagtttaaaaacttctatggggaaaaatcacggttgaagtcatagatagaaatgagattgctgaaagcagtagacacacacagtatttttaagagttcatcaaactcactattttaggtcatgctatggatataggagtcactgygccaggtctcctgtggatataagaggtacagagccaggtcatcgtatgaatataggagtcgctgagccaggtcatcctatgaatataggaaacactgggccaggtcatctgtggatat

SEQ ID NO: 897849 - DNA, 642 bp, Homo sapiens
tttagttgaattaattaatgaatgaaagatttgtcaccaaaatcattttgcctatatgtagtggttaggtgaagcaaagtttgatatcaagtaaaagttaaatgtagtctgcctgcagagaatggtgtcacataagtaatatcatctgaactgtcctggctcaagaccaacttttgtagggtgaagaagtatcttctaccaccaatctgaaaataatttaaatgaacctaaagtcataactcatgcatggggtggtagaaggatgctctcagctggtttggaagatggtggggcaagctctccctgcaaacaccgatcacctccttctgcccagtttataggccataatccaatgacatagggacgtcaaagtaaaagcaagtttaaaaacttctatggggaaaaatcacggttgaagtcatagatagaaatgagattgctgaaagcagtagacacacacagtatttttaagagttcatcaaactcactattttaggtcatgctatggatataggagtcactgcgycaggtctcctgtggatataagaggtacagagccaggtcatcgtatgaatataggagtcgctgagccaggtcatcctatgaatataggaaacactgggccaggtcatctgtggatat

SEQ ID NO: 897850 - DNA, 688 bp, Homo sapiens
atacaataagtgaatttccaaagagggactgggcatccctgtgaagaggtgacatttaaagcgagacctgaatgataagtaggtgctaagcatggaaagatctggaggaagaacattctagacagagagcagattgcatctgaccctaaggcaagaatgtttgagatacagaaaagaagatcagttaggctgcagcatagagaaaaatataacaaaaatggagaggcaggaactggccttaccaatacgaagtatttccttgtaaccagaataaggaactttgattttattctaagtgcagtgagaagtggttggatgggttttaccctggggatgacacagttcattgtgtctgggctaaacagcttaacattgccactgctgtgtagaaagttgatcacatgtttacatccgatactgctctcctagtccaagtcaccttcatctgtcattgacaccagcaggaagacttcaataagtgacaacagccaaagacttaaacagaaaaagaaaaaagaaatcattgaaaacaagaagaggctgagtgtggtggctcacacctgtaatcccagcactttgggaggctgaggcaggaggatcacttgaggccagaagtttgagacctgtctgggtgacatagtgrgaccccatctctacaatttttttttaatgagctgggtgtggtggt

SEQ ID NO: 897851 - DNA, 691 bp, Homo sapiens
aattgtgtatatataccacattttcttcattcacttacccactgatgaacacttaggctgaatccatatcttggctattataaataatgctgcaaggaacatgggagtgcaggtatctcttcaacatacggattttatttcctttggatatgtacccggtaggattggtggatcataaaaactgttatctttataatgttcagtcattctatccaagaatggaagattcctttccatttgttcaagtctacttttgtatctatcagaagtgttttaaaatttcgctgattaggtttgtacattgcttcttaagtttattcctaatattttatctttttgttagttctctaaatgggttttctttatcataatgtcctctaattggttattgcttatatataaagtctattgattttcatttgttaattttataatctaccactttattaaattattgttgttggtttgaatgttggttctatagggtttttctatttatgctatcatgtctgcaaacagataggttttttttacccattcttatgcctcgaattgatttattgtgtctaattgcattggctaatactctaatacaatttctagtaacagggattctaacaggcatccttkccttgttataatcttagtgaaaacaccttgaatgtatttccattaaataagatgtcagcgt

SEQ ID NO: 897852 - DNA, 626 bp, Homo sapiens
caaagatgtatcctatatgatcttagaaaaaacaatttaacgtaaaacattggcttctctcttatccgttctagcctcttaaaaataataatgtttttaaaagctaaacacaataagctagctgggcaccatggctcacatctgtaatcccagcactttgagaggtcaaggcgggaggactgcttgagcccaggagcttgagaccagcctgggcaacatagcaagaccctatttctaccaaaaaaaaaattaaaaattatctgggcatggtggcacatgactgtagtcccagtgacttgggaggctgaggtgggaggatcacctgactctgggaggtagattgcagtgagccatgatcacaccactgcaccccagcctgggtgacagaatgagactgtctcaaaacaaaaccaaaaccaaaaccaaaaacacaataggctaaaccattttatacactttgatatatcatatatattgtaatatcttagtaaaatattttggtacatgaagaacactttaacctgaattcctggctggtttatcctagaaagagrgaaaaaatgttattacccacaacttgaagagtttatgagttttcaattcattcctttcaatttccaggaaca

SEQ ID NO: 897853 - DNA, 626 bp, Homo sapiens
caaagatgtatcctatatgatcttagaaaaaacaatttaacgtaaaacattggcttctctcttatccgttctagcctcttaaaaataataatgtttttaaaagctaaacacaataagctagctgggcaccatggctcacatctgtaatcccagcactttgagaggtcaaggcgggaggactgcttgagcccaggagcttgagaccagcctgggcaacatagcaagaccctatttctaccaaaaaaaaaattaaaaattatctgggcatggtggcacatgactgtagtcccagtgacttgggaggctgaggtgggaggatcacctgactctgggaggtagattgcagtgagccatgatcacaccactgcaccccagcctgggtgacagaatgagactgtctcaaaacaaaaccaaaaccaaaaccaaaaacacaataggctaaaccattttatacactttgatatatcatatatattgtaatatcttagtaaaatattttggtacatgaagaacactttaacctgaattcctggctggtttatcctagaaagagagaaaaaatrttattacccacaacttgaagagtttatgagttttcaattcattcctttcaatttccaggaaca

SEQ ID NO: 897854 - DNA, 626 bp, Homo sapiens
tgtgtctatatacacatacatatactctgtgtaaaagtgtacaattttacgtatgtgtaatatatgtaatatatacgtagcatatattacacatacacataattgtatgcttttttctttttgataaaatataatagattcttgatatttcaagtttttaatgaaaaatctcctaaggcaatggaatggctccctgtgcaagtccatgggccatctacatcagaatcacctgggaagatttttttctttaatgaagattcagggtttttcgtttctagagactgacttagggaggtctggaatctgtattttaaacatcagctcattttcatgcccagcttgatttgagaaccatgatttaatgaaatatatttacccaatcatgaaaaaaaaaagcaaaaccatatgtcagactttagttttttaaaataatagtgacaatggctaccactgagttactgttatgttcccggccctgtgctaggcatttccgttatattatcttgaattaaatgcttgttgagaacctattattgctttgatttgaggtcatctgacctaagtcaagagtttttctctggctttaagagaatgyttggtttttaaattagaccatatctgaacag

SEQ ID NO: 897855 - DNA, 692 bp, Homo sapiens
tatatcatccatgtcatttgatatatataaaagtcatattgtctttgcctaaacttcatgtttgatggcagaaccaaatctggaactcagatttccaggctaatatttataccacactayactgttgcttatgctgaattcagctagtgatttttctagtttgcattgtgcatataaatatatatgtgttgcctcagtatttccataggttttaagggaaattcattcattccacaaatatgtattaagaactgactatgggctggagatatagctaaaagcaagatggacaaattccttgcttcacaaggcttaaattctagtaagggatacaggcaatcaataagttgacaaatctataatatagtaataggtattcaaagcagggcagggagatagaatattttggaaattacttcatgaatgcattgtcctgctgtataactttttcaaatgaagatgggtttgagacattttgagagagtctttgtccatttagtgttgctataacagaataccagaggctgagtaatttataaaggaaagaggtctatttagctcatggttctgaaggctgaaaagtacaagaagcaaggcactgacacctgcttggcatctggcaagggcttttcatggtgagtcaaacatggcagaaaacgtcaaagaggaagtggacatatgtgaagaggcaa

SEQ ID NO: 897856 - DNA, 656 bp, Homo sapiens
tttgttttgtcctgaaagcctcacataaacagttatataaatcaatgtgattctcacmctttacttggtcctaatacccttgaaaggtacaatacactctcttcagtaagagaggctcgttatagcagtaattctcaagaaagaaaaagaaaaagattccatcttccctgtttctatggagggtatatcagtttctctgcaggagctcaaggaaatatacgctgtagcttgcaaaagtccctgaggtgattttgataagtcctttaaaggtagatgcttcttctccattgagataaactgatataaacactaatcattagactggtgaatctttatttagggattctgaaaggtagcaatggaggtgcccaaggctactttcagtattttagaaacctaataaattttcattgaaatgtctaaaggcacttatagatgaaaaaactgacagataaccagaaagtaaattatttgcttttacctgaagttatagcaactgagtgtggtattactggctgcagaatgttaatcagtgacccagataagtgggtatatgtgtataatataactaagaagtcaaaaatagaaaatgagttaatttttatttaataagtatactttgatattgtttaatagacattaccttacaaacacat

SEQ ID NO: 897857 - DNA, 587 bp, Homo sapiens
tccatgtttctttggagcttcattcctatgaggtgaaaaggaggggacgctcagtcacgtccagtgtaaagtggtctcaggttaaatggactttgcttagaagagtacttagcctattcaaaggttcaacctcaggcaggtgtggtggctcacgcctgtaatcctagcactttgggaggccaaggtgggcagattgcttgagcctgggagttctagactagcctgggcaacgtggcgaaactctgtctctacaaaaaaaaaatacaaaaattagccgggtgtggtggtgcatgcctgtagtcccagctacttgggaggctgagctgggaggatcacttgagctcagtagttggagttgcagtgagctatattcacaccacttcactccagtctgggcgacatagcgagatcctgtctcaaaaaaaaaaaaaagatattgtgtaatattatatatgaaatatattgaataagatatttaagttataagtagaaaaamtgagcacctgtaagagctcatcacccagtgtcatgcaatcaggggttgatatggccaatcggaacaatgagccagatggaaaggaatgatc

SEQ ID NO: 897858 - DNA, 644 bp, Homo sapiens
aagtcgcattaatgactataatttgctctattactactggctttgaagtttcattaagtggttttatatctattattttgttatgctttgttttgttttgtttcgttttgtttctaaagacctgtgggatacctcgagcaggaatcttgttttgttttctcccctacatttaacatgtcagaagctaaagcttaagagaggtgactttctttgcccaaggtcacatgacctgaactacaactcatgtttctatcttcaagcctgaatatccttgtgtaagatcatagtgccttgagcacatttccttaaaatagagtcatccaaaaacagtaaattgtactgttggtctccaggaaatcctgaccagtttccatagcttcccagtgaatatcttttttataagatcatagtgccttgagcacatttccttacaatagtgttgtccacagacagtaaattgtactgttggtccccagaaaatcctaaccaatttccacagcctcccagtgactgttagatgatccagtgcccatcttccttagccttctctaatgtcctgaccagatcattagagacaggytgtttaaaacttggcttgcttcctttcaccttgactttgacttctcttgctttcacctagtttt

SEQ ID NO: 897859 - DNA, 618 bp, Homo sapiens
ctcctcatcttcaagtctctcctttccctttgcaaaacttcttgtaccaccactgcactgtacgttagttagcaattcctgggccaaatgcattgtcgatgttgcaagttgtctctgctcctttaccacccattttgaactcgaataaaaaaaaatcactcaaatttactttttgtctaacctcatttccataatctgaaataaatataaaataaacagcaagtagtaagtcattagcaaaaaaaaaaaaaaaagtgagatacgtgcattaaaatgatgtgtaactaacaacatttatttaagaatgtattccaatatcaaacagcaaatttcaacgacgcaaaaatcgcagttatttttgcaccaacttgccagggcttggcttacagatgatttttctttataaatctctccttgataccttacttgccaatttatttgagcactatgttcccaacgctattctaatttaagcctcacctcaaccccatgttatacatgctgccattattccattttgaagtggagaaaccttagacayggaaaggttaaggaacacaacttctctgaggaataatcaggattcaaacctaggtagtcagctcgggggtctgcact

SEQ ID NO: 897860 - DNA, 593 bp, Homo sapiens
tgctggggccataatgatggacaaaatcaaatatgactctttacctcacagaatcttctgtctaatgctaaatatattaataaaataatcaccaaaaaagtttttttttwaatttttttaaattttgagatggagtcttgctctgttgtccaggctggagtgcagtggcgtgatcttggctcactgcaacctctacctcctgggttcaagcgatcgattctcctgccgtagtctcccaagtagctgggaaatacaggcgcccaccaccatgcctggctaatttttttatttttagtagagtcaggctttcaccacattggccaggctgttcttgaactcctgaccttgtgatccacctgcctcggcctcccaaagtgctgggattacaggtgtgagccaccgtgcccggccccaaaaaggtatataattatgaaatgtgaataaagaaaagtatgtggtgctgaaagattataatggaaatatgccttagtttgggaacatctcagaaggctttcctgagaaagccatgtttaaggcgaagagggcctggtatacagaatcagccatgtgaatctcattttctttagaattct

SEQ ID NO: 897861 - DNA, 586 bp, Homo sapiens
ataagaaacaatacatagatggggaaaaatgctgttttaaaattagtattcaacaaatgcttgcttacattcagtgcagagctctggaaaaaaactgtaagagatcatgggatwtgaactggaagttgtaagtgttgccttatgtcttcccctgaaagaaagatgaccaaattgaagaataattcagcctgaccagatgcagagaagagcaacagagaaattacacatggatattcaacactgtttataaaatgagcctgtccactaaggaaaacaggcccagagaagatcagctctttctccctcaaggagttgttaataaggagggatgaacaataaagggagatgctccctcctcaacgttattgactgaggtctgcatgctaatatatactaggtgttttaacgggtatacaaaagtctatgccgtggtccctgtgctcacaaagcctacagcatcactaggtcacaagttagccatgcacatatacgttagaaagtcatgtgtgtatattgggaatggagctgaattgtccatttcactgttctcccttctatatacccaagtgaacaatgagccgttttc

SEQ ID NO: 897862 - DNA, 572 bp, Homo sapiens
ccaagatatatattttcttttgcaaaagcttcccttttactctgttttcagagaagaaaaatacgtacttcttgttttggaaatggagattgtcatggtccttgttctccttactgatcacagacttttctttcatgtaatacatctatcattagaaaatcatctttaagatcgttcaagccaacaagaaagtgtcacagtatcagtatcgccacagacatagtgaaagaatagaaaattatcttaatttggtttctcttaatttagccacattaattcaggctaaagtcacctgatttatgagagaagagagctcactttttatacaaacctcttattttgttccttttaataccctttccaaaaccaatctttgagagaatattaattttctaagttttattaactgaaaaattttcattctaaatttatgatatacatatgaytaatcaagaacattacaagaccactgctaaaaaattattggttattcccaaatttatgactgtttgtacaattttcagatatgttttgttttttccaagagttaaaatcgtgacttttgattttat

SEQ ID NO: 897863 - DNA, 641 bp, Homo sapiens
ctggccggcgcgggctgcactcacccactcgaggaccttgatgaagccgagtggctccttgagcgggttgaggttgatctggaagccggacatcctctgaggaaaggagggagagagagtcaggacgacrgggcggaggaggggaccgacgagaccagagcagcccggtggcgaggaagggcaggcggggctggcgcgctggccgggctcggaggcgggcccgggcggccgtggggcggggcggggcggagcggcggcggttgagctgctggctgagactctggggcggaaacggagtggggcggctggggaggcgaggggcgggccggggcggagaccgggaggcttctcctcaggccgcacctggccgagtcgactgatccgctggcgaaccaagtagatgttgggcgccatactgcgtgcgccgcgcccccttccctgcggttcagcccctggcactcggtcttcccctgcgcacgcgtgtacgcgtgcgctcgttgggcccgcgccgcgcttccggacccgcgcgactgcgaagagccctgacccgggggcgcccacgcccgctcctgcgcagcttgggggcgctggcctcagagacaccctcacttgaccccgagctcaccacagctgagctcact

SEQ ID NO: 897864 - DNA, 565 bp, Homo sapiens
gtcttgctctaagatagatttaaggcagcttacaaaaaawggcagacagctgaacaagataataaaggggggaatcaaagatgacaaacgagggtagaaaaataatacatgccattttgagatatgtatgcaagatgcatgcccccaggacttcaatttggttctcaagccataaagttacagaaatagaagagttcataactttaaaagaacacatattattcaggagaaggacagttattgcaggtacacagactgtatagaagtttcttctgtagtttctcatacaggacagtgagcaataaagcaaacatcatctcaaataccatgtaaccaactctgagttttgttaggctactcctagtaaagttcatcaatgaaaaaagagtgcacaatgcctaaatacagatataaaagcacttctggggacatgggaggtacagactggctggcaattaaagaaataagagtaattcggcatttttggaaaagtgtccttgctttatatggttcattcatttcctaaactaatatttgagtgcctgctaagtgtcaggtactgtgc

SEQ ID NO: 897865 - DNA, 650 bp, Homo sapiens
tggtgaatgaaaggcagtgcagagactgcctctctttttgaggatgtttgytacagagccttggtgtcagataatcatgtaacaagcactggattggcaagtggtattaatgaaaggaacatttaggagttttggtagatccatacaagttggggtaggatatacccaagcgtgtatatatttgctcagcatgtgaaataataaaaataatacaaaactactcattcttcaaggtagttacagtttcaatgccactcttcctgtccccatattcattaagacagaagcttgatgcttaaacacacactggtatgaaaatgttttgtgttttctgttatattgtcagaagtgacattgatttgaaaggatgagagccttattttcttgcaacccttactgaaaggcatgatttcaggtgaaaatcttcagtgatttttaacatatgttacatgtttgcagtaaggtcagtctttccaatcacagatagagttatgcatctatattctaccaaatattagcaaaaccaatgcaatacgtgtctgtctttgcaatataaagtaagcttggtgattatatttagtggagttacttgaaataggtcatttagtttacatacagtttaattctcatgccacaattaataaggtatc

SEQ ID NO: 897866 - DNA, 631 bp, Homo sapiens
tgtcccgcttctacagagctcaaccattttctagagaattgttgtagacaggggtccatggatgggggaaaataaaaacacattgttatttacagaaacctcaatccaactgaaattcagcatccttttcaattattattatagtctacaaaccacaagagtatttgcagtgtttttgactgtcaccaatagacatgacagatattttcctaccacttatagatgttgctgtctcaagatatcatttatgttcatcactacttcaaaattttggcagtgataaggcccactgctagatcttttatttattgagttattaaagaagcacaaatattactaaattacacatttttataaaatattttcataaaatgatattgtgatataagtgatttcctttgtaaccttatcctttattttatgtttttaaaaacattattctgagaaggtgtccacatagggtcactaaattatctaaggggttcgtggcataaaaatgattaagagcrcctgattgattagcccctgaagactaatcatttggacaagatttaagaaatcctttagaaaatggctttgactctttgcatcacaggttgtctcatcctcatgactcatttatctcagaggc

SEQ ID NO: 897867 - DNA, 655 bp, Homo sapiens
cctatgacctatttaaaattattatattttacacatgttkcaaaatggagtcaaggtatgttttattttattttatttttgatggacatccagtgattgtagccctattttttaaaaaacactttcttctccccatgtaattgctttggcatttttgtgaaaaattaattgactgtatacacgtgggtatatttcaggactcttttctgttccattgatctatttgtctgtcttcatgccaatatccactctcttgatttatggagctttatagtaagccttgaaatcaggaagtgagagttcttcaacttttatcttttctttcaaaaagttgttctaggtctttgcatttccgagtaaatttaggatcagcttatcaatttctaccaaaaaaaaagcccctgagattttgaatgaaactgtgttgaatttatagatcaatttggggagaattggcatcttaacaccagtaagtcctccaaaccacaaatatggtattattttcttatttattggtcttcattaatttctcttagcaatatttcatagttttcatgtgaaggtttacacatttttcattgaatttttcataggtatttgctgtttttgttgatgttataaacggtattattttattaattttccattttttaat

SEQ ID NO: 897868 - DNA, 620 bp, Homo sapiens
gattaaatttaactgctttgtggggacattgaccccaaaacttgcttcaattagtgtatgcctctagctatctaaactagctgggcacccaggtattactaatctattgctttggcttttgtttgttttaatattattttttaatgggtaaatgtagagatatatacatattttttattttactttaagttctgggatacatatgcagaacatgcaggtttgttacatatttatacatgtgccatggtgttttgctgcacctatcaatatttttaacaagccattgacttgctcttttttatgaccatcacatgctttaaaaatgggacagttggccaggcgcagtggctcacgcctgtaatcccagcactttgggaggccgagatgggcagatcacctgaggtcaggagttcaagaccagcctggccaacatggtggattatctactaaaaatacaaaaattagccaggcacgatagcgggcacctgtagtcccagctactcaggaggctgaggcaggagaatcgcttgaacccaggaggtggaggttgcagtgagctgagatcgcactactggactccagcatggacaagagygagactcatccagaaaaaaaaaaag

SEQ ID NO: 897869 - DNA, 615 bp, Homo sapiens
ttattctgattctcttaggtttttttctttcttttctaggatcccacctatagcaccatattatatttagtcatcctaactctctaggctcctcttggttgtaacaatgtcttggactttcctcatttttgatgaccttggcagtttgatacttgccaggtattctgtggaatatccttctgacatttgcctcataataggactgggggtttgggaaggaaaaatcacaggggtaaattatcattttcactacatcacatcaagggtacacattgttaacatgaattagcactgctggttttaattgtagagtctttcgagttttcttactataaagttactccccttccccctctttccacattgaactctttggaatgaagtcattatgctcagcccacattaaaaaattggggtgtgatgctctacttttttgagggcagagtgtctacatgatttatttagaattctcctgcaagggagaaacttctacwctcccacacttatttatttattcaatcatgtatttatatcaatgtggaatcatgaatatttcatactttgggttataatccaatatgatgttattcattttgttgcccaatttgttccagc

SEQ ID NO: 897870 - DNA, 615 bp, Homo sapiens
ttattctgattctcttaggtttttttctttcttttctaggatcccacctatagcaccatattatatttagtcatcctaactctctaggctcctcttggttgtaacaatgtcttggactttcctcatttttgatgaccttggcagtttgatacttgccaggtattctgtggaatatccttctgacatttgcctcataataggactgggggtttgggaaggaaaaatcacaggggtaaattatcattttcactacatcacatcaagggtacacattgttaacatgaattagcactgctggttttaattgtagagtctttcgagttttcttactataaagttactccccttccccctctttccacattgaactctttggaatgaagtcattatgctcagcccacattaaaaaattggggtgtgatgctctacttttttgagggcagagtgtctacatgatttatttagaattctcctgcaagggagaaacttctacactcccmcacttatttatttattcaatcatgtatttatatcaatgtggaatcatgaatatttcatactttgggttataatccaatatgatgttattcattttgttgcccaatttgttccagc

SEQ ID NO: 897871 - DNA, 585 bp, Homo sapiens
ttgttctggactatcttttcaaggatatctgtacaaaaaacaaccttgaagtgtaagatgtctctctctggagcaataggcaggtatgggtaatatctggtataataaagayaatgtcccccactaaagtaaaaggcaggcatgcttactgctcattagaaaagattcagagtccctaagctcagaattcttcccctgtagaaggatccactgtgtgtaggtgttatctggccctctttatgacgccttatgggaatcggagctcagaaagcctgtgcaaaaatgctggtacaatggctactactactgctgtgagtaatgaactgtctttcatctctgacccaagagttggatgctttcaaccagcacctagtttgtaagctaacttacaagcttgtgagtaggaaaaagatctcagatcttcacagttcattgcaatataaccggtccctactatggaagtaggtcatcaaaatcagctttgttagccttaaatattcatagtataaatgtaagtttggctttgcccttgatactctatgattattaccatgctactctgagattataaataattaaatccct

SEQ ID NO: 897872 - DNA, 567 bp, Homo sapiens
tcagataatagaatgctttcatatggatggggtatcaaagtttaaaactcagaaagtaaatatacatatgaaataccattgagagccgggtatggtggctcacacctgtaatcccggcaytttgggaggccgaggcaggtggatcacctgaggtcaggggttcaagaccagcctggccaacatggtgaaaccacatctctatgaaaaatacccaaaaattagccaggcatggtggtgcgcacttgtaatcccagctactcaggaggctgaggcaggagaatcacttgaactcaggaggtggaggttgcagtgagcagagatcgcaccattgcaccccagcctgggcaataagagtgaaactctgtcttaaaacatactactgtggcagagggttgggagacaatgcaacattttggaagaccagtaagtagaaactggaagtctttatatctgagactgagtcttcatatcattgacttgttccatgacctaggtagggagaaggagaaatattggcctccatcattttatttgtaatgcatgaaatatcaaatctgtaagttaata

SEQ ID NO: 897873 - DNA, 647 bp, Homo sapiens
atcaaaaggtcatctgacctagacagatgagcgtctgcagctttgaaatgcctcagagactttacgaagacccctaaactaaatttgaattgctccgtacttctttagcacccccacccrccttggaaacatccaggagaggtgcttatgtggctgaatagcttggctgggcagtagggttccagctgtcagagcagagagtgcccccagcccactgcctctttgcaaaccattcccctttgcagcagctccaccaggcggctctcagcccggggaggaaggaggagcggagtgctactgtccctttgctgttctcttgatgggaaagttaacgatttaattgtgtctatgtgggatacataatgaatgagtctgaataattcaagacaggatgttagtgaagaggacgcagccaacacctgggctgcacaaagatttctttggctgcctcagggggagggggtgtgcagtcttcattttaccagactgtattccccgctgcgaacagtctaaactacagggacattctctttctcttttgagaagataactgtggctgtttggatgtgtgtgtgtgagagagagagtgcgtgtgtgcataaatgcatgtgtatgtttgtgcatatatgtgtgtatgtgtgcatcat

SEQ ID NO: 897874 - DNA, 647 bp, Homo sapiens
atcaaaaggtcatctgacctagacagatgagcgtctgcagctttgaaatgcctcagagactttacgaagacccctaaactaaatttgaattgctccgtacttctttagcacccccacccaccttggaaacatccaggagaggtgcttatgtggctgaatagcttggctgggcagtagggttccagctgtcagagcagagagtgcccccagcccactgcctctttgcaaaccattcccctttgcagcagctccaccaggcggctctcagcccggggaggaaggaggagcggagtgctactgtccctttgctgttctcttgatgggaaagttaacgatttaattgtgtctatgtgggatacataatgaatgagtctgaataattcaagacaggatgttagtgaagaggacgcagccaacacctgggctgcacaaagatttctttggctgcctcagggggagggggtgtgcagtcttcattttaccagactgtattccccgctgcgaacagtctaaactacagggacattctctttctcttttgagaagataactgtggctgtttggatgtgtgtgtgtgagagagagagtgcgtgtrtgcataaatgcatgtgtatgtttgtgcatatatgtgtgtatgtgtgcatcat

SEQ ID NO: 897875 - DNA, 576 bp, Homo sapiens
tggaaagagaagaacgcatgtcttatatggcaggaacaagaggaagagagagaggggggaggtgccacacactttcaaacaaccagctcttgtgatacctcacttactatcacgagaagagcaagagggaaatctaccccgataatccaatcacctcccaccaggcccctcctccaacattgaggattacaattagacatgagatttgagtggggacacaaatctaaaccatatcacctctctttgctagggttcagatatatatttaaggggagcaataggcattgtgatccgacccgagcacctttctctctaatggtgggaatatctatggcaaagcaagcctgtgtccccaactctctctttaataggatcttctgttttccatgaagcatctcaggtattcatagagatacatcttaagcattttcccctgaggatatactttaatattgcatatgccactccagaacggcaaagccagcagacytaggctcaatatacaacctgctttacattggagaaattatggaatatttaaactacatttcactatcatgcatgtgtgtatatgca

SEQ ID NO: 897876 - DNA, 610 bp, Homo sapiens
ctatttctatcagtttgtgttccacaagctattattcacagtgaggacacgcagttatcatacactttctttcaaataaccaccttattccactcayggcttcaaaagcaattttcatgggggatagatgaaagggatgagacacagtgaaatggcaactctgtctcattgtcattgcctctttatgttaattcttggtcttgttctggtgccagattcatcagtgcatttttctacccagttctatactcaacaagttcatctgtctctttgtccttccttctcttcccaaagttttacaggaatcatgtttgcagtatatattacccctttaactaattcacaactagaagttttaaattactaaaattactttctaaaattaattcttttgttgtttgtttgtttggttgtttgagacggagtcttgctctgtggcccaggctggactgcagtgtcgtgatctccactcactgcaacctccacctttggggttcaagcgattctcctgtctcagcctcccaagtagctgggattacaaggcacccaccaccacccccggctagtttttgtatttttagtagagatgtggtttcgccatgttggccag

SEQ ID NO: 897877 - DNA, 610 bp, Homo sapiens
ctatttctatcagtttgtgttccacaagctattattcacagtgaggacacgcagttatcatacactttctttcaaataaccaccttattccactcatggcttcaaaagcaattttcatggkggatagatgaaagggatgagacacagtgaaatggcaactctgtctcattgtcattgcctctttatgttaattcttggtcttgttctggtgccagattcatcagtgcatttttctacccagttctatactcaacaagttcatctgtctctttgtccttccttctcttcccaaagttttacaggaatcatgtttgcagtatatattacccctttaactaattcacaactagaagttttaaattactaaaattactttctaaaattaattcttttgttgtttgtttgtttggttgtttgagacggagtcttgctctgtggcccaggctggactgcagtgtcgtgatctccactcactgcaacctccacctttggggttcaagcgattctcctgtctcagcctcccaagtagctgggattacaaggcacccaccaccacccccggctagtttttgtatttttagtagagatgtggtttcgccatgttggccag

SEQ ID NO: 897878 - DNA, 655 bp, Homo sapiens
cctgaaatccttctggagcagagacaattgcaggggatttccccatgttcccagcaacaggcaaccctcctattttccgaggcatcctctgcttcatttctagtcctctccttggccatcccagctggcaacatgtgggctctgccacacaccttctttagcgtcatcagcatgatttttggtttcagggatatttttgaaaagtccctgtgaagaaacttcctttgtttcccctgagagagatgcttcaatttatgcctttaaataaactatgaaaagcttaagactaaactgtatggttatttttataatagcttcttgacagcaccttacagagagggaagaaacaattctattttggcttcaatttgaataatttctggtaataatattttttaaagttttgatgctttagaatgttgtatccagagcaacttccatcataattaaatattttgtttgtacaaagtatcatactgctttgagaattggcattaatatttaagtttttgtataattaattttatatcttgatataacacactgatgtttcgtcatttgaaattattttgcacttgrttttttgcatttcatacaggtagtgagagcacactgtctcgctgtctgtagaggttttacgatttccctttctaat

SEQ ID NO: 897879 - DNA, 581 bp, Homo sapiens
atctgagacagtatcatctcccacattgagttttttcagttatttggttctayataagcatgaacttaaggaaattgatgttattctcttgtttactattcaatagaatttttatttatgttgttgctaaaattgtctcaacttttgctcctagcatctctttcaggttggtctcctgtcactttgatgtgtgtgtgtgtgtgtagtatttccttactggtgttacaagatgctccagctcatcttgtattttctctatccagccctagaatttacaagttctccgaggagtcctggtgtcttttattgatgaatggttgatatggtttggctatgtgtccccacccaaatctcatctccaattgtaattcccacatgttgagggaggttcccagtgggaggtgattggatcatatagtaaggggattctcatgaaatctcattgtttgataagtgtctgacacttccccattctctctatatctcttttgccaccttgtgaagagggtgtttgtttccccttcaccttctgtcatgatgtaagtttcccgaggcctccccagccatgtggaactgtgagt

SEQ ID NO: 897880 - DNA, 581 bp, Homo sapiens
atctgagacagtatcatctcccacattgagttttttcagttatttggttctacataagcatgaacttaaggaaattgatgttattctcttgtttactattcaatagaatttttatttatgttgttgctaaaattgtctcaacttttgctcctagcatctctttcaggttggtctcctgtcactttgatgtgtgtgtgtgtgtgtagtatttccttactggtgttacaagatgctccagctcatcttgtattttctctatccagccctagaatttacaagttctccgaggagtcctggtgtcttttattgatgaatggttgatatggtttggctatgtgtccccacccaaatctcatctccaattgtaattcccacatgttgagggaggttcccagtgggaggtgattggatcatatagtaaggggattctcatgaaatctcattgtttgataagtgtctgacacttccccattctctctatatctcttttgccaccttgtgaagagggtgtttgtttccccttmaccttctgtcatgatgtaagtttcccgaggcctccccagccatgtggaactgtgagt

SEQ ID NO: 897881 - DNA, 641 bp, Homo sapiens
ggagacctctgtcagccctgtggcagttccaactccatatccagactctcaaatgcaaaggggaaactaccaaacctaaaatgactgcagattatgtttaaatgcctacaagacttaatattatgccaacttcatcactgctaagtttagaacccatgaaattttcatgacgtttgaaaacaatccatggtgggacttcctaactttccaagaattttcaaatgcttacagtgaataccaataaattgtagcctattgaaaatgataaagagtatttaaaaccagataatttcataggcaaaacaataattttaccaaagaaatgcatttcatatttacatgtggttttaccataaacgttagatatgccttgtagtggaaccttcagatggaagagcatatgtggggtctgcagcggccctgagagatcgctctggttccaggaatcacctgatgttgtcttcatcctggtgatgagaagtgtgtttggagaaggcacaggaaataggagacctattggtaaattatggaaccaagggcgctgttcactttattttatctatttataacaacgaktatgtggttgaaataagagtatgagaagtgaaatactttttaaaaacctcacattacccaagtct

SEQ ID NO: 897882 - DNA, 627 bp, Homo sapiens
gaaataagcttagatttcttaactatgaaataagctgacataagtctagatttctgttgattttgccttaaattaatgaggatgcaattttcagttttccctaatacataatgggttatcttgaaggaccttgagagatccctaaactttctctcccaggactctctacccagagtttcccaactttcaatctctctctcttttttttttttagacagagtcttgctctgtcgtccagcctggagtgcagtggtgcgatcttggcgcactgcaacctctgcctcctgggttcaggtgattctcgtgcctcagcctcctgagtagctgggattacaggtgtgtgccactatgcccagctaatgtttttgtatttttagtagagatggggtttcgccacattggccaggctggtctcaaactcctgacctcaagtgatccacctgcctcggcctcccaaagtgctgggattacaggggtgagccaccatgcccggcccaatttccagtctttgtgcaacactcttactgctttttaaataatatttttcatactatttgcattgttaatgacttcatatttttatttwaaaatatgttccttatatacaaatgtttaacatggaaacca

SEQ ID NO: 897883 - DNA, 564 bp, Homo sapiens
gctggttttcaaagataacaaaactagaaagaattgaggaaaacatactgagaggttctcaacacatcatagacacaggagtgcagagctgaaaggaamcctagaattaaagtatacaaccatgcatttatttttattttattattattattattgttattattattattattattattttgagatggagtctcgttctgtcacccaggctggagtgcagtggcgcgatctcagctcactgcaacctctgcctcccgggttcaagcgattcttctgcctcaacctcctgagcagctgggattacaagtgcgcaccaccacacccagctaatttttgtatttttagtaaagacggggtttcaccatgttggttaggctggtctggaactcctgacctgtgatccacctgcctcggactcccaaagtgctgggattagaggcgtgagccaacgcacctggccccatgcatttctttattagacattcatgtatgatcttcaacaggccatgcttaatttatttatgtactttggatagttgacttaaattaatcttgtactttgta

SEQ ID NO: 897884 - DNA, 564 bp, Homo sapiens
gctggttttcaaagataacaaaactagaaagaattgaggaaaacatactgagaggttctcaacacatcatagacacaggagtgcagagctgaaaggaaamctagaattaaagtatacaaccatgcatttatttttattttattattattattattgttattattattattattattattttgagatggagtctcgttctgtcacccaggctggagtgcagtggcgcgatctcagctcactgcaacctctgcctcccgggttcaagcgattcttctgcctcaacctcctgagcagctgggattacaagtgcgcaccaccacacccagctaatttttgtatttttagtaaagacggggtttcaccatgttggttaggctggtctggaactcctgacctgtgatccacctgcctcggactcccaaagtgctgggattagaggcgtgagccaacgcacctggccccatgcatttctttattagacattcatgtatgatcttcaacaggccatgcttaatttatttatgtactttggatagttgacttaaattaatcttgtactttgta

SEQ ID NO: 897885 - DNA, 548 bp, Homo sapiens
ccaaatatcatctttaattgtaatctccaagtgctgaggaagatatctagagagaagtgattgaataatgaaagcagtttccctcatgctgttctcatgatagtgaggaarttttcatgagatccaatggttatataaatagcagtttccactggacttttcactcattttctctcatctgctgccatgtaagatgtgcctgcttccccttctgccatgattgtaagtttctgaggcctcccaagccaggcaaatctgtgagtcaattaagcatcttttctttataaattacccactctcagatagtatctttatagcagtgtgaaaatgaactaatacaccatatcacaagggattaataaccagaatatataagaagctcaaaggaaactgtataggaaaaagtctaatttttaaatctgatcaaaaaatgggcaaaagagttgaatagacatttctcaaaagaagaaatacaaattgcaagtgggcatatgaaaaggtgctcaacaccattgatcatcagatgaatacaaatcatctcattacaa

SEQ ID NO: 897886 - DNA, 545 bp, Homo sapiens
acaccctttaagagctagagtcttactgaaacacaatatgtacctaggaaaatttactgtacaayagtattatattggtatcaaaaaaacctgctttcacaatagcaatcaataacaacaaactgttattgcaaaagaagtgttgaaaaagttcaagtccagtcagaggacaagtttgactcatcccttgaatctaatttaatgtcaggcaataagcatcagaacagtgcgcttaaaataaaatgaattttatgaacagatttgccctgccctgaaatatatataatgcagaacagcactgcttaaaatatctttgttgaaaagtcttttcttttccttttccctctgacaatcaattgtggaccaataaatttgtaaaatacaagaagaaaattactagacacatgatcatatacttagatgttatggccaagtcaaattgctataaacatttcccaatagggaatgaggtggtggatttgcaaactttttctgtaaagtactgggtagtaaatattttaggctttgcaagccatccagtctct

SEQ ID NO: 897887 - DNA, 618 bp, Homo sapiens
gcgtgagccactgtgcctggccagtaatttttatttatttcttttcctcttttctacctctccccactcctcttccccacttctcctcctgcactccctactctttcttcttcttttttattccctttcccamcccctgcctcctgagttggccttttctggctgtgtaggacaaatactaggtaatattcaaaacatgctctgaaatattctacaattcagagacttggtcacatcaattttggtcatttttgatcaggatggcggatattaagtttccaaactcagaatgcattactaggataaacctgtgtggagtcctttaaattccttaaatagccagaaacaggcagttagatctttcttcctttttttttttttcgtgcaagtgactgcaaccaccatgctaaactaatcatatcattttctaatttatttggaatgtgtatttgtacagctatatgtgtatacatatctatctatacttttaaggaaaatgaagtcagtagtcaccagtttttctttttttttaaagtcaaataatcccaaatgcagtagaccttttccaaatgcataagaacctgagaagggtagatttgcctgttctgaggatctgat

SEQ ID NO: 897888 - DNA, 507 bp, Homo sapiens
acgaggcagtgtgtaggcagtggggagaagtcatggtctgagcaggtggtgggggacacatccagtggatcataccctgggaggatgcagagktgtgtcccaggcacggggagggagagagcctaaagctctcaggatctgggggcttcctaatagcagagaggttaggagctgagagagggaaggaagacattcattgtcaagtttttagagattgacagtctatctgctatcatggcattcctcttggggtgagaaatgtgtttttgttattggcttatttgcagtttctcaatgtacctataatgtagttattcttacaatggaaaaaaagtaatataaattaaatatttgaaatgaatgattgtgccattacagtgtactcaccaaactgcagaattttcctactaacaggtgctctgagacccctgagttcagtgcttgggggagtctgaggtctcatccccaggaagacaggcttcagtaatcagtgccagcctgtgggta

SEQ ID NO: 897889 - DNA, 640 bp, Homo sapiens
tgcgtgctcattcctccctttctacagtgcgttttccgccgctctctctctcacttactctctgtgccattgtggcttctctctctgcatctgccccatgccttcctctgtgaagatgggcttccttctgcactctggccaatcgagaggatgggtgggcacccgaagccctcaggcatgtgttgtagtagcagccacacacaaacccctgccacagtgtcagcccctacttaacctttctgggctggaaccagtgtcagtgttgggtgctgctctgtttctgtctcttgtttcacttctggaatcccagggaagggagagtcctgatcctgggagacacctgtgattcagtcagctgagtccaggccagtggggtcgtgctatgcagctgtggctgtgtgcggcctaccggagggggtggggaggagagaagggggtgctgaagggagctgagcagatgctctgaatggcttctccctggagacaggtagaaatgcagcccagctctaatgattgaattgtctctggaatgtcartcatgatgaatacatgtaatatgcatgcttccatacagtcatacttgtcttggtgtttcccctctaccccttccataatatttgaaaaataggattgaggtttg

SEQ ID NO: 897890 - DNA, 611 bp, Homo sapiens
ttctacacagacacagcaacaatctgatttctctttcctttccccacacttcccccacttccactcgacaaaactgccatcgtcatcatggcccgttctcaatgagctgctgggtacacctcccagacggggtggcggccgggcagaggcgcccccgacctcccggacggggcggctgccaggcgggggctgtcacccacctcctggagggggcggctgctgggcggagacgctcctcacttcccagacggggcagctgccgggtggaggggctcctcacttctcagacggggcggccaggcagagacgctcctcacctcccagacggggtggcggtcgggcagagacactcctgttcccagacggggtcgcggccgggcaggggcgctcctcacatcccagacggggcggcggggcagaggtgctccccacacctcagacgatgggcggccgggcagagaccctcctcacttcctagacgggttggcggcygggaagaggcgctcctcacttcccagactgggcggccgggcagaggggctcttcacatcccagatgatgggcggccaggcagagacgctcctcgcttaccagacggggtggcggccggg

SEQ ID NO: 897891 - DNA, 611 bp, Homo sapiens
tgaaggattggttctgtgacttctttgtcctccactcagtttagttatttcaccacacgactgaatcttagaaggctcatttactaaagaggtcctwtttccttatgtttgcccacaatttactaagaggtacatcactcatcaggggttacagctagatcaaaaaaacaatcccctcaactaacagaaagaagactacactccagcaacagtctgcaacatcacaggtgtggaagaaggaattattgccccccagttcctgactcccccatggtattaatatacacctgaatacttgccttggcctcatagtgagcagtgtctaccttttccctttcgggtttggccatatgatttgcctggctactggggtgttattgaatgtgatatgaacagggacttgctatgtacctgcatggctgtagttactcccttctcttgccctcttaccatgagaagaacacgcctcagaatagttgttatttcaaggaagatgagagacatctggagcaaatggtactgaacccattgctagatcagccaaacctaagctggcctatagactcatgagcaagcaataaaagtttatttattttttattttatatatat

SEQ ID NO: 897892 - DNA, 638 bp, Homo sapiens
ttcactgatgccatttccaaagacatataagatacttaaggcccaacaggatagattttctatgagtcagccaggtcaactatctcaractcattacatgtgtgcaaaggcttgtttgcttgtttttaatagagtttatttttttttttagcagttttaggttcacagcaaaatggtggaaagtacagagatgccaaggtcaaatgatgtcatcaggacatgggctgactcctgtctctcagctctagttttctctttgttggtttcatggtcagccaagctcttctcacttgatagcaagaatggcccctagggtagcactaggctaccttatgccagtcctttcctcctgtaatacccctttcagagtaaagtctttgttgaacagaacccttgatgggccattgtgagttggaaggacagcctggggcttggccaacagggctagaagtggagggattatatattttattatccagaccaggacactttggagggtcagaggatccctattaataatttcaccaggatgacaggcataagttggtttggttcccataaatctgagtatctgatctccttttgaagaaatgaagccgctctgcatttaagagaaaaggcctaccacgagatggcta

SEQ ID NO: 897893 - DNA, 603 bp, Homo sapiens
ccagacccatcatatctgcctactattgtttggcagaaataaatacattttaaaatgcacagaaaatagcaacaatatctatgcaagttagtattagaaaaaaaacagaaagtgagaatcaagtatttcagmtgatgaaaattctcaccataagacatccataaaatacaacaccttaaactgaaataaatatctttaagtgagtattttcagatgtttttaggttgtagtagaacattttaaaaacataaagcaaaaaagacataaaaacataaccataagaaacaagagttgacagaactcagaagaaactaagaaaagacaaaattttctgaaaatgaaaaaactggaagatgtcaaagggagaatagatccaatgaagctataataagaggaattgagaagaagaatgaaaacaactgagtaaaaaataacataatcatgtcagaaatacatagaatcaagccagacatggtggctcacacctgtcaggtaaaacccggtctctacgaaaaaacaaaacatagccagttgtgttgacactcacctgtaatcccagctactcaggtggctgaggtgagaggatcacctgaaattggggag

SEQ ID NO: 897894 - DNA, 642 bp, Homo sapiens
ccatggtacttgtgcatctacaagaattacttgtttatttgacaattttccccactgcactgtgaggtccttaaggmagacactgtccttcaactctacatcctttgtacccagcttaatgtccaaaacataagaggtacttagtaaacattttctgagtgaatgattgaggcatcagcaacaccaggaagaaagtggcagacaagaattaaccccttcatttacattctctcttcttccaatgtcacagcaattttttcaagctccaattcacttttcttattattagagtgcttcagtagatgaacaatgttaccaacagtcaacacaaactttactgacatattcacaaaaaaatcatctctaaaatcactccaatgtttttctatgttgtaacagcaagcagcattggaggctgaggcatctaagatacaaagagaatacaagaaagactccaatgccttattttgttatacagttctgcatcattgttctgcccttctggtttccatatcttgaattccagctttataggcccataacttggctttctatctaactaaattcttcagctgttctctcctcagctatctctgacatgcactgttaatctttgtttttgttttttgcttttttagtatt

SEQ ID NO: 897895 - DNA, 617 bp, Homo sapiens
ggcatatacatacgatgttgccattatgattctattttatatattatttattaygtattattgtatatcttctctataatataatattttctattttattattatttttagaaacaggatcttgctatgttgcctgggctgtagctattcacagatgtgatcatagcacactgaggccttgaactcctggcctcaagtgatcctcctgcttcagctacccaagtagctttgaccacaggagcaccctaccatgcctggattattttatttcatttttatatttgatgaaataggaaaacattctgaatatattaattgcaaatgaagggtataattccaatttaataaaagttgtgtgcgtatgcatgcataagtgtgcagatgtatttgcgcctgcatacaggtgcacgtgattatgtaagaatagaaagaagaatgaaaataaaagcttctcgatgttaataatatttatacctgggtgtagaattaagaatatgcttcattttctactttgcacttacccatattatcagtttcttaacaatgagaatgtaatttttctactgaagaaaataatcccagtcattgtaacacactgtgactgctgttctagaaga

SEQ ID NO: 897896 - DNA, 534 bp, Homo sapiens
cagggaaatgcaaatcaaaaccacaatgcgttattatyttattccagctagaaggactattaataaaaggacaaaatgtaatagatgctgtgagaatgtagagaaaagagaactcttatatacttttggtagtaatgtaaattactacagccactacagaaaacagtatggagcttcctcaaaaaactaaaaattgaactaccatattatccaataatcccattagtggatattaatccaaaaaaaaaaaaaaagaaaatcagcgtattaaaaggatacctgcactcccaagtatgttgcagcactataacacaatagcaaagatagttatcagtctaagtgtccatcagcagatgaatagataaagaaaatgtggtagcatatagacttaatggaatactattgggccacaaaaaaagaatgaaattttgtcattagcagcaatatgaatggaaccggagatcattacgttaagtgaaataagccagaagcagaaagacaaatatcacatgttctcattcacatgtggatgct

SEQ ID NO: 897897 - DNA, 632 bp, Homo sapiens
ctcacttataagtaggagctcaacaataagagcacatggacaccaaggagggaaaatagacattggggcctacttgaggktggagggtgggaggagggagaggatcagaaaaaaatacctattgggtactatgtttattactgagtgacaaaataatctgtacaccaaaccccaatgacatgcaatttaactatatattaataacaaacctgcacatgtaccctgaacctaaacaaaaaattgaaaaaagaatcacaaactatgatcaagtgggatttatccgtgggatgcaaggatagttcaacatatgcaaataggtaaatgtgatacaccatattaacagaatgaaataaaaaattattgattatctgaacagacacagaaaaaaaatttgaaaaaatttcaacatctttttataataaaaaacctcaacacattagacataaaagaaaatcgaaatacaaaaagcaatctgaaaatgtgtacaaaaccacaaagtcctcaaatagtaaaaacaatcttgaacaaaaaggacaaaactggaggcatcacacaatctgatttcaagatacagtacaaagctattgtaatcaacacagtatggtactgtgggcctcaacataataaaaacc

SEQ ID NO: 897898 - DNA, 653 bp, Homo sapiens
agcaattaactgaaggcagctcaccttcagagagacrcaaactcaagcttcaaaaagtttttatctgtagctctttttattctgaataccaggttcttgtgaggtttgtgtgtgtgtgtgtgtgtgtgtgtgtaaccaagctgaaaattcagtgatacggagagacaagcatgacgtattagatgagcaagactaactaaatcaagccgagacaaagaacacctggtgtatattattttgactaaggatttcttcgtttttcttatttcccaagcccatttttctgtttgaaacaaaagaggcatgaaatttatagattcagtaattacaggaatagtaattatgttggatgaagacaaccctttgagctagtttagcgataagcaccaaaatcaatcaccccaagtgtaaagtggcacagtaggttatatttttataattgtgatcatcaaatccaggcccagaggctggggggttcaaatcatagcaaatttatcacatattttattccaacctgctctagtctaatctagacattcattaaacttttgagtgtcaggccctgggctaggcaaaggagacatacacaaagattactaaaacattttctatctttagaaaatctctaacagtgaaaatatgaactggcattg

SEQ ID NO: 897899 - DNA, 659 bp, Homo sapiens
gttaacagctcagtggagggtcagtgtgacagccttttgcgcccacacttacggcacccaagtttttgcccaacatccaggaagaatgaggtcagacgaataaactgaatttggtaaatttaggagctctcagtgtaaaggggagctgaaaggaggatacaacaggaaggtaatcttttcctgaagtccagctgtccccgaccagactcctctctgaagctatgccatcaagctgtccctctgaagtcaagttgcttctcttcaatggtcaaactgtagtctccaacatccaactgcttctcctcctctctactggctgagtccagggtttttatgggcacatgatgggggatggggcgggccatgggtggttttggaaaaggcaacattcaagtgggaaaacaggatgtaagttctcactttgggctgtggtatcaggctttggggccctcactagggacccaccctcttctgcccagaatttacctgcctcctgtccctatcaatagtttctagatttactgttccaaggcataatcatgagttcatatataaaaaatacttggaccagtacttgctatatagtaaaaattttatattcatttkttgctgttatcataagcaatttaaatgttttaaatgaaggagtactcagattt

SEQ ID NO: 897900 - DNA, 447 bp, Homo sapiens
gatcctagtgcattctctagcctcatctcccactacactccacttcatatccaccagaggacccctttttcccttactcagacagaccaatctcattagcaccttaaggtcctgcttttctcgctaccttaaatacagaccctatgttctcacaggactacatctttcttctactcctttcttctagcctgggtcgacttccctgactacctgaaccctcatgcacacctaccccactgaaaccagtcaatggctagccccacacccccttctattttcttcagagtacttgccattaccatttatttatttatgtgtgtggtctgcctttatgtcctatttctggcctccacatccctacactactgttgcatacagactcaygagagtggggattcttatcgatgtccacgttgcctagaacaacaccagttacataataagagc

SEQ ID NO: 897901 - DNA, 504 bp, Homo sapiens
aacattttaaaatcacctatacaaaatgcagatcccttgctgcgtggtaaaacactcactatcacaaacatatgtgggccttgcttcttttgttacttgtttttttggcagccagaggagtaccatttcatctctaaatgtgttttgcattcacaagaagagtcagcgggttgagtgtgatatttgccaccagtttctgactggcggccaattccttttaccacctctgtgggacttgtcgccctgaagcagcaatctggcctcccaagctggacgttttatgcaaagagccaagcaggacacatgtgggatgccaggcctgggagcatttcacaaggctggttcaggggatataaaataacaggtggtggaggcagccatcaaataatcttgaggagatcgtgtgtgtgcctggtgagatgttyatcacaaagtagtgtagcagatggggggaggtaacatgtccaccactccctggcagctcaacattcaaatatgccctta

SEQ ID NO: 897902 - DNA, 647 bp, Homo sapiens
attgttaatatgaaaaacaaactagttttcttcattaaatgggtgtagttgccaatgtaataaaaattataagttaaaaatactatccaagaatttctgtgacaccaagacctctgaaggtctttgctactgtgctgattgcaatgaacagaacttttatatccatttgttctaggaaagtgttgttctctggataccatgttgccaaagaaaaaaatatatcgtttctgggtagattcagaaacagagctgtaaatgattctggcaggatgagcatggaagggagaagatattaacaactggaaaatggccttgttgccagaggctccatatgatggcattagaagccacatgatagaattagacttgaggttatatgcaggtctggttaagctcaaagcacccatcaactccttatgaactgattataagacagccatagaggcagctgaatgcaccttttattatctcagtcagggaagtcttcatttgaaatccagtgtgtggggagagtgataagaaatcatgcctatattcctagatgactaccatcctacaatcccacccacccatccctcagtttctatcttcagccccatcacacaggaccygctcattcgggaaagttccaacctagaacatcccca

SEQ ID NO: 897903 - DNA, 563 bp, Homo sapiens
aaggggcagccagaggaggcctgaatcctctgaaggttatggagttggttattagaacttagcatctttaggagcaaaayggatggatagccaataaggtcatcattcaatatgtaccatgagtcagcctcaggaggctaagggcaattgctccagtaaaaagtaatgatctcttgttctgtttccagatttaagttaatttttcaacgttgaaaccactgactagagaacaggccatgaccccaggagaaagaccctgcaacacattttaactgcacatggtaattatttcctagtcctttccaaaaggtaccaatctccatttacttgggtaactgtgcactgggaaaaggggactactcagatatttgttagacacaaggtctgaattgacattgatacctgggacccaaagcacctattgtagagggggcatatgaaagccatgtaataaatggagtcctggctaaggtttggctgatagtgagttatttgtctgataatgtgtcatttgtccagtccctgaatatattattagaagagaaatacttattacttcatac

SEQ ID NO: 897904 - DNA, 604 bp, Homo sapiens
gtttcagctcaggctgcttaggttttgtttacgttgccataaattaaagggcatgctttttacacgtcctgaatacatttcactcaagatgacagagaatgggaaaagtggtttcsctaaccctctcaaatgtccctctcaaatgtcacatggaggagcatgctttgcagccaggcacaatgatacctgaacaggggcatgaccacttgaaattaatacataatcaacagcaagctgcccgtcggccagagatggagggagatcattttcacccatgcatgactgaagcctctcaccccaggcgatggtgtgcctctcagctaaccatgaaaatcggtcacatatgtctcctgctctcttacacagctgcgatttggccacaatatttcgatttgtttcaccaacattttctaagtgacctacgacttcatcatagtcccagttagtccccttgtgcagagcccccacacagaggcctgaagtcaacaataattgctgaatctcaaatatccagggtcccacccatcctggcttggcccccgttgtgctgaaatcaggtcagatccagggctcccagccactctaggaaaactgcagagaccaa

SEQ ID NO: 897905 - DNA, 705 bp, Homo sapiens
aatccccagcaatattccatgttctggtccatcccttccactaacaggcgtcaccyacctggtgtttccctttccttaggagtcagttctctgctagatgatagttaattgtataatttttaaaatctcaaacatctcagtacacatcagtgtacattatttatcccaagttatagacttgcacttgaacagggactttctgggctaatactttaaaccaaatggacaaaaactctagtggtagaatttcaagcactctggcacctctgtgaatgtgagatttttgtacaggaaagtggtgttttaccaccagtcttaggctgtgggatcagctccttccttcgtgtttgtggccaacaaaagggtttacagaaaaagaaaataatttgcccttgcaaagactgtgaaaacagtcatatttataagcacaattacatacacttctgactctatctcagtggccagtatatggtagctgcctaacatatgaccaaagaaggaagaagaaaaaagaaagggaggaaagaagaaaggaaataaggttgtccataatcttttttaacatggcttccagcataaaacttggtaactaaaaacagatattttttcattcctaagggggcagggcaagggacatagatatccaatttattaccactaagatttttatcctaaaatttgaaatattttgagtgtacaaaaagc

SEQ ID NO: 897906 - DNA, 727 bp, Homo sapiens
accataacaataaatagctaacaagctattgaagtagcctgctgttcaatgtccatctccctacttagtcaaaaatgcaaagattaggtctgtttgactagtgtaacctccccaaagcccagaatataactatatataggcgctcaaaaaacattccttcactatgcgagagagtttttaacaaggtgaaacccctcctgactaaacttcacattcagatgaaattcagtacagatcaaagagtatttcagaggggagaaatctttacagtctattggctgtaaggtacagaaactgaagaggccaaggggttttggttggttgcagacttaagagggccagggctccccaacatttgtgtgacccccacacaacagtgggggtcccaaaaccactggtctaaatatttataatcttcagatcgagctaacaaacagttagataaaatatgtcctctagtcttatcttgaaaatatgccttcaaatcaattagaggtccagataattaaacatagtgaaatatagagactttaatcaagttgggttttcagcacgaaaattatccacattttaaaattcttgagtaggggataatcattctcttcatcacatgcacacayacacacacacacacacagagagagagagtatgtagttatccattaagaaagaatggttgccactgttttgaaaaaaaaaacaaaactaagattcataggatgctcag

SEQ ID NO: 897907 - DNA, 482 bp, Homo sapiens
tttttttattattattatactttaagttctagggtacatgtgcacaacgagcaggtttgttacataggcatacatgtgccatgttggttgcctgcacccattaactcrtcattttcattaggtgtttctcttaatgctatccctcccccatccctccaccccatgacaggccccagtatgtgatgttccccggcctgtgtccaagtgctctcattgttcaatttgcacctatgggcgagaatatgcggtgtctagttttctttccttgtgatagtttgctcagaatcatggtttccagcttcatccatctccctgcaaaagacatgaactcatcattttttagggctgcatagcattccatgatgtatatgttccacattttcttaatccagtctatcattgatggacatttgggttggttccaagtctttgctattgtgaatagtgctgcaataaacatacatgtgcatgtgtctttatag

SEQ ID NO: 897908 - DNA, 570 bp, Homo sapiens
ccacttatgctgtacagctactctccaaagcagggctaggggacttctctaaagcattgccaccccctcaggctttatctggggaggaagctacacagctcctctattcttgggttgccctccctgtctgggctccggtctgctatcatctatcccttccaggcttattcccaggcaggcagacagggccaggcctgcctctgggtctgactggcagctaagctcccttatccttctctgaagcttctctttacccaggctgtcactttccattcccaatatatagagggaattaactgtatacctggctttctgcagagttttagcctttgaaacttaaaaaaaaaaaaaagaaaaaaggaaccaactcatcttttgccttttccaaaaaaataaatgctttagatttaaaaactaatgcctctgctctgagtttcaagagtccatttggaattcaaatacaagaaggaaaaagaattcrcctcttttcttatttccttatgcctccctttcatgaatgctctctgaggcaattaatgccgctgagtcaaaggaaacaggtcacggtgt

SEQ ID NO: 897909 - DNA, 536 bp, Homo sapiens
aattagttaagttctttttatttttatgtaacctttgaaatatttttcttagttacattttccttcctagraacaacaaaaaagtgtcccatctctaatttagacattgtataaaataaataataggagcattgtggtaggcagaattctcaggtggcacccatattcctggttcctggtgtacacacaccttctgtcagttatttaaccaaatactaatctaggtgctgctgtgaagagattttgcatatgtaattagttaaccttaagacaaagagattatcctggtgggcctgacctacatgagcctttaaatctgaatctcgaaatcagagacagagaagtcatattagaaatatgtaaaggactctatgtgtcgccacttaagatggactgaaaatggaggggtcacatggcaaggaatgccagctacttctaggagctgagagtggcccccagctgatggccagcaaaaaaacagggacctctacagctgcaaactgaattctgccaacaacatcaaaaaattaatttga

SEQ ID NO: 897910 - DNA, 598 bp, Homo sapiens
cagcaaatacttatgggacgtacttaccatgtaccaggcactaaggtcgatcctttacatcaactatctgatttcatcctcatcaaccactcactgarggatgtgcaattattattcccattctacagacatggcagctataattcaaagaattgaactaggaaggttgagaatagatatatcactgaattcatcaatttttagttactgttaaagtagtcttatcataaaaatcaattagaaaatacaaaaataaatctcattcacaatatcaacaaaaaatataaaatgccctaagaataaacataaggaaagtggggaagggcaagacctaaacaaataaaacaaccaagtttactacaaaagaatatttcaatctatgttcctggccaagaagaaccaacactcttctcccaagtaaaggaaaagatgttgcctctccccaaaataagtataaattcaatgcagatttagtaaaaatcctaagggatatttgtgacatttgcctacaagtaattgatattcattataaataaaaagcccttacaagtcaataggaaaagacaaatactctgcattatttatctattgcagcgta

SEQ ID NO: 897911 - DNA, 598 bp, Homo sapiens
cagcaaatacttatgggacgtacttaccatgtaccaggcactaaggtcgatcctttacatcaactatctgatttcatcctcatcaaccactcactgagggatgtgcaattattattcccattctacagacatggcagctataattcaaagaattgaactaggaaggttgagaatagatatatcactgaattcatcaatttttagttactgttaaagtagtcttatcataaaaatcaattagaaaatacaaaaataaatctcattcacaatatcaacaaaaaatataaaatgccctaagaataaacataaggaaagtggggaagggcaagacctaaacaaataaaacaaccaagtttactacaaaagaatatttcaatctatgttcctggccaagaagaaccaacactcttctcccaagtaaaggaaaagatgttgcctctccccaaaataagtataaattcaatgcagatttagtaaaaatcctaarggatatttgtgacatttgcctacaagtaattgatattcattataaataaaaagcccttacaagtcaataggaaaagacaaatactctgcattatttatctattgcagcgta

SEQ ID NO: 897912 - DNA, 698 bp, Homo sapiens
atcacatataatgcatctagatgtctttagtactgcaaaattaaaatgtttaaagaagaaaatatagtgacaattatatccaatttggctttccatttgttggaaataaagattgctcatagatgccatatgttatttgtggcaaagtgtttacaaaaaacagcatgaggccatctctcttatcttgtcatttaaaacataatgcaaatgttgtaaaaataaaccatttgtgttttttagtgcaaaatgcaagaatccaaaataccaggtcatgaaagtagtttttgtccatttgatgttgaatcatgtagttaaatttcaatctgcattttaatatatattcagtctccaactgtcttagtccagtttgtgctgctataataaaataccaccaacggagtaatttatgatgaacagaaatttatttggctcacagctctggaggctgggaagttcaagttcaaggggccatacctagagagagcctttttgctgtgtcattccatggaggaaggtagaaaagcaagagaacacatgtgcacgagagagccagggagggccaaatttacttttataacaaatccactcctgcaataacaaacccacttccaagayaatggtattagtccatcatgagggcagaatcctcatgacctaatcacctcttaaaggtactacttctcaacactgttgcattg

SEQ ID NO: 897913 - DNA, 611 bp, Homo sapiens
ggaaacaaagacgataagagtcccttcccaaaataaatcccttctgcctggggaccagactgcctttgtagaactagcaaatcagctataagattagaaattaggggccaggccggtggctcacacctgtaatcggagcactttgggaggccgaggcaggcggatcacctgaggtcaggagttcaagaccagcctgaccaacatggagaaaccctgcctctactgaaaatacaaaaaaattagctgggcgtggtggcgcatgcctataatcccagctacccgggaggctgaggcaggagaatcgattgaacccgggaggcagaggttgcggtgagccgagaccgcaccgttgcactccagcctgggcaacaagagtgaaactccatctcaaaacaaaaaaaaaaaattagaaattagggctcaggagtcatgcagccagaggccatgagattcctaacctcagccgggcacggtggctcacgcctgtaatcccagaactttgggaggccgaggygggtggatcacgaggtcaggagatcgagaccatcctgactaacaaggtgaaaccccgtctctactaaaaatacaaaaaattagccgggcgtggtggc

SEQ ID NO: 897914 - DNA, 543 bp, Homo sapiens
agataagaattcaggcttggccggatgtggtgactcagtcctgtaatcccagcattttgggaggctgaggtrggcagatcacctgaggtcgggagtttgagaccagcctgggcaacatggtgaaaccctgtctctactaaaaatacaaaaaaaaaaaaaaaaaaaagaaagaaaattagccaggcgtggtggtgtgttcctgtaatcccagctattcgggaggctgagacaagagaatcacttgaacccaggaggtggaggttgcagtgagccgaaatcatgctgctgcactccagcctgggtgacagagcgatactccatctcaaaaaaaaaaaaaaaaaaagaagtcaggtttgaggaaggtttgaaaatcctagcggacagtgaggacagctgtgagagatccaaggcagcatgagagaagggacagactgaaccaagctggggagacattcagggtggaaaagaagagcagtcccttcactgtggttgagaccttttccctttcatctttcaggtctcatgaatgtgggtgtaggtttg

SEQ ID NO: 897915 - DNA, 607 bp, Homo sapiens
ggagattttgaaagaaagctagacagacggtttctcataatgacactgcaaaaaacccccaaagccatctgcagctggctcacttaggaaccaagtttaaagaaaaaaaatctttttttagaaaggctcatttatcaatgccaacaaagttaagccgcttaataaatcctaagttcccattttgggtagatatatttttacattatcactatttccgagaactctgaagttattggctgttgtacataatgatagggtggatcaacctgttttaatcccaagtgcagtctgaaacgagagaaacaccagttcaaatgtaaaccagttgaccattccttacagaatttcattttctatttgttttcactattaaaaatatcatctcccttcaatccacatgaagttcaaaatggaacacattaggaatattgcagacaagcatctaagataaactacccttctgtgaccacaactccaccatcaatctgcttgtctccccaaataatcagattctgtgtattcattaaactggtgatcagtgtctcaaagatgcttcgattaaaatactggcttagagaaacagraaaatgttcttcctaagtaatga

SEQ ID NO: 897916 - DNA, 642 bp, Homo sapiens
ttctcctgaactacctctggagttcaaaaatacaattgtcttcctttgggcactctttcgtgtcaggagtccaagtagagattttaaagaatggaaaagatttaggtgtcttaaagaagtccacrcagccagtgatgggtaggaaagggactgggactgctaagaaacactatgtcacaagtgaggctggattttggcttgctttgttatgatgaagaggcaattagctggctaattctaaccttagaatacaagtgtacctattccaaatttgatattccaaatgtgaataaggtcaatttgaatacaaaatggtcaaaatacttgctcacttgtctccatttagtatgtaaataggaaaatgagagttcaaggaggttgacagtctaatgaggactttctgtcaccaggctggagtgcagtggcatgatcttggctcactgcaacctccacctcccgggttcaagcaattctcctccctcagtctcccgaatagctgggattacaggtgcccaccatgcctggctaatttttgtatttttagtagagatggggtttcaccatgttgatttagtacaatgagtaaaatgtagtttttcacaagaataagcattgaacgtcacaaaagtggctacttctaaa

SEQ ID NO: 897917 - DNA, 587 bp, Homo sapiens
agcaattccactactgggtatctagccagaggaaagtaagtcattatatgaaaaagacacttgcatacatatatttatagcagcacaattcacaattgcaaaaacctggaaccagcccaaatkctcatcaatcaacaagtgaattttaaaaatgtgatatatacgtacacaccatggaatactactcagtcataaaaagaaactaaaaataggctggatgcaatggctcacacctgtaatcccagcactttgggaagctgaggcgggcggatcacttgaggtcaggagttcaacaccagcctgatcgacatggtgaaaacccatctctacttaaaaatacaaaaattagccaggtgtggttgtgggcgcctgtaatcccagctacttgggaggctgaggcaagagaatcacttgaaaccgggaggcggaggttgcaatgagccaagatctgtctcaaagaaaaaaaaaatcccactcccccagacatcctccatttagtatgaggatggagattattccagtatcttgtgtatagaaagatgtagaggaatccagttctgccaggccatttccaatgaataacaggc

SEQ ID NO: 897918 - DNA, 612 bp, Homo sapiens
ctcagagtccaaaggtcaaagaacctggattctggtgtccaagggcaggaggaatggaaggaagcacccagcatgggagaaagaaggaagctagaagactcagcaagcaaggctatcccaccttcttctgcctgctttgttctagctatgctggcagccaattcgatggtggtcacccacattgagggtggatcttcctctcccagtccactaactcacataccaatggcaacatcctcacagacacattcagaaaaaatactttaccagctatctaggcattcttcaatccaatcaagataaaacctaataataatcatcacaaatacctattttttaaataattgttgaatgactattattcttgtttgatttttcctgtatcaataagaaatcaattcaattctgattactgataagcagataaaagtcatattttattgtatctccttgattaagatttcagaatcctacatctcaggattatttcaaactataaagattaccttgtctaaacacattgagatctytcttataattccttttttaaagagtacatgcttagtctcatgaagcatagcacaccaatccgttgtgtaataaacactcaat

SEQ ID NO: 897919 - DNA, 607 bp, Homo sapiens
aaggaagttgtcaattctttagagacactagaatgggacctgcagtagtgtgtctagtgggtgagacactcaggctttttcttttacttggtacaatctaatccactgagcaaatgagagatagtggtggctcagtctagagtggtcatggtgagagattcaatatgaggaacgggagaaagagttgagtcagtggtgttgccagggcttttgtccttaaaaactagggtaagaaagctggaatgtacgagatgtgggatatgtgtcaggcacagatagttttgggggtggggtggggagaaagaatagaccagaagtttggtgttgagcatggcatgtttcagatgtaaatggaaatccgtatgagatgtgctgtagggaaacaggcataggagtttggaatttaggtgagagttctaggctgaaagaacaaatgccatgcatgaaggtactgtttaaagtaatgaagctcamtgaggtgacagaaagaaaacaggtctatgagttaaactgaatcacagcaacataagaggaatagggagatgaagaaggagatttaagagaggccaataaattgggagaaaacacaggggagtgtggtgttccg

SEQ ID NO: 897920 - DNA, 615 bp, Homo sapiens
taaaaattaataaaccgcacagaaaagtaaaaccaaaccatcattccagatttaccatgtagaaacagccatggtttactgtgcagaaacgtgttaacacagcaaggccaagactgctctcccaatgcctacttaaatggctggccaagaggccagcacctggaagctctgtgcacactagtttcaaataaatgcttaaagtttaatattacttgaaggcaagagaagacaaagacaccccaaaatattataaagaaaagattataaaagatattatgtggttggaattgttactctttcaattccatatttgttttattatttactgatgttctaatattaagttcaagataagtcacactcataggttttctccaccactcctcccacctaccagtttttctaacatattattatttgaaaattcttagttttatcacagcaaattctccctcctatcattcttattttatttaattttagtttcatacttaggtacatagaaaaatgattrattttactgattcttttttccactgtatgcttaattttgtaaatttaattcatatctttgtttttaaacaggggtctatggatggtgttttctttaagttt

SEQ ID NO: 897921 - DNA, 615 bp, Homo sapiens
taaaaattaataaaccgcacagaaaagtaaaaccaaaccatcattccagatttaccatgtagaaacagccatggtttactgtgcagaaacgtgttaacacagcaaggccaagactgctctcccaatgcctacttaaatggctggccaagaggccagcacctggaagctctgtgcacactagtttcaaataaatgcttaaagtttaatattacttgaaggcaagagaagacaaagacaccccaaaatattataaagaaaagattataaaagatattatgtggttggaattgttactctttcaattccatatttgttttattatttactgatgttctaatattaagttcaagataagtcacactcataggttttctccaccactcctcccacctaccagtttttctaacatattattatttgaaaattcttagttttatcacagcaaattctccctcctatcattcttattttatttaattttagtttcatacttaggtacatagaaaaatgattaattttactgwttcttttttccactgtatgcttaattttgtaaatttaattcatatctttgtttttaaacaggggtctatggatggtgttttctttaagttt

SEQ ID NO: 897922 - DNA, 618 bp, Homo sapiens
tattcacacagcattttctctgacctgtacacatttttctccttattccattcaatcaataaattctcattamactattattaatgacctggagagagaccttatgtacacataccatatgttctctaatttatattcaaacaaataatattttttcaacccaatccaagagaattatgaaagaaaattaatagacagcatcaaaacctccctttgataaatctgcctttaatagaacagttaaataaagctcctctgtaagactgttgcaccaaatccacactgctctaagatgaacttcatttaagtacagggtacaattcctgagatgcagatttcagtgcttaatctggaagtagtgggttggaatctagtggctggacacactgtagaagaatacagacttccttctgtctttggatcttacaaaattttcatgagcacaccagaagaattttgaaatgttaaagagtaaacttgtagcagtgataaaagaaaaaaagacacaaattacttaattcttattgagtatgtattgtgggccaactatgcacaatagtgcttaattctttgtgtgtgttacctcatgtaatattcataatgttacctgtattattt

SEQ ID NO: 897923 - DNA, 590 bp, Homo sapiens
ccacattaatgaataacctcaactattctcaatgattttattcttgcccccgttyaatgcatttttcacacacacattagagtcatatttatacaacacaaattgtgttagattacccttatgttcaaaatctttaactgtgaatcccccccaaaaaatatatgtttcttaagatgtcatataaggccacacttgtcctgactatagtttctttttcacaattcttaacccacacttcatctgatcataatgaaatctttgccatgctctggacaaattggaaaaagaactctgtacttggaagatcatactactagtttctaaaactgcctgacatatagttgatgctaaaaataaatgtttggtaaaataataattgtaaaagccattaattctagaaatatcatttcctagtttatgagactttgctgggcttattaaattatgtaaaaaattatttgaacagtttagccttttagctggttctaaaatcttgataaaacatcatttttcttatatggccttcgctacatatcatatagtttctcatgtatttttatcttgtttctaaaatctttcataatctatac

SEQ ID NO: 897924 - DNA, 509 bp, Homo sapiens
tcctgtggtcccatgagcaggagcatgttacagctcttttattgccattgtctgcagctcagcaagttctgggctcttgtctcacaaccaagatgaatgatgtgcgtggacatcacggagtgagtaacgcagagaagtattttattgagtgacagaagaaaagctcacagctgcaagagggaaccccaaaagcagacatagctgcctgtgaggctgagtctggggtttttatgggcttagaatgagggagtgtgtgctgattggtccatgggcaagcttggaaaaagcacaatttgactggttaaaagacattatccagaaggaaccaatggagggagaaggtaagacaggaatagaagttctcacttcagtcgtgggctctatcctgaacyagcctctcagttttcaaattttaaactggctttggcttgaaggtctggtttcaccagggacccatccctgtctgcctaggaatttgtctgtctcatgtcactatcactactactgca

SEQ ID NO: 897925 - DNA, 618 bp, Homo sapiens
aaatagagcccacggaggcatgtgctgccctgcatttccagcctctgagcagaagggagacaaatcccaaagcatgccccattatgtcccttctggccacccttctactgagaacactcagagctgatggttgaaagtttgtggagaaatcactttccttaaaaacaaagcacaggttaagtaactttctcccacacaattttctacaaacacacagccactggggacataaaattctacactgcttgcagccacggaaagtcaccagccattaaacgcaggtgtttcctgcttaaacttcatgatccaatcagatcttggggttccagcagaatattgccaatacctgaaatgtgtcatttctaaacttcattcctctctatacactgacctttccaacctggcttgtattcacggaggcacagaatcatcccacatggaaattgaagagatgtgctgattctggtggagcaaggctgtcactcagtggaagtatttttttctccagattaaaaagtatttctaartattggaaattgtctgtttccctgaatcattagaagcaacccataaggacccccatagtgaaactatcagtggtagttttcccctatagta

SEQ ID NO: 897926 - DNA, 657 bp, Homo sapiens
gcccaatactttgtgaggatctctgctgcttcacagggtcacaaatgagggtcacaaatatggacacttaattggtaataaaaatcttgtactcctatccccatttgctaacttgctctgaatctagttcctttgaacacttagttttgagtaagtggtatagaggaatttgtaagaacttgccctctcccatgatctgcctttggctccttctaagttgctgatatggtttagctgtgtccccacccaaatctcatcttgaattgtagctcccataattctcatgtactgtgggagggtcctggtagaagataattgaatcatgggggcagtttcccctacactgttcttgtggaaatatatgtctcatgagatctgatagtttttataagggaaaacccctttcacttgggtctcattctctcttgtctaccaccatgtaagacgtcctttgctcttctgccatgattgtgaggcatcaccagccatgtggaactgtgagtccattaaacctctttttctatataaattacccastctcgggtatgtctttatcagcagcatgaaaatggattaatacagttgcctatctgattttgtttccatcatttattcccttcccagatcttatacaatgttcagctttgggatgcacat

SEQ ID NO: 897927 - DNA, 585 bp, Homo sapiens
aaactatttaatctttctaagtcttagttccctgatgttaaaatatgagtaattatagtccctatcacatgaaatctaagatataaatacacaaatacagtgcttggttcagtaaaatgtgaactrttgtaattttcctcctccctctactttttactttctaccactctccaacattttcctcatctatttttactgaaacacagtctgtattgatacttactactttccactttcatttctttctgtcacttaattatatgatgtgacatacctaccagactataactaagcctactatgggcatgaccctaatccagtttcagcacctatccctcttcccctatcccttgccttgcatggtgtatactggcatgaatacatgaatgaatgaatgattacctatgactttcttttaaaaattggtacctgctttaatatgtgtttgtatcaaagttggctctttttctgtctgcccacatcagtgatcttggtgttttgaggacagggacagtcaggataattggttttgcaccacagagcatgcaaaaaggcctaattggtgatgacattttagtagccaac

SEQ ID NO: 897928 - DNA, 677 bp, Homo sapiens
tatcaaagttggctctttttctgtctgcccacatcagtgatcttggtgttttgaggacagggacagtcaggataattggttttgcaccacagagcatgyaaaaaggcctaattggtgatgacattttagtagccaacaacagttgaagtcagaaaggatttttttttgcatcatgtttatgcttaatgaaacattcaatcctcctctttaggagttttattttctaatttccccaaactgcatttctagtttctacatgttgcttgtctcatggtgacagtttcaggcattttcccaaatgctaatgatacaaaggatgaatgatatcatgggcaaattgctgtggaactatgcttttgcaaagataaaaagaacaagaaatgggacttctctagcttctgttcaatttcaatgacacatttcttattagcagcctttgtttttactctgtgggtatttaaattttaggaaactgagtagtttctcccagagaactaccaactgagcatttttcaactatggcaaacaggatttttctcatatgaagtagattatgttattacaaagaataattgaaaacacccttgaattgttgagttggttcccaaagtggattttacttgcagagaacatggaaaaatgagactgattgaagtgagccccattcttagtgctag

SEQ ID NO: 897929 - DNA, 586 bp, Homo sapiens
agtgaaccctaaagaccaggagaagcccataactattcagggagtgactttcttctattgtctaactcgagaataccctggcaggttctagtggggaacttggccctggaacattccattaccttttgccacatcatagcacaactctcttgaaaatcatcaaaggcaagttgtcctgcaattagaaaagattttacattaaaatcatatttttaaagcccagttctctctagtctcatacagccaagatttattaccaacccaagctttagaacacgaacaagaagttaaaattaaactctaaaacaagccttgtctgtgaaaggccctggtttttcccccttctgctgccaaattaggaagaaaaaacaaagcctgcgggtttcctgtctgtgtcctatgtagtttttgttacagcaaccaaagaaccggtgtgcacaagggagaaccgcagacagcaagtgctttgaccacagcacaaacacagggccaatcaacaggaggctggacctgcagaagcaagatgctagcaataaaagctgtacrtgacagagtgaaaacagcacttcagagttaaaaagaaaca

SEQ ID NO: 897930 - DNA, 610 bp, Homo sapiens
tttccaagaatgaatagacatagatatcaaaagctgattacttattattttcatagaatggctgtgcctaagttatttaacactattcccttttgatgaaagcatttaggttgtctccatttttcgttatcacaaatgatgccttactaagtagatttctggatgtctgattcctagaagtgaaaatgttcagttaaatggcatgtacatttaaaattttgtcatatatcagaaattttgacaaatggctctccagaagataatactaatgaatacgcccatcaacactgtatgtcagcaactgaatattttttttctaatctgattgatcaaaatcatattgccttgtgttaatacgcatttcactcttaactggttaggttcagaatcctttcatgtgtttatcatttgtgtatatttctttttctattcattgtttgttctgatactctgttccaatctttctactgtgtttttttcttagtgatgcagtcatctttatacmttaggagcactgatgttcatctgctctgtatattgcaaacattttcctccaagatattgcttgtttattgttattgttttggtttattttacttttttatcactt

SEQ ID NO: 897931 - DNA, 695 bp, Homo sapiens
tagtagctgtggaggaagatgcagaatcagaagatgagrtgggggacgtgaaactcttaggtatatctggaaagtgatctgctcctgcaggtggtagcagggttccatggaaaaaagtaaaacctgctgtgatgatgatgatgatgatgatgatgatgatgaagatgacgaggaaactgaagaaaaactccggtgaaaaaatctatataagatataccagccaaaagtgcacaaaagtgaagccagaatggaaaagacttaaaaccactaacacccagatcaaaaggtcaagaatccttcaaaaaacaggaaaaaagtccgagtgcagtggatcacgcctgtaataccagcactttgggaggccgagttgggcagatcatgaggtcaggagattgagaccatcctggctaacacagcaaaaccctgtctctattaaaaaatacaaaaaagtagccaggtgtggtggtgggcacctgtagtctcagctacttgggaggctgaggcgggagaatggcgtgaacccgggaggcggagcttgcagtgagccgagatcgcatcactgcactccagtctgggtgacagagccagactccatctcaaaaacaaaacaaaacaaaacaaaacaaaacaaaacaaaaaaacaggaaaaaatctcctgaaacacaaaaaggatctagtcctgtagaaaacattaa

SEQ ID NO: 897932 - DNA, 595 bp, Homo sapiens
actgactttcgacccagcaaacaaaaacataaagtggggaatggacatcctactcaagaaattgtgatgagayaattggcaagtcacacgtataagaatgaaactggatactcatctctcaccttatacaaaaattaactccagatggatcaaagactcaaatctgaggcctaaaatcataaaaattctaggaaataacactggaaaaaactcttctgtacattggcctaggcaatgaattcatgaccatgaaaccaaaatcaaatgtaacaaaaacaaagatatatagatgggaattaattaaactaaaaagcttctgcacagtaaaagaaataatcagcagagtaaacagataacccacagaagaggataaaatagccacaaactattcatctgacaaagaactaatatccagaatctacaaggaactcaaacaaatcagcaagaaaaaaaaatcacatcaaaaagttgatgaaggacatgaatagacaattctcaaaagaagatatacaaatggtcaactaatataaagaatgctcaacatcgccaattatcagggcaatgcgaattaaaaccacaatgagataccacctta

SEQ ID NO: 897933 - DNA, 595 bp, Homo sapiens
aactgtcacgtttcagttaaagggattggggctgaaatccaggaaatagactttgaatgtwtttttttttctttccattgccctactgttcatattcagctcattagtcttgaactaacatagtagaatgatcttttagggaatttaaatcacttgaacaatactcattccagagtttctgtaaagggtagcatatgtccctagtaaaatctttaatattaatggtctcaattattcctttgttttcttcaaggacacaaccagtgtgactctgtttctcaaagggtagggaggagtctatttggagaccaggacttcattttcctcctacccatgtcagcctacttgtcctctgtcatgctatcttcattataaagcagcacccagtagtctacagaaaatgtggcctaggaaaaatcacagaacagcataccataagaagcaacaacataagaaaggtcacacatacagacatacacacacacacaaattttaatatcctcttagcaaaatgtgagatcaggacacaaatgagacattgaaatggtgtaacttttaatccttttgcattaccatatcatagtgttaaaaatac

SEQ ID NO: 897934 - DNA, 692 bp, Homo sapiens
gccacggtggtaagcaagaagtgagtgcgctgttggtccttggagcagggggtgtgggctaagcctcagcatttaaaatcacctctttcagaatttaaaaccacctacagacaagccagggaggagccacgggttccaagagtgagagttacctgtccagctgcttgaaaacaggtgcaaatgaccctagaaccaaggttgtttaagttcatctttcccatcacctacctgcccactaagctagtctcatcaagctattttccagcatgactgcagcctgcccatttctctcctttccctgactgcagtcagcatcatgtcagcaagaactaaaaaaaggccagagtcaatccaactgggattctccttgtgtgtgtgcatgcgaggaggcagggggctcctctaaggcttttcttcccagtgtcccccaggatctgaagtatcagcatcacctggagctcagaatcttgggacccacctcagatttgctgcattagaatctgcattttaacaagatcccagaccgttcacaagcacattgcatctcaagaggtgctggcacaggttacagcacaccccattctgcaaytgggaatgggttaatcccaatgcccctgagaccttgggaggttctgccaccatcatttgccttgaaaattataaatgtactgataacgtctataggtgggagg

SEQ ID NO: 897935 - DNA, 631 bp, Homo sapiens
cttcatagattgagttgagccagtgtgttcctccattgggaatctcattaaagaggcacagagtctgttattagttggcagaagatacttgaggacataatggagggaaagtactggaaaactacagcccatgggccagatctgtcctgctgcctatttttattaataaaattttactggaacagcatcatgcccatttgtttacaaatgatctctgcattcatgctacaatggcagagctagatcatttaaacacagattttatgttccatgaagtaaaaaatatttactatctggttctttacaaaaagtttgctgaccctttctcttagtcagttttatgcatctataacagagtatcacagactgggtaatttataataaacataaatttatgatgcatgcacttgctctccccaagggaccaaggacaagcctgctacgtactaccacccatggtaaccccacccatacaattggcagagcatacacttctccaaggactgaggaccagttaaccaaatgcctagcaaaactgtgccactacctccataaatgcccacagtctacatcactgaggaaytcaaatatgtcactgatttgattaaagtcaaagaaatcacatgaagac

SEQ ID NO: 897936 - DNA, 641 bp, Homo sapiens
agaacttcacgaagcatacacaatttcaatagctgaatcgatcaagcagaagaaaggatattagagattgaagatcaacttagtgaaataaaytgtgaagacaagattagagaaaaaagaatgaaaagaaatgaacaaagcctccaggaaatatggaactatgtgaaaagaccaaacctacgtttgattggtgtatctgaaagtgagggggaaattggaaccaagttggaaaacactcctcaggatattatccaggagaacttccccaacctagcaagacaggtcaacattaaaattcaggaaatacagagaacaccacaaagatactcctcaagaatagcaaccccaagacacataatcatcagattcaccaaagttgaaatgaaggaaaaaatgttaagtgcagccagagagaaaggtcgggttacccacaaagggaagcccatcagactaacagtggatctctgcagaaactctacaagtcagaagagagtggggccaatattcatcattcttaaagaaaataattttcaagccagaattttatatccagccaaactaagctttataagtgaaggagaaataaaatcctttccagacaagcaaatgctgagagattttgtcaccaccaggcctgcctt

SEQ ID NO: 897937 - DNA, 600 bp, Homo sapiens
ctaaagccttgccttctgaaaggtctgtagggcttttcagtttttgatgaaagcccccaaagaataaatctactctgctaatgttgtccttgatgcccaagtcccctaaagctgtttcctctaargtgctgtccgtggtactgggcactggtgcttctgggcctgtatttgcaagtgaggggccaataagacagaattaacataaattttttgttttgttttgtatttgataaatcacagctcaaaatatgtataatgaatggagcaggaattgaatttggatcttcagaccccaatttctgcagtgccctctctcacccctcctattcaacatagttttggaagtcctggccagagcaatcaggcaagagaaagaaagaaagggcatccaaacaggaagagaggtcaaaccatccttgtttgtagacatgatttcctatctagaaaacctcatagtctccacccaaatgatcctcaagctggtaaacaactttagcaaactttcaggatacaaaaccaatgtgcaaaaatcactagaactcctatatgccaacaacacgtaagtatatggccaaatcagaagttcaattccattcacaa

SEQ ID NO: 897938 - DNA, 613 bp, Homo sapiens
atgggaaaagtttcataacaaagatgccaaaagcaatcacaagaaaagcaaaaattgacaaatggatctatttaaactaaagagcttctgcacagcaacggaaactatcaacagagtcaacagacaacctacagaattggagaaaatatttgcaaattatgtatctgaaaaaggtcttatatctagcatctataaggaattgtaattactttacaagaaaagaacaaacaactgcataaaaaagtgggcaaaggggccgggcgtggtggctcacgcctgcaatcccagcgctttatgaggtggaggagagcggatgatcacgaggtcaggagattgagaccattccggctaacatggtgaaacccttctctactgaaaatacaaaaaattagccgggtgtggtggcacgcacctgtagtcccagctactcgacaggctgaggaaggagaatctcttgaacccgaaggcagttgttgcagtgakctgagatcgcgccactacactccagcctgggcgacagagcgagactcgatctcaaaataaaagtaggcaaagggctgaatgcggtggctcatgcttgtaatttcagcactttaagtggctgaggcaggtg

SEQ ID NO: 897939 - DNA, 613 bp, Homo sapiens
atgggaaaagtttcataacaaagatgccaaaagcaatcacaagaaaagcaaaaattgacaaatggatctatttaaactaaagagcttctgcacagcaacggaaactatcaacagagtcaacagacaacctacagaattggagaaaatatttgcaaattatgtatctgaaaaaggtcttatatctagcatctataaggaattgtaattactttacaagaaaagaacaaacaactgcataaaaaagtgggcaaaggggccgggcgtggtggctcacgcctgcaatcccagcgctttatgaggtggaggagagcggatgatcacgaggtcaggagattgagaccattccggctaacatggtgaaacccttctctactgaaaatacaaaaaattagccgggtgtggtggcacgcacctgtagtcccagctactcgacaggctgaggaaggagaatctcttgaacccgaaggcagttgttgcagtgatcygagatcgcgccactacactccagcctgggcgacagagcgagactcgatctcaaaataaaagtaggcaaagggctgaatgcggtggctcatgcttgtaatttcagcactttaagtggctgaggcaggtg

SEQ ID NO: 897940 - DNA, 603 bp, Homo sapiens
tctacctctctcccagatcatcctgaggatcaagatcagtgctgtcccagaatgtttaaaggcagaaagaatgattaccttctagagccaacgactttaccaagaatcctcaccttaaaaaaatttatttttgyacaaattgagaaaatgtatatcttccgggtagattctctccggtgtagaaaaggtttgaggggcacaaaggctgtgctttaaaatcattcttccttgctccctcatcattatgcttgcatttccctggtaacccaatccacagcctagtacctctcccagtataatttcgctgcattacagacacaggcctgcaaacagctatggttttaactgagtttcttcctgacagctgagcctttctcaccctgcaagggaagcttgctgagaggaaattggaatcaggaatgaaagcagagggcatggtttacagggaccatttaaatgctgcaactcaaagattcacacagaagcccggacacaattccgaagttgcccagaggaagcaaaaatgtcagagctacaggtaagttgaataccctttatttctttctcctgcctgattgccctgaccagaacttccaacactac

SEQ ID NO: 897941 - DNA, 598 bp, Homo sapiens
acctcccaacacatgttggcttagagcaatcttttcttctgatcttgctcagttaactggactcatgtgggtggtagatcatgtagtgaaagtgacgttttctgaaggatatttcaggctgtgattccagaggatgcttcactcatgtctgactcaacactagggctgggcgaacacctggggctggctggttatttcctttcctacctcacctccaaattcatgccttgaattccctcaaatcatgagagtctcctgtttcttggacggaatgatgataggcttccaccaaagcaagcctcccaaaaggctcaggaagaaggtgcaaggtatcataggacctagctttgaaaggcagacagtgtcacttctatgacattatattgatcaaagtgagccatacacacagcccaaatcaaaggaagggaacttcataagctgtggttattgtgacatgtggtcatgaaggagcatccttggcaattatttccactcggtcctcactggcttacaagcttctcatatatcaaggataccaatcctgtaaggaaccactgaaggcaacaygtttacaggaacaggctcagattgaagtcta

SEQ ID NO: 897942 - DNA, 572 bp, Homo sapiens
tcctagaagtggaatttctaggtcaaaagctataaatatttttaagccttttaattcttttgccacttgggcatgtaaattggtgtgtcatttctggaaagcagtttggcaatgcytaagtaatccctccctaagatctcacttgttctaagtacaatcatttgtaaaggaaaacaagtaaacaaaaatgctgcatgaattttacggttttttaaaaaaagatatctcaatgtattaggtttgcgtgcacatgacaggttacaaaaattcaacattttttacatttattttcctttcgtatttctattttaatatttttatttctatcttggcccatttgtctgttttttctctcatcattttatcttttcctctccaattttatttccaccgtacatattttagatggtaaaaatttaagagcacaatttctagaatcagacggtccaggttcacaccgtaattcttccactttctggctgtgtgacctttcgcaagttactaaaactccctgtgcctcaacttccacattgctaaaatggagtcactaagagtatctacatcacgttctt

SEQ ID NO: 897943 - DNA, 633 bp, Homo sapiens
cgaagtgagttcttgctggcttacattcattcctgkgtgggatcgcagaactggctgagctgtattatcagtctgagtggcgtcatctgagtgatgtcatgtgctatatcagaacgcagggtctgtaaatatcttaaacactgatcttaggttttaccatagtgatgttattcccaggagcgattttgggaaggttcagactcttgcagtcagaggctgcatggcccctaaaccgtaatttctaatcttgtagctaatttattagtcctacaaaggcagactggtccccaggcaagaaagggtttttcaggaaaggactgttatcaattttatttcagagtttaaactataaattccttcccaaggctagtttggcctacaccccggaatgaacaaacacagtttcaaggttagaaggaagaaggggtcagttaggtctgtttcaccgacataatttcctcacttatgattttttgcaaaggcagtttcactttgacttgtggcaacttccaagcttctaacacgtttcatagggctgattttaggtttttaaactacacattttattatgttttaaaatgagaggtccatctaatgacaggattattatatatagtatatatcttattatat

SEQ ID NO: 897944 - DNA, 615 bp, Homo sapiens
gcttgtgagtgtcctgcatacagtctgatttgggtggttgttttctttgtggaactacttagaggtcatatgacatttgcctgtgsatagttcaaattggctctattttcttaggtccattttgcccttattcactgagaaatatgtggtctctcatataagattgtttccattgaaattctgccaataccttttattcaacttgtaagcatggaaaagtattatgaacttatttaatttttaatttatttaaaaatttttatagtaacattagcacctaccttctaaagttgtttgagaattaaaggataatttctgtaagacaattaccaaagttccaatatgtaatgcttattcaataaataataactatcattattattacatcataataggtgcctatatttctaaattaacaatcttttgtactattgatgtgacaatatgtacattaagtggggtgaagaattaagtcattctcttcataatcaggtgataacaaccttctcctttattgagaatcaagcatctcagagcgagcgtgaatggatattagagtttctgcctcagtgttctcaacagcttctactggtaaagcaagttacagctagtaac

SEQ ID NO: 897945 - DNA, 646 bp, Homo sapiens
ttcacaaaccatacaattcacccatttaaagtgtgcaattcaaagcattttaggatattcataaggctatgtgaccatcaccatatgctaattttcaaaactcttgttttgaaaccctacatccactagycattactttccatggcatctcaccaccttcccaggcctagtcagccatcatttactttctgtctctaaatatttgcctattctcggctgggcgtggtggctcacgcctgtaatcccagcactttgggaggagaggcaggtggatcatgaggtcaggagatcgagaccatcctggctaacacggtgaaaccctgtctctactaaaaatacaaaaaattagctgggcatggtggcgggtgcctgtagtcccagctactggggaggctgaggcaggagaatggcatgaacccgggaggcggaggttgcagtgagccaagatcacaccactgcactccagcctgggtgacagagtgagactccatctcaaaaaaaaaaaaattgcctattctggacatttcatagaaatgaaatcatatacaatatgctttcttgtgatgagcttctttcatttggcataatattttcaaggttcaaacatgtagtagcatgtatcagaactacattctttcttatggat

SEQ ID NO: 897946 - DNA, 621 bp, Homo sapiens
atgtcttttatcacaataaaaaataagttggaccatrtggaactagctttataaatatatatgtgtttatataaatggataaaggactagagaaggatatgtaccaaaatgttaacattttgtgataactagatgatgagattctagatgcttttcattttcttctgccaacttgtatttcctaaatcttctgaaattagcatatatttattacttctgttttttaaagaaaaatcttctttaaaaaaaaaagaaagaaaacatgctaggctatgtatagctccagtataatataacctgtcagtgcctaacctcattagccatgagcctcactttagcttgaagcaagtcattacatatttaaaagagaggtttcattgtttagctgcatttactgggtgcttaacatgcataaagcattaaaaatgagtagtagaaagctatgaaagaagtaaaaggcgtgctgtccaccctggggattggagggtttgaaacagaacagaccacagttgaggagaagcaaccaattcttctagtcataagagctaaagcaggttctgaaatgaatggtgtacccagagcattgcacagctttcagggttctctgtacctcctctactc

SEQ ID NO: 897947 - DNA, 661 bp, Homo sapiens
ttacttagcactaatatatatattttttcctttggacaccctcccagttcaaatttatatttaagattcttagctaatcttccttcttgaggtaatttacagagataaattaactctatgtttatagtcttatgatgatatctcccaagataaatatttcttttattttacaattttcactcaacaaattcatactcataagtgatgttgtcagagcactccagaactcactgagcattcccaaagagttgtgggtagaaaagagaggaggcaccattagatgaacacctatcccctccaattgctctgtcccatattatcattatctgcccccatagtgccttttatagggcctactgagtgtctgaaatgtgtttgttaaatttttgaaaatgtacccactgggtaaatataaccccttaaactttctcttaaattaccagttaaggccttagcagggtttcacaggcaggtggctgaaagcaagaaaggaccagaaggcctcccacctctctctctattttgccagagccccctgggtaaagaactgtcatgagccacccagagatacagtgttgtacaggagaaaccatggcagycttagacccaggtacctcttccccagcccatggtgggatgtaggaccaatcaatactgagct

SEQ ID NO: 897948 - DNA, 593 bp, Homo sapiens
gtctggctcataaaatgagctggcttccctgttggcatgctctgtctttggaaggatgccctgagaaaaaggcctacatagatgctgaaagcaggtgggcacagtgccattctggcaggtgatttgagtgttctggtaatgtagagcatgatctaaaagagttctgggttaggttatacacttaaatctatgctttatcattacctaaatttaatttttttaaatggttgcgttttgtatatggcaggagatagagttcaaacctttcccttggttccttcacagttccttatcacactgtggagaggtttccagggagggctctttaaagcattaggcttagggcaggggccccttttgcccaggactaaggcatgccacctccatgaagccttctggaatcctgactagctatcatttggaatccttgcctactatgaatcccacttcttctgcaaccttcctatatgaattatgctagtgaaaacattctctaatgtattttcaactttttttttttttgccactgyttcttctcaacaatgtttagacatgctccaggctcccatctgaaaaacctacaacaagacaaa

SEQ ID NO: 897949 - DNA, 584 bp, Homo sapiens
tgagggtcttttaaaaacttcagcttccttccccgacccaccccagacagctgaatcagaatcaccgggtggtgcrcaggaacccgcgtttttaaagaacactagtgtgactatttcatatttcctctcctcaaaccttctcccaaactgattcatctgccttatatttcatgaaatgaatttacataaacctgaaaatctcctcaccttcccaccaccaaagccaatacttttaccacaatggttctaggctctctgcctgccttctcaccatttctagtggaggtgtccaggcaatcaccacaggagatgcctcctgcaactccagatcccagcccctaacccaagtttgttcaacctgtggcccacaggccatatgtggcccaggatagttttgaatgcagcccaccacagattcataagctttcttaaaacattatgagattttttttttgcgatttttgagctcatcgggtatcattagtgctagtgtattttatgtgtggcccaagataattctccttcttccaatgtggcccagggaagccaaaagattggacacccctggctaacctctcacacca

SEQ ID NO: 897950 - DNA, 623 bp, Homo sapiens
ttgttgggtttttttttgagatggggtttcaytcttgttgcccagtctagagtgcaatggtgtaatctcgactcactgcaacctctgcctcctgagttcgagcaattctcctgcctcagcctcccgagtagctgggattacaggtgtgcaccaccatgcccagctaatttttgtatctttagtagatggggtttcaccatgttggccaggctggtctcaaactcctgacctcaggtgatctgcccgccttggcctcccaaagtactgggattacagacgtgagccaccgcacctggccaaaatgttttaattaattaattatttctgttatcagataaggactttctttacaaaaccataataccattatcatacccaacaaaattaatgattacttcatataatcaaatacaccattctcattcaaatgtctccagttgtctcaaaaaatatctctttatagtcattttctctatatacatttacattaatcttattaaggaggaaaattgaactccagagagagtaactgccttattcagaatcataaggccactctgtggtagatgcagagctggaactttttttagtcctgtgctctttgaattttggtccacaattac

SEQ ID NO: 897951 - DNA, 640 bp, Homo sapiens
agtggagcagtgctcataactctcaacctrtaggttaaaattacctagtgatcttactaaaatgcagaatctgattcagtaggtctgggtcagggctcaagagtttaaatttctaacagatgtcaatggcccaaagatcaggcttttcacagcaaagccaaagaattaacatagagctaattaatttttccactggattcagttgcagcacattgctttgatttggaggtaagtaaccaaagaaagaattaaaagaatatgtttctaaaaatctctgctttggcctaagatagaagttctcaaactttttggtctttacactcttattgagggcctcaaggaccttttgtatatgtgggttacatagagtgttatttgctgtatacaaaattaaaactgaaaaattaaaaaatatgtgtttatgaattgatttaaaattagcaataaactcatatgttaacataaataggaaatttttatgaattattactctattttcccaaacaaaaaactccatgagaagacattctttttacattcttggcaaatctctttaccctctggcttaatggaccacagctggcttctcatatctgcttccacgctaaatctataatgatagtacatgtcatatagtatc

SEQ ID NO: 897952 - DNA, 599 bp, Homo sapiens
aatctgctttggtaagggcagttttgccttggcaggcatctccagccataggctttggggtcaaaggcaccggactcaaatcttcaacaccctccacgccagctgcctagatrtggcaatcacctattagatactcagttcctccatttacatagaagagaataatactcacaggattattttgaggatcaatgacttgttaggaaagtggttgatgtgtgaaaaaattatgtacgaattataattttttttgagacagggtctttgtcacccaggctcaagtacagtggcctgagctcattgcggccttgactcaagctcaagcaatcctccaatttcagcctcctgagtagctgggattacataaaagtacacactaccacacctggctttttacattttttgtagagatggggtctccccatgttgcccaggctggtttggaactcctgggctcagtaatccgctcacctcagcctcccaaagtgttgggattacaggcatgagccacagcacttggctggtaattttttattatctataattactgcaagttcatccatgagtatcagttacatctacttcacaatccagtccaa

SEQ ID NO: 897953 - DNA, 659 bp, Homo sapiens
atgggccagaaaaaggggtcgtgcagaaagggagttgagtttacctttccatgcccactcgggaaagtctactgaacccctggggagtgtggttctagaggtttatccactttggcactactgacattctgagccagatcattctgttgtgggcagctgccctgtacactgcaggatgttagcagcacttccagcctcacacactagatgctagcagcacccttccccgaagcataaccaccaaaaacgtccccagattttgcaaaatccccagcaggaaaggtgtctgccagtatgttccaggcacagcaaaagaggctgtggccctacaaatctaagagggtattttcctctttacaggtggactgagatcctctcaaatcactctgaatgggaaatcctggcagcagccctgccccaggtagggcagaaaaatatctccagttactgcaaactcatccctggttcagaactactgctttagagcaagaaaagcctgggagagctcgtgcagtcctctgctgaaatgtcaccatagctcagccaacattatttgtcatcagaagcgctttacccccacctgacagaggatatatttgttttctctctagctccttgactagacattcargtcctcaggtggagtgactttgtttcgg

SEQ ID NO: 897954 - DNA, 659 bp, Homo sapiens
atgggccagaaaaaggggtcgtgcagaaagggagttgagtttacctttccatgcccactcgggaaagtctactgaacccctggggagtgtggttctagaggtttatccactttggcactactgacattctgagccagatcattctgttgtgggcagctgccctgtacactgcaggatgttagcagcacttccagcctcacacactagatgctagcagcacccttccccgaagcataaccaccaaaaacgtccccagattttgcaaaatccccagcaggaaaggtgtctgccagtatgttccaggcacagcaaaagaggctgtggccctacaaatctaagagggtattttcctctttacaggtggactgagatcctctcaaatcactctgaatgggaaatcctggcagcagccctgccccaggtagggcagaaaaatatctccagttactgcaaactcatccctggttcagaactactgctttagagcaagaaaagcctgggagagctcgtgcagtcctctgctgaaatgtcaccatagctcagccaacattatttgtcatcagaagcgctttacccccacctgacagaggatatatttgttttctctctagctccttgactagacattcaagtcctcargtggagtgactttgtttcgg

SEQ ID NO: 897955 - DNA, 574 bp, Homo sapiens
agagctgaaataataggaagggaatgcttcaacctttaacactcgaaaatcttttcccaatttaattcaccaaaactgccccttgaattattcagtctatcctaattaactccccagagagttatcttcaaggcacagttagttggttgttgcctaaggtcaaactccaagctagctctggatgtgggaaggatacaaaagtttctttgcacttgacaatttctgttacctgaggtgagacagggagacaaaactatcccattaaggttactgttgaacccaaagggacatacagaatttcatatcataggctgtcattggcagcttatcagaaaatgtcccttacaaaataaaattccagataagggagcattgcaattttaaatatttgatttgagataataagattcttcctaagacaaggtgataattttccttaagtatcccaagtagactgggaaatcctaaaaagaagactccagcaggaaatcccagaggaacctccaagctaggcctgctgagataacgatgccaaaaatccacagtcrggcattaaaatagctttttagcaaga

SEQ ID NO: 897956 - DNA, 673 bp, Homo sapiens
cgcttcaaaaaaaaaaaaaaaatgaatcatgaatgtctcctctaccagactcaactgtagaagagcaggaatggtgtcttcttttgctctccactctgttcccagcttgtagctacatagtgtacacacaataaatattagctgagtggatgaaccatttcttctctgtctttaaatgtaataccttgctccaaatagattttcgataaatacgaataaatggagaatgccattttaaatcattcaaaagggctcttgcagaataaaagacttagaagagaaaaagttgaacctcaaggctcaaaaatacaatcatctttccactgttgatctatgaactcatgaaagagaagcttctcctagggacagggtaacattcatcgggggaaaggggttttaaaacattaaataataagtttgcaaacttttcctttagggactaagaattttagcttttttgccagttattattcccaaactctgctaagtgatcactatgtgaaaacaacattaagtaggaagaaatggaaagagagtggtcttatgaatccatgcaattcaggccartttattacagttgtaattttcctttaatttttgagagtcagggttttccacagtaaatataccaggaagcatgatggctctccagacacataatggttaaatgatc

SEQ ID NO: 897957 - DNA, 684 bp, Homo sapiens
tcaaatgtcaccttctgaaagcagcctttcctgaccactctatgtgagatcacacaccttgcactgtctgtctcatttctctgytttgtctttataactctcatcattgataccacactgtacctttctttgtttgcttattacccaattctctcactaaaatgtaagacacaaagtcagaggctctgtcttgtttcttgctgtaccagcagcattgagagctatgcctggtttataccaaatgcccaataaatgtttgtggagtgaatcaccaaataaagaatgaatgaattagcaatttcaccaatattagccatgagtatgtgtcgtccccacatactaaaaaataaagaactttgattaatagacaccatcatagcaaatctgtactgttataaatattctcattccatttcccatgcagatttttaatataaaaagaacaataaaagataactcataattggtcttttttaaaggtatcatgcatctagtggcttatttgtagcaagtttaattccttgcataggtgttttgatcaattgtgatctgaaagtgtcaaggaaaaaaaaaaagttacttttccagttgaaaccagggtctcaggaatatactcaaaatctcaatattatgctataatcagcttgtctcttgttcagtaatgtggctaaataaagagtacag

SEQ ID NO: 897958 - DNA, 663 bp, Homo sapiens
tcctttcatagatgccaatgtgtgaatgttttatcatttattgacrtgacatcattatttcacacagtgtaattacaattaacatggctgaattatttgattttagcttagattgtcacattctttttgcgttaatatttgagactctagaggtatactatgttaagtgaatccttcaacacttccctctttgcaagttagagtgacctgaaatttgtactttgaaagaaacattcccagcatagaaaaagcaggagaaacaaagaaatcgatggagacactttgaatgccaggtcacacagaatcactgcatccatttattaagaaaccctagagtgcagctctttcctccaattcattcatattgtagcaggggccttgggtcaaagcttgttaacctgttccccttattcaaaaccacctgatgttccatcttctctcttagtgtattccaagaatggaagaaaataaacctaattttgtaaatagattgactgctacttatcaatctttttttatatttaactttgtttaattaaagaaaaaaacgggaacagtaaatgtccattatttttccttggaaataaaatggaaagaaacacaagcatactaatctttgctggaatttatacaatgatcatattcaattgaagagctaaatgt

SEQ ID NO: 897959 - DNA, 584 bp, Homo sapiens
ttctgctgttttccaaataattccaaaggtattaatttacaacagtgttttctaaatgtttctatgaaaactaatttatcaaggtgttcataagttttaacatcaaataatattttgaccaagtgagtcaaggaactgctgggttaaataaagttcattggccgggtgtggtgcctcacgcctgtaatcccagcactttgggaggccaaggcgggtggatcacaaggtcaggagattgagaccatcctggctaacacggtgaaaccccgtctctactaaaaatacaaaaaattagccgggcgtggtggcaggcgcctgtggtcccagctactggggaggctgaggcaggaggatggcgtgaacccgataggcggaggttgcagtgagccgagatagaaccactgcactccagcctgggtgacagagcgagactctgtctcgaaaaaaaaaaaaaaaataaataaataaatgaagttcrttacatttctatattgcaagacttcacagcaactttatattaatatgtatatgactctcttaaagataggtagtatgtgggcttttccaaatgtatttgattacag

SEQ ID NO: 897960 - DNA, 623 bp, Homo sapiens
gtaaatagtagagcattaggatcaggaaaagtatagaaatatatccaagcagaggagtttgctcgttttcagaagaataaaatatgattatcattgttgtacatatatatcttgttggacacactttttttaatacctatttcatacatcagaggaaatgatatttgatttgcaaaaaaacacacccatatgtcaatgaaaatgaaaattcagagtcacaaatttggtcaaagagatacagtagtcagtgcttttaaagattttaaaagtggtcttcaagcaaaatctgacacaaaaactaaaaatgtggagctgctttgatggtgatcatggttgcggggtggcagggggattgagagaagacctaattgccacctccagtaatggcagctaagtcaccccttcagagagctgaatcctcttcagattgtcacttgaaaactgtattaatccaaccttttcatttaacagaaaaggaatctgaggcatagggtttaagtgacatcaccagaaattcccaggtaatttgtggcagagacttcttaaatcctacrttcctcattaacagactaggagttcttgcatcaagacacatcaatatatgtacatattgatcataatat

SEQ ID NO: 897961 - DNA, 639 bp, Homo sapiens
atcccatccgcaagatacctcaaatattccaaaatatgaaacagtctgaarttcaaaagacttctggacccaagcatttcagataaaggatactcaatttgtgttcagtgcttggtatgagccaaagactgtgccgagcttgctttgtgactccctagctgcttgccctcagctttctgctgcttggagatacctcaaatgggacagaaggctgtctaatgcagtcctggttgaggatggactttgacacacagcatgggaatatattacatcaatcataaagtagagactactgaaatgagagggtctcctatttgatgtgttgatgaaaggctacttgggcatctgtgtagagtaggtcctaccaacaagggactcaaaacacacaaagggaagaagggttaggaatgctgaagacacatactgaaattggctcttcagtagtgcctttgttacatgttctatatataggggactttgccctatacagggtatgtgtgttgggggtgggggcggcggggggcggggtgggtgtttaatgtctgcagtttagctggggctttacaggtgaaacgtactgtatgtgttctctcgacattatgaagattttgtttgttttggtcactggtatttttataa

SEQ ID NO: 897962 - DNA, 686 bp, Homo sapiens
cacagatacccaggctgtgccttcagcgtcagacacccttcatcmtcaaccacccattggcctggtgaccacctcttctgtggacactcagctatagtgcctggagctgggaggagcatcctctggcccctgaccacctcagcagagtggaccatgtcctgctctggcctctgctggggctggggtttgctttcaggcccctatgtactccactgcatggatcagttgctccctctagaatatcaagagctctacctttcacctgtttgggatcctctaagccagacttcctgcatgaagggatgaagggtaagtttttgttttcagggggatgtgggaggatgaagaggctgcagcaggtccttttggatgaaggatgttctggattcagacgaggtggtgaggaaaggcctttggatgaagaacacgctcagggcgggaggataggaattgtgctagagggcagggcagaagggagtgtgggtattcagagggcagcaggtttcccccttcctcccctaccattcttagacctggcaggtcctaaggaacaggaagtagttagtggtacgtagacggtgggaatcctgctgctcagggagaggtctgcaaaggctcccatgtaggcataaatatataaagaaatgggccacacagaacccagggccagatagtataggttcatg

SEQ ID NO: 897963 - DNA, 469 bp, Homo sapiens
catcagcctcttcctgatgccagacacaagtcaggtgagtaacctgcttctccagttgggcaggactttgggattcccctggatgagactcctgggtrggatagatcccctgatattactgttggatcacaccgaatgagataaccaaattttccttctcatggtgccacttacaaagggcttctgaataattatctgtttgatccttacaccaaccctaggaggtgaagctactaatgttatccccaatttaaagatgtgaaaactgagactcacggaaactaggtgacttgtctagggtcacacagccaggaaacgtcaaggtgagaatttgaaccctggccttctgaacttgagatccagggcctggcacagagtgggcccagcagacatttcttcttcccatcacacctgccatgagctaaagaaaagtcatcacttctgtcttgtaggaccggctcttcaggga

SEQ ID NO: 897964 - DNA, 631 bp, Homo sapiens
cctaagcaagcagaataatagatttaccagtaatcgcattacagaacgctttgagtgcgacagatgtggggggtgctgagaatctggaattgagggctgtggtcagagctgaatacataaaattttggaagttttcaatgtaaaatgtttttcaatgtgatgagattaggtgaaattgagtaggcagtaaatctagttagaaaacagaaaatatccaaagaactgtttgtatggtagaagaaaaaatagaaaagtaggtgtgttctatctgggagagtgcagccactcctcttggctcaattattcttacatgctaatgacatccgactgcatatctccagcaaaggggtttctcttccaacaatcaagatgctttctcacaactccaacgcaatctaatgaaacttctacaatgctttttcttatcccacactccaaactccttcattcctaaattttgctcaagttgtttgttgccaatgattccaaactatcattaaactcttcttgaagtattattacttttattttaagaaattttagttaccctttatggtatacattctcagrcactctttaaattaaagtatatgttctgtacaatttacacatttctgcaaggcatagtagc

SEQ ID NO: 897965 - DNA, 626 bp, Homo sapiens
cactgatttaagtgaaattagtctaaaaagaccaacagaagatgtgagcttaggaaagaattctcaataaaaagttaggagaagtcaaagggaagagtgaggaggaccatgaaaatgaagcmgttgccatatgcaaagctttaggttgtaagagtttgtgctcctgtttggaatgctgcacacatttgtttggctgaaaaatataaagtgtctcttagaagcttggtatttacaataataagaactagaagatctggttggaaactatattcccatagtttccaagggcctggccaagttatcactcaataaaaatgcattggatggaaagatgcgtgggtgaatggggggaggcaagaaaactaacactggtagactacctactacatgaaaggtactgtgctaggtactttcacctatgttatttgattttatccttcaactccaaaatttaggtatcatctcatttttgcagataagcaaattgaggcataaagagaacagacccaagggcaaagagctagaaactgggaaaacaaggatttgagtggagagctagctaacttcttgttcttttttacattatgactttaaatctatctttaaatcttttttttttttttttc

SEQ ID NO: 897966 - DNA, 618 bp, Homo sapiens
cactgtttccaagaatgccaatgtttattgccactgagcaggtcctatatagaatgggaacaaatataataaacttttgtgcacactgactactgagaatggatctgtaccacaaaaattattttttcactttgttctgcaaaagaaaaaaaaaagaactagcaaatgcctcgaagactcattcccagaggtagagtactctccctctacctcaaatccacccctgtaatccactctgctctggtctttaacatattgaggcagttcagtatttctgtcaatgttcattacctccaagtacaattattatcatgctcagaaatataaaaatgaatctgatacaattctcctgtcctcaaagagtttacagcttgctgggggagaaagagagtagacaagtttaaagcaatgtgttgtataatgtaagggaattatgcagcagcatgtggtggtagcttcactcctttctccaaatatcctcttctgtatccactgattcacayggtagctgaggagcttcaaagtaggtaaagcaacttgtactgtctcttaattggtgtttagatttatctgcctgcctagggggaagtcaaaatccagagccaggattataatatc

SEQ ID NO: 897967 - DNA, 640 bp, Homo sapiens
agcgagacctgtcaaaccaaataaaatataaaataaaatcactaagtttttaggagaaaagaggctatctgtaagactttggggtagggaaagttttcttaaacaaggcacaaaaaactctagctataaaataagattaataagtttaacgttaaaattgagaacacatcacacctgtaatcccagcactttgggaggccgaggcaagcagatcacgaggtcaagagatcaagaccatcctgaccaatgtggtgaaaccccatctctactaaaaaaaaaaaaattagctgagcatggtggcacacacctgtattcccagctactctggaggcagaggcaggagaatcgcttgaacctgggaggtggaggttgtaatgagccgagatgacaccactgccctccagcctggcgacacaacctggcaggtggaggttgcaatgagctgagatcacgccactgcactccagcctggcgacacagcgagactccgtcccccccaaaaaaaagaaaaaaaaaaatgagaacacagcttcacaaagaataccataaagaaaaygaaagaacaagccacaatttgggagaagatatttgccacatacataaccaacagaaaattaatatccagaatagctttaaaaga

SEQ ID NO: 897968 - DNA, 590 bp, Homo sapiens
tggtcaccatggcagttttcaatactgtatctggttcaagtggctccagttggtgtccagagatcaaatcttagaggcatctctcctgcttggtgtgctgggctctcctctctccagctgctttctttaaactgataattctgacattcaccctcacatttaaagtgaccacctctcagtcacagcatgagctcctggtcccagtgtttgctgcttgctttgaacacatccattaaagctccctgctggaaatctgtcagataacaccctggacttaataaaggcattggcttaccggtctcttctctcctccctgcctgggctcactgacctctgtgtctgtggtctccaggtgtgccaagtgctccccagtgtctgtaagtagtaaaaatacttacactttcacgttgtggttgtattgctgtggcctcacatgccatccagggcctgacattgacgctgccttrtgggacctgtgctggctgagcccctgctggagctgttgttttatggtctctggttctgctggggacaggagcttccagctaacttgattgaaaaactgatgcctttcattgaaaacactgggt

SEQ ID NO: 897969 - DNA, 579 bp, Homo sapiens
cccttgaaagacatgctgcattttatacaaataacctgaggcccgttcccagatggtttgcagtgggatattggtggtaatgcctagccagggttgagaagtgctrtgaaatgaattgaatgatgaatgaatatatgaatcaaggtttttatccatagccccatatcagatggtgagaataacaagctggtacttaaatgggtggagaggaaaggaaaacttagaatgagggaaggccatggtgtgttccagagtcagcaggaagcctgccaggactggagcaaagcatgacttgaaagagaagtgatcacagaggtaaattctggtagagtcttgaatgcctgttttctagtagacctgagggctctaagactaagaagcaggtgcctcctgtttcactcctaccctcaagtagaaccccacctgccttatttgtaaaggaaggtgctactttctgggcctggagacctgcctcaaagaaggagctgttcatactcttgtttctcctctggttattatggccttcccattccctggtgtttctcaaacttgcatcatcatcagaatcactggggttag

SEQ ID NO: 897970 - DNA, 573 bp, Homo sapiens
tctctgatacagaggtagagaaaatgaatgtttcaaagaaagcaaaatctggaagactatgagactgacttcatcctaaaaacaaaggctggggatgtatttaaaacaaattacagcaaaatctccacrttgataaaaccaggatacccctctggaagttgtaatcatttctttagttactatacaactcccatatttttggccaatgctgctattttgccaaacagttggtcaggggctgtaatccaataagtgttttattttctattgcacattcacaaattaagccacagcggcaacccatatcaacctgatctgctcagagaggcataggaaaagtcaattagtttttccactctctagggccaaatagacaattagaatagagagaaggttgtagggggagaagtctgtgagtattttgcagagaaagtaagtctttgaaaactacaacatcaagttaatatcaatcagcccaacgaatatgtggcactttctaaaaagacgattttcttctattaagttataaaataacagagggtctgatctatgtaatgatcatcatattcactg

SEQ ID NO: 897971 - DNA, 574 bp, Homo sapiens
tatagtcttaattcttgtacattttaaagctttgttttgaggcacagaatatgttttgccttggtaaatagtatgctcttaataataatgtccattgtactattgctgggtgcagtgcttttctataaacctcaattaggtcaagatggttgatagcgtggtttagatcttctctttccttattaatttattatattcttgctctatcaatttctgagagaggtgtggtgaagtctccaactatagttgtggatttgtctctttctccttttttagttttacctgtgtttgctttatatattttgaagttctgggattaagtacccacatatttaggaatattatctcttactcattttttcacccatttatcattatgcatggttccttcttcatgattatttttaataaactttattttttaaatcagctttaggttcacagcgaaattgaacagaaagtacagacagttcccatgtaccctttgttcccacacatacaacagtctctcctactgtcaatgtctcacaccasaatggtacatttgatatgtactgaaccttttaaattttgt

SEQ ID NO: 897972 - DNA, 637 bp, Homo sapiens
tgttttgtggaaagaacaagaaggagacaatgatgagtgtgtgtctgtgtgtgtgwgcgcgtgtgtgtgtacgcatgagaaagagacagagacatagatgagaaagaaaaagagagaaagagagacagacacaaatacacatacacagagacagagaaagagaaacagagagggagagagacagaagcagacagacagagccatagagacagagagagactatcatatatcaagaagattggatccaagtgtgagtaaagatatggctacatgatgtagcgcatttcactggacttttactagcaggtgtggaattgagactgatgccatataggatgctgagtgaatttacagccatttggcttggtttgctgctggcccaaccttctttttcaaaattatctatatgaagcctctcctgtggctactgactgattgtgtattttactatgtccacaaaggatgggaaagagcaaaagccaatgtgttgaatccagccatggacaggatgttagcaaagaaccctttgtggcttgttattggagacagaggggaaatcatcaagattttagggggaaatcagctctgtaaataaattacattgaactatagggattggcaaacaaaatccatttat

SEQ ID NO: 897973 - DNA, 578 bp, Homo sapiens
tgcctcaacattcctgtactcaaaccatcctcccacttcggtctccccagtagctgggaccacaggcacgtgccaccgtgcccagttgatttttgaaaatgttttctagagatraggtctcgctatgttgcctgggctggtctcaaactcctgggctcaagcgatccttctgccttggcttcccaaagtgctgggattacagtcgtgaaccaccactcccagccgataagcagtttttcaagcgaagcgttttaactagagaatcgagaactaaaaaaattgtaacaggtagttcgtgctatatttaattcaatactgtgaacgatttagaagactagatcatcaagacaacattgacaactgtggaaaagaatggtgtgcagtggagggcagacttatggaaaagcaggaaaataaaagagatgaaaagattcactgtccctggatcctacctaattcatctcaaggtctactctacgcaaggatctgttaaaaatctgtccccgtaagcatctgggttctttgaaattctcacaggccagcctcgcttctgaccacatagaaactggggacatgtt

SEQ ID NO: 897974 - DNA, 535 bp, Homo sapiens
ctttaatttatgcaaagagaaatttcaggaaagttgttctagaatcacatakttacatggtactgaaattgagggcaaaaccacttttgtccttgttatcaccccttttctctgctagttagctgactggctgttttagtcagggttccctagaggggcagaactaatagaatgtctatatctatctacatatgggagtttattaagcattaacttacatgatcacaaggtcccacaatagactgcaagcttgaggatcaaggagagccaatctgagtgtcaaaactgaagaacttggagtccaatgtttgagggcaggaagcatctagcatgggggaaagatgtaggctggaaggctaggccagtcttacattttcacgtttttctgcctactttatattcactggtagctgattagattgtgcccaccagattaagggtgggtctgccttccccagcccactgactcaaatgttaatctcctttggcaacaccctcacagatacacccaggatcaatgctttgcatccttcag

SEQ ID NO: 897975 - DNA, 646 bp, Homo sapiens
ttctgggtcaggggctcgtaactaaggttgtttttctatgataataatgccatcaatggtggatgagcccccaggttgtcacattccagcctagcttatataaatgaatgcagtacaggagaaacacaataaaatataaaacataaaactctatggtgattaagtttggtgattaactaatgttcaggtaagtacaaaactatgaaatggtcattgtagggtacatattttattttattactggtactgcaatggcaatagtttgtactattttccatatcgtgtatagattcaactgtattatagatgtaaaagctttctggctcagaaataaggtgcaatttactgtttctgtaaaaaattaagtattaagatttaatcaattaatatactggttgtgttaaattttggaacacaattgatgactgccattgctttcacttagtgcagcaaacccttcctcttcttcctcttttcttctgctcttcttctttttcaattttttcatgtctttatgttagaagaaggctcttaacgccacaaacgtactttgaaattggactcttgctgaaaaatggacsttgtttcacaaatgatatttggatccaatggcaggatgtgtttaagtattttgtttcaaaatttt

SEQ ID NO: 897976 - DNA, 577 bp, Homo sapiens
ctcccaggactttgcaggagcttggttctatggctcattgttaggaattttctctttttcttcattaggtatttttttttagcaggttcagggtagttgttagggctactacaggagataccrttttcaaaagggtcctctctcgtaacctttaattatgtgattcttatctcagatgagctcttcccaaaagcggagggattccctttacagataagtgtgattttcacagacaaaatggcaaaataaataaagagggagagagaggggaaataaatgagaattgttttggattttattatctttagtagtataacgtgtgagcagctagtttggcatgtcatagtagtgaaatgaaccaaaacattgaagattttacaaatcacccttgtgctgatactgacaaagcttatgagatttgtctcgtgaagttatatgttttttatattgaaatagaatataagaacacttgaggaaaatgttgctcagttaaacatagtaatagaaactgaccagagagttctattcttgatttgccaccttcagcagttactcctccagcccctactgtgggtat

SEQ ID NO: 897977 - DNA, 595 bp, Homo sapiens
gttttgtggaaatacatagaatctcatgtagttcatgagtcccaccacactgagagtaatcattctcctggcttaatgaaaatagttctattgttcttcttttaataaattcgagtttgtcaactcaggttattattttaatgtctgctttcggcaaggtttgttagctgttgtacagtatcagatattaatcagattaagtattgaggtctgaatattataaggtgacagacatttgcagtaagattacaaatctacatggataaacatgactaatttaaaagagccctggggagcattttttagaaagttcaaatacctgctgaatgctgcactgttattttaattatcccataatatggcacaaaataacaatctcatttcatccttttatttacaaagctgttcccattatcattatattttacctgctcaagctctgaaagattgctcctcgttgagagattcattaaaagagaataattatattatatttcacagattggcagaaagaaaatgtatctttgaacaattccatttccctgagcrgctgttcatttcagagttgaagacaggtctattacgtactttctac

SEQ ID NO: 897978 - DNA, 621 bp, Homo sapiens
ggctgggagctgtagaccggagctgttcctattcggccatcttggctcctccccgcaatatgttgttttaattgaagtctatgaagaaaatcaagcctcacacagatatgtagttgggaaaaagagtgatatgttaataatctgttcaaatacttttggatattattctttggcattatatcaaaattcaacaagtagtagtttcttaaaggttacttgcaatgtgaaatatagaaacatcaatcaattttttgtactcttttgcattaaaatctacaggtatgtcttgaactttgaatggatttcttaactatgagtgatttttaataccatgaattaatcatttgaaaataatatcagttctgttatgcaggctttcaaatattgacacagattattatacaatatcaaaaatcatacttgttgatttcaagctaagactagtaaatacaaaaagtttctaaattcctaattttcacttggaacattgaattttatyattgggaacaaatactgtcagttgttttccatcaaactgaaaaactccttccatttttaagaaaatatctgccaactaccccaagatacccaagtctgaataaccataattttaccatcagt

SEQ ID NO: 897979 - DNA, 461 bp, Homo sapiens
tctggttggtctgtggacccagtgattacaccgtgagccaaatgccagccaaaactctacttactatctggctcccatatgccttcattctattaggastatggaatcagtttggatatcaaaggatgaatttcagtatttttgttttgtttcattctgtttggagatagggtcttgctctgttccccaggctggagtgcagtggcgtgaccttggctcattgtagcctcaacctcctgggcttaagtgatcctcccaccttaacctcctaagtagctggaactgcaggcgcacaccaccacatctggctaatttttgtatttttgtggagacgaggtctcactgtgttccccaggctagtctcaaactcttggtctcaaagcatcctcccaccttccccaaagtgctgggattacaggcgtcagccaccgtacctggcctaatttgagtttggattctga

SEQ ID NO: 897980 - DNA, 461 bp, Homo sapiens
tctggttggtctgtggacccagtgattacaccgtgagccaaatgccagccaaaactctacttactatctggctcccatatgccttcattctattaggagtatggaatcagtttggatatcaaaggatgaatttcagtatttttgttttgtttcattctgtttggagatagggtcttgctctgttccccaggctggagtgcagtggcgtgaccttggctcattgtagcctcaacctcctgggcttaagtgatcctcccaccttaacctcctaagtagctggaactgcaggcgcacaccaccacatctggctaatttttgtatttttgtggagacgaggtctcactstgttccccaggctagtctcaaactcttggtctcaaagcatcctcccaccttccccaaagtgctgggattacaggcgtcagccaccgtacctggcctaatttgagtttggattctga

SEQ ID NO: 897981 - DNA, 653 bp, Homo sapiens
gggattcttgttacagaaatgtaattctacatattaaacaggcttttctatctaggcatttttatgtttacttttcctctgaaaactatacattatagacaacctgaaatgattatgaaatgcctctttttctatctgcttctacttacctttcctccaatactctccttctactgccatgcctcactataatttgatagatttggaatagagttatgaggattggttactattatataaaataacattaaagtattggaacaaatttacactcccaccaacagtgtaaaggcattcctatttctcgacatcctcttcagcatctgttgttttctgactttttaatgacaccattctaactggtatgagatggtatctcattgtggtttttgagttgcatttctctaatgaccagtgatgatgagctttttttcatatgtttgctggttgcataaatgtcttcttttgagaattgtctgttcatatccttcacccactttttgatggagttgtctgtttctttcttgtaaatttgtttaagttctttgtagatkctggatattagccctttgtcagatggatagattgcaaaagttttctgccattctgtaggttgcctgtttactctgatggtagtttcttttgctgtgcag

SEQ ID NO: 897982 - DNA, 633 bp, Homo sapiens
cgccaccatgtccggctaattttgtttttgtatttttagtagaggggtatttcaccgtgttagccaggatggtctctatctcctgaccgcatcattcaccatcctcggcctcccaaastgctgagattacaggtgtgagccactgcccccggcctctcactgattgattgtgttgagagtgttagcaattagaacttctaaaatggatttgcacaaataaaatttcaattttctcttttacttactggtttataaaatgttgctttgtttaaaatgaagttgttgactgctttaaaaagtttgataaccactgagcgaaagtaattatattcaaattatggagtttcaaacatttgccagaagctaagggagcagctggactttctgcttgaaacctcattaataggtgactgtctaccctgcatatggatacaactgtccaggtacccatcatgcaaaagtttatttaaaaactaattaacatattatattgtccagacagttttcagtgatttcattcacatttaacaatgatactcttttcttcgggcagaatttcccaaaacccagcaaggactccactgatggaaaatgagatgggttagtgggtacatggatgaatgttttaaaagt

SEQ ID NO: 897983 - DNA, 545 bp, Homo sapiens
actgccatctgcctaacctagtgacatgccaattatcaaacatggttgtgactaaagactcagggatttctggactgcaccatttakaatcaagttccaaattcagcatacaagttggaggcctgttggggatgtggggaaaggttgatgaaacagcggaattcccaaacagctaacttgggtgtggcaatccagggaatgaaaatcttggcaagttgtctcccttataagccctgagtatgatagtacataagcttcaacttagttcaataaaccaaggatatcaatatgctaaggaatctataaagaaataaatgcttctgtaagtatccaagcagaaaattcttgtaaaacttgtctgttactagtatgtggtatctgaccctacttcatcattcccaaaacttggattgtgtttgctccaaaaatgacagcctgttcctggaggaacgggtgttggctgtgctgatcacagcactacatgagcagcacacatcactggaataggaggaagcaggtgctgagattataattaaatatgtata

SEQ ID NO: 897984 - DNA, 649 bp, Homo sapiens
gggaggaacatttaagcccaggaggccaaggctacagtgagttatgatcacaccactgcactccaacctgagtgacacggtgagaccctgactctaaacaaaaaaaaaaaaagaaaaaattattaattattataagaattaatatgttgttaaatattataattaactactaattattttttcttttcttttttcttatgtataaacgagtaagaaaacaaaacaaagaacaatttagaaataagaaaaggacagaagcaggcaataaataaaaaagacaatttcagcagctaataattatatggaaagatgctcaatgagataccaaaacacatccatccaattgggtaacatcttaaagtcttataatcctcacgttggcaaggatatggaacagttaaaattttcatacactttcagagacagtataaatgcacacaccatttaaaatagcaatttaaaactatcctgtcaagtggacaatgtatgacaccctatgatctgtgtaggtacaataccctccccctgcaaagatattcatgaccatatccccagaacctttgattatattacctcatatgccaaggggaattaaggttgcaggtagaatttaggttgctaayaaaatgacctaaaatcataagattat

SEQ ID NO: 897985 - DNA, 585 bp, Homo sapiens
ctggaaatatttattgtagaaaaaaattatccctacatcctactgactccttcttagaaaggttttgctgcaacacactatatatgtattttttaaaaaatcttaaatatgccccygtcaagaaagagttaattatacttacaaggtctaaatacattcaggaggctgaatgatgcgctgctttcaaataggaaagcacctatgcacaactggtaagattcagaaacaaggaaaatatttgatgaaactgttaatactataattgctggtagagttagcactcatcctgtaaaacataaacatttgaaatactgccattccataataatctatgatattactaaaattcacatttccaaaacttcacatttccaaatcagtacattggtgatgaatgcgctttcaatggctgttattgttcaacaaatattgtactaatctctattatttgagaattaatttttgatgcttctgactctttcctctcaaagatgttggaacagattccttccttcatttatggatgcattcattcatcatttactaaatgctatcaatgttctgggcactttgttagatgcctga

SEQ ID NO: 897986 - DNA, 500 bp, Homo sapiens
tcctttttatattttatttgcaggattggtttatattttatcgatcttaaatacaacatttggaccacaatttaaaatgggctatgcaaatattatatcttgttttttttgtttgtttgttttgttttgctttgctttaattcccaatgcacagattgggccttctcataaaaaaaaaaaagcctgtattaataaaaatgttttatttaagcctctgcttaaactatgatttctaatttcttttaatggtattgcataccactccaaaataaaatctgtgaattcttttaactttttaaaaacttttatttgcatttattttatgctgaatttattcctgtgccataagtttttatttgtttcttcagtttcttcaggaatatctttttcttctatgcaacctcattctttcaatttkattgttgactgtggattcttttgctaggaacacattatgttttctgcctccctgtttcaaaacaaagtctgaccaaatcctg

SEQ ID NO: 897987 - DNA, 683 bp, Homo sapiens
cctccaaaaatgtctgtcataacccacagaacatgtgaatatattaccttctatgaaaaaaggagatttgcagatgtgatgaagatccttgatatgggcacagtatcctgtattatccaggtgacccaatgtaatccctagtgtccttagaggaggaaggtaggagggtcaaatcagagaaggtgatgtgatgatagaaacataagagagagaggtgagggcaagaattagaagatgctatcctgctggctttgacaatggaggagggagccataaaccaagggatgcaggcagtctcttgtctctagaaactggaaaaggacagaaaacagatatttctttagagcctccagagggaatacaaccctcccagcaccttgcctttaggacttcttacctccagaaatttaataggaaatatttgcattgttttcagccactgctggtggtatttcttatagcagcaataggtcactaatacaacatcttacccctgcaaccaccaccacctggtctgaatccatcatctctcactcggattctgcggcagcctcataactgatctactttcttctacttttcccctttycagggacaacgcagcagccagaatgatgctttggaaatggaagtctgattatatcttgcctctcttctgctcaaacctaatggctccccatttt

SEQ ID NO: 897988 - DNA, 642 bp, Homo sapiens
taatggctattaattcctaaaatacttactctctggttctctccataaatagttttccaacccttgctctaggtcatagaattatatatagttcattagagtttatcagaaaatacctcaagataatcaatgtaatcctctcattttacaaataagagaggggttatgattgacccaaggtcacatgggaagattatgacctccaggccaggcatctactcatgacatcaggcatgcagaaggttcctgtatgcaacgcatgtagtttcccctattattattaccattattattattattattattattattattattattatttgagcagactctggctctgtcgcccaggctggagtgaagtggtgtgatcttggctcactgcagcctctgcctcctgggtttcagcgattctcctgcctcagcctctcgagtagctgggattacaggcctgcacccccacaccaggccgatttttgtatttttcgtagagatggggtttcgctgtkttggccaggctggtctccaactcctgacctcaggtgatccacatccgcctcagcctcccaaagtgctgtgattacaaagtgtgagccaccacgcctggccggtttcccctattaatattgtatgtcagtatgg

SEQ ID NO: 897989 - DNA, 635 bp, Homo sapiens
agattgcatagccatgtacagagaggttaagtaacttacccaaggttgcacagccattaaatggcagaaacacttggatcaggatcaagttagggcttttaatcatggcattaaattatttcttatgtgtggtggtgtacgtaagtaaagggacccacaaaacactcgtgcaacccagttttaggggtgggagggtagggacaggaactcttctaggaagtattgacaatgcagctgaaagaaataacgacccccaaattctaatacgtctgaagcaagctctcctgagaattctggtgggctagggtcaggaaccttctcttaaggtacagaagaagtgtaggacgcttgggttctttgactaaaatgtttaggactttctttcccactcatctgtcccaaatgacttccttttgaataagaattactgtctctttctgtgagtgagtgacaggctatctcctgggtccccttttctctctcttaataacagcatgtttggataytgatgctaagtgcagaagagctggtgctcctaggctggcagtaatgaaaatatttttaaaaggatgtctgctcctctatgtttccctcagtcttgactgccttcaaaggctgaggaaggtcacaagaag

SEQ ID NO: 897990 - DNA, 630 bp, Homo sapiens
agtgtataagtggatattatgctcatgaaataagccagagagaggaataaaaaatgctacattatttcacttatatgtggaatctaaacaatgtcaaatactgaccaggtgtggtggtggttcatgcctgtaatcccagcattttgggaggtcaagatgggatcaccatttgaactcaggaatttgagaccatcctgggcaacagagcaagatgtcatctctactaaaaatatgaacaagtgagccaggcatggtggtgtgagcctgtggttccagctactcaggaggctgaggcaagaggatggcttcagcctgggagatcgaggcttcagtgagctaccatcacaccactctacttcagtctgggtgacagattgagatcttgtgcttaaaatgtaaaatacatagaaatagagagtacaattctggttatggaggggtgagaatgggaggagtggggaatgggaaaatgtgggtcaaaacgtacagagttgtggttatgtaggatgaataagcctagacatctaatgtacactatgaygactatagttaaaaatattatactgtacactgtgaattttctaagagtagagtttaggtgctctttccaccaaaaaaggtaactatttg

SEQ ID NO: 897991 - DNA, 553 bp, Homo sapiens
acagtgaagaagctacgttttattttattttttatttttatttttttgagttagagttttaatctttatgcccaggctggggtgcaatggcgtgatsctggctcactgcaacctccgcctcccaggttcaagcgattctcctatctcagcctcccaagtagctaggattacaggcgcacgccaccatgcctggctaatttttgtatttttagtcaagactgggtttcaccatgttggccaggaaggtctcaaactcctgaccttaggtgattcacccgcctcggcatcccaaactgctgggattacaagcatgggaagaagtagtatctaaggttatggtttcatattatataatgatataaggattccaatatttatgagaaaggtggtctttagtcagatgataaataatgatcaccaaatgatggtcaaaggtaatgcaacttctaagaagagatctaatacaaaaagccaaaaagcacaataaaaaataagagagaaaacaagttggaaatgcatgcataaaaggcaatttatttgtccaaatgttgca

SEQ ID NO: 897992 - DNA, 553 bp, Homo sapiens
acagtgaagaagctacgttttattttattttttatttttatttttttgagttagagttttaatctttatgcccaggctggggtgcaatggcgtgatgctggctcactgcaacctccgcctcccaggttcaagcgattctcctatctcagcctcccaagtagctaggattacaggcgcacgccaccatgcctggctaatttttgtatttttagtcaagactgggtttcaccatgttggccaggaaggtctcaaactcctgaccttaggtgattcacccgcctcggcatcccaaactgctgggattacaagcatgggaagaagtagtatctaaggttatggtttcatattatataatgatataaggattccaatatttatgagaaaggtggtctttagtcagatgataaataatgatcaccaaatgatggtcaaaggtaatgcaacttctaagaagagatctratacaaaaagccaaaaagcacaataaaaaataagagagaaaacaagttggaaatgcatgcataaaaggcaatttatttgtccaaatgttgca

SEQ ID NO: 897993 - DNA, 583 bp, Homo sapiens
acaggaaagtgcagatatctgtttaatacactattgtcatttccattggataaatacctagtgggatccctgagtcgcattctatttttaactttttgaggaacgtacatactgttttccataatggctayactaatttacattccatgaacaatgtataagatttcccctttctccatatcgttgtcagcatttgttatttttcctgtcttttgataatagccctgttagctgggatgacgtggtatctcattgtggattcaatttgcatttccctgataattcgtgactttgagcacttttcatggaccattgtatacttgtatgtcttcttttgaaaaaagtgtcctcaggtcgttgcctatttattaatcagattattttttcccactattgagttttaaaatacattctagataaccatttttcagatgtttagtttggaaatattgtctctcattgtacagcttttctcttggatctgtcaattatctcctttgctgtgcagaagattttttagtttgatgtcatcccattcatctatttttacttttgtaatctatgcttttgaagttttattttg

SEQ ID NO: 897994 - DNA, 583 bp, Homo sapiens
acaggaaagtgcagatatctgtttaatacactattgtcatttccattggataaatacctagtgggatccctgagtcgcattctatttttaactttttgaggaacgtacatactgttttccataatggctatactaatttacattccatgaacaatgtataagatttcccctttctccatatcgttgtcagcatttgttatttttcctgtcttttgataatagccctgttagctgggatgacgtggtatctcattgtggattcaatttgcatttccctgataattcgtgactttgagcacttttcatggaccattgtatacttgtatgtcttcttttgaaaaaagtgtcctcaggtcgttgcctatttattaatcagattattttttcccactattgagttttaaaatacattctagataaccatttttcagatgtttagtttggaaatattgtctmtcattgtacagcttttctcttggatctgtcaattatctcctttgctgtgcagaagattttttagtttgatgtcatcccattcatctatttttacttttgtaatctatgcttttgaagttttattttg

SEQ ID NO: 897995 - DNA, 583 bp, Homo sapiens
acaggaaagtgcagatatctgtttaatacactattgtcatttccattggataaatacctagtgggatccctgagtcgcattctatttttaactttttgaggaacgtacatactgttttccataatggctatactaatttacattccatgaacaatgtataagatttcccctttctccatatcgttgtcagcatttgttatttttcctgtcttttgataatagccctgttagctgggatgacgtggtatctcattgtggattcaatttgcatttccctgataattcgtgactttgagcacttttcatggaccattgtatacttgtatgtcttcttttgaaaaaagtgtcctcaggtcgttgcctatttattaatcagattattttttcccactattgagttttaaaatacattctagataaccatttttcagatgtttagtttggaaatattgtctctcattstacagcttttctcttggatctgtcaattatctcctttgctgtgcagaagattttttagtttgatgtcatcccattcatctatttttacttttgtaatctatgcttttgaagttttattttg

SEQ ID NO: 897996 - DNA, 677 bp, Homo sapiens
cagaggatgtgtcatattccatcaattctgttgaggggtggctgtctcctaggacctctatgcagaggacattgcccctgaaatctaaaatctggtaggcatgtaagacctacaggggctaagcaggaaacagatacagaaacactacatacagaaacattggatagtagggagtagtggagactgggaaactagaagttatgtgtgtactctaaagggggatacacaaatttaatgtaactatgactctgcgatgagggtgtacaaaaattctcacgaccggctgagctccttttctcctatggctgaggccggtgtgagagcaaacaatctgaaagtttgtgaattcctgtacctccctgggctgttgacattttggtcatcactgaacaggcaggaaccccaggactgacaaaagagagcttggagtcgatcgtgcatcttttgtgacccagtcagcatgtgggaagtgatggccttcattgctttctagtttttgctgccactgaaggagggctgactcaagatatgggaagagggagagagttgaataaatacaggattgattgattcrgatttttatgtggaaacttttttttcttaacacatcaatgatatataattggcatacaataaactagacatattgaaattgtataatttgataaatttcgaca

SEQ ID NO: 897997 - DNA, 590 bp, Homo sapiens
ttcttttcttttctttttctgtcttgctgtcttgcccaggttggaatacagtggcacaatctcggctcactgcctttgcctcctaggttcaagcaattctcatgcctcagccacttaagtagctgggactacaggtgtgtgccaccacacccagttcgtttttgtatttttattaaagacgggattttgccatgttggccaggctcgcctcgaactcctgagctgaagtgatccatccgcctcagcctcccaaagtgctgggattacaggcgtgagccaccacacccaccctttactttttataataaaattttttttatacatttgttatatatgtgctatatataattaccatatatgatttgttataaacattagtatataaatgctggatttctaattggatcaaattatggacattgttttaatttacttattgtatgtgtatatatatacaacttatttatgtgaagatatttatatatatagtttttaagactaaataagggtggtattrtgtttgctaggcctggcatttgtatggtacataaggtttaaaagttcactttcttttttctgccccttgggtt

SEQ ID NO: 897998 - DNA, 630 bp, Homo sapiens
tcatttaggagcattaatctggcaagggaatcaggatattgtagacaaaattggtagagcaatgaaattagcattttcttctcactatcacccttacayaagatgttaaaaaaacagagtggggaaggagtcaaaagggagacagagagtcattcaagagcaaacttaatgggtttgtgggactttctgtaagtcaggagcaagaaacaagtcaaagataattctgaggtctctggagaaaaaaatattaataaacattgggataggtgaaatgaagagaaatccactttcgcatttgtggagtttaaagctatgaaaatctttgaagctttgagtgtgagaaaaataacctagaggggccgctcatcttttaaagtatgttggtaaaatggtgactgagtctagcaaaaatcatgcacaattcttgaagagataagatttggtttatgtgttagtcagagttctctagagggacagaactaataggatagatgtatatctaaaggggagtgtattaaggagtattgactcagacgatcacaaggtgaggtcccacaataggtcatccgcaagctgaggaccaaggaagacagcctgagtcccaaaaccccaaaagtagggaagctgaca

SEQ ID NO: 897999 - DNA, 635 bp, Homo sapiens
tgtccccttacagaaaaaaaaaattactatgttcaagtataaccccattcatatatrtctacccaagtgctttcgtctatgaaatgagtatttgactgataaatacatacatatttaattttgtaactttccccacaataaattatttgtataaaacagaaaaatttttatctattgtaattattttcttacctcatctggagggtctgagaagcattggcaacagcacaaatgtgacatgagtatttaaagaaaaggtgaattgcccagggctaaaaaacatactccatacatcatgttttgaacagtcatacaatagattatgatgtgactgtgaagtcacaacagtgggctcccaaatatgattttcttggtggacattaccctgtgacactttccttgtatatgtgtgtgtatgcaagtgtgtgtatgtcggtgtgtgtatgtgtatgtgtctgttgtttgcctgtctctctgcaaagcattctactcaggcacagtaatgagtaggacaagttctcctacaaacgaactcaatactgttcatcaattaactcttgcgcttccttctaaaaccacttgtgaaatcaaccatttttcctcttcttcagattagggaatgggaacaaatggag

SEQ ID NO: 898000 - DNA, 566 bp, Homo sapiens
aaaaaatgtagaggctctcagatttctttctttgtgcatttctccttcctgttgaatgttgggaggagttgaccagcctccagggattaagacattcaaagtggtcagtaatttccataataggattcagtgatcagattcaaaagcaaagaacaactaataggaaaggataagaaggatgaatggctgttatagagtaggctctgtaagttgagaaatagagcattcttgaagagagcatttcattagccctcaagacatatacaaatactagatattatgtgaaggtgaggaagtcttgatgtcttcttgtcttatggaagaatttttattctaataatgggttacaagattgaaagaagaacaaagacattttgaatgggacaaaaattgaaattaaaaaatcagcattcatctgttggaacaaagttttgagagcaaatggagctctcagaataggcagaaagaaagaagctaggccagattaattgyggagcttggcttttattgaatcagtgatgtctagagccatgtttacaatatttttctgaaaaatttattagctt

SEQ ID NO: 898001 - DNA, 611 bp, Homo sapiens
agatttcccttgtagtgtaagtgaattaaaacctaaagtcttccattttccaaagttgaattggttggatcccaaagaacttaaaatattcatttattgattgtaaaattagttcaacaaacactcttttgtctctgcattcttttcttctgcgtttcacaaatcagtcatttgacggaagacgccttgttctgtactctacaccaaggagagaaaaataattttacacactttcccctatagcagtcaaaatgaaagggaaaaataataaatctagaaacagtattggtggcttctttttccacgttatttattctttttcttccccacgttctcccttcttcccaatctattctcttccctttctcttttctctcttaccgtctttgttactctcttctctcctttctcctcttccctctctctgtttctatttctttccatttttcctcctttttaaaagaaaagttatgtttctaatgaccacaaaaatcacattgcagacytgaacactggagtcctgtctctctctttaggttctttgccacgaataaatgattttattacaacagaaaaaaaataagggaagtgacatttttctttcaaatatt

SEQ ID NO: 898002 - DNA, 290 bp, Homo sapiens
acttatatcctgcagaactgtgcaagaataaacttctgtttgttttaagccacccagtttgtggtgatttgttatggcagctctgggaaactaacacagtgggtcaaacaaggatttcccttatgggtgacactctaagctaaatgggagctaccagtattttccctttacttccacaacayctagtactttctaatgccccacaggccattcctcagccctcctctctgctcagcactgccctgattaaatgcttcagttccacccccctgctgatgattcctcaccac

SEQ ID NO: 898003 - DNA, 549 bp, Homo sapiens
tgatgcaccaatacaggttcatcaattgtaacagactctaccactgtgtgtgtgatgttgacattgggggaggttgtatgtttgtgggggaatgacatatatgggaggcctctttgtattccacttaattttgctgcaaaattagaagtgctctaaaaaataaagtttactgatttaagaacgtttgtttaaaaaatcatttcaaaggtaaagaaaagtgcaaaatctctgtttttcagaatcacagatttgagattgagatctttgacgcaagtcaattttatttttctatgctcttctgatttgtttggcttatttttcaggatcccctattatctgtacattggttttccattatcttcaacatctgccatcttttctttcattctttttggctctcaccttaacattctagaagaaattctcaaatttttctctacatcattggctcacctttctgcagtgtcaattctgttgtttactaaaatcgattccatacctgcattattttyctacttaaaaaatatttcctaatctcattcagttccc

SEQ ID NO: 898004 - DNA, 643 bp, Homo sapiens
aaatttttgtttattataaattagagaccatagtattcatttatggcagcacaaagacaattggtaccagagagtgaggtactgctayaacaaatacctacaattgtggaagcagctttggaactggatagtggagactagacgagtctggaagagcaggctagaaaaaggctgcattgctgtgaacaaagagttaaaggtgattctggtgagggctcagaagagaagagctgtatgaagggtaaaacttcttagaggttacttagatattaatgatcacaatgtgggcagaaatatggacagtaaagaccactctgatgaggtcttacatgagaatgaaaaatatcttattagaaactgaagtcaagtccatccttcctataaagttatacagaacttgactgaactatgtccatccccaagggttttaatgaagacagaaattaagagtgatgaactaggatacatggtggaagaaatttctaagcaaaatatggaagaatctgcatggcttcctttaactgcatacagtaagatgcaagaggagagaaaatatttaaaggtggaatttatgattaaaagagaagcagaatgtaaccatctggaaaattcacagcctggccacgtaaaacacaaaaatgtg

SEQ ID NO: 898005 - DNA, 606 bp, Homo sapiens
atagtctatgtagaaaatgccaaggaacctataaaaaaattcgtagaactaatggtttctgcaagattgcatatgagataaacatacaaaaataaattgtacatactaataatgaacacatgaatactgaaataaaaaataccactgacagtttcttaaaaaaacacttaggtgttaatccattaaaacatgtacagaatgtataggcagaaagctaaaaaatgcttatgaaataaataaaagcaaatctaaatagagagaaaaagcatgtctgtggtatttgtatctggcaaagatatcacttctccccaaactgatcacagattaaatgcaatcccaatcaaaatcttaataagatttattatagttacagacaaattgattctaaaattgatacgaaagtacaaaggaaatagttaaaattttctagaaagaaaagcaggactcacatgatccaatgttaagatttagtataaaattaagtartcaatcaagagagtacggtcttggcaaaaataaagaaacccagatcagtggaaaagaataaaagtacaaaaagtagacctagacaaatatgatcagtggtctctaaaaaaggcacaaagg

SEQ ID NO: 898006 - DNA, 595 bp, Homo sapiens
gaaaatgccaaggaacctataaaaaaattcgtagaactaatggtttctgcaagattgcatatgagataaacatacaaaaataaattgtacatactaataatgaacacatgaatactgaaataaaaaataccactgacagtttcttaaaaaaacacttaggtgttaatccattaaaacatgtacagaatgtataggcagaaagctaaaaaatgcttatgaaataaataaaagcaaatctaaatagagagaaaaagcatgtctgtggtatttgtatctggcaaagatatcacttctccccaaactgatcacagattaaatgcaatcccaatcaaaatcttaataagatttattatagttacagacaaattgattctaaaattgatacgaaagtacaaaggaaatagttaaaattttctagaaagaaaagcaggactcacatgatccaatgttaagatttagtataaaattaagtagtcaatcaagagagtacggtcttggcaaaaataaagaaacccagatcagtggaaaagaataaaagtacaaaaagtagacctagacaaatatgatcagtgrtctctaaaaaaggcacaaaggc

SEQ ID NO: 898007 - DNA, 687 bp, Homo sapiens
aggactgaattcctctaagcgtacacagtcttsacaacagttcctggcatagccaaagcctgcggagagtccaaggcaggcagggtctttgccagcctctcccactctgccaaaagccattctgcacacaggatatgttgagaaaaggacagtaaggctggagagctgtgaaaaccagggggaatgtgtatcacacacatctgtattgtgcagtgcaggatgggtggctcattcctctgcacacattttctattaaaaagaacaagaaagaaaaagaaaaatcctggcaccatccggtgtatctgtcccctgggttttgtgcagggaatggttagcgatgactaatctgatatcgaggtagcttgatcgccaaggacttaatttatgaagtgtttagtacattcctgacaaaaatcggctccaaactatggacacacgttcattcgtgccttatggctcccagctgcagtgctgcagctataaacgctcattgttggaagggtgaaggaggctgggagtggtcggaatgagtgagtgttcctacagagtggcctggagagcaaggctcccacaagacctgagggctcaaaaaaatgggcaccagcaggcacggggagggggcaggaggagggctgagggttggtcttgcctgttggaagtggcaaagaacctggggatcatcctggt

SEQ ID NO: 898008 - DNA, 644 bp, Homo sapiens
aagttgtaaggatggcatgaggcaagtgatgtaatgggtttatttaatattgatactattgtagatatctaatagacatttgttccattttcccttccctctttaaaatacagtaatcatgtgatctctttccttagaaataggttctaaattttggtgggtcaaaaagtagtttttacaactaagatatggtcagaattccaagagttggccttccatttctccttcctactagggtgatgtgtgcacagttctaagggtgactttccagagatctgacaatgactcaaatgtcgggaggtagataggaccctgaagtcaccacccatgagcagaaatccctcacctgagttggctgtgctcacaataccatcagaagagtctcagagaaggcactttttaaaatcaaatgaataactaatataaatacaccaaagaaaaatggaaatagttgtttatataacagcgatagaagaaaagacctggaaaaaaatcttaaaaattgtcaatgaattrggaaaaagaagtagtgttaccatccttcccataggtaaccttccctaaaggaaagaagatctgaatatttggaagaagtgagtcctaaaggggattcatccctctacccctgcttgctctttcctata

SEQ ID NO: 898009 - DNA, 543 bp, Homo sapiens
aaacaacctctttaattactcaaagtgaccaaggctataatgttttactaagaaaaaaaagtgcctttctttggcattttgtagaaaatttaagaaacactttggggcatgcaatcatccctgtttatctraaggcaatttccacatgatgaaaaagcagttcagttcatcgttcagatccatccacctactaaatgactgttcacgagatgtctgatctgagatagatgatgaatctctccttggattgcctagtactacacaaaattggtagtcaggtttgagtttttaaattttttttgtggtgttgatgatgactagaatttactgagagtctgttctgtgggcatatatcatgctaaagtttatgtgcatcatcttatttaattctcctaaaacctgttgagttaggtactattattttccccattttatagatgaggaaactgaggcttagaaagcctaaggaattgaatggttgcacagctaaaagtagtgggtcgtgaccgatgctttgggaatctacttatgaggcttgaaaca

SEQ ID NO: 898010 - DNA, 579 bp, Homo sapiens
gatggcaaaggctgccatacaaaacacttctcctaggccagagaaatgagtggagtgtttatagaagcactaccctcagaaatctrcgttcacagaaaaccgttttctgagacaggttttgaaagaaggtgtggattctgcaagcctttggtctccatctgttttctcccctctgacccttggttgtttgactacatggtcatgaccctacgttgagtggggtagatggtctgtgaagatgttcatgcagcttcatcttcatgcctcccagcagtgcctaaagctctcctgctccttccttcctggaagaaatgccagaatctcacttcttaaaaaaaaaaaaaaaaaaaaaaaaaaacataaaagagaaacacaaacagagaatgagccagattgctgagggggatcaaggaatgaaatacagactcaaaagctgcatagactcagaaaccccaaaactttcccaaaacccaacctggaacatttatcttcctgactttctttagtctcaggccagtttttaaccattagacgacttacaattataatgttgacaatgcttaggttagaggtggctgc

SEQ ID NO: 898011 - DNA, 633 bp, Homo sapiens
ctcctttagactctaggctgtatgcagggacttcttaatatgcaggaggggagctacagtctcaagcatgcttttctcagtattagaatttcagttcttgaatgtatcaactttgatgcattgtattcttttaaatttatcttctgttctggaaccagaagatttatctttctaacaatgatttaccattgttctgttttgttttattgctgtattttacaaggcttttatgcatgcttaatgtgtgtgtgtgtgtggagcgctttcttcatattctcttcttgttctcttgtcccttctgttgtgtgtgtgcttacaaatgaactctgggggtaaaaaaaaagccctgatttgtagcatttgctcattttcatagtgtaaatactcccactgtgatcaatttcaagctatggacatgacatcaacacactctcaaaattcctgaaaatgtaacagtcaactcttgcaagtgcaagtcacgttgaactagcttcaccacaccacagttaaattactgtatatttaaagtttyggaaactctgatattgtaattcagtggaactctagtaacatttgggaatgtgcagttttatatgcattctcgtcattctaattcaggaggctgtgaaccac

SEQ ID NO: 898012 - DNA, 415 bp, Homo sapiens
acttattctaactggcatagtgattctagtaaaaaaaaaaaaaaagaaaagaaaaagtaagagtatttactgtggtttttccaactaacataattttttcccttaagcatattttgtatggagaatgtgtcaaatttcgttgttttgcaggtctcaataaagcttgtatgttgtgcttaagttgctcttctctgatctgttcctctagtggcagatacctggatgtaaacaatctgggtgttcatttatcttcatggaatttacaaaagacttttaatctaggaagtggcataaaatgtcacagtggatattaaatgtttatctataggggaaaatttggcaagccaaatctttgaaccaacagcctttagttgagttctrtgaattcactgtgaagtgccagcatttccaattg

SEQ ID NO: 898013 - DNA, 679 bp, Homo sapiens
ttggttacagatagggtgaagaggggatgatgtgggcaggagaagagtgtattataaaaggrcaacttgaaggatgtttttggtggaactatacagcatcttgattgtgatagcagatgtatgaatttacacatgtgataaaattttatagaactaaatgcacacacacacgagtacaagtaaaactgagaaaatacgaataaaataggtggattatatcaatgccaatatcctggttgtggtgttcagtgctatactgtactatacattaatatgttaagctatactgtaattttacaaagttgccactactgggggaaattgggtctattgatctgtgtctatccttcaatagtaccaatctgttttaatcacgttagctatgtagtaaaccttagtatcaggtagagtgattccccccactttatgcttgtttgtcaagattattttagctattccagggcctgcgcctcactatataaattttgcaataagcctgtatatgtctataataaaccttactgtgattttggtaagaataacattaggcctatagatcaatttgtgaaggattgacatcattattatgtggagtcttaaaatccatgaacactaagcgtttacatttacttaggtcttccttgatattttgaatgccattttgtaattttcagcatac

SEQ ID NO: 898014 - DNA, 679 bp, Homo sapiens
ttggttacagatagggtgaagaggggatgatgtgggcaggagaagagtgtattataaaagggcaacttgaaggatgtttttggtggaactatacagcatcttgattgtgatagcagatgtatgaatttacacatgtgataaaattttatagaactaaatgcacacacacacgagtacaagtaaaactgagaaaatacgaataaaataggtggattatatcaatgccaatatcctggttgtggtgttcagtgctatactgtactatacattaatatgttaagctatactgtaattttacaaagttgccactactgggggaaattgggtctattgatctgtgtctatccttcaatagtaccaatctgttttaatcacgttagctatgtagtaaaccttagtatcaggtagagtgattccccccactttatgcttgtttgtcaagattattttagctattccagggcctgcgcctcactatataaattttgcaataagcctgtatatgtctataataaaccttactgtgattttggtaagaataacattaggcctatagatcaatttgtgaaggattgacatcattattatgtggagtcttaaaatccatgaacactaagcgtttacatttacttaggtcttccttgatattttgmatgccattttgtaattttcagcatac

SEQ ID NO: 898015 - DNA, 617 bp, Homo sapiens
cctcattttaactaattacttctgcaacagtcctatttcygaatgaagtcacattctgaggtactgggggttacaacttaaacaaatggataacatatgagttttctgaaaggacacaattcaagtcataacagtataagaacatgggaatatactatgatgttaggttcaaataacaggaaaaaagttgcacaatgaaaggaccctaaatatgagacacgaaatatatctgatgcatatattagtattagtatatattatgagatatttgtatataaataattagatattacataaaatatatattatataaaatatattatattgtataatttttaaataaggctactttttcaatgtcttactagttttttcacaatgaatatatgttattcttacagagaccaaagtgctgtttttaacaaattgttgcactctctctgtttctcttgctgtacccaccaggctgggtcacttgagaggctgccagctcttggaggtttgaattttgcctcttgtttttctcaggcagaattgtctcacacagacggtgcacgaatgaatgatgtaaaatgaatgacgtaaatgaagactcccctatcttaatggtctaggaa

SEQ ID NO: 898016 - DNA, 589 bp, Homo sapiens
cctaaacttcttagtaactttccaaacaaattatgggagagaatcagctgttaggttgggactgtattagaggctatttctgttgtcaattttgtggacaaacaatttgtcctgtatagagactaaattcttgatcagctatttcaacactgcttgcaaaaccctcatctaattcttcatctccttgaccattggctctgctgggctcttgctctgaataaattgcactgccatatttctccactccttgcctgcagggtctttctagaaagagctatgagtcaattcctgtaggtcacccacagattcatacaattggatctcaatggggctttcactgatacttttcaaggcttcccttcaccacctgatgaggggctcactctccacaccccccaagcccctgacttcattcccactctcacattctctgctgataacctcaactcttgctttatgaagaagtcattgcaagtagggcagaggggaaagaaggaagaacrccaaagggaaaaagtcaagaaagaacagagtgagaaaatgagacaggctgagagggggtgctttggtagcaggcaggcagaggaga

SEQ ID NO: 898017 - DNA, 619 bp, Homo sapiens
cttatccgttattgcatagcaaattaccccgaaatgtagtggcttaagacaacaaacattgattcctgtccagtatctgtagggtaggaattccagcaaagcatagataagtgaccctggctcacagtcccctctcacaaagctacactcagggtgttagctggagctatgctctcatctgaagactctccttggggtagcaggagtacttgcttctaagctgtctcatgtgactggcagactggatcccttgctatgtaggcctgtttacttgattgccccataacatgatagctggcttctccagggtgaatgattgaggagagagcaaaagaggaggtgcccaagacagaagccatagtctttttataacccaatgtcttagaaacctgtcaataagtccaggccatgctcaataggctggtgtgaatatcaggaggtaatgctcactggaggtgatcttagaagctgtctaccacagaaactcattgagaartaagattacaacccttgaaggtataccaagtccctcctaaatgacttctgctgtctatccttttttaaaaaaagtagatatggagtcttgctctgtcacccaggctggagtacggtggtgtga

SEQ ID NO: 898018 - DNA, 577 bp, Homo sapiens
ccatatgataggccacaaaacaaggctgaataaatttaagaaaattgaaattatatcaagcatcctctcagaccatagtggaataaaactggaaatcaactccaaaaggaaccttcaaaaccacgcaaaatacatggaaattaaataacctgttcctgaatgatcattgggccaaaaatgaaatcaagatggaaattaaagaattctttgaactgaacaacagtagtgacacctattaaaacccccgggatagggcaaaggcggtgctaggaggaaagttcatagccctaaacacctacatcaaaaagaccaaaaaagcacaaactgtcaatctatggtcacacctcaaggaaccagagaaacaagaatgaactaaacaaaacccaagcagaagaaaggaaatagccaagatcagagcagaactaaatgaaaatgaaacaacaacaacaaaaatacaaaggtaaatgaaacaaaacctggttctttgaaaagataaataaaattgatagaccrttagcaagattaaccaagaaaagaagagagaaaatccaaaaaacctcaataagaaacaaaacgg

SEQ ID NO: 898019 - DNA, 616 bp, Homo sapiens
ttgaagacatacaagtggccaacacacatatgaaaaaatgctcaacatcactgatcatcagagaaatgcaaatcaaaaccacaatgagatagcatctcatactagtcagaatggctattattaaaaagtcaaaaaacaacagatgctagtgaggctgcagagaaaagggaacacttctacactgttggtgggaatataaattagttcacccactgtggaaaacagtttggagatttctcaaataacttgaagcagagttaccacttgacccagcaacaccgttcctgagtatatacccaaaggaaaggaaatcattcaaccaaaaagacacagacacttgtatgttcattgcagcactattcacaacagcaaagtcatggaatcaacccagttgccatcagtggtagattggataaagaaaatgtggtacatactcaccatggaatactatgcagccataaaaatgaatgaaatcacgtcctttgcagcatcatggatgcatttggaggccrtaatcctagttaagttagcccaggaacaggaaaccaaatactgcatattgccacttaaaagcgggagctaaacattagacacacatggacatagacatgggaac

SEQ ID NO: 898020 - DNA, 610 bp, Homo sapiens
gacatggtgcttattcctaagtcatagaagactgtgaggctgaagccacgcccctcacaccaggaggcacgcagccttagctatcaaggatagcttttagccggtgaagaatacayttagctaccagagtaaggcaagttctaggattgaggaatacaggactgaggttgacaaaggagcaggagggagtcttgaagggacttctccaaaaaggtaataatttggcaggtcttgaagacccagcctgagttgtttaatggttatagtttcagttttacatgatgaaaagagttctggcgatggatgatgggttatttcaaataatgaaagttctggaaatggagttggtggacgggaaagcgggaattactgagatacggtttgggtacacggggtgccaatgaggcaggaacaggcactgcatctcgtcgaagcttgatcccacctcgaaactgacactattctgccaccatggaatagctgttaatgtattttggaatttcttttaccaatgtaattcccttcatatatttattgcttcttcttctggggatatcaactttacatggtataaaattgactttggaatttgctcgggaagaaatctggc

SEQ ID NO: 898021 - DNA, 635 bp, Homo sapiens
atgttcagctgtgctggtgaagaagtgaagtacaagagagtaggattttaccagggctttggttttctcaggcgacaatggtgacaggagagagagacaagagagctgactgtggatactagaaagagattctagtaatggctcatgaactgctatctcaaagaccacgcatttttttttatctgttttgcaacttataaatattttgaagttattgatgtataatttacaccaaacaaaatgcaccaatctaggctttcagttcgatgaattttgacaccggtatacacctatgtaagcaccacctcagacaagatgcagaacatctccatcattactagacatcccctcaggtctctttctagtcaagccctgacttctgtcccaggggcaccactgtctgactctatagccagagaatagctttgcatgttcttagatttcaaataaaaagaatcacacagaatgtattttctttgtgtctagcatctgtagctcaaccctatttttgagattcatccatgttattgagkgcactaatagttcattccccttattgctgagtagtattccattgtacggccatacagcaattttttgcccatttttcctgttgatttatatcaacattcagg

SEQ ID NO: 898022 - DNA, 656 bp, Homo sapiens
tactttaatgacctcatcttaactgattacaacggaaacgattctatttccwaataaagtgacattctggggtactaggggtaggacttcaacagtgtggacagagttcaacctgtaacacacctatctactattatacttcttctctgagaaatgtgggagtggcatgattttcttagtattgagagcacagaaaacaaattgttatgaaggggcgcaacagaataataaagtagagggaatcctaaaaagcacatctaaacaccaattgcattattcctagttcccatcatgaaatttcagtcaataaaatatattccttaacctatttccatcttaataaggatgctactgccacgacaaagtttaacagaagcaaagtcttacacttaaaaaaaggttaatttttacattagggatttgacttcattatacagaaaaaaatgttaatttgatcaatgtaaggaacaaaagcagatgtgagttgggtttcatgcagctaattgtctaagtttaatcaaaagattatgtagtatttgttggcagcagtggtagatgaagccagctattcacatacaatttgtgcttcctcttccagagtgtggagttgccactcagaggttacattactactcaccaatgggatgtgagttgaa

SEQ ID NO: 898023 - DNA, 634 bp, Homo sapiens
cccatttacatttaaggttaatattgttatgtgtgaatttgatcctgtcatcatgatgctagctggttcttttgcacactagttgatgcagggtcttcatagtgtcattggtcttaaaattttggtgtgtttttgcagtggctggtactggctttttctttccatatttagtgcttccttcaggtactctttcaaggcaggcctggtggtgacaaaatcccttagcattttcttgtctggaaaggattttatttctccttcacttatgaagcttagtttgactggatatgaaattctgggctgaaaatttttttctttaagaatgtgaaaattggccccactctcttctggtttgtagggtttctgctgagagatctgctgttagtctgatgggcttccctttgtagatgacctcacctttctctctggctgcccttaacattttttccttcatttcgaccttggagaatctgatgattatgtgccttggggttgatcttctcatggaatatcttagtggtgttctctgtatttcctgaatttgaatgttggctgtcttgcyaggttggggaagtatttcttgaatttgaatgttggcctatcttgctaggttggggaagttctcctggataat

SEQ ID NO: 898024 - DNA, 689 bp, Homo sapiens
aggctgacgcttatgttagctcaggatccaggcatatccttctcccaaacctgcattayagtcctggtgtcatgttgaccaaccagagaacttctctaagaatagtggttctcaaccccagctacacattagattcacctgagaggtcccctcaactccccccgccacccctaccccgccgactccccaccaccaaaataatattgatgcctgggctccatcctaaactcatcaaaagcagcagaattgagaaccactgtactagagtattatagctccccaaggccatgtgtgggaaaacaggcatgccctttaccttcctgtgtgcgtctacaagagcactcccaacatagaaccatgaaggtgggggaagtagcacattaattttctgcctcggtagccctttttccttctcccacacctcgactgtgctagtgggcaggatgggctttcccccttcacctaggcaggggctttccctgagttatatcctgagttggcccctatgcacaggtaggcagtccaaattaggagtcctcgtgttaccacactacctgatgtggaggccggaggctgagagaccacaccaaagctttgggcaggaatggtgtcccctagttggcacaaggaaatggaccccaagtctaagtcttgataactcgacatttaatagcttggtagaggaggat

SEQ ID NO: 898025 - DNA, 663 bp, Homo sapiens
agaaaataagtaacacaaggtctgcctgaggctggaagaagtgggacagctgtggactctagataaattcagagccagggtctagtctaattctgtcacttgccagtcttgtgaacttgagaaaattgcaagtttttaacctgcaaagtcaatttgataaaccccatcttatcaaatatatatatatatattctatgtaaatcacctgacacagtgttaggtaaactttgggtctttaatgaatggtaattattactaaacttagtttgacccaagatgatgacaatcttcccttacagaattttatttgcagaatatgttagagaatactccaaataacatagaaatccacatctgctgaaatgctgcccagccagtaaaattgagtagtgtttcctcattaaagcatctgttatttggctgtggagttgtctcctttagctggaggcaactcaaagttcttgtttcgtgttagggaccgaaaacttccccggtcacttttccatccaaaccgcccctattttcattcacttcatcaccaccaaaaaccaaaccctsccttagagtttgacaaattatactcaaagtaacctaattcaaatgtctttttaatggagcagactctcgctctcccagcctatgataggggtgatggttcagtgg

SEQ ID NO: 898026 - DNA, 606 bp, Homo sapiens
gattctgagaactaatagcaggagaaagactctatgggacmcaactgttcaggggtttgtgactccttgacttctcagccaggatctctgactcctccctctagtgacatgagtcctccagggagaggagtgagtggctgacatattcgggttattcgtgctggggatttcgagggctgaaatgggtggggctatgtgggttcctgtctcttctaggttggttgctcccctcagtccttgctcagggtcctcacaatgaacattcccaagacctagaggcctgtctgcttatgtacagcctttaattccctaatactaccaagaaggatgtaagagtttcctcatctgagcacgaaagccttatgatcacctacagctgacagtacctaagggattctgcgttgtctgtactgttatgatttgagtggttccttccatcttcatggtcctcagcttgactgtttgcatgacctggaatttatccctgtggtaatctcaggctgaccccttacaccagatgccttacctccttgagatgccttgaaaggaaatgagtgggactcatcatctcagaattcctgggtttgccagggagagacatcaatg

SEQ ID NO: 898027 - DNA, 617 bp, Homo sapiens
ctactttacagcatcctcttgggttctggacacagttatttttctccatggtaaggtgataagtgacttctctgaggacttgccaccttagtatgcagtggtgacatcacctgctcaggctctgtctgcaatgtggaatttagtattttccaacttctggtctaacttgaacttcataattaagcagagtcgccttttgagggaatagtagggtgtctgcccctaaatgtctgtgtaaatgcagaaacacatttgggaacataactgacttttatgtacagaagccagatgcatttcatgcccatgcatgcttggggaagcaagttcatctcatctatcacaataagcatctgttccactaaattccactgcaggatacttttcacacttagacaacaaaacatttaaggaaataaaagctctttccaataaaaatgtgcatcaaaaactgtgtgtattttttttaaaaaaaaaaaaccttcctctataarataagccacaggaactactaaaaaagcattcttgaaatacattttctgataggcatctacgcccttgccttatataagatttaaggaaagtgatgtgtgtgtctttatgctcgaaaggctgctttc

SEQ ID NO: 898028 - DNA, 612 bp, Homo sapiens
actgtatctctgaaactgggagctaaaaatatgcatgtacawtactcattctcattaagagttacttaagcatcagtagagttctttattccagtttcaccttatttcactaaattcttttgcatttatgtgcaaagggatctttggcccttttcaaaaattacctttcataatcaatcttgttaatttgatgttcagttacaccaacctctctttatttttagcttgatcttcagaaaatttatactttctttgacattgttaaatgttacaatattaaaagaaatgaaaaagacttaaaaacttagaatatttgaatgagggttgctggaaggcagagagagcaataaggcaaaagtacttacttactgcactactgttccaaagtaaaaaaaaaaaacgaagattttaaaaatgattatagcagctttgtatctcaaccagggtttcctttgaaatttctacaactgcaaacactattcagcaatttacactgattataaaatttattgttttaaggtcaattgtgatactgtgatcagataataaaatttactttactcttaatggcttcattttgacaaatgagggagcttttaggaaggacaatgc

SEQ ID NO: 898029 - DNA, 578 bp, Homo sapiens
actcctctccaagaacaagccactrttctgattctgattatcatggattagtggtgtctcttctgatatcacacagtacccatgcctttgtggctgagcttttctcattctacctaacgactgagattcattcatgttgcatgtatcagcagttcattcttttttaccagtgagcagtatttattgcacgaatgcatcacagtgtatccattctcctgttgatatggacatttgagttcttgatagtttgggccattataattgttaaataaaatgtatgggaggccattggtttggactcagctcctgccctaggctccaacatacaaaaccaaaattaagtcacttgtgctaaagttccatgtcatcaaatcaaaactaaatttatctgaccttccaagaagtcaggagagatgacagccaaatccctgaacagtccagcatttgtcaacacgataaggaagtctcctctgctctaacccttacaaggaaagtaaccttaagtaacctgatattaacaaatccactttttgtactatgttgttttcttgctcctgttcaagctacctcatcaaaac

SEQ ID NO: 898030 - DNA, 692 bp, Homo sapiens
cttttctggagatctctctctctctctctcwcacacacacacacacacacacacacacatacccatatatgtatatatgaacagtatggataatattttgtgttttttaaagtctacacagatgtttagtatatctctttttctctcttcctctctctcctgtctctattcctccctctctttataacagatataaaatatatattgcatatatagggaatacagatataaatacacatattggtaaacaatatgtataatgccttttgatttcattaaaatttaaataaatttatcatatggtacacatttctctctcaacattttgttcagagtatttggtttttttattttgttttgttttgttttgtttgagactgagtctcgctctatggcccaagctggagtccagtggcacgatctcagctcactgcaacctctgcctcctggatttaagtaattctcctgtctcagcctcccaaggagctgggattacaggtgtgcaccaccactcccagttattttttgtatttttagtagagatgaggtttcaccgtcttggccaggctggtctcaaaattctgactcaagtgatctgcccaccttggcctcccaaagtgctgggattacaggagtgagccaccgtgcctggccaacattttgttcagggtatttgtagttatgttgatgca

SEQ ID NO: 898031 - DNA, 615 bp, Homo sapiens
ggcccactggaccggtcatcggggaccccctttaagccttcctgctagaagattcttttytctaaagtcgaaggctgcagagttgactaggagaggacagagcttttccttcaggtgaaagggaatgactgtcattcattctcaaagtggaaagccacgtactggcaggtgcactcccaggtcaacgcggaagtcatgagttttgcgggttttctgcttaggctggatggaagctactgtcttcctcgaaacgtgtgaaagcaatgagatcattcctcttctctgaggtgggggagatggggagaccggcctgagatacaaaaagaaaattatgaggtagggactgggcggggggacccagagggaggactgagagcgagagccagggaggcaggcagacagtaggctgggcaaagccagaggagagaggctgcgggaggtgagagtctgagccgagagtgaccccaggttgaatcagggataaacgctggaatgggctgtaaccaggaatgagacgtctggcattttgtaatttctggagaattcctcttaaattccctttcccttcagtaaacatgatgaaaaaccactgcccgccatgtgtgtggtctccgt

SEQ ID NO: 898032 - DNA, 662 bp, Homo sapiens
tttctttgtaaagctaggggtctcactatgttgcccgggctggtcttaaactcctgggctcaagggatccttccatctccacctcccaaattgccacgattacaggcrtgagccacctcgtcgcctagcctggggggagtaaactaatttgcaagtaaaaggagtaggaacaggagcattcggtcatcattagaataaagtgcctatttggccagcttcagtcctcaccaaacctactgccaataatttcctctccccattcaacctcactcaaccacattagacacattaaatcctagccacattaaacaaaggctagactgctattgtacaagctcaggtttccgcttccttggcctgcttgacccaagggaggggcttaatgaaggctctactggtggctgccatataaccattccagcaggaagtgggatgatgggtgagaaagtgctgtcctctgagagtgccgcacacacacacagacgccagcccacccagtgccgtctctgaactcactaggtgatctctttgcagggctctgtatccgctagaactgcctttctgcacattctttacatgcaagtgactctgtcacccctatggctgagaaatgacacccccatctttctgctttgaagcagcttgttcaaggtaaggaaaac

SEQ ID NO: 898033 - DNA, 662 bp, Homo sapiens
tttctttgtaaagctaggggtctcactatgttgcccgggctggtcttaaactcctgggctcaagggatccttccatctccacctcccaaattgccacgattacaggcgtgagccacctcgtcgcctagcctggggggagtaaactaatttgcaagtaaaaggagtaggaacaggagcattcggtcatcattagaataaagtgcctatttggccagcttcagtcctcaccaaacctactgccaataatttcctctccccattcaacctcactcaaccacattagacacattaaatcctagccacattaaacaaaggctagactgctattgtacaagctcaggtttccgcttccttggcctgcttgacccaagggaggggcttaatgaaggctctactggtggctgccatataaccattccagcaggaagtgggatgatgggtgagaaagtgctgtcctctgagagtgccgcacacacacacagacgccagcccacccagtgccgtctctgaactcactaggtgatctctttgcagggctctgtatccgctagaactgcctttctgcacattstttacatgcaagtgactctgtcacccctatggctgagaaatgacacccccatctttctgctttgaagcagcttgttcaaggtaaggaaaac

SEQ ID NO: 898034 - DNA, 662 bp, Homo sapiens
tttctttgtaaagctaggggtctcactatgttgcccgggctggtcttaaactcctgggctcaagggatccttccatctccacctcccaaattgccacgattacaggcgtgagccacctcgtcgcctagcctggggggagtaaactaatttgcaagtaaaaggagtaggaacaggagcattcggtcatcattagaataaagtgcctatttggccagcttcagtcctcaccaaacctactgccaataatttcctctccccattcaacctcactcaaccacattagacacattaaatcctagccacattaaacaaaggctagactgctattgtacaagctcaggtttccgcttccttggcctgcttgacccaagggaggggcttaatgaaggctctactggtggctgccatataaccattccagcaggaagtgggatgatgggtgagaaagtgctgtcctctgagagtgccgcacacacacacagacgccagcccacccagtgccgtctctgaactcactaggtgatctctttgcagggctctgtatccgctagaactgcctttctgcacattctytacatgcaagtgactctgtcacccctatggctgagaaatgacacccccatctttctgctttgaagcagcttgttcaaggtaaggaaaac

SEQ ID NO: 898035 - DNA, 652 bp, Homo sapiens
gtggacacagatttgaggtttcctctcatctcctgggttgtctgtcctataattgttaaactctttctctgctgcaactccttgccctgctggtctcgagatctcaagacattaactygctgagcagcaggcaacaaacctgttacagttacactgggcttacttaggttcatagaaatggtgaggaacccagtcttagggtgttctggtatttgatgccctgagggttagtgtttcttcgctacctatgggtctctgtgtcttctagttatcgtcactggcttctaccttcacgcaggttttcagtaccaccaggccatcctcacatgaggtcctgctgtctttgggctgccttattcaagtgggatcctagttttctacagctctacatagctctaccaaactcctctgggtcaaataactcttcctgttcaactgcaccagcctccagtcccttcccctcgtcagattcaattgtgttcatttccatcaatatctgtaagcaaagtatttttagagttgacctggggcttcccattcttccccccacatcacgtacaaagcaaaaacatacatacaaaaacagcacatacaaaacaaattacatacatacatgtataacaaaacacattgcgtataaaaacaaaataca

SEQ ID NO: 898036 - DNA, 631 bp, Homo sapiens
tcagctatcatatgtcactaggaacaaagtgagcaaggtgctaagatctcccttcatatcctgttgggaaaytgcttcctatgagaagaagaatccttcttggcttgagtcatgaagaaacggggagggctccgtgtgaacactattgaaagctctggacaacgctgggagggagtcttagttctaaaggtactagctgggtgaccttgagaacactgcctaatttctctcggagcccagcgtggggcctaagaggggctgggcatcagctttcaacctcgcttccagatgttctgagcactgttgttgggatggtcctgtttggcatgacagtgggtccattcttctgggaggggcaagggctggtgcacatctgtgcccctgtgccagcctgagacatctgtgatggcaaatcagactaggaaggtgatggaataaaactgtgtcttggacctctcaatatgcacaatgcatagcatgcgcttccagcacagcgtggagttacaagcctaggtcatttaggccatctgtggctgattaatttagagggaatcaaatatttccagcaaagctccaagagctgtttatcaagctgagatctggaagtgattaagaatttcaacaaactttc

SEQ ID NO: 898037 - DNA, 569 bp, Homo sapiens
tccccacgctctcccacctgctccaaaagcttgagaaaaaagttaatccagtccctgtgctgatgaatcaaatagagacacactcatatcctgcttcttcctttttatctttaacctaaaccaaagcatcctcatcccgtccacggcacctgcttaattaccaagcagagcgacacagccagagcacaccctggtaacagaaatgggcacaagatacatctctggaggcttcccatcaagccaatccctcacatgaaagccctgatgcaatgctctcatttggcactttaccctttctgcttccaaaaaggatgtggagtaacctactgctgcagatgtcacaggcttctactatgtatcttcccataaagggaaactgctgatagggtatggcagacacaccttactccttattcagtggaatgtttctaaaatgatgccagagccccagtccagaycaaataaatcagaatctctggcactaggtcccagacatattttttaaaagctccccaaggcattctaatgtgcagccaggggtggcactcactgggctaaggccttgcagt

SEQ ID NO: 898038 - DNA, 623 bp, Homo sapiens
agtgcagacattaggagcaagacacatggggaayttccaagctagccctactcagtcctctgacctcacaatccatagtgaccatgacatcctcaccccaccattccacagtctgatacctgcctcactttccccctaacctataacctctgatgccctctcactctcagtgccctagggaccccgctacccacctactctttccgggaatcactttgggtagtagctgccccaggccatcttggctgggccattatccacaaatatgcagccatggccagcaggccaaaaggtgagacgttagacggctggcttgagcagacttttcataatagaaaaaccttgttcctaatcaaggccatcttcaaatcctcaactcacagagtaccagcagctcagggcagggttggagaaggtggcactctacaagcaagagccctgtgtgttaggggagggctgccatggagtgtacacaccgcaaacccaggtggcagggcaggtggcactgattccccaacaaaccagggtttcagagtcaacagcctctttaaagtcaagccttccttcactcattttctccctggaaggctggagtgaggtagggactggagcagcccagccca

SEQ ID NO: 898039 - DNA, 701 bp, Homo sapiens
caagccatagataagactgggctcagtaataactggttgggtgatctctgcctccccckcttcttggtaaatagcctaataaagcccctactttccttttagggggtggatgtaaaagcttttgaacaaaaggaactgcaccacctcagtgtaggggattattatttaatgaaagtatgtgctggggctgggcgtggtggctcacgcctgtaatcccagcactttgggaggccgaggtgggtggatcacaaggtcaagagatcgagaccatcctggccaacatggtgaaacccagtccctagtaaaaatacaaaaaattagctgggcgtggtggcgtgtgcctgtaatcccagctactcgggaggctgaggcaggagaatcactcgaacccgggaggtggaggttgcagtgagctgagattgcgccactgcactccagcctggcaacagagtgagactccgtctcaaaaaaaaataaaaataaaaataaaaataaagtatgtgctgggatattttggggagcagggagctggccagttgtggatgctttggcgcaaggctgttaaactacaatttgcttcacattttgagctttccaagaacctagagggctcatagaccagaggaaggaacagaggtaagaaagacaactctgttgactttctcttgtggcattacccaggaactcttaatccaaggact

SEQ ID NO: 898040 - DNA, 618 bp, Homo sapiens
aagataattttcacctatttcactgggaagaggatcggtggagctcctcatgctgtcatgctggaagtcaatcctccttatagcacgtgtgtgtatgtgtgtgtgtgtttctttgtatgtcatttttagtagtttgctttaggtattacattatgtgtgtctcatcactgtcttctgttgtcatgttatcagttcaagtgaaacatagaaattttacctccctggaagtccttttaccctcccagtttgtaattgtcttaaatatttcctctgtatacttttagaaccacaccagaaggtgatataatttttgtttcaatcatcagacataatttaggaaactcaagaacaaaaaaccttttatacctacttttatttttgcttatatatttttttcctctttgatgttctagggtttctttattcacttttttcctttctgcttagagactttcctttagccattcttttagggtaggtctgctggtgacaattctcatagtcttgatctaagacttaggtttaagacytaaaatagtcttaatctaagaatgtcttgatctccctttcattcctggagcttattttttctggacataagattctgggttgactttt

SEQ ID NO: 898041 - DNA, 596 bp, Homo sapiens
taatgctctggagtagaaggatcctgagatttctcctattcttaacacctgtttggttatttgaacacttatgaatggagtggaaagaagatttatgatatttccagtatcagtcacagaatttgcttctagtaaccatggtttttaagttctcagaacatagagaaaaaaagggattggccttattacagattcttttttttttttttttttttttttttttgagacgatgtcttactctgttgcccaggctggagtgcagtggcgcgatctcggctcacagcaagctccacctcccgggttcacgccattctcctgccttagcctccgggagtagctgggactacaggcgcctgccaccacgcccggctaatttttttgtatttttagtagagacagggtttcaccgtgttcgccaggatggtctggatctcctgacctcgtgatccacccgcctcggcctccaaaagtgctgggattacaggcgtgagccaccacgcccggccaagattyttaggttttattagcgtcatgatgcttgacttaccaaaaacactagggtgtggtcatctttgcctagttctctgtgtgtacac

SEQ ID NO: 898042 - DNA, 647 bp, Homo sapiens
cctttacaccactgctgtaggcaaaagtcatggggctaagtcagtcccaggagggacactgactcttctttcatggataatccttttcccctggcactcaggtgggatcaaaaccgagtcatccactattccgggggagatctgatagctgtgtcatctaatcgaaagatccatcttctggacatcatacaagtgaaagcgatacccgttgaattccgaggccatgctgggagtgtccgggccctcttcctgtgtgaggaggaaaactttctcctaagcgggagctatgacctaagtatcaggtgaggagtccaaagacatcatgatccctgtcccacctagggcctagaggcagctcatggaagaagtgtgcatgcttcttctttttatagttaacagttttcctagaagatactgacttctagaataccttcagcttattttttttttggcaaggaaaaagtcaggaatgtatatattgcttaacatttgaatgagatggatttataacagttatcagatatattttctaattgatgactgcaaatcagaaaaattttctttattagcattcttagaggaagaaataatttacatttgttcttacagaytctttcaggggaacgtggttttttatgggtttgaga

SEQ ID NO: 898043 - DNA, 655 bp, Homo sapiens
ataagatacccaaagaaaacttggatttacacaaagaaataaagatgactgaaaatggttaaaataaaggtacatatgaaagggtyttccccttattttcattccctctaaaacataattgattgtctaatatgaattactattgggcctaaggaagaaataatactaattctatataaacttttttaaaaaatagaagagaagaactatttcccaactcattttatgtggccatcactattctgataccaaagaaattgaaagaaaataacagtacaaattaacatagacacaaacatccttaagaacatattagcaaacagaatctagtaatatgtaaaaaggataatatatcatgacccagtgggcttatactgggaatgcaaggctggttcaacatttaaaacttagttaatataatcgcaatatcagcagattaaagtataaaaacaatatgaccatttcaatatatgcaaagaacatttgacaaaattaaacatccatttatgctgcatacatgctctcagcatccacacatgctcttagcaaagtaggaataggatggaactccttaactcaataaaaggcattgacaaaaaacttacagctaacatcatacttaatgatgaaagactgaccacttacctttaagata

SEQ ID NO: 898044 - DNA, 633 bp, Homo sapiens
acctgaatatgtggaagtgactttggaactgggaaacaggcagaggctggaacagtttggagggctcagaaggagacaggaaaatgtgggaaaatttggaagagatttcctagagacttgcccaaaatgctgatggttatatggacaataaagtctaggcttaggttgtctcagatggaaatgaggaacttgttaggaactggcacaatggtgactcctgttatgttttagcaaagagactggtggctttttgcccctgctgtagagatttgtggaattttgaacttgagagatttagggtatctgatagggtatttgaacttgagatttagggtatctgatagaagaaatttctaagcagcaaagcattcaagagatgacttgggtgctgttaaaggccttcagttttataagggaagcagagcatgaaagtttggaaaatctgcagcctgacaatgcaatagaaaagaaaatcccattttctcaagaaaaattcgatctggctgcagaagtttstttaagtaactagagtcaaatgtgaatccccaagacaatggggaaaatgtctccagggcatgtcacaggtcttcatggcagcccctcccatcaaaggtccagaggcctaggaagaaa

SEQ ID NO: 898045 - DNA, 629 bp, Homo sapiens
tttattccagtaaaacttaatttatacagtcagagggccagatttggcccttggtctatagttggccaaccctgtttagagcagtcaaaatttattccctggggctgggccaactttttcttaaaaaaaaaaaaaaaaaagaaagcaacccactgtcagaataaaataaggtttctatttaaaaagaataagaggctgggtgtggtggctcatgcctataatcctagcactttggaagggtgaggcaggaggactgcttgaggccaggagtttgaaaccaacttgggcaatatagtgagaccctctctctgcaaagaataaaaaaattagccaggcatggtggcacatgtctgtagtcttagctacataggaggctgaagggtaagatcacttgagcccaggattttgaggttacagtgagctctgactgtaccatttgtactctagcctaggcaaagagggagaacccaaaaacaaacaaacaaacaaaaggttggttggggcgggttggagaagaaagtatttctgaatttctggataggttactggtagtgtcaggccaaacwagctctacagtcatattcattataaataaaggcaactagaagatctccatctagctattaaaa

SEQ ID NO: 898046 - DNA, 591 bp, Homo sapiens
cacagtcccagaccacggcaagcctgaggcctaagactaggtctgtctgcacccatggcctgaatccttaaccaacaaacttctttgtgcccccaaaacagtagctctggaagacccaggcctaccaagactgggcaatcagagacacagggattgggtgaaaaattggtcctgtgatccaggccaggagaagtaaaccatgggccatttctgggaactctaggggaaaggtggcctttcccataagaactgagcttctgggactcatcgttgacatcatgaggaaaaggccaccttgataggaaaagcgacatggagaaagctaaagccaagagagaaagacagatttccagtgaccttgtgtgagacctggatccagccatgcctgaaggccaccctccctggactttaaagtcaatagattatctttctttgcttagaccacaccaggttgggtttccaccactcacaactgaaagagacttcaataaccagagacagctgggtaccagcccagagtcactcagcattttkaggtcagagccatggtctctgtaggatgctgcccattccccctgctcagcctcgccc

SEQ ID NO: 898047 - DNA, 639 bp, Homo sapiens
ccatggtctctgtaggatgctgcccattccccctgctcagcctcgcccgtccaacgatgggaagcacaggggtcaaggaaagggacccaagctggggtggagtctcctcttggagatccccgggacctgcagcaggagagcaacgaacttagggcagacaagctataggatggggtaaagggaattgacccaccagaggtggacatcatggaagtagcagcccagatcccccaccagccacaagtcctcctcattgttctaggctttgggacaggcaaggtgatgctaggcctggcaaggggccttgaatactaacgatgtccaattgcctcaccctgcactctcctttcaaacattcctactcattgttccagacacagctccagtaactcctcctctaggaagccttccagcctgccccagcagagaccttgttcttccctgggctgtgatccatctccctctggccctttcctgatcccatgaagttggggatatctctatccaggtccatctccttaaagttgggggttcctccaggactgggccttgggttgaggtctcttagggytccagggcagcccagaacaccagaacagggggtagatggcaatagagagaggagacgctgagatggaa

SEQ ID NO: 898048 - DNA, 662 bp, Homo sapiens
ctatttgatatagaaatatcatagatayggcacacataccctctcataataatatgttgcaatataatctttgcagtcacaatttcaattgtactgaaattcttggttaagctgcattttggagtctcagtcctattgactcccaagcctaacttcccagtggggaagaatacagcaatggctttcaaacaacttttttttgactgaggctggggtcatttgcagtctgactgagaacatatgtttatatatttatacctgatattaactagaataaatgtttcaatactaagtatacagacattttttaaaatgctatttgtgactttgtaaattggtttcatgaccaactaatggattgtgacctgtagtttgaaaaacatagggctgcagcaactgagcaaccacacaaagctgactagacaactttccatgttagttcactacctttttccagtgttactgacctctttgctcttaatcacatatgtgcttctaaaaacaagtttaatctgtaatatgggcaatggagaattttgtgattaattcttgaactagtcacactctctcacttgattagctgttctaattttgatttttcagcatgaacccacagattctactttgcatttccctcgtacatataatgaggcattgttttt

SEQ ID NO: 898049 - DNA, 548 bp, Homo sapiens
atccaattccacagatctaggaagcacagcgtatcccaaacagcatgaataaaaagatatccacatatagacacatagtattggaactgcagaacttcgaaggcaaataaataaataaacaaatacyacgaaggcagccagaaagcccacgacacctacaaaggaagagcagttaaactggtagattttcccaacatcaatgaaagccagaagacagtggataaacagttttaagatgttgagagaatagaattattgatttagaattgcattgtcagcaaaactatcattcaagaatgaggataaaaggaaacatttgtagataaacacaatctaaagcagtttatactgaagtccccactgtaaaggaacttctggaggacttactttaagaagaaggggaatgatatgggaaaaacatcctcacatgcatgagggaatggtgaacaaataaaatggtaaataagtcattaattccaagtaagtgatgtttatatcaaataacaatacttgtgtgtctgatttgtggggatgaaaaatttgaaata

SEQ ID NO: 898050 - DNA, 586 bp, Homo sapiens
cgacctggccagacctgcagtagatgtggcttctgcctcttccagtaggtggcgccacagggcttaggagtcaggaaaggggcttcagggtccgcctggtgatgaaaggtgtagggggagtttagagcttgtgacctgttggggctgtgctgcttccatcaggcccacacctgccccggcacaggtaacccaaaagaccagtgtgtctccgtgccgccgcacacactggaggccctcgcggcatcactgagggacccaggtcccacagtgacctctccaccctgttgtaatgagaactcctttggagcccacccagtccgtcgcaggctcttcccacagacgtctgttcccttccagcacagacagcatcccgccgagcctggaggaagccttttgggtgaatcgctgaacttggtatggccagatgttaattttctccctgatttttcactgatggtttagtaaccagagggcccggtggtgcccaagcccagtggagcatggggtgacctgaagcatgggatctggraacccagacctgtgcagtcacagagcttgccagccaaaggcaggaggacattttcct

SEQ ID NO: 898051 - DNA, 644 bp, Homo sapiens
ccgtaaaatttacccttttgatgtgtatgattcagtggtctacctacttccccaatattttcatcacccgcaaaaaataccctttacccattggtagtcacttttcattcccctctstctccagcccttggcaaccatgaatttacttttgtctctatggattttcatgtgttattgacagcaataataattccttttttttttttttcctgaggtgtagtctcgctctgtcaccaggctggagtgcagtggtacgatctcgtctcactgcaacctccgactccctggttcaagcgattctcctgcctcagtctcctgagtagctgggactacaggcacccaccaccatgcctggcttatttttgtatttttagtagagatgggatttcaccatgttggccaggatggtctccatctcctgacctcttgatccacccgcttggcctcccaaagtgctgggattacaggcgtgaaccactgtgcccagccaacagcaataataattctacagttggagtttgctgtgtagtctgactgttgataacatatctcacaaatttcagacctagataggtcatgacaatttacatgataaatgatgacattgaaaggaagcacgtgaaattagggagctggctgtcatt

SEQ ID NO: 898052 - DNA, 652 bp, Homo sapiens
aaatttgcattttaaaaacaaaataatcttttgtatccctttgtgctaattctcctgagacagtkatcactagaatgaatctattgttctgttcagttgtttcttcactcattttcaaactggctaaaattttctattacagacccataaatgtttaaactccccctgaaaacccactggacccttagtcttggaaaggatgtctatgttcagatcacaatgttctcttttcataccctggtccaaagtaatagcattctaagtccactgatcccaattatttccagcattattgtgaatgtaagaaaacctatatttagtctcctggatctaagaccatgtacataaaaagttttggtttcataaaagccatgaaaagctaagtgtcacaaaaatttctctctaaataataaagagttctccagaaatgtttaataaatcaatttacatacacatacgtatacacacagactgatcgacttacattaattagattctacctgccagggcccttattgatctgattgatcaagtacctacaagtttaccagtgtgtctattttctctaagcaggcaaactcaattctaattactattttagaaaaaaaaaaaaaaaaaaagaatcccataataggtcctagggaatcaagac

SEQ ID NO: 898053 - DNA, 620 bp, Homo sapiens
tatatactcatggttaataattatcattattaacatgaaaatgtaacatgattacttatcattataatttgcacagtatttaggattatactaagcactttcacccatactacatggattcccatagtcatccacggaggcatatgtttttattgttcttatattatagatgacaaaactaatgctcaaaaaattcaagtgaaatgcttaaagtttcacagagaactgaaaattgagtctagagtttgatttacagactctataaatgccatatctttgccacaggtgataatttaaaaaattctacttctttctcattcaatgacactatatttagctctaattgtttttcttttattctttttcttttttttttttttcgagatggagttttgctcttgttgcccaggctggagtgcagtagcgtgatctcagctcactgcaatgtccgcctcccgagtttgagtgactctcctgcctcagcctcccgcatagctgggattacaggcacacaccaccatgcccagctaattttgyatttttagtagagatgaggtttcaccatgttggccaggttgatcttgaactactgacatcaggtgatccgcccacctcagcct

SEQ ID NO: 898054 - DNA, 621 bp, Homo sapiens
ggagtctccctctgttgcccaggctggagtgcaatggcatgatctcggctcattgaaatctctgcctcccggatgaagcgattctcctgcctcagcctcccgagtagcaagattacaggcatgcaccaccacgcccagctaatttttgtatttttagtagagacaaggtttcaccgtgttggccaggctggtctcgaactcctaacctcaggtgatccacctgcctctgcctcccaaagtgctgggattgcaggcacaagccaccacatccggcctagtttttctttgctagaagggatgcatgttgtttgatgttagagtagctgcctgaccacaaagaggagtcacatgtgaggatagcagcacaataaaataggctcctgcaactgctatatattctttggaaaaactgcctgagctattgtttaacagaaaagtaaatgtttcttgtttaagctactgttattttggatttattggttatctacagctaaacytaagtttaccttttagattacctgcacctctttggattttgctgagagaaggtagaaagcagcgctaactcctctctctagaaactgtgtttaattcctcagtctttggaaatttatttgttct

SEQ ID NO: 898055 - DNA, 632 bp, Homo sapiens
atataagtaatacattatgacatattatataaaccatacattacaaaatatatatacacccacatatcttatttaatggaaatgaattgttacctggcttttgtttttacaggtgaaggaaaggatcttggtactatgagagtcaaaggttgtggaattgaatgttgtgaactatctgctctggcttccctggggaaatgtgtaagtcattattagaagttgaatatgacttagctagacaaagggtaacttagaataacgtttcagaatgtgagagtccctgtgacaggaagcagcatgaagattttgaagaatggaaagaaagacaatgtggctggtgtatggcctatgagaagaccaggtgagtgtaggccatcaaagttttggtcttgttcctaaaatcactgagaatcactgaaggaattttagcagacagaggagaaaatcagatactctctgcactggaaaatagtaattggtcaagatttgtagtgaattcttagagaccatttataatctagctgattttttttcacctagatattttattcrtaagatatttatcatgttgatgtactgaacaggaaaacatactggtgattgctggtttgttatgtgccctgtactcaagg

SEQ ID NO: 898056 - DNA, 667 bp, Homo sapiens
tattttgcctgattgtcatccttataacaggattaataaytgcaggaaaaatttagtcaaggttgttttgcttatagcaggagtaatagttacaaataagaagtaagcattgaagttttaccatcattaagtttaataggactttttactaaagattggtaatataatgcactctaagctatgaaaagaaagttataaagaaagacattttatatgagaaagaattttgtatggtaaatacttgccctaaaaggaaatgactggttgtttaaaggaagaatgtttaggacaagtaaaaaagtttaagtatgctctaagagagtctgtgaaagtcattaaaaaataataattaaagaaaaggaattgtcataattaacactgaagttattttagccacccaatgatgtatttctcccaatcataatccaagttataaaaatggcctaaagcctaaggttattctctaatggcaagacaagggggaaatgtatgcttttcttttcttttttttttttttttttccttttgagacggagtctcactttgtcacccaggctggagtgcagtggtgcaatctcggctcgctgcagcctccgcctcctgggttcaagtgattgtcctgcttcagcctcctgagtaactggaactacaggcgcaccaccacacc

SEQ ID NO: 898057 - DNA, 535 bp, Homo sapiens
tttctcagactatgaaaataagccaacttaagacactaaaaacttccagaagcattctrtcacagtagtaagcaagaatgagtgccaaatataaccacttttgcaaaaattgtatcagtgagaaaagttataacagagagctgaactcacccatccctatcttgactttcccttaattattcctgacttttggggccaagctgactttaagagacatttaggctatagtttaaataatagtaagccttcctcccaaactcaacgactttttaaggctaatgggaggccagcaggctgggaggaggagaggagactgagtcctgctaaggagtagacataaaggattttcaaccgttatttcagagtttataagatatgttacctccccagttattcctgcagataaaaccactattatagatttgtcttttgagatatcttttcaggatttctgtatgtctgacactcatggctccacctggacccacccaccatgttcctatggccctacccagaagcaatttagcacacagca

SEQ ID NO: 898058 - DNA, 535 bp, Homo sapiens
tttctcagactatgaaaataagccaacttaagacactaaaaacttccagaagcattctatcacagtagtaagcaagaatgagtgccaaatataaccacttttgcaaaaattgtatcagtgagaaaagttataacagagagctgaactcacccatccctatcttgactttcccttaattattcctgacttttggggccaagctgactttaagagacatttaggctatagtttaaataatagtaagccttcctcccaaactcaacgactttttaaggctaatgggaggccagcaggctgggaggaggagaggagactgagtcctgctaaggagtagacataaaggattttcaaccgttatttcagagtttataagatatgttacctccccagttattcctgcagataaaamcactattatagatttgtcttttgagatatcttttcaggatttctgtatgtctgacactcatggctccacctggacccacccaccatgttcctatggccctacccagaagcaatttagcacacagca

SEQ ID NO: 898059 - DNA, 535 bp, Homo sapiens
tttctcagactatgaaaataagccaacttaagacactaaaaacttccagaagcattctatcacagtagtaagcaagaatgagtgccaaatataaccacttttgcaaaaattgtatcagtgagaaaagttataacagagagctgaactcacccatccctatcttgactttcccttaattattcctgacttttggggccaagctgactttaagagacatttaggctatagtttaaataatagtaagccttcctcccaaactcaacgactttttaaggctaatgggaggccagcaggctgggaggaggagaggagactgagtcctgctaaggagtagacataaaggattttcaaccgttatttcagagtttataagatatgttacctccccagttattcctgcagataaaaccactattatagatttgtcttttgaratatcttttcaggatttctgtatgtctgacactcatggctccacctggacccacccaccatgttcctatggccctacccagaagcaatttagcacacagca

SEQ ID NO: 898060 - DNA, 634 bp, Homo sapiens
ttacactaaagagtaaaaagaagtaatggggttattactcagcactacttctactatgcctggtgctaattgtaaaattcaaaggaaagcatatagaatagtcttatggactaagatctagctaacctcagatctgctcaacccttttatgagtaaatcaaatctctgatatattgtctctcaatcctgaactatcttaatgggactcattaaagttaaatgagataagaccatgtgcttagcagatagtaaacattcaataagttttattcataatcatcatcaccttcattatcttcatgctaattgcactatccattaatttatctatttgatatgctatttcaaaagtggataaatttgccacatggctaaatttggctttttttaattctctagaccaaggtttctcaaattatgctccacataaatataagtttaggaaatatcagtggatgcatcataaaataattctataacaaacaaatataacaaacaggacaattctatattcaagwaagtttgggaaaagaatatctctatttcctcccagagattcacactatatattaatattttagagattataagtcagaagtgaaggggcttgtacaacgatgtttatttgcattta

SEQ ID NO: 898061 - DNA, 604 bp, Homo sapiens
aaagttgaagagaacacaaacaaatggaaagatttctgttttcattaattggaagaattgatattgttaaaatgtccttaatatccaaagcattcttgagattstatgcaatgtccatcaaaatatcaaatatcaatgatattcttcacagaaagaaaaaaaatcctgaaactggtgaggaactacaaaagatcagaatagccaaagcaatcttgagcaaaacaaaacaaacaaaaaaccaaagctggaggcatcacaatacctgatttcaaaatatacaacaaagctagaataaccaaaataacatggtattggcacaaaaacagactcatagatgaatggaacagaattgataccccagaaataaatctaggcatttacagccaactgattttctacgaaggtgacaagaacatgcattgggaaaagaatagtctcatcaataaatggtgctggaaaaattgaatattcgcatgcaggagaataaacctgaacccctgtctttcaccatatacaaaaatcaacttggaatgaatttgagacttaaatgtgagaccacaaactatgaaagtactagaagaaaacacagaggaagggcttcaca

SEQ ID NO: 898062 - DNA, 654 bp, Homo sapiens
cccaatttcactcctttatttgatggatgagaaaactgagaattgcagaaattaactaatttatgccaggtagccaatagggagagagatatcattcctgaggggaaatctaagtgcaggtagaaagcagcaattttgtcaaaggcaagctggatttgcctgatcaaaaatcacttcttttttttataactgtttttttattgtggtaaaatatatacaacatacaattcacattttggccattttcaagtgtacaattcagtgccattaagtacattcacgttgctgtgcaaccatcaccgccaccatccacctccacaacttttccttctctcaaactgaaaccctctgcccactgaaaaataactgctctcccccgcctgcaggtaaccaccattctgctttctgtctccatgaatttcactattctaggtacctcctacaggtggaatcacacaatatttgtccttttgtatctggtttatttcacttaggaaatgttaaggtacatccatgttgtagcatgtatcagaattgcattattttaaagactgaatagttttccattgtatgtatatamcacattttgttcaaccaatcatctgacaatggacattagggttgtttctaccttttggctgttgtgaataatat

SEQ ID NO: 898063 - DNA, 657 bp, Homo sapiens
attttgcattcccaagtagaattattatatttttgcctttatttccttcatatttattactagaaacttttttcaggactatttaaaatgattgaaatgaatgtgtagctactttaaaaatcattttttctattcgcataaattatcacatttttttttctctgtagatagagctttggagccaaacccttctgatgatccaagggcaagcacagtcttcttgcaaaaatctcaaacagatggtgagacgacactgttttttccaccaagaagacgactgaaaactctctgtcataatgagtgtattatagaaagcatttagagaaacttacattggtttaaaattttcaacttttcatatattcacttgtcctattttaatgtgtgaaatacttctctttagttgttactgtgtgagtgaaaacatgtaaactttctgtttatacattttgctaccttttggcaacaccatttgtcatgtgatttaagagtagtcatagatttatctttattcataattttttattcatattttttgtctttcgccctttttcccttgctccaaagagttcattttaatgatgaatgatagaatttaggcttcagcttsatctttatttaaacaaataaaaaaaccatttgttcatcaatggggat

SEQ ID NO: 898064 - DNA, 657 bp, Homo sapiens
attttgcattcccaagtagaattattatatttttgcctttatttccttcatatttattactagaaacttttttcaggactatttaaaatgattgaaatgaatgtgtagctactttaaaaatcattttttctattcgcataaattatcacatttttttttctctgtagatagagctttggagccaaacccttctgatgatccaagggcaagcacagtcttcttgcaaaaatctcaaacagatggtgagacgacactgttttttccaccaagaagacgactgaaaactctctgtcataatgagtgtattatagaaagcatttagagaaacttacattggtttaaaattttcaacttttcatatattcacttgtcctattttaatgtgtgaaatacttctctttagttgttactgtgtgagtgaaaacatgtaaactttctgtttatacattttgctaccttttggcaacaccatttgtcatgtgatttaagagtagtcatagatttatctttattcataattttttattcatattttttgtctttcgccctttttcccttgctccaaagagttcattttaatgatgaatgatagaatttaggcttcagcttgrtctttatttaaacaaataaaaaaaccatttgttcatcaatggggat

SEQ ID NO: 898065 - DNA, 620 bp, Homo sapiens
aactgagcagctgctcttaagaaaatktgctgtgcctgtaaagggtatgctgttcagtcatttaaaaaaaataaacaaaaaaaactaagaagatccatatcctgtaggcctatgcttatcttcagtaactaaacctctattaataggtgtaataatttaataaaatattgtatttctacacagtcaaaatgtgttcatggaaaaatgtgagataatataaaacaaataaatacaaaagtcctgattagctgattattaaaacattgtctgatttacatttctatagccttacggtcatatgaacaggaaattgatgttggaaatagtttcagatgggttttcagttaaacagatgagaaaactacatctctgctcatattttaactgctcttccagagaacatcaaacatttgttgacttagccagtggataagatattaaaactttaaaaccaagaaactaaatatgttgttcaggtattgattgtttttatacaattaagtctttacagggattactgtgaaagtggttctatattattttatattcatttgtttaaacatttaacaagaagccaggtacactggctcacacctataattccagcacttttggaggcc

SEQ ID NO: 898066 - DNA, 579 bp, Homo sapiens
atctgctgcagtctggtagattcatacttatctaaagaagtcaaaaaatttattcgtgcaagtgcttgcaggaagccagtgcttattagtagtgaccctgcttctatcaacgttattgagacaacacatattctattctaagggagaaagagggaggaagagagggagggagggaggaagaagagggagggagcgaggaaggaagataggagatgggtaggggggtaaagagaaaaggagggagaagggaaggaaggaaagaagagaggaaagaaaggagggaaggaaaaaagggccaaactttctgatctatgaacttctcagttcagctgtcacattatgagaagtaaatcagaatttttttaaggagaagtcattcttagcactacaataattgtaccagtaattgaggaaaccaagacaatcttcacctgaataatagagggtytgagaactgtcagccttttgccattcaaaaacatttatgtccaacctgaaaaaaaagcatcaataaaacctatcccaagcattcaaaatagtcctttccaaatgttatttattttaaagtcaatcagctct

SEQ ID NO: 898067 - DNA, 550 bp, Homo sapiens
cccttccacctgcagggccagggaggctcgttgagatttttttttttttttttttttttttgagacagagtctcgctctgttgcccaggctggagtgcagtggcgcaatctcagctcgctgtaagctccgcctcccaggttcatgccattctcctgcctcagcctcccgagtggctgggactacaggcgcccgccaccacacccggctaattttttgtgtttttagtagagacagggtttcaccgtgttagccagaatggtctcaatctcctgacctcgtgatccacccgcctcggcctcccacagtgctgggattacaggtgggagcccccatgcccggccgacccaccctgagagcatgacctctcagttgtgctggggatgccacaggggcctcagggctgtgtaccctgcggtgtgaggcgtttgcttctcttgagaggtgtcctccttcccccaggatcctccttcccctggggtccacttgttcktagcttttggtggcttccagaatggtttctaatcatttgtctgatgaggcttatgcaca

SEQ ID NO: 898068 - DNA, 548 bp, Homo sapiens
ccccttccacctgcagggccagggaggctcgttgagatttttttttttttttttttttttttgagacagagtctcgctctgttgcccaggctggagtgcagtggcgcaatctcagctcgctgtaagctccgcctcccaggttcatgccattctcctgcctcagcctcccgagtggctgggactacaggcgcccgccaccacacccggctaattttttgtgtttttagtagagacagggtttcaccgtgttagccagaatggtctcaatctcctgacctcgtgatccacccgcctcggcctcccacagtgctgggattacaggtgggagcccccatgcccggccgacccaccctgagagcatgacctctcagttgtgctggggatgccacaggggcctcagggctgtgtaccctgcggtgtgaggcgtttgcttctcttgagaggtgtcctccttcccccaggatcctccttcccctggggtccacttgttcgtagcttttggkggcttccagaatggtttctaatcatttgtctgatgaggcttatgc

SEQ ID NO: 898069 - DNA, 646 bp, Homo sapiens
acaaggaattcaattagttattttatttcaggctgattatatgagatcctatgatgagaaaaaaaaagaaaaccaaaaaagaaaaaaaagaaaaccaaaaaggaaaaaaaaaaagaaaaccaaaagagattctgtactgcaagatataagaggaggcacctttaggggtgccaaggatgttgtaacttcaaatgctgtcaaatgtggaaaccccggcagagcacatgtggacatttcagcccctcagcatatagaatccccatgtggcctttaccactgacatgatcagtctcagctctgatgtggccatctccctgtaagccttttgcagcctgccatcccccccgcctgtgctcccaggccactatctgcacaccttagcacaggtctcatgagatcctcgtgctgttctctgtgtgcatgcctctgagtgcctcaagaagtgcctgttttctcttcccagtgtccagagcatctaacacagtgtgtgacacaatgcaggtgaccatggaaacaaaataattctgtcttgyaaactttcactcagatgctcttaagcactcctagtctgacctcaggctcagattccatatcccagtggaggaacagctaccgagtagcacaggggaaaacattctatgctttt

SEQ ID NO: 898070 - DNA, 601 bp, Homo sapiens
aggtggagttagcttagatgactccttagaaatgctttgaagcaataacgagcaaatataagaaattgtttttgtttttcaagatgataacatgttcacatgctaatggaaaaaaaatatataggagaaagaggggagaatttctagagccctgtcctttagtagttagaggagctagaatctaggacacagtggagggattggctctaaaaagtaacatggagggccgggcgtggtggctcccacctgtaatcccagcattttgggaggctgaggtgagtggatcacctgaggtcgggagtttgagaccagcctgaccaacatggggaaacccccgtctctactgaaaatacaaaattagctaggcatggtggcacacgtctgtaatcccacctactcgggaggccaaggcagggcaatcccttgaacctgggaggcggagattgcaatgagctgagatggcaccattgcactccagcctgggcaacaagagtgaaaccccatctgaaaacaaacaaacaaaawaagtaacatggagatggagagttcacttgtattaacaggtgagaaggtagcatgtgggagtgtgggcaatactagg

SEQ ID NO: 898071 - DNA, 596 bp, Homo sapiens
ctgtgaaatacttgcgtatatgtgtggggagtgtttgttaatgagttacccrgtgtggagatttgtgagaactatagaccaaatattttttcccttatgtttttacattttggaaaatagttttttaaataggaggctttttacaacctgatattaagctttgagtattgtagtagattttcattgtttcattagattgattaaaaaataatataaatggtgcaaaaacaatttccattttgtaagcttaataatactgaccttatgcttactattgagtgtttctacttataccacacatttggtagtataaaaatagcttttttcaaagttttctcataataaatttcttttaaaaggttggatagctattatcctgagtcttatgtctgataccatgtttttgttttgtttttagagtcttatatttaaagaaaaagtaacaagccttaaatttaaagaaaaacctacaggcttggagacaagaagctgtaagtatcttctcttgtccatggtgaaactaattcatgcagatccagagctcttgctttgtgtaagtgtttttttatgaaatacgtcaaaattaccacactaag

SEQ ID NO: 898072 - DNA, 596 bp, Homo sapiens
ctgtgaaatacttgcgtatatgtgtggggagtgtttgttaatgagttacccggygtggagatttgtgagaactatagaccaaatattttttcccttatgtttttacattttggaaaatagttttttaaataggaggctttttacaacctgatattaagctttgagtattgtagtagattttcattgtttcattagattgattaaaaaataatataaatggtgcaaaaacaatttccattttgtaagcttaataatactgaccttatgcttactattgagtgtttctacttataccacacatttggtagtataaaaatagcttttttcaaagttttctcataataaatttcttttaaaaggttggatagctattatcctgagtcttatgtctgataccatgtttttgttttgtttttagagtcttatatttaaagaaaaagtaacaagccttaaatttaaagaaaaacctacaggcttggagacaagaagctgtaagtatcttctcttgtccatggtgaaactaattcatgcagatccagagctcttgctttgtgtaagtgtttttttatgaaatacgtcaaaattaccacactaag

SEQ ID NO: 898073 - DNA, 533 bp, Homo sapiens
cccagctactcgggggtccaaggcaggagaactgcttgagcccaggaggtgcgggttgcagtgagccaagatcgcaccattgtactccagcctgggggcaagagctagacttcatctcaaaaaaaaaaaaagaaaaaagttacacacaactctccccacttccttttttcttacaaagaggtggtgatgaaccaggtttgctcatgcaggtgacaatactcttgaaaatggtggcagagagccagcgtggtggctcacacctgtaatcccagcactttgggaggctgaggcaggtggatcaccagaggtcaggagttcaagaccagcctgaccaacatggagaaaccccatctctaccaaaaatacaaaattagctgggcatggtggcacatgcctgtaatcccagctactagggaggctgaggcgggagaatcacttgaacccaggaggcagaggttgcggtgagccgagatcgccccatcgcactccagcctsggcaacaagagtgaaactctgtctcaaaaaaaaaaaag

SEQ ID NO: 898074 - DNA, 618 bp, Homo sapiens; identical to SEQ ID NO: 896954

SEQ ID NO: 898075 - DNA, 620 bp, Homo sapiens
aataggcaaatctagaattcaaattgaaaggccmtcctcttaactaataatttacattacattgattctttgtaataaatatttatattagaatataggctaagaagggcctaaaaagggtgccaggtgatttgtaagttataattccttagttatcgtgggttttggcctatgctgaccagtttcacctggcactaccagctaaaattaaacggcgtcttcaccagtcctttcaaatggagcagatggaatgatctcccaatgcaatggcttgtcatttgtttcttacacagacccatgagccaccctttgtcaaatgaatgccatcagccagatgagaatgatgagaatgaggaagaggaactggagaatctaactgaggaactaggggagtgtgggatttgagatgtactaatcaggaaggaggtgaggccaggcgtagtggctgatgcctataattccagcactttgggaggccaagatgagcagattgcttgagcccaggagttcaagaccagcctgagcaacatggtaaaactcatctctacaaaaagtacaaaaaattaccccactgtggtggcacatgcctgtagtcctagctacttggggggctgaggtgg

SEQ ID NO: 898076 - DNA, 620 bp, Homo sapiens
aataggcaaatctagaattcaaattgaaaggccatcctcttaactaataatttacattacattgattctttgtaataaatatttatattagaatataggctaagaagggcctaaaaagggtgccaggtgatttgtaagttataattccttagttatcgtgggttttggcctatgctgaccagtttcacctggcactaccagctaaaattaaacggcgtcttcaccagtcctttcaaatggagcagatggaatgatctcccaatgcaatggcttgtcatttgtttcttacacagacccatgagccaccctttgtcaaatgaatgccatcagccagatgagaatgatgagaatgaggaagaggaactggagaatctaactgaggaactaggggagtgtgggatttgagatgtactaatcaggaaggaggtgaggccaggcgtagtggctgatgcctataattccagcactttgggaggccaagatgagcagattgcttgagcccaggagttcaagaccagcctgagcaacatggtaaaacycatctctacaaaaagtacaaaaaattaccccactgtggtggcacatgcctgtagtcctagctacttggggggctgaggtgg

SEQ ID NO: 898077 - DNA, 595 bp, Homo sapiens
ctacctccttttgcaaaagcagggaatggtgcaggagacaggagaaaacagggcataaaaattcacagaaaatagcatatgtcaaaggaaaaccactgtgggccagatcaaagcaatgacagaagtaatgattgagtttctttatagctatattttactgttcaaggtaggagattgtctgtaaattaaagagccaaaaatgattggattaagatacccataccctcaatttagaaactgttattaaggacttttttttttttaacagaactatttcagaagccttagagctcaggaagggtgataatgtcgggacttcagggtaagtaggaagaaacacacaattcaagggcagtgaccacttctccaacattgaaaaatgtgatcaatttctattgaaaggaaagattcagtggccagctagcactgattgttattactaaaaataaactttggtcacagattcagcagcctatgagaagttagtaaagtgrttgacttaaagattaccttttaagaggcagaagaaaaataattattagtaacaccttcaaacatagaatgcttccagacatatcccagttggaatgagact

SEQ ID NO: 898078 - DNA, 612 bp, Homo sapiens
ctaataaaaagtccaaaatgcacccctcttccctcacttcctcaaaccctcatgaaatataataagaaccaacagaaaccaagctatcaacagcrtgagttatcaaactgtataaaaaacctgtgtttacatttgttgccatttcgagcctttcatacccatagttccgtaatgtaaatgttactttatcttacagaacccttgattcctggctgaaagctgctctgtgaacatgaagagtctccttttttgaccaccttccttctggtaccccagagagtaaatggttcttgtgacttagaagctgttcctctttgcccagacactcaaatgtgcctttccatgggagcagagacactgaaattgatgaaattgacactgaaatctatgcggattctgttgtttttctctagctgagaatgaatgagtaatgagtgagtgagcattcacctgctgagtatctgtgatgtctgaagcactttgataggcgctttttcctggcctcttttttagacctcacagtgaccaatgtgcttctgaacaaatcccagaggaattaaatggtttgctccagttcacttagaaagcagcaaaactgtgtgactcaaacca

SEQ ID NO: 898079 - DNA, 650 bp, Homo sapiens
agtgactctgtgaactaaggaagtttagactgctgagaatgagagcagaggaaattggatagagaaamgtagaaaaggtttgaaatatctgttataggaaatgagagcaaaaccgaaccaagttcaaggttgtattatcaagactctacatcagatggtgtaaagatggaaatgaacacagaattggctgtccaatatccaggatggacaagactaagtgttgcaaagaaagagaactaactatagcactgaaacatggagtctctccatatatcttcccccaaatagaccgatatatacacaaatatattctttattcttagagagagattatctgtctagaggttgggaaacatgtgggaaatgagaaatcctgttttttgtttttttctgttactatattaacattctccaaatcacatgattttccctgcagtgaagagcagctcaagaagtttgttcacgtttttatattcatctgtatgatgccaacataatcaatcctaagcagaagatttttctgtccccataagctgccctgctcttccccagctgctggtagggcttgggtatgtgcccagtgttcaactcctgtaacctgctcttacagagtgcagaatagatgccttaaatcaacaggacatattgtg

SEQ ID NO: 898080 - DNA, 585 bp, Homo sapiens
gtgagaaatcttggaagcatagacttaggagtggtggtgatgttggaaagaagaatgattacagagagattcaggaggcaagactgayaagacttggtgatgtattggctattgggagtgagaaggagggcagtgtcaagaatatcttactggcttctgtcatgaacaagtggaagagtggtgccaattgttgacttagagaaaattgacagaagacccaggcctagttttggagattctaagtttgaagtatctttgagtcctcacagtggagatgttgattggtaattagacataccatatttatgcctttatatggtgtcatcgttggcatctcttttgagatgttaactctttcagactaggaaacatgttgtatcactcaaacttcttattttgaggcaggaggtgtggactccaattgaacagaaaggagtttattgaaaatatattcggtatttaccagctataatggaaggctggagcactagtcatgagaaaatgtttctagaaacaaagctccaaattccacattggaattggtctgatgagtaaaccacggcagagcaccaggtgctacacttg

SEQ ID NO: 898081 - DNA, 566 bp, Homo sapiens
cttccaaaactatttctatgcacttttaaacaaaaaggggattatactggtaataacatgtttacattatagttttattaagagaattaaacaagtgagtaaagatataaacatgctattatctgctccacactgtcctaagtgacataaatataaacatacatatttataagtataaatgtataacagtaattggctttgtaaatttttttcgcttaaaacattgcaaacaacttttaatgttagtaaatattcatctaaaacatcatttttaagcgaataaactttatttttcagaggagtttcaggtttataggaaaatcaagaggaaaatacagtcttcatataccccctgtctccacacacacaacctcctcactatcaaaattccccaccataggggtgcatctgtgttaattgatggacctacactgacacatcattatcacytaaagtccatgtttacattagggtttctcttggtggtgtacattctgtgggttttgacaaaagtatgatgacatgtatccaccactgtagtatcacacagaatagttacactgccc

SEQ ID NO: 898082 - DNA, 630 bp, Homo sapiens
atgcacagtctcttagttgggtcagtgtcccgggatggaatttcctgaccttgtcaccggttcttggatccacaccttagagcaattcattactgttggaactgcctgcatctggttctgkcctctcctctcaattaagggagaaacaagacaggagggagggctgcaggaagctgctgtgctgtgagaagcaggtgcccttggatggcttctgcaaactccccaggtcccagttttctcattggtgaagaaaccagaatgggcagaccaatagccttacaggcttgctcagtggctatcctgacaaaacaaaagaccaaaacacaggttaggaggtgttacctaaaatgtacaggaggccattgatttgggcggagttcctggctgtgcatctggcctgcggtcacccagtactccgggctctgacacacaggcggcagctcctccctatgaaagtgccacccaggttggacatgtttttaaaagctgatcgttaatgagctggaaaggaaaggaatagaagccattatgatcactctaagaaagcatctctgattcatggatcatttactattgattattgaaaccaatgccatcgtgcacgccctgtggctggttttaaaacctcta

SEQ ID NO: 898083 - DNA, 570 bp, Homo sapiens
gtcctgtgccgcctgaagcccatccctgcactgaggttgagaactcctgatgcagtcgtggtccttcttcatcgataagtcacttccggcccacaggcttgtcctcagatcactcatgagtttctggcaggccaaggattcctgcttcctaaagtttatttagagttcatggtagacacagactaaaaacctactcaaactggcctcagaaaaggggaagggagacatagtttcagtgtggaatgatggaaaagctctggaagtggacggtggtgacagctgcatgacaacgtgaatgcacttaaagctactggattgtatgcattaaaatagtaaaagtggtaaattttgtgttgcatatatattaccacaataaaaaaaattcaaaaaggtaaaataaaaggaagagtacattttaggggctggagagtacaccagggaagctgctggctgctggacctcaggaggtaasgagaacattgtcacactaacccctgcccctcccctgtggcttctccctgtccactcttccagcttaggcccacatcacagctctcatgcttttattcc

SEQ ID NO: 898084 - DNA, 632 bp, Homo sapiens
ttggcctcccaaaggattgtaggcgtgaaccaccatgcccagctgtcagtatgttcttaaactccatacagtcaagtacttatcaataatttatttttaaatttctaaattttttttgctttttttttttgagacaggatctcactgtgccacccaggctggagtacagtggcacgatcttggctcacggcagtcttgacctcctgggctcaagcaatccttccacttcagcctgagtagctgggactacaggtgtgtgccaccgcccctggctaattttcacaatttttgtagagatgggatcttgtcatgttgcccaggctggtctcaaacacctgggctcaaggtatgctcccacttcagcctcccacagtgctaggattacagacacgagctgctgcactcagccaaaagctttttttgagttgatgaataccccatttatcctgatggaattattacacactatatgcctgtgtcaaaatatctcatatactccataaatatatacacctatrtgcccacaaaaattaaaaattaaaaagcctattcaaagccaggtgtggtggcttatgcctgtaatcgcagcattttgggaggctgaggtgggaggatcgcctgaggctaggagt

SEQ ID NO: 898085 - DNA, 665 bp, Homo sapiens
gatgggctgagactgatctcctcctgctgagtttcccccatcagattgtcctttctctgcagcacgtgtcttcagagtatggatgcaggaaatgaattctgatccattgaaatttgtctaccctgtgtgtgtcctgcactgaatgcccaaacactaaaatgggacataatgcagagggggacacaggcacagcccaggcctaacaatcctgtgggtgcgtgaagtagaactgacccccaacacccagaggtcatgaattcctcacggtgtacacggaaatatccagttgcttcttcaatggtaaaatctgtctttatgatttgtagggtatagaatcctgtgtcatcctgggtgactttccgggtcagcagggatgcattggcaaatattacctcctgactactgtatgcaggtcctgagctagatctttgaatgcctgttgcatatcctaaaattcaatagtagagatccacacttcttcctttgtgccaattgtagcccatcactttcaggggcagattgtgggcaagtagaaaaaactcctcctcctcctcctctgtggcattgaatggcatggcttcartagtgactctggcagtggtgggtgggttccagaaggttaaaagtgaggctaggatggggagggagcatcagtcaatatcaaa

SEQ ID NO: 898086 - DNA, 599 bp, Homo sapiens
atgctgctataaacattgaggtaccaaaayctgtttgggtctctgctctcaattattttgggtttatacccaggagtggaatggccaggtcatacagtacctctagttttagttttctgaggaaccgccataatgtttttcacagtggttgcaccattttaattcttatgaatagtgcacaggggttccaattgttccacagtctcattaacacttattattttctggggtttttgctttgtgtttgggagtagccatttaaattggcataaggtataatttcattgtggtttgcattttcatttccttaatgattagtgatattgatcaatattttatatgcttgctggccatttgtacatcttctttggagaaatgggagggacagatccctcccattgaatagattaatgtcctctcctgatggtgaatgaattcttcctctattagttcctgcaagacctggttgttaaaagagcaggccaccgccccggtttctctcttgctcccttgctcatgtaatctctgcacatgttggcttcccctcctcttctgcgatgagtgggagcaggctgtggccatcaccagatgaagatgcc

SEQ ID NO: 898087 - DNA, 599 bp, Homo sapiens
atgctgctataaacattgaggtaccaaaacctgtttgggtctctgctctcaattattttgggtttatacccaggagtggaatggccaggtcatacagtacctctagttttagttttctgaggaaccgccataatgtttttcacagtggttgcaccattttaattcttatgaatagtgcacaggggttccaattgttccacagtctcattaacacttattattttctggggtttttgctttgtgtttgggagtagccatttaaattggcataaggtataatttcattgtggtttgcattttcatttccttaatgattagtgatattgatcaatattttatatgcttgctggccatttgtacatcttctttggagaaatgggagggacagatccctcccattgaatagattaatgtcctctcctgatggtgaatgaattcttcctctattagttcctgcaagacctggttgttaaaagagcaggccaccgccccggtttctctcttgctcccttgctcatgtaatctctgcacatgttggcttcccctcctcttctgygatgagtgggagcaggctgtggccatcaccagatgaagatgcc

SEQ ID NO: 898088 - DNA, 567 bp, Homo sapiens
tacttggacttctactgtcagactccaggggccttccactcccaccctcacctgttttctcactgattgcagagcttgacaccaccatcctcacaaccccaaatcagacacctaccattcatttgtgatttgctaattggttgccaacctcctaacacctcttttagattctaccttccatcccactgtgttagttcaggtcctaatattttttgcctaagctattgcaacaatctcctaatcagcacttctctccctattctattcacacttccacaccatgtaatcgtcttgcttgaaatcctccaaaatcttcttaagggcctctcaattacctcaagtcaagattctaagtcttgaggtgaacacaacgatctggtctctctcttcatctccagcttctccttcttaactcctctaaacacattctatctacctacccacacacatgtgttcatagttctccacacatgacagagcctagactttgcatatgtgtttccttytgccatgctttcatctttccttcaactccaacttgtgtcaaacatcactttttttgccatt

SEQ ID NO: 898089 - DNA, 611 bp, Homo sapiens
tttctcttgtgtttctcctagtttttaaattttaacttttacacttaggtctgtgatccattttgagttcatttttgtgagctaaggtacttgtatcattttggagctaaggataaagaaaatgtcctattaagcttgcagaagtaaaaaacaagaatcatgcaaggattcagccaatgcacctctctcaccccttcacagaagctaatggaggacatgctcccacaacgtaagggcaaaagccaacaaagagaaagcacaggctctcataaacagcagatctcactagaagagtggtgaagcaaaacctaagactacccattgtacatcagacatagaatcaatccagattggagcaagaggacaataaaaggaagacctacagagagatctctaagtgaaaggggaatttgagagaccactatatattagaggaaagaatatgtgaaaagaattaagactatgcatgttttgaaattgcarctacaaaaaggccatttttaactcaagggaaaaagaaacgttgcaccaaaaaaaaaaaaaaaaaagaaagaaagaaacaaaattacactctactaactagcttgtctgtgaacaatatacatagtcat

SEQ ID NO: 898090 - DNA, 507 bp, Homo sapiens
cactatgttgcccaggctggtcttgaactcctggcctcaagccatacttctgcctcagcctcccaaagtgctgggattacaggcatgagccaccatgccctgmcaccaataaaagttttttttttttttttttttgagacagagtcttgctctgtcgcccaggctagagtgcagtggtgcaatcttggcttactgcaacctctgcctcctgggttcaagcaattctcctgcctcagcctcctgagtagctgggactataggcgcccgccaccatgcctggctaatttttgtatttttagtagagacagggttttatcatattggccaggctggtctcgaactcctgaccttgtgatctgcccgccttgggctcccaaagtgctaggattacaggtgttagccactgagcccagtcaataaagttttttaaaaaattattttgtaatatatttttaaagcagccatgctaatcttctctgtattgttccaattttagtttatgtgctg

SEQ ID NO: 898091 - DNA, 586 bp, Homo sapiens
tagaggaggcttaaaaacattccttgtgtttcaggagrgggaggtaagttagggggaaagtgagagtgaaatgttgctggttcctaagcaggaaccatttctaagccacaagtctagcagaagctggagcaaagacatgggtcctgagatagcctgagggaatgtgaaagcaaaggaggcctgtaggagggccaagggaaggggtgagtctcaaagagccccagagagtcatgattgcagaaaaaaagaacacatgtgatgtagcacttccaaccactctccaggggcccctcaaagctccaaaatggaaaaggcacagaaacaactaaaaagtagccaggtctggagaagccagggtctctgtaactgatacagctgtgatcactatggagtggtgaccaagggccagatggcccatgtatgaataatggcagccaaagccagattccctgtgatgtcttggcattctctaagaccactcaggagacctgggggcaagatcagaggaaatgataaaggctgtgaggtgggggtaggggagagaccctgagattacccggaatggaccaagaaaaacgggccctga

SEQ ID NO: 898092 - DNA, 511 bp, Homo sapiens
tgtctgtgtgcctgtgtcccttctattaaggatacaggtgattggatttagggcccgccctaatccagtatgacctcatcttaatttaaatcttaatttgcaaagattctttccaaataaagtcacattcrtaggtactgagggctgggacttaaaggtatcttttgggaggaccgaattcaagccacagcacacgtgactatgcaattaataataatagctaattaataatgcaataggctgggcacggtggctcacacctgtaatcccagcactttgggaggccgaggcaggcagatcacctgaggtcgggagttcgagaccagcctgaccaacatggagaaaccctgtctctactaaaagtacaaaattagccatgtgtggtggcatatgcctgtaatcccagctactcgggaaggctgaggcagggagaatcgcttgaacccgggaggtggaggttgtgttgagtcgagattgcgccatttcactccagcttgggcaacaagagtga

SEQ ID NO: 898093 - DNA, 569 bp, Homo sapiens
attcatagctaggatttattatagcaaaagaatataaagcaaaatcagcaccttttctctttgccagacaaggaaccaaatgcaagtttccaagagttctctcgctgtggaatcacacagcatgggcttaattcctccagcatcgtattgtgacaagtggaaaatgctgtctaccagggaagcttatcacagacttagtgctcaatgtttttgtctgtttttttttagagtttggggtggggggtctcactctgtcacctaggcgggagttcagtggcacagttaatggctcactgcagccttgacttcctgggctcaatcttcccacttcagcttcccgagtatctaggactacaggtgcacactaccatgcgtggctaattttctgttttcagaaatggcatcttgctctgttgcccaggttgttcttgaactcccagcctcaagctaccctcctgcctcagcctcctgagtcactgggattataggcgtaagccagcactcctggccyaaggtttttactgagggttgctcattacacaccctctgcctagcacatataaaaatcc

SEQ ID NO: 898094 - DNA, 624 bp, Homo sapiens
accattctaaccaatggcttttaaaattaaatgaacaacacacagttttatttttaaacaactacttagttgcctactcctttgccttaatacagaatacaacagagcatgaaaacaaaaattgagttcatttatatatactcatgtatccatgtaatagagacgttttaagtttctgtcgctttattttaaaatgaacactttaatgagcacattctcttctatctagaaaactgtattataatagcaaggttagaaatgacctagaaacaaacgtgtcaggcctccctctgcccggcctccctctgcccagccaccccctcccaccaacagaagcatttgtgtgtgttaaaacaggctgatgttccagagtctagactggaaactactaagtgaatgcagatagtctctgtgtgaagaattttagtaagcctcgtattcagtagaaatgtttctatttttggttcctctattaactcgttttgaaactcagacaagctatttagctttcctgtgtctagaaagwatcatttctaaaataataatatactttctagtccataggtcaacagatgttatagagaactggatgtgaaacctacataggtaaagattttctaatta

SEQ ID NO: 898095 - DNA, 508 bp, Homo sapiens
ggggattgcagagatacaggaagaacaagtgaccccctccacygatgtgctggtgaccctgagcaccccaggtagctgcagccagacctttggggctccctgcaccctgccctgtgagctgtgtctgtccagagccaactccagggcaggggcatgaatggaatgccccctcacctttccaactaggtaaagtccccagcaggctcccagctgggctgtgcacccctggcctcatcttacaaagaacacagggtccctcttgtgaaaacaagagccctgcctggagcactgcccaagcccagaagggggaagagaagggacaccatgggagaaggaagccaggggtcttccaggagaatctgggggtccctctcaaggaaggggagcatggggagtgagggccactgggatcctggctcttccaggccactcccctgagtcagcagagtgcctggcagcgagcagctgcctgcccacggggagggctgattttcgggaaggaacatgg

SEQ ID NO: 898096 - DNA, 609 bp, Homo sapiens
gaattcttttttctttcccttgataattatataaacataagacattaacacccatatcaatggtctgtattatggagaggcaagatgtttttgcaagatcktcattcccatctcctgaaacaggattccttaagtctagatctggagtctccccatgctctagagaccctagccatgtgccagaatctgacaggagctggtagcagagtacctcagcccttaggtgtgaacttcaccacagcaggttcatgtcagctcatctaaggaatggagtgggaaggctcctcctagtttccagtgtatgtccaggtagagtttatcaggtttaaaaagttacaggatcctgatttgagctggcagggttaaatatatgcctttccataggtccagttcacctatacatttagatggtttggtttagctttacttaaagtcaaaggaatctctgtgtttgtgtttttgcaagaaactggtaatggcttgcctagtttcttctctagtttcttagggcaaaggaatgagttttgccaaaattttatctaggaaaaatggagtagttttctaagtcttacaggacactgtcaaaatatggaaatctattttattgcc

SEQ ID NO: 898097 - DNA, 561 bp, Homo sapiens
tgactaatacaaattcaatgatcaaataactgtatacttattcagactctctgcgcccatcaattctaaattattacaacatgaattttttcccaatgccagtaagattgccacattgaaaggcccacctgaagtctcttaagcccagacccctgagtcttataaatatctgcttctgacttttgtggtgcttctgagagtctctgctaagacgatgctctctctgactgcaacagatcaataaacctagttttgcttcatcaacaggtaattctggtggtcttttaaggaggttctgcagtcaggagtgtggttgctggaagccagagtgctgcgtgtctatcattatcttcctgttttctattgatcagttggtacctttggatttgcagacaactgttaactgggacccaggagatgtcgcatttgctcaccctcctgccccrccagttactttgaaccatctttggtgactcacattttcattccccgacaatatgtttggttgagttttagccctcacttttctaatcatctggttcacagaggctgcagagtaag

SEQ ID NO: 898098 - DNA, 605 bp, Homo sapiens
tgggtgtattgggtaactggaaacagagtctgagaattgggtaagggagcatgggataaggaggtaaagaacaggcaagattggagcacccctagggctttttgaaccttaatgaagataatttgaataggaagtagagtgagcctgctgtaactacctgttgctctccaaactcagaacaaatgacccaaatttttgaaattgaattgatatagcactggggtgtgatttttctcaccagggccttagggtcagaccattgtctagtggatgggagttgaatttcctttgaagggagcaaaggatcgaaccttcaatcatactgggaagagatcagctctatggcaagaagggaggaatcagaaagcagaccccggatttgagggagagtgtctgccttgctctagggatagaaatgagcctgaggactgtgtacagtggctcatgcctgtaatcctagcactttgggaggtcaaggygggcagatcaattgaggccaggagtttgagacaagcctggctgacctggtgaaaccccacctctattaaaaaaaaaaattagccaggcatggctaattttagcatgcacctgtaatcccagttact

SEQ ID NO: 898099 - DNA, 625 bp, Homo sapiens
agtgagatgtggggttgatggagaaggaggagttaaggactctggcttgggcagtcagatagattatggggcatccccagagacagggaaaaatgttgactctaaggggatttggtgatatggctacctggttttggaactcagcagtgatcagggctggggatgtggagttgggagatgtcatcactcaggatttgggaagggtaagtgcatagagtgagaagagagagaggttgaggagtggatactgggaaaagggcatttgaggttgggcaaaggaagaggatggagagagagaaagagagtggtgaaactgaggtggggttgtcatgtcccagcagtcaaggaaggagaggtgcagagaaggagggagaatcatcactgcatacgacttctagaaagacagagagagaagcatcttttggatttagcagtacatggccattggtgatttgacaggaatgatttcagtaaagggaagggagatagactgaagtggatttgggagtagayagaaaattggcaactagagacacagcacagagaatgtttctgcaattttggctcagaagaaaaaactataggctatgtagttgaaggaagagactgtaggatgggagagact

SEQ ID NO: 898100 - DNA, 613 bp, Homo sapiens
gctgcagtgagctgtgtttgtgccactgtatgccagcctgggtgacagtgagattctttctcaaataataataataataataatagtaataataatattgatggggaaactgaggtttaagttggaagtctttaagattatatgattaggcaatattagcattatgtgagtgcatggctacagtcctttctttctgttctaaaccccttggagctccacagctctgagatgccctttagtgtaggtttgccctgtactgtgtgtgctcctcacccctttcctcagaaatgccccgtacctctctgactcaggatgacgctacgaaactgacatgcaattattagcctcattctagctactatgggtttttgtgtagtttgcagggcatcattttattgtgtgcacatgcatttttacattcctgtgactatttgctttttgttcaactttgagtgcatgtgtttgtctcatattccccaacaggttataatatctatagtcgaggayggaaaaaaagtaggcaggatactaacattttttgagtgccagatatctatcaggaaccaaattagataccctcacataagccattgcatttaatccccacaccaac

SEQ ID NO: 898101 - DNA, 622 bp, Homo sapiens
tctcttaaggcaccagcagcccaccagtggagaagaaaacctaggctccctgtaggcaggacagtcaagatggcagcaatttacataaaactgaaacccrcactgttgacaagagttcaataggctcttttctcctcctggaaactgctgcaactgtcaatgactttaggtgatctcctaaagtttctccttttgaagaccaattacatgctcagatgtgtttgctgctggacagccgagttaacccttcattgaaatatgaccttattctgtggattgaaatgtctactcatttttattccaattagaattctacagatatggaaattaaaatatatccatagatgggaactttttgggaagatgatgttgctgcaccattgttgatggcactgtcaggcagttttctagatcttgagagtccgagaaatatctgtctattctgaatttcattttaaagccactctgtaggaaggaaaatgaccaaaatgcctacgtaagtcaggtaacaatccggactgagttattttatggggtgtaggtgggaagtcgatctactgggacttctggtctctaaggacataaattgaagccactgatttcccactggagagtagacatg

SEQ ID NO: 898102 - DNA, 627 bp, Homo sapiens
agcaccatctcttcaatcagtgagttcatcctttcctccctcacttctattttcttgagaggaaataagcatttttttttctttttttaggcagagtctygctctgttgctcaggctggagtgcagtggtgtgatctcagctcactgcaacctctacctcccagattcaagcgattttcctgccttagcctcccaagtagctgggactgcgggcatgcaccgctatgactggctaatttttgtattttcagtagagatggagtttcaccatgctggccaggctggtctcgaactcctgacctcagatgattcacccgccttggcatcccaaagtgctgggattacaggtgtgagccactgtacctggctggaaataagcatttaatacttatgtgtgatgcccagcagatgccaacagtattcatggagagtcccattcccaagctctacaaagtaggggtgaggtagagctaaccatcctgtttcacagagaagcagagggattcacagctgttctctgccagccctcatgtctcacgattctgtgaagtgacagtttccatgggctcagagtagttgttgcgaagctttctagagtcctctgaccctggaagctgctaattaaag

SEQ ID NO: 898103 - DNA, 627 bp, Homo sapiens
agcaccatctcttcaatcagtgagttcatcctttcctccctcacttctattttcttgagaggaaataagcatttttttttctttttttaggcagagtctcgctctgttgctcagsctggagtgcagtggtgtgatctcagctcactgcaacctctacctcccagattcaagcgattttcctgccttagcctcccaagtagctgggactgcgggcatgcaccgctatgactggctaatttttgtattttcagtagagatggagtttcaccatgctggccaggctggtctcgaactcctgacctcagatgattcacccgccttggcatcccaaagtgctgggattacaggtgtgagccactgtacctggctggaaataagcatttaatacttatgtgtgatgcccagcagatgccaacagtattcatggagagtcccattcccaagctctacaaagtaggggtgaggtagagctaaccatcctgtttcacagagaagcagagggattcacagctgttctctgccagccctcatgtctcacgattctgtgaagtgacagtttccatgggctcagagtagttgttgcgaagctttctagagtcctctgaccctggaagctgctaattaaag

SEQ ID NO: 898104 - DNA, 627 bp, Homo sapiens
agcaccatctcttcaatcagtgagttcatcctttcctccctcacttctattttcttgagaggaaataagcatttttttttctttttttaggcagagtctcgctctgttgctcaggctggagtgcagtggtgtgatctcagctcactgcaacctctacctcccagattcaagcgattttcctgccttagcctcccaagtagctgggactgcgggcatgcaccgctatgactggctaatttttgtattttcagtagagatggagtttcaccatgctggccaggctggtctcgaactcctgacctcagatgattcacccgccttggcatcccaaagtgctgggattacaggtgtgagccactgtacctggctggaaataagcatttaatacttatgtgtgatgcccagcagatgccaacagtattcatggagagtcccattcccaagctctacaaagtaggggtgaggtagagctaaccatcctgtttcacagagaagcagagggattcacagctgttctctgccagccctcatgtctcacgaytctgtgaagtgacagtttccatgggctcagagtagttgttgcgaagctttctagagtcctctgaccctggaagctgctaattaaag

SEQ ID NO: 898105 - DNA, 651 bp, Homo sapiens
tggaaaacattcttcaggatatgatccaggagaacttccccaacctactaagacaggccaatattcaaattcaggaagtacatggaacaccrcaaagatactcctcgagaagagcaaccccaaaacacataatcatcagattcaccaagtttgaaatgaaggaaaaaatattaacagcagctagagagaaaggtcgggttacccacaaaagggagcctatcagactaacagtggatctctctgcagaaaccctacaagccagaagagagtaggggccaatattcaacattcttaaagaaaataattttcaacccagaatttcatatccagtcatactaagcttcataagcaaaggagaaacaaaatcctttacagacaagcaaatgctgagagattttgtcaccaccagacctgacttaaaagagctcctgaaggaagcactaaatatgaaaaggaaaaacccatactagccactgcaaaaacataccaaattgtaaagaccatcaacactatgaagaaactgcatcaactaatgagcaaaataaccagctagcatcacaatgacaggatcaaattcacactaacaatattaacctcaaatgtaaacaaactaaatgccccaattaaaagacacagactggcaaattggat

SEQ ID NO: 898106 - DNA, 651 bp, Homo sapiens
tggaaaacattcttcaggatatgatccaggagaacttccccaacctactaagacaggccaatattcaaattcaggaagtacatggaacaccacaaagatactcctcgagaagagcaaccccaaaacayataatcatcagattcaccaagtttgaaatgaaggaaaaaatattaacagcagctagagagaaaggtcgggttacccacaaaagggagcctatcagactaacagtggatctctctgcagaaaccctacaagccagaagagagtaggggccaatattcaacattcttaaagaaaataattttcaacccagaatttcatatccagtcatactaagcttcataagcaaaggagaaacaaaatcctttacagacaagcaaatgctgagagattttgtcaccaccagacctgacttaaaagagctcctgaaggaagcactaaatatgaaaaggaaaaacccatactagccactgcaaaaacataccaaattgtaaagaccatcaacactatgaagaaactgcatcaactaatgagcaaaataaccagctagcatcacaatgacaggatcaaattcacactaacaatattaacctcaaatgtaaacaaactaaatgccccaattaaaagacacagactggcaaattggat

SEQ ID NO: 898107 - DNA, 659 bp, Homo sapiens
tggtttttattttatctttgtgtaaaagcttactgtattttctagagtgagcacatattatatttattattctaaaygacaaaataaccatgtaagatacaccatgccacctctcaaataaattgtgtgcattgtatttccatgacagtaaataggaagaatctatttactctgcagaagcccagaaatgaacccaagcaagcgaggcttgcatgacccagagagcacattaaaggatccagaaatgcaggcaagggaacaagacagccaatgaaaaccaaggcagatgactggctgtatgaattgagtgcacaccaactcattagccttttacattttgctacccaaccacccaacttagatgcacagaaaacaaagcttgcaagagtagcaattccagactctgtagcaggaatccttctgctgagcctctctcatgccccctcccctactgttctcatctcccaggatgttcaaatccattccctggtccttacatctgcttctgcccatgcatgtgttcgctcctcctggtttcttttggctacttgattttgagtctcccggatggattttaaataccaggtccaagccaaagtgggccctccaggggaaagtttctcagacactttccctttttattagcacctccagaacag

SEQ ID NO: 898108 - DNA, 587 bp, Homo sapiens
agcattccctttgaaaaccagcacaagacaaggatgccctctctctccactcctattcaacatagaattggaagttctggccagggcaatcaggcaagagaaagaaataaagcgtattcaraaagaaaggaaatccaactgtctctgtttgcagatgacatgactgtatacctagaaaaccccattgtctcagcccaaaatctccttcagctgataagcaacttcagccaagtctcaggatacaaaatcaatgtgcaaaaatcagaagaattcctatgcaccaatcatacacaaaaagagagaaagattatgagtgaactcccattcacaatggctacaagagaataaatacctaggaatccaacttacttacaagggatgtgaaggacctcttcaagaactacaaaccactgctcaaggaaataaaagaggacacaaacacatggaaaaacattccatgctcatggataggaagaatcaatatcgtgaaaatggccatactgcccaaagtaatttagagattcaatgctatccccatcaagctaccattaactttcttcacagaattagaaaaaaactactttaaa

SEQ ID NO: 898109 - DNA, 681 bp, Homo sapiens
tgctatccccatcaagctaccattaactttcttcacagaattagaaaaaaactactttaaatttgatacggaaccaaaaatgaggctgtatagccaagaaaatcctaagcaaaaataacaaagctggaggcatcacactacctgacttcaaactatactacaaacagcatggtactggtaccaagacagatatatagaccaatggaacagaacagaggcctcagaaataatgacatatatctacaatcatctgatctttgacaaacctgacaaaacaagcaatgaggaaaggattccctgtttaataaatggtgctgggcaaactggctagccatatgcaaaaaacacagaaactggaccccttccttacaccttatacaaaaattaagccaagatggattaaagacttaagtgtaagacctaaagccataaaaaccctagaagaaaacctgggcaataccattcaggacataggcatgggcaaagacttcatgactaaaacaccaaaagcaaaggcaacaaaagccaaaattgacaaatgggatctaattaaactaaagagcttctgcacagcaaaataaactatcatcagagtaaacaggcaacctacagaatgggaaaaaawttttgcaaactattcatctgaaaaagggctaatatccagaatctacaaagaactta

SEQ ID NO: 898110 - DNA, 681 bp, Homo sapiens
tgctatccccatcaagctaccattaactttcttcacagaattagaaaaaaactactttaaatttgatacggaaccaaaaatgaggctgtatagccaagaaaatcctaagcaaaaataacaaagctggaggcatcacactacctgacttcaaactatactacaaacagcatggtactggtaccaagacagatatatagaccaatggaacagaacagaggcctcagaaataatgacatatatctacaatcatctgatctttgacaaacctgacaaaacaagcaatgaggaaaggattccctgtttaataaatggtgctgggcaaactggctagccatatgcaaaaaacacagaaactggaccccttccttacaccttatacaaaaattaagccaagatggattaaagacttaagtgtaagacctaaagccataaaaaccctagaagaaaacctgggcaataccattcaggacataggcatgggcaaagacttcatgactaaaacaccaaaagcaaaggcaacaaaagccaaaattgacaaatgggatctaattaaactaaagagcttctgcacagcaaaataaactatcatcagagtaaacaggcaacctacagaatgggaaaaaaattttgcaamctattcatctgaaaaagggctaatatccagaatctacaaagaactta

SEQ ID NO: 898111 - DNA, 587 bp, Homo sapiens
aatatgcttagccaagtgttgggtagtaaatccattttaataaactgatgttaaatgtactgcaataaagactaaatatttaagatcacaacaggaggattacttgaggtcaggggtttragaccaatctgagcaatatagcaagatcctgtctctattttcaaaaataaaaacaaataaaattataaatttaagaagattaaatatttaaattacattcagatctcaattagtattctcccaacctgaaaccctgtttctattttcaaaaacaaaaacaaataaataaatgaaattataaatttaaaaagactaaatatttagattatattcagatctcaattaatattttcccaacctgaaaactgggtctttattcattatttcatttccatacttcatttccagacaccttatgacaaaaaggaaaataacactctgaaggtatggctaaaagaaaagaaaaataatcagaattagcatcaccatggcattcacactcaatggtgaatatttgtccatttttttgtcacagaagatttgatcattttcttgaagatttgatcattttcttttaaatttgacaa

SEQ ID NO: 898112 - DNA, 542 bp, Homo sapiens
aaaagaacaaggtgggaaggtttgctctctcaaataaagctaccataattgagacagcatggtattgatgtacaaatagaaaaacagattaatggaagaaatcagaaaggccaggaatagtcttgattgataacaaaggtagcactgcaaagcagtgagataatgatatggacaagtggatatataaatatgatacgtatcaaaaaggcatataaacagtgtttcttccgtatgtacaagaaaaattttctgaaggaataaacaatataaactgaaataagctcagggtttcatcagcttattttataaacattgtgtatacttcagaatctcctcaaagatttcgtggccatagtatttgtaattattaaaggtattgctctaacaaaatatatagcaatatatcttcagtattctataaaaattaagttggattttctggccrggcacggtggttcaatcctgtaatcctaacactttgggaggccaaggtaggcgggtcacctgaggtcaggagttcaagaccagcctggccaagatgg

SEQ ID NO: 898113 - DNA, 648 bp, Homo sapiens
ctttagtttaaaaatactgagttcagagaatatgggcccaaaattcaggacaacaacatattttaatttttttttttttttcttgagacagagtcttgctctgtcgcccaggctagaatgcagtgctgcaatgttggctcactgcaacctccgcctcctgggttcaagcaattctcctgcctcagcctccagaatagatgagactacaggtgcaagccaccatgcccagccaatttttgtatttttattagagacagggtttctccatattggctaggctgctctcgaactcctgacctcgtgatccatccgcctcagcctcccaaagtgctgggattacaggcgtgagccaagggcttaaaagatacattgcccatctccccagggaagactggtagaggaatacaggacactgaccctatatctgtgatttcgggcataactgattcaaccatgaaccagctagctgtttgcatcagttatctattgctgcataacaaaccacccccaaaacttagtggcttagaacaaacaccatttatatagctcatgattctatgggtcagctgagtrggtcttctggtctgatccagctcagttactgtctgctggccttgctcagacatccctggtctgctggcaggtcag

SEQ ID NO: 898114 - DNA, 599 bp, Homo sapiens
tttacattcaatgttagtattgagatgtgaggtaccagtgcattcatcatgctctttgttgcctgtgtaccttggtttttttttttttggctttttaactttttttttttgtattataggtcctgtgtgatttatgctttaaagaggttctgttttgatatgtttccaggatttgtttcaagatttagagctccttttagcagttcttatagtggtgccttggtagtggtgaattctctcagcatttgtttgtctgcaaaagactgtatctttccttcatatataatgcttagtttcactagatacaaaattcttgggtgataattgttttgtttgaggaggctgaagatagggactcaatcccttctagcttgtagggtttctgctgagaaatctgctgttaatctgataggttttcctttataggttgcttgttggcttctgtatcacagatcttaacattatttcctttgtcttaactttagataacctgatgacaatgtgcctagtgatkatctttttgcagttaatttcccaggtattctttgtgcttcttgtatttggatgtctagatctttagcaaggctagggatgttttc

SEQ ID NO: 898115 - DNA, 619 bp, Homo sapiens
tttctgtctggtggtgagctatgtgctgcaggtagtgtgtttaatgtgtttctctcatgtttccgtgtatctggtggaagatgtgtgtctgcaggatgagtgtctcttttgtcggtgtatcatggattgtgtgtttgtgtgtgttgcagggaatgtgtttgtctcagtatctgagtgtgtcgggtcgtgtgcaggtgtgtgtttttttgtgtgtttgtttgtttgaaacagagtctcactctgtcgccaggctggagtgcagtggtgtgatctcagctcacctgcaacctccgcctcccgggttcaatcgattcttctgcctcagcctcctgagtggctgggattacaggcgtctgccaccacacccagctaattttttgtatttttagtggagacagggtttcaccatgttggccaggctagtcttgaactcctgatctcaagtgaaccgcctgcctcgtcctcccaaagtgctagaattacaggcgtgagccaccgtrcccggccgcacgtgtattttgtatgatatatatctgcttctgactttggtgaagtgtgtgtgtcgcagggttgtgtctatcttgtggtttctatgtggcctatggtgtgtgtgctgcaa

SEQ ID NO: 898116 - DNA, 636 bp, Homo sapiens
attctgaacgacatctttctgtaaaagttcaggaaaactactttttcacaaaacaaatgagcaacaaaaatgagcaacttaaagtcgaatttatacaaagttattataagaacaaagaaaataaggtacatgcaatacaaatgtgaaaaataatctaattttcaaaatgagctaaaagacattaaaaagatacaaatatgaaagcaatataactcaaaattagaaaacaaaagtaaagtaacataaattcaaagaattacaaataaagaaaaaaatacagaaattaagaagaaattacaaagaatgtaagagcaaatgagcccaacagatcactccagagaaataaaactgtgaaaagcaacaaaatcttaaaaattataatgaaataaaaatattaaaatgattcaagaaaaagcaacatgtattgaaggtagacttaaaaaaagacttaacctatggataatacgagtaccagaagaaatatcaaaacaagagagaagaaaatactaaaaattataattcaagaaaactttcatgaaatttaaaaaaagattaagakaagatttcaaaatacatattctgtacataccagacaatgttggcccagatacataatctagtaaaatgactagattt

SEQ ID NO: 898117 - DNA, 623 bp, Homo sapiens
aataataaaaaacactttattaaccctgtcattacttcagtaatttcagatttgcttctaagttatcctttgtgagagaatygaaaatcaaatgtccctagtaaataagtaagcttacaagttgttacaagattagttctagcctatggaatctgtcttcatgacttggttctatatcatttatttgattttttcaaataagttgaaatgctgaatactctggcttggagatcccagatgtctcacatggtacaccagaaattcaggcttgttattggaatattttgagacaaacagaactgagtttaaattctggatctctcgcgtattaattctgtgaccttgggggatattgccatgttctcatctataatatggacataagagctatctgttaggatcaatggagaactcaattagattagacatgaaaaagtaacttccaagcattacaccttaataaatgttagtttcttcctcctttctcctaatcaggacaaaaaaagccattagttaagtaaagaatatgtttgggaaaaactattctctcaaatcaggtatcagctgaaatttgagctaatgcatggaggcaacacctaatatcttttgtatgaagacagcaa

SEQ ID NO: 898118 - DNA, 449 bp, Homo sapiens
gccctaatgagctccagggggacagaagtctgtcaatcacagggtacttttcaagtatagtcatctctgccccatcagagaaccacgaggcatgaaataattagaaagcccagaataactgctctgtttyacaagagcaaaatccgtatgtggatcatttacataaacttgtcacttcccattacagttctaatgtcggctgggtagtaatcgcaggcatgctgggggaggggaggtcaaggtaggctgcgcctccatactggaagcctaaggtacgcatgtgctgtgcctgtcaccacccccacctgcactgcctactgaattaatggaaagtatcttttcttttccattaaataagaactattcatgctgctatggcagcagaccctgtgcttaagagagagaaaaaaagcgcttttgcatcaagctattgttgggggagaattcac

SEQ ID NO: 898119 - DNA, 653 bp, Homo sapiens
gtgtgagagatatcaccgctaattaagtcctgatcccctggctccacttgaaacaaaccaaggagggatcaagttttgcgagcaggtgctaactggttgcaaaagaggagtccatcacttcagcaaaaggtttcmctgtaccttggggaggacacagcttttctgaggaaagtcattactggacagagccataggctcttattttgtcttaggacacggaggagcttgtaaaaaacaaaaaaacacaaaaaacaatcctccgctgtgacaaacaactgttttcctttcctgtgttttccccttgatggctgatttactttctcctcagatggacaatggagtaatttacaggtcagtaaacactttcctggagatgccggagcagtttcattttggtacagataatatgggatttgttgtgactcagaatatcagtccagagtgggactgacacagccacctaccctgactgtttaagaaaaaacaattctaagtacaatgcataaataaacctaacagcaaatacttacctgcagaaagaaaatctgagagctccatgagtattgtgtatgtgtgtgtgaagagggaaagtgatgtgttaaggagctggacaaatatcctgtcaaacatccatgattttttttattctcgga

SEQ ID NO: 898120 - DNA, 585 bp, Homo sapiens
ggagctaattgctttatacatattatcttacaatgcacgctattatctaatacaacatgtgtgaagctagtatcatcacaattattaaaatatcrttatttttaaaagggggaaacttgtgctctaaagaattatgggcatgatcataattcctcaatgtgagtggcagatccatgtttttcactcagttttgcctaactccaaagtctatttttcacatcttgtaatacattcacctgaatccctctaaaatacatgcccaaacgctaacccctgtgtgatggttaattttatgtgtcaacttgatggtgctaaaggatgcctagatagctagtaaaacatcatttctgggtgtgtctgtgaagtgtttctagaagagattggcatttgaatcagtacagtgagtaaagaagaccacctcaccaatgtgcgaatcatccaatccatggagggattgaatttaaaacaaggtggagaaagaataaatttcttctttctgagtacctgccctcagatatcagcactcatgattttcaggcctttagagttgaaccaggatcgacactagtggtctcccataagggt

SEQ ID NO: 898121 - DNA, 628 bp, Homo sapiens
aaagtctagtatgtgccagtcatcatgtcatggtttgatgatccaaaggcatatcaaacacaagacacatgaagaaattgttattaattgtgacaatataatggaatgattattgaaatgggggtcatgggaagtcttcagaggggaaatgacatttgatctggattttgagccatgagtaggaatttgcagatgtaaaagggaagaagggcttctgtacaaagaggatcgtgtgctacaagattcagggataagactgggctttacccaggacacagagaaacctttcatgtactggaaggcaaagctttgtgttgagaagcatgcagaaaacaagggggttgcaaaagcaggttggaacctcatagtgaagaatttaaccagaaagtatggactagattctgtagaaaaagtagaagcaggagtccttcaagtatgaaacacctccacttcatagactgcattagttttctattagtgcaaaacaaattaccaaagactcagcagcttaaaataacacaaatttattatcttactatgtcaatgggtcagaaatacascataaatttgttggatcctttgcttctgggtgtcacaaggctcaaatcaatgtgttaactgagtgcat

SEQ ID NO: 898122 - DNA, 599 bp, Homo sapiens
caaatttccttagcatttgcttctctgaaaaggattctatttctccttcatttaggaagcttagtttggctggatatgaaattcttggttggaattccttttttttttttttttaagaatgcygaatacagcccccaatatctttgagcttctatggtttcaactaaaagctctatttttagcctgattgcatccctttttaaatgacctgacctttatcttcagctgcctttaatattttttctctcattttgacctaggagaatctgataactatgtgtcatgggaatggccatcttgaatggtatcttgcaggggttctgtgcatgttctgaattagaatgttggcctctctagcaaggttggggttatgatcacggatgatatcctcaaatacattttccaggttgcttgcttttcctccctctcttttaggaacaccaattagtcataaatttggttcctacgtaatcccgtattttatggaggttttgttcattctttttttaattctcttttttatttttgtctgactgagttaattcagagagccctggagattagagtcttagagctctgagattctttcctcggcttat

SEQ ID NO: 898123 - DNA, 479 bp, Homo sapiens
gtggcacccttctcacagctccactaggtcatgcctcactggggactttatgtggggttccaaccccacttttaccctttgcattgccctagtacaggttctccatgagggctccactcctgcaggagacttctgcctgagtactcaggctttttcatacaccttttgaaactcaggcatagacttccaagcatttatcactcttgcattctgtgcacctacaggcttaacaccacatggaaactgtcaaggcttatggcttgcattctccaaattggcagctcaggctctaccagaacctctttgagccctggctgaagatggagctggagctgaaaactgtcaggatgcgaggagcagtgtcccaagactgcacagrgaagttgaggcctggatctggctcatgaaaccattcttccctccttggcctctgggcctgttgtagaaggggctgacataaaggtctctaaaatggcttt

SEQ ID NO: 898124 - DNA, 635 bp, Homo sapiens
tgtgaaatacgagagtataaaatttgactccaagcttttttggctttatcaactggaaggatggagtggccattaattgagactgggaaaactatagaggggcaagttcagacattaaaggttgagtttcccattagaagcccagagagatttagatgaggcaatagattatataagtctggcatttaagggagagtttcagacatgattaatacatttgggcatcactggtatatagaaagggtttaaataaatgaactagatgaactcataaaagcaaaaggtatagagagaagagaagaggttcaagggctgagtctgggtcattccactctttagtggtcagagaaaggaggagaagctagcaaaagaaactaggtattagtaaaactcctataagctaaaagacaagtttcttagggcctaaagcaagcttgtccaacccacagcctgtgggccgcatgcagcgcaggacggctttgaatgcagcactagacaaatttgtaaactttcttaaaacatcatgggaatttctgtgattgttttttagctcatcagctattgttagtgtattttacctrtggcccaagataattattcttcttccagtgaggcccagggaagcaaaaagattg

SEQ ID NO: 898125 - DNA, 667 bp, Homo sapiens
tctatgatcacatattctcttctttttattcacacctaagtaatgagtatatgttacatactagctttctatttttaagccagaaagagaggcagccacagcagaagtattttagaatgcagactcaaaagcagaggcaggttctaagggtgcctcttcaaatcaagagaaggatatcaaggatttagagttgaggatggattcaaggcagaactcccaagtatctgaggcttgaaggacagctgatgtggctaagagcagaggcatgccttgtactattgtttatataaaagtgctgcacaataagtcatattaggaaagtctaggcaagccttataacaagtggcccaggaaatgtgccctgtacacacttaacactagtcacatcatccaaaagaaggtcttaaataaggggctggaagcatcagtgtagatgatatttgcctacttttcaaattttattcatctcagaagactgcctgatgggtgaaaataaggatattcatgggaatgaagaaagatgatttctatattcttattttwttaattactgtatcacttcacagtggcaagcctgctaaagatccataggcaatcagataaaatgaaaaatttggcagaaaattggaaaaacaatgtaggaagaaagaaatctgtgtttacattg

SEQ ID NO: 898126 - DNA, 667 bp, Homo sapiens
tctatgatcacatattctcttctttttattcacacctaagtaatgagtatatgttacatactagctttctatttttaagccagaaagagaggcagccacagcagaagtattttagaatgcagactcaaaagcagaggcaggttctaagggtgcctcttcaaatcaagagaaggatatcaaggatttagagttgaggatggattcaaggcagaactcccaagtatctgaggcttgaaggacagctgatgtggctaagagcagaggcatgccttgtactattgtttatataaaagtgctgcacaataagtcatattaggaaagtctaggcaagccttataacaagtggcccaggaaatgtgccctgtacacacttaacactagtcacatcatccaaaagaaggtcttaaataaggggctggaagcatcagtgtagatgatatttgcctacttttcaaattttattcatctcagaagactgcctgatgggtgaaaataaggatattcatgggaatgaagaaagatgatttctatattcttattttattaattactgtatcacttcacagtggcaagcctgytaaagatccataggcaatcagataaaatgaaaaatttggcagaaaattggaaaaacaatgtaggaagaaagaaatctgtgtttacattg

SEQ ID NO: 898127 - DNA, 667 bp, Homo sapiens
tctatgatcacatattctcttctttttattcacacctaagtaatgagtatatgttacatactagctttctatttttaagccagaaagagaggcagccacagcagaagtattttagaatgcagactcaaaagcagaggcaggttctaagggtgcctcttcaaatcaagagaaggatatcaaggatttagagttgaggatggattcaaggcagaactcccaagtatctgaggcttgaaggacagctgatgtggctaagagcagaggcatgccttgtactattgtttatataaaagtgctgcacaataagtcatattaggaaagtctaggcaagccttataacaagtggcccaggaaatgtgccctgtacacacttaacactagtcacatcatccaaaagaaggtcttaaataaggggctggaagcatcagtgtagatgatatttgcctacttttcaaattttattcatctcagaagactgcctgatgggtgaaaataaggatattcatgggaatgaagaaagatgatttctatattcttattttattaattactgtatcacttcacagtggcaagcctgctaaagatccataggcaatcagataaaatgaaaaatttggcagaaaattggaaaaacaatgtargaagaaagaaatctgtgtttacattg

SEQ ID NO: 898128 - DNA, 640 bp, Homo sapiens
ggaattagtcaaaataagatatctagaaaaacctctcacataactggaaattttaaaatacacttttaaataattcataggtcagttaacttttaacaacttkttgtataaatgtttaattattttttaagaaaggacacatgatacaactttccacaacgttttcacagagttattttgagtatgaagtgaggtaatgaggataacattgttttagccaggtgcggtggctcactcctgtaatcccagcactttgggaggccaaggcaggtggatcacgaggtcaggagttcaagaccagcctggccaacatggtgaaaccccgtctctagtaaaaatataaaagttggctgggcatgctgatgtgcgcctgtaatccctgctactcaggaggctgaggcagggaactgcttgaacccgggaggcggaggttgcagagagccgagattgtgccactgcactccagctgggcaacagaacgagactccctctcaaaaaaaaaaaaaaaaaaaaattgccacatatttgatgaacaacaatcagtactgtcttttctggtatgcaacaagtaacttgctgcatacaaaaggagttaacaatccctgaccggcataaagtgttcctttattttacccctatg

SEQ ID NO: 898129 - DNA, 547 bp, Homo sapiens
agctgccctgcatctcttcctacgtccaagaacctcttgggcccttcctttagcccccagacaccttgaacaaccagatacaaaactgtggtgggagtttttgttgcagaacttttatatccagaacttttgctgcaagtgcgtgatttccagagagcaattatatcacctcagcctaaagccaagcaccggaaacagccgcggacatccctgaccttgagaaggcttccctttgcccaccacccacggcttcccattggctggacaaaaccctgcaccacagggcaggtgctggtttggaggggcctgaagttaacagtctgagaggcctctttaagataaagaacacaaaagcacaacaaacattgtaagtcaggcagtgagcttggcccaacatgggaggccctgactctctagcctcagcaaaaacacagrccacttttccagctgactacccaccccctcctgcactcttcctgggccgagagggcccccaccattcacacagtccaccttctactccccgccaaggcagaacacttcagct

SEQ ID NO: 898130 - DNA, 594 bp, Homo sapiens
gcgggcctgcaggactcagtgcctcacaaaaccagcggatacctgtggtcatcgcggaatcttgtggtgaccgtgcacccttccatgcccaaggcagaagcctcagctcctttctacctcccatctgccacgttaagtcacaggcttgcaccttaaaggccagaggccatccatggagaagactctcccaaatgactcccaattgggattggccctaacaaacaccatgagcttggagtctctcttctttcggggccactctgctttctcagtggtgctgtctcttcatgttacccacagccagtggaatcatgttctctgttccctctcaactatcagaaccagtcttttggacaggatctcctgaggttcctgctagcaaggtataaataacagattccctggaagtgttgaaaattggaaacgaaataggaatttttaaaatcttacacttcaagacaactggttggatgaattggggagatggtggctttatttttcttttgaagaaagtatacaaaggtggacamtggacaggtagggacaaggtgactatggaagcatctcatggctgaagcttgctcccatctccca

SEQ ID NO: 898131 - DNA, 559 bp, Homo sapiens
agcactagttatcaagatttagatccatatcaagatccttgaaggcagggatcatatctctaagttatattgcattctctatccttcakagattattgcctggcatggacatcaatgtttactgtccccactgcatgcccagatcacagtaccagacatacggtgtacactcaaccaatatctgtcagattgaacacacagtgatgagaagcaactgaaattttcaagcctaaaaaaatgttgaaagattggtacaatgaactaccctcaaactactccatgatccattttccctttctatgcatacttgcatgtgtatacacacacacacacacaaccatttttgctttctgaattatttgaaagttgctgaaaaaacagttctgcactctaaagtcctttagcacatgtctcctaagagtaagagcagtctctacataagctcaatacctttatcacagctaagaaaataggatcctacatataattcaaacacaaacttcctcgatgtccttatgtgctcttttacagctttttttttcaatccaggatacaatca

SEQ ID NO: 898132 - DNA, 577 bp, Homo sapiens
ggggttttctaaatataaatcatgtaatctgcaaacagagataatttgactttctctcttcctatatgaatattctttatttctttctcttgtctgattgccctggccagaacttccaatactatgttaaataggagtagtgagagagggcatccttgtcttgtgctagttttcaaagggaatgcttccagcttttgcccattcagtatgacattggctatgggtttgttacaaatagctctcattattttcagatatgctccatcaatgcctagtttattgagagtttttaatatgaagagatgttgaattttatcaaaggccttttctccatctattgagatgatcctgtggtttttgccattgattctgcttatgtgatggattacgtttattgatttgtgtatgttgaaccagccttgcatcccaggaaagaagccgacttgactgtggtagataggctttttgatatgctgctggatttggttcaccagtattttattgaggattttcgcatcgatrtgtcatcagggatattgacctgacgttttctttttttgttgtgtctcttccaggt

SEQ ID NO: 898133 - DNA, 675 bp, Homo sapiens
catttacattttaatattgttatatatgaatttgatcctgtcatcatgatgctagctggttattttgcacattagttgacgcagtttcttcctaatgtcattggtctttatattttggtgtgttttgcagtgactgataacagtttttcctttccatatttagtgcttcccttaggagctcttgtaagacaggcctggtggcaacaaaatccctcagcatttcttgtctggaaaggattttactcctcatttgcttatgaagcttagtttgactggatttgaaattctggattgaaaattctttaagaacattgaatactggcccccactctcttgtggcttgtaggatttctgcagagtgatctgctgttagtctgactggcttccctttgtaggtgacctgattcttctgacagtgcttaacattttttccttcatttcaaccttggaaaatctgaagattaggtgtcttggggttgatcttctcatggagtatcttagagttctccatatttcctgaatttgaatgttggcctgtcttgctaggttgggkaagttctcctggataatatcctgaagtgtgttttccaacttggttccattctccccgtcactttcaggtataccaatcaatcataggcataatcatttggtcttttcacatagtcccatatt

SEQ ID NO: 898134 - DNA, 578 bp, Homo sapiens
tgggttagaacacgctcctttagctcagaggagtttgttattacccaccttctgaagcctacttctgtcaattcatcagcctcattctccgtccagttttgtttccttgctggagaggagttgtgatcatttggtggagaagaagcattctggcttttggaattttcagcacttttgtgctgctttttcctcatcttcatggatttatctacctttgatctttgaggatgatgacctttggatggggtttttgttgagggggggtcttttttgttgatgcggctgctgctgttgttgctttctgtttgtcagtttttcttcttacagccaggcccctcttctgcaggtctgctgcagttcattggaggtccactccagactccattcacctgggtgtcaccagtggaggctgcagatcagcaaagattgctgcctgctccttcctctgtaagcttcatcccagaggggcactggcctgatgccagctggagctstcctgtgtgaggcagttctcctgtcttgctggggttccaggtgccactggggtatgaagaatgtcattggcattttaataggga

SEQ ID NO: 898135 - DNA, 557 bp, Homo sapiens
atggctaacgtgtagaaatatattagtgaaacagtcaaaacctaaataacaagaggaaaagaacacatactcccacaagcaggcacacacacacacccctaccaaaattatatacagttgaattagaaatgcttcagaaaacatttattcataatggttaaatttataaaacactatatccagtagtcactgctctaagggctctacatgagttatttaatgcttacatgtcattttcttttcttttttttttctttttttgagacagagtcttgctctgttacccaggctggagtacagtggcgctatctcggctcactgtaacctccacctcccaggttcaagtgattctcgtgtctcagcctcccaagtagctgggattgcaggcatgcaccaccacacctggctagcttttttttttttttttttttttttttttgtatttttagtagagatggggtttcaccatactggccaggctggtctcgaactcctgacctcaggtgatccacccgcctyggcctcccaaagtgctgtaatcctccaaagggattaca

SEQ ID NO: 898136 - DNA, 618 bp, Homo sapiens
ttcttacttttatccatactttctattaaaataccaatttaaaatagctcaaaattctgtctgtggttttggagacattaaacttaagtgcatcttgtgaatcaartacatgtctctgcagagacaatcaaaaagaaaaagcaattgaaaactcaagtacaatgttgttatgttttattataaagagtatttaaaaagccagatattgtggtgccagatacattactttaatggttaacttcttggcatctcgtcaaaaggtagaacttgtatctggaaaaacttgatgagaaaaaaatgtcatagctataattttactgcctcatactacacaaaattgtctgttcaagttttacctgcgtaactctgtgagcagtcctgtgttcagcgccatccatggaggtttgtggaggaagttatccaggaacacaaaaaacagtcattttgatgtttccttagattgtttgtataagttcaaaattaaaaatgacttttgactaccttaacatcaattaaattcaaacctagacttaattgacctattctccaaatgagaagtccgaaattccgtgaattctcaggaaaatatctgtattatctttatttgcagcttttggc

SEQ ID NO: 898137 - DNA, 456 bp, Homo sapiens
ttatcttaccacttctccttgcaagccaactgtgtcagttgccagctctactaaactcagagcaaaatgggcattctgagctgccagagagggtggcaagctacagaatggtaaatgtctgttagtacaatggcttcttatgctgttaaaactgcagcataaggttgggcagatgagcatgtggcttacagtgtcccaagtgagaccatatctgttacaccagttgctcttcatcacaattaaggatggagaagggccaagtttcgtggctcatacctgtaatcccagcactttgggaggccgaggtgggaggatcacctgaggtcgggagttcaagaccaacmatgatcaacatggagaaccccgtctctactaaaaatacaaaaaaaaaaaaaaaagaaaaattagccgggcatggtggcacattcctgtaatccagctacttgggaggctgag

SEQ ID NO: 898138 - DNA, 456 bp, Homo sapiens
ttatcttaccacttctccttgcaagccaactgtgtcagttgccagctctactaaactcagagcaaaatgggcattctgagctgccagagagggtggcaagctacagaatggtaaatgtctgttagtacaatggcttcttatgctgttaaaactgcagcataaggttgggcagatgagcatgtggcttacagtgtcccaagtgagaccatatctgttacaccagttgctcttcatcacaattaaggatggagaagggccaagtttcgtggctcatacctgtaatcccagcactttgggaggccgaggtgggaggatcacctgaggtcgggagttcaagaccaaccatgatcaacatggagaaccccgtctctactaaaaatacaaaaaaaaaaaaaaaaraaaaattagccgggcatggtggcacattcctgtaatccagctacttgggaggctgag

SEQ ID NO: 898139 - DNA, 617 bp, Homo sapiens
agctgttaaccagagggaaatcacttgtacttttctagcctgtagtcttatctgtagttacagaatttctttgcaacatttactattgtaagatgtagaacatggtgaaatgttgtagaaatcacggaaatgyaggcttgagatgatgccagctttgaagattataagtgtgggccctgttaaagagatgaatcacataaagtagaatatagcacacagacacacactcacacacacatagacacacacctttgctcatactcaaacattcacacacagaaacatacttacgctccccaaaataagaacacatgcaccccttttccgaacacttgctgtgccaaactttcaactctggattgagtttttcgttgattaaacacatgaaactgaaactatccaaataaactcttttggcagttattgaaagtcttttgaagtaaaccagaatgcttctacagtcaatgtttccatactgaatcagtccctgtcacagtgatattatgtttatttttatgctggaatgtagattttttctttctttgcaccagctctgcaaagataaaaataagaggtaatgaagcagaatgctatgggtttgaggacctcttccctgg

SEQ ID NO: 898140 - DNA, 610 bp, Homo sapiens
aggctctaggcaattgcatacactggtggacaaaatgaaaaacctaatcttcatgaaattcctattccagcaggaagagacagaaaacaagttattttaataagtaaatttyatagtgtgtttaaaaacaatttttttaaaaagggaaaaagtaggacagggctttagggactgctggggctggagtggggcaggttgcaatttgaaatagggttcagggtaggcttcactggaaaagtgtgatgagagaaaacatttgtgaaaggtgagggtgtgagccaaggggctgttgaggagaagtgagcagttcaggctgaaggaccgggtagggcagattcttgaggtggggatatacctgatgtgttcaggaaagagctgagaagtcaatgtggctgtacatcagtgagctgggagtggaggagtaagagaggaggttgaagaagtaaaggttatcttagtctgttttctgttgcttataacagaatacctaaaactaggtaatttataaaggaaagaaagttatttcttatagttctggaggctgggaccagctccaaggtcgaggcagcatctggtgcgggccttcttgctgttggcgactctgcagagt

SEQ ID NO: 898141 - DNA, 589 bp, Homo sapiens
ccttgggtaccttttgcttaatcctggaataggatgcataatccaggctctaatatattcattactttcttsttcagtttcccataagctataaacaaatggaaaattagttcccgtgtaatgctgtatctcaggagtaaacaacctgtgtctctggggcccaacagccttggagatgggtataatctgcaatatccccatgcctcccatggttcctgatacagccagtgcccagtaaatattggtggattgatgagtagcacagcaccagggttacttcaccggccacgcggcagatggtgacgtggacctaaaatcaaatacagattttctgcctgtgctgccaccatcctagatcttgggctcctttcttgccctcttttgaaggtaagaaatctcctttattgggagactcttgtctgaaaacaactctatttctaggatcaagtaacagaaagtcattaaatctggacacacaacaggtcccgtccttttcatgctgcagagatgaaacagaaatgtgtaggaggacttttcttcacaacaggctaccttctctttcagtaatgtgaaaagattttgtaattct

SEQ ID NO: 898142 - DNA, 671 bp, Homo sapiens
catctgcaagccaaggagagaggacttggaagaaaccaatcctgctgacacctggatctcagacttccagcctctaggactgtgagataataaatatctccagtctggggtactttgttatggyggccccggcaaactaataaagtctgattctggtttggggctgctattaacatcctcatatgttgatacccatgttagtatccgtgttcaaacacttttctctggtacatcagaatctctggggtatatacttcttaaataggagtaagtggttggctaaaagtttgtggctgagccactttattagatattgctcaagtgtttccaaagtaattgaactaatttacattatcttcagcagggtattcaaattccaattgtcccatgtccttgtcaatacttggtgttattaccagacgttcaaatttttgccaacccaagggcacataattgttttatgtatatttccctgcctattaatgatgtagaacattttgtcacatgtttcttgttcacttagagttccgctgttgagaagggtgtgttcaaataattgccccatttttcttttgtgttatctgtcatattcttatcgattgattcatattggtctggaagttgcaaacgtctttcctgactctctctgtttgttgttgttgttgttgttt

SEQ ID NO: 898143 - DNA, 491 bp, Homo sapiens
cctgccaactgccctcctagcagctgtggcatcttaaggggaatcaggccagcacatctctgtgtccagcacaacgcaacacgttttgtggacacacacactacatgagccctgaagttcttaccctccacccactcccacctaaatttccgcaggacatcatgatagaattgccgtgcaggctgaaaggaggtgaagagccccctctaagggacctcctggtgctcagtaatgcttttattttcaatcacatactatggtaatcatatcagcacaagcacacaaatgtggttaagtgatgaagctgaatgaaactttcctaagatgtcaatcataaattccatcaaccatactaaagactgatttatcttgctcttctctctggagaaaatattacaagattaatatcaatgaagaagcagaatatgcaatcagaaatacatagggaaaaagstgggttaatagaagtattttcctggattttgtgatgt

SEQ ID NO: 898144 - DNA, 584 bp, Homo sapiens
ttagaaatactcacctacctctgtgaaaagttggaccaagagcttctgccctgtgagcctagggtgtggagagatagcttcacatctcacggacttgaacattatccactcattaaagacggatgagtctttttgctccacactagtaatagcatgacatgggtcatgttgcaatttgtcattgatatttaaaatacatatttgaatactgaaagcctgtgcatgatttaccattgcacctataaattaaactaggtttaagtttatccttataataatgatgctttcctataatcctatgcttgcttgagtgagaactttgcataactagtggtctttcaacagtttattgcatatatagtttcttctttcatgtatgtccaattgtgaaaggaaaataattgacaacatttccaacaagttcctgtcattatgtctatcattaaatcacaaggtaatcttgttccacagcaggacacatctcaataccctgtccacaggaagagagagagtacatgtcactyaaccacggcaaataatggctttcactcaactgttgcattcttctcttgagaccactgttt

SEQ ID NO: 898145 - DNA, 593 bp, Homo sapiens
atgctgaattttattttagggagaacaagctgcaatcataataaagaactgtatttacagctaacagcaatacccacgtttctctataggtcttacactacaatctgaaattgcatttcatgatttacaaggtctgagacataaacagtaaaaggtatgtttctgggaattttctcattaacagccacaaaacaagcaattttatgtggaattgctttgttcaccttttctgaaatatgtgcaagatctctctttgatgttgaatccattctgatttgaacatctcaatatttttgatgttccatgaactcctccacaccccacctatctccgggaagctcagacctccctacctacttggtgaaaagaaggaaatttagaacatttgagctcgcaggctgcctacttaagactacccgaagaatgagctctgcttacccctgttccttcgtaggtacatgaatgagtcrtcaaaaattcactaatagttgattaatgcagttgtgacagtatgaaaaacaacaaaaggagtgcagtgctgaagaaattctagatcttgcagatttaatgcatccacttatatccataactca

SEQ ID NO: 898146 - DNA, 650 bp, Homo sapiens
cttcttcttcttctattatcactatattcactcttactgggcattctaataaacttactaggcttccattactatctacatactaatcactcaaatctataytatactcacagttcatattgctcactttagtttcaaatctagatatcgcactctttattgatcatctctagtctccatttgaatatccaacaagtatcacaaattcaaaaggtctaaaactgagcttgttgcattttctcccaaagctcctatttcaatgttatctgtttctatgaatagcaccatatcccttcagttacatgatgcagaaagctaaacatttttcctcttctattttcttcaaccctacattcagtcaccatagctagttaatattatatctttaacatttttcaaatttgtcgtcagcctctgttctctaacacttcagtattgaactccagtttagactactatcatcttttatctgtttactccagcatcttgtatcagtcttcttacctccacactggcctcctctttaatccatttttcatgctgtcagagtgaagtttttaatggtaaaatcggattacattgtgctcaattcagcaacacatataccaaaattagaacaattcagagaagactagtatggcccttgtgca

SEQ ID NO: 898147 - DNA, 647 bp, Homo sapiens
cttactcttttttctttttttgagacagggtcttgctatgttatccacactggcctggaacttccaggctcaagggatcttcccgcctcagcctcctaagtagcttggactacaggtgtatatcatcacacctagctagatccttcttattctaaggtctcttttagaaactgaaatttgatggttataattagtgcaatttttcatctcttaccttattagagaataaggataagatagactagtacatttaaaaaaaaaaaactaaataatccatgtaaatacattggagccaaactgtttacttctcagtcttcacttagagtctttgcttctgtgcttttagcaaatagttgctaatgcctctcacactttcttaaaaatgcagaagagaatgatatgttacctgtctccaggagatggtcaatgtgggaatgtgctcatggaaaacctcagttcataaaggtgtctgtttatttctcatgaaactctttagccaaacactctgctaaatttctgtatcaggaattaagcataaaacgctccactttctgttgttgcctatgactcttaatattttgagaactaacaaaaggtaaataaaatgtmaggaatcaagattaaccattagaaataaaaaatgaatc

SEQ ID NO: 898148 - DNA, 586 bp, Homo sapiens
aaaatctaaaatcgacaccctaacatcacaattaaaagaactagagaagcaagagtaaacaaattcaaaagctagcagaaggcaagaaataactaagatcagagcagaactgaaggagacagagacacaaaaaaacccttcaaaaatcaatgaatccaggagctggttttaagaaaagatcgacaaaatagatagaccactagcaagactcataaagaagcagaagaggtaagaatcaaatagacataatacaaaatgataaaggggatatcaccactgatcccacagaaatacaaactaccatcagagaatactataaacacctctacacaaataaaccagaagatatagaagaaatggatacattcctggacacatacgccctcccaagagtaaaccaggaagaagtggaatctctgaatagaccaataacaggctctgaataattaatagcctaccaaccaaaaaaagtccagggccagacggattcacagccgaattctatcagaggtacaaagaggagctggtaccattccttctgaaactaytccaatcaatagaaaaagagggaatccttcctaactca

SEQ ID NO: 898149 - DNA, 651 bp, Homo sapiens
ccatgatcaagtgggcttcatccctgggatgcaagcctggttcaacatatgcaaatcaataaatgtaatccatcacataaacagaacctatgacaamacccacatgattgtctcaacagatgcagaaaaggccttcgacaaaattcaacagccattcatgctaaaaactcccaataaactaggtattgaaggaatgtatctcgaaataataagagctatttatgataaactcacagctaatatcatactgaatggggcaaaaactgcaagcattccctttgaaaaccagcacaagacagggatgccctctctcaccactcctattcaacatagtgttggaagttctggccagggcaatcaggcaagagaaagaaataaagggtattcaaataggaaaacaggaagtcaagttgtccctgtttgcagatgacatgattgtatatttagaaaaccccattgtctcagctcaaaatctccttaagctgataagcaacttcagcaaagtctcaggatacaaaatcaatgtgcaaaaatcacaggcattcctatacaccaagaacagaaacagagagccaaatcatgagtgaactcccattcacaattgctataaagagaataaaataccgaggaataccacttacaagggatgtg

SEQ ID NO: 898150 - DNA, 556 bp, Homo sapiens
aaaaaaaaaaaaaaaaaaaaaaaaccctaaaatatgaatagtaaacctaaatgaagttcaagaaagtccaaaatgtcttgatttatgcccacgatggccactcagatttgttttttttttcctacggkgccctgctttgcagtgtcttaggcccactgcccattactgaccctgggatggtttgatctcccactacctctttgggataacctttaggttgtgcttttgatcaaaatgcaatgatcatgcccaaaactcatcgtaaatttcaggccaattcccaaaacatcctgggtaggggagcccaggcacccacagccatgaccttgtatccccagagtgttcccatttcaagcacactcaagcaggtgaattctcctgatggaagaattcaaaggacagaaatcaatttttttttggctgttactgttttctctttgttctacacttagaccccatactttttgttaaaaatggaaaagagttttggaccactgggctttctccagagtaaatattagactagatggttatgaagctcatttggtcagaatat

SEQ ID NO: 898151 - DNA, 610 bp, Homo sapiens
gtgatgagggtgaagtgcaataaaaactatagtttcattatgtttatgactttcagactgtatgtcaattattttgttaccatggccaccagcggtaacagcctccatacgattgtttccccacagaggctgaacaggaggaaagggatatgaaacaggaatgaatttcccattttatgcccttttcctgtgttggaggttttggaaaggagtaaatcaagtttcaagagtcatgtagagtcctctttgaaaaagagccagagagtgggaaaaaaaaggagagaggctgtctgtcttctggttttcacttctttcaagacaactgttagagacccttaccttccaggggcagccaggaatattactacatgttaagcagttgagctacagatgtgaacgaaaagagccttctgttgcccaatcctctctccatggtttgccaacatgatgatcagccaaaactttactctctgctcttctcaagaactgccatggaaagctaaatttktggaagagggttgatggcagctgcttaaatggtgtattatatagctgccacgtcttctgcacactccatgagccacgagggcatagcaatcaccaaagtacg

SEQ ID NO: 898152 - DNA, 594 bp, Homo sapiens
cagattggaaaggaagaagtaaaaccatgtttgcagatgacatgatcctgtatatagaaaaccctacagaacccacaaaaaaatctctattagagctaataagtgagtygggcatggtggctcacacctgtaatcccagcactttgggaggctgaggcaaaaggatcacctgagctcaggagtttgagaccagcctgggaaacatagtgagactcatctctatttttaaaaaataaaataaaactctaaaaaaaaacaataaaaaatagagttaataaatgagttcagcaaggttgcaggatttacaagctcaatatacaaaaatcaagtatggaaaaaacagtccaaggtggccaaataggaacagctccattctacagctcccagcgtgagtgatgcagaagacaggtgacttctgcatttccaaatgaggtaccaggttcatctcactggggcttgttagacagtgggtgcagcccacggagcagagtggggcattgcctcaccctggaagggcaaggggtcagggaactccctttcctagccaagggaagctgtgacagacggtacctggaaaatcaggacactctcaca

SEQ ID NO: 898153 - DNA, 646 bp, Homo sapiens
ctcagctctgaagactgttagccccctgatcccactttgcactctatttctgtgtctttatcttcaattcctctagcaccgctgggttggggcctccatgactgaactggtcttggtagaaggtctcacttttttccccaggctggaatgcagtggcatgttcacagcacactgcagcctcaatctcctggctcaagcaatcctcccacctcagcttcctgagtagctgggaatacaggtgtgtgtcaccatacctggctactttttgtgttttttatagagagagggctgtgccatgttgcccaggctggtctcaaactcctgggctcaagtaatccacccgccttgggctcctaaaatggtggattacaggtgtgagccactatgccggaccaactgcctaattttataaacaaaatgttctcttgaaaatctcagagctatacaatagagtagacctgttccccaaactggtgtcctgggaagagcccagagactggcttcggtggcctagaattccagttccagcttgtaccaatctggtttctcttgaaacatattcccattttttagggaaaaaaaatttcccctaaattytgaagacccttattgcagtgacattctgagggcccttattgatcagatt

SEQ ID NO: 898154 - DNA, 608 bp, Homo sapiens
cttatttcctaatactggcagtgtctgtattactccaggttggggtattaattggagaggtacagattggggggtgggtagcccagttagggggcagttgcaatatgttaagggaagaattgcatgcaggggtcagggtctgtgagaaaaggaatgggggttgggctcttgctaaatgggtgaccagggtcattggactctgggctgcttatgttgaagactggaagggtggtgctttaatgcctaactggcctgccataaagattcttctacggagactcagaggagaccacccagtggagaagaccggggccaatccactttcccattccttcaaaatgtaagccccaccctctgaaatcatgttcctttgtcaccaccaagctcatactctcagctttgtaatttccttcaagaaaacactggaagtcaggttttgtacaaaaatatatttatttggtgtaatagttacaaaatattcatttccacaataatattttagcaatgcattggaatgttaaaaaaaattctttgtattaatgattcttgcaaagaccctcaaaacatcccaggggtagaactgtgrttcaagaggaaaagcaatttcc

SEQ ID NO: 898155 - DNA, 619 bp, Homo sapiens
ggtctcattctgtcacccactctggagagcagtggcgcaatcacaactcactgcctcctcaacctctgcaggctcagatggttctcccacctcagcctcccaagtagctgagactacaggcatgcaacactatgccaggctaatttttgtattttttgtagagacagggttttgccatgctccccaggctggtcttgaactcctgagctcacacgattggcccaccttgacctcccaaagttctgggattgcaggtgtgagccatcgcgaccagcaagggtcttttcaaagatagtctggtgggcagggggctagcgtatggggagtactaattgcttgagtcacagataaaattacaggagcaattggtgggtctaggtggagccattggccatccaaaaaatctgaaaagacatctcaaaaggccaatcttaggttctacaatggtgatgttatctgcaggagttactggggcagttgcatatcctgtgacttctgcaataatggctggcaatcatttatgtctacactttagcagaattcagactcctctatcctcctagcctggtggtctctcattarctttacaaagtagctgagatgtggggaaggcctatta

SEQ ID NO: 898156 - DNA, 590 bp, Homo sapiens
ggacacttagggcattaggaatcagcagagaagtgttctttgctgtttagctgtaggacaggcaggatagtggttaaaacaatggactctgtagccagattgccaggatttggatgcttrgatgttttgaaagcttatttcaggtctctgtgccactgttttcctatcagcaaaataggtgtgaattaaactagttgacacaggaaaagggcattgaaaagtgaggtgttagcatatggtaagtatttaataaactcattgttatagatattgatagtgagaatatagtgatcagaggatgctaaacagagacccaggatgtggactattgaagaaggactcccttaattgtcttcatgcattcagatgaagacatgtgatagagatggaccttcaggaatgcctgtgctgtaaataaggaaataaaaagagtctcccggaaacagggaagcaagagaccccaggatcttcacatcagccagaggtgcaggatgctctggaccccagaaagaataggagaaagatcccaggtatgacacatacccagagacaccatgctcatgttctgcagatggttcagagcctgcagt

SEQ ID NO: 898157 - DNA, 654 bp, Homo sapiens
ctgtcttaagtgattcccaaggaacatagcagggtcaggtagaagaatgttctgcaaatcgcaagttctggagaatggctacattcttcatcttcatctcagatttattcagagatcacaaaagtcatagaartaatggaaagagacactaagagggagagatgaagtcacagcaggtcgcacagctggtttatggcaatccaggactggagaagaagtgagaggccacacaggacttgggcaggtcattccaaagactgccatgcaagttcaaagccgtggggtccgaactcaaatgtgagagaacaaaggaacctcagagagcattggtgttccagtgctatactgagctatacctctgtatccccaggaaaactggttgaaatcctgatgggggcactgttccacaacccaatgtcctgactcagaatcttgggataaggccaggaaatctgcattttcaggggtagtcctggtgattctgattcatactcagtttggaaaccatcagtctagtgcaaaaggtaagctgggtttcatggaagaaaaaatgatttgcacagatttacctgacacacagcctaaagaaagagctgaggatgcaatgctcaaagatgtgcaatgcattcctgtctggttgctggtccctactgg

SEQ ID NO: 898158 - DNA, 590 bp, Homo sapiens
gtgagtctcatcttggatatttttgcctccctgacaatgtttggagaagcaggtggagaggagaaagatggaaagggtctgtgaatgagtacaagagggagaatcatgcatgaaaagtgcctactctgttctaggcactgtgcacagtgctttaaatgccctgacccatttcatcctttaacgacgcatagatactatcattaacacttttacaggcaggaacattgaggttaggtaatttacctaaggccacatagctagcaagctgacacttaagtcagctgtgtctgaggtttaattctgtcttctgcaggtaattgtgtgggctgctgacagggccctggagagtgtcagaaagctcacagcttctgcaggagagaggagcttcccctctctgggcctccatctcctccagtgcagtgaatcaaatgagcaccagcaacatctccggagatggggtttggagggctccctagagaacagaaatagtgcmggggttttgagggactgttgtgccagccagggccaagtcaaagctgtcactcacactgactcattagccctaagttcgtctttggggcatgaggtac

SEQ ID NO: 898159 - DNA, 563 bp, Homo sapiens
cttttgggacagaaacactcaaattgggaacaaatatgtaaatattatgtctcactctaaagagttgaagttgyttttgcactttcttgagttatgagaaaatgagtgaacccacctggtcactgcatgactccagaataattctttccccttctctgggccccagttttctatcttcaaaataaatgattggatttagaaaacctctcaggtcttttccagtttctgacattctagtttttgtttttctgccattctgctcaaccactttccccttctcccggctgtcaggagctgtccacggttctgaagagcttgggcccagagagaatcaaccatattagatctggccgaattacagttgcacttttttccccccatttgtcagttgtcatggtttttaaaattttaactttatttatttttaaattgacaagtaaaagttgcatatatttatggtaaaccacatgatgttttgaaatttcgtgcatgcatgtggtaagtctataatcagagctgtgggtgacatagccaaaatctaagatggaaattctgcctccaag

SEQ ID NO: 898160 - DNA, 602 bp, Homo sapiens
gagaaacatgactcatttttaaattaaattttatgcattatgtgagatactggtcaaaattcatatttttccgtatggatgaccagttgttccagccacatttgttgaaaagattgttttacctatargattacattggtttcttattgaaaatcaaatgaacatataaatgtgggtttatttctgggctccctattatctcccatgaaattatatctccctttatactaccaacctgtcttggtgacagtatactagctttacaacaagacttgaagtcttgttaagtcctccaactttgtttttctttgtcaagtttgccttgaatatcctaggttctttgcattttcatttccattttagaatgggcctatgaatttctacaaataaagcctgatggaaattgggattgagattatcttgaatccatagaattaacaggggagttattgattggggagaattaacatcttaacaacattgagttttctagtacagaagcattcatttaagtcttccttaattaatctcggtaattcttttagttttcagtatgtaagtattgccaatcttttgctaaatttattcctaagtattttttt

SEQ ID NO: 898161 - DNA, 543 bp, Homo sapiens
ccccttccacctgcagggccagggaggctcgttgagatttttttttttttttttttttttttgagacagagtctcgctctgttgcccaggctggagtgcagtggcgcaatctcagctcgctgtaagctccgcctcccaggttcatgccattctcctgcctcagcctcccgagtggctgggactacaggcgcccgccaccacacccggctaattttttgtgtttttagtagagacagggtttcaccgtgttagccagaatggtctcaatctcctgacctcgtgatccacccgcctcggcctcccacagtgctgggattacaggtgggagcccccatgcccggccgacccaccctgagagcatgacctctcagttgtgctggggatgccacaggggcctcagggctgtgtaccctgcggtgtgaggcgtttgcttctcttgagaggtgtcctccttcccccaggatcctccttcccctggggtccacttgttcgtagcttttggkggcttccagaatggtttctaatcatttgtctgatgaggct

SEQ ID NO: 898162 - DNA, 574 bp, Homo sapiens
aaatatccctctctctcagctgatttactgctatgttgacgacggaaaagggtgtgttgtcggagggaaggacatgggtcctacagcagtgtgggcatcttgggagcggagcgtgtagcaaacacaggggtcttgagggaatgtggtgagggaggcctgagacaggggcaggactcacatctcatgcatctagtgaccccaggctaggatttgggtctttatcttgaggttcatggaaactcttaatgactcttatgctagagagcagagaggctcagcctagcacttcagaagtccctctggttgcagtgcggggaggttagcctagggcatgggctgggtggatctgtggtcctgggaataaactcactttccctgagctgggctgtagaaggcagaggcactcgcagcctcagaattattgactccaccagggcttatctcctctggactcgcttggttctcagttggtgtgtgagggtggatatttgaggtaacrtaatagcagcatcctttgctagtcccagatgctcccaaggagcctggctgaaggaggcaggtgggtcctcagcca

SEQ ID NO: 898163 - DNA, 581 bp, Homo sapiens
agacaggtcttagttcatttagaaagtttattttgccaaggctgaggacgtgtgcctgtgacacagcctcaggaggtcctcatgacatgtgctcaaggtggtcagagcacaattttgttttatacrttttagggagacataagacctcaatcaacatatgtaagatcagcattggttcagtctggaaaggcaggactacttgaaacagagagggggcttccaggtcataggtagataagagacaaatggttgctttttttgtttgttttttggggacggagtttcgctcttgccgcccaggctggggtgcaatggcgcgatcttggctcactgcaccctccacctcatgggttcaagctattctcctgcctcagcctccccagtagctgggattacaggtgcccgccaccacacccagctaatttttatatttttagtagagacggggtttcaccatcttggccaggctagtctcgaactcgtgacctcaggtgatccatccacctcggcctcccaaaatgctgggattacaggtgtgagccactgtgcccagctggttgcatttttgtttttttttgagt

SEQ ID NO: 898164 - DNA, 606 bp, Homo sapiens
aaagccttcaagaaatatgttatgtaaaccagccaaacctacgarttgtaggtattacagaggaagaaggaaaaaaagttaaaagtataaaaaatatatttgaagaaataattcaagaaaacttctctggttttgtgagagattaagccatccaggtaaaagaagatcagaaaactcctggaaaacacattgcaagaagaaatacactaagacataaagtcataagactatccaaaggcaatgtgaaggaaaaaattctaagagtagtaaaagagaaaggtctaatcagctataaaggaaatgccatcagattaaaagcagactattcagcagaaactttacaagccaaaaaaattggtggccttttagcctccttaaaaaaaaatgggccaggtgcagtggctcacacctgtaatcccagcacttttggaagccgaggcgggtggatcacgaggtcaggagatcgagaccatcctggctaacacggtgaaaacccatccctactaaaaatacaaaaaattagccagacatggtggcgggcacctgtagtcccagctacttgggaagctgaggcaggagaatggcatgaacctgggaggtggagct

SEQ ID NO: 898165 - DNA, 600 bp, Homo sapiens
tccctctcggacagggcccctcatgactcactccccctcctaccgggcacgtcccccmccttctctggcatgcacgggacactggtccctctctgtctgctgacctgcagctccccttcactgtctgccccgcagagcccagcaagtgaggagtttgtttggctatcactgtgcccagagtcagcactgccgttcagcttcctcagcacccactgggatgggcacagcgttatgtcaggacattcgccatccctggggctggtccctgagctcctcccccgggccttctgtccctgcacctccagccaggatggcaccctgggctatgacggaccctccgctacctcagtgccgaagccttgttttcatttccatccaaacgtgctggcactgagcctcctccctggtactggcagtgtcggctcatgtgacctgcagaccaggatccatcctggtcaccatatgctgagactgtgcagctcacagacagtctcccgctgccctgactcagcaaagcatctgggcagtgttctgcttcctcgtttcctgcaagtgggttttgtagcaaaacaaggtctgcactgctgtctctgtggtcct

SEQ ID NO: 898166 - DNA, 668 bp, Homo sapiens
cctcatcagaacctcagggaccctccaygatgcgggatgatctcccttcatcagaactgcagggaccctcaaccatgcaggatgatctctcttcatcagaacctcggggaccctccaccatgcgggatgatctcccttcatcagaaccttggggaccttccaccatgcagatagtctcccttcatcagaatcttggggaccttctactatgcggatggtctcccttcatcagaacctcagacttgactcagaaggtcctggaccagccttcttagggaatcagagtatactctgagcttgtggttaatgggctccttctctcctcaccctcagccctgctccacagcttccatcatccacactttgggtcgatcagcaggcttctgacctggccctggaagacccacagccctgaagtacaatgtcaacaaccagaccaagtgtagctaggtaggtgacactgacaccaatgtcctcgagtccagatctttcttgactgctgcgcaacaagcttacagaaaccatgcctccaaacactggcagtcaggactctgacttctccatggacccctgctaccccctgaaccaacggagcacttgggctgctgctctaagccatgtagcctggcttgtgggcacacacaacgtcctgcaacacctgggactca

SEQ ID NO: 898167 - DNA, 668 bp, Homo sapiens
cctcatcagaacctcagggaccctccacgatgcgrgatgatctcccttcatcagaactgcagggaccctcaaccatgcaggatgatctctcttcatcagaacctcggggaccctccaccatgcgggatgatctcccttcatcagaaccttggggaccttccaccatgcagatagtctcccttcatcagaatcttggggaccttctactatgcggatggtctcccttcatcagaacctcagacttgactcagaaggtcctggaccagccttcttagggaatcagagtatactctgagcttgtggttaatgggctccttctctcctcaccctcagccctgctccacagcttccatcatccacactttgggtcgatcagcaggcttctgacctggccctggaagacccacagccctgaagtacaatgtcaacaaccagaccaagtgtagctaggtaggtgacactgacaccaatgtcctcgagtccagatctttcttgactgctgcgcaacaagcttacagaaaccatgcctccaaacactggcagtcaggactctgacttctccatggacccctgctaccccctgaaccaacggagcacttgggctgctgctctaagccatgtagcctggcttgtgggcacacacaacgtcctgcaacacctgggactca

SEQ ID NO: 898168 - DNA, 668 bp, Homo sapiens
cctcatcagaacctcagggaccctccacgatgcgggatgatctcccttcatcagaactgcagggaccctcaaccatgcaggatgatctctcttcatcagaacctcggggaccctccaccatgcgsgatgatctcccttcatcagaaccttggggaccttccaccatgcagatagtctcccttcatcagaatcttggggaccttctactatgcggatggtctcccttcatcagaacctcagacttgactcagaaggtcctggaccagccttcttagggaatcagagtatactctgagcttgtggttaatgggctccttctctcctcaccctcagccctgctccacagcttccatcatccacactttgggtcgatcagcaggcttctgacctggccctggaagacccacagccctgaagtacaatgtcaacaaccagaccaagtgtagctaggtaggtgacactgacaccaatgtcctcgagtccagatctttcttgactgctgcgcaacaagcttacagaaaccatgcctccaaacactggcagtcaggactctgacttctccatggacccctgctaccccctgaaccaacggagcacttgggctgctgctctaagccatgtagcctggcttgtgggcacacacaacgtcctgcaacacctgggactca

SEQ ID NO: 898169 - DNA, 677 bp, Homo sapiens
cttggaaatagagggactagcatataaggaaagtctgaaaaactgtcacagccaagaggagcctaaagatatgatgactaaatgtaaygtggcatcctagatgggattgtggaacagatgtaccatgctaaggtaagaggttaataatacaggaaactgcgtgtaggccgtatgagatctctatattatctttgtaatttttctgtaaatctaaaattgttctaaaataaaattcataaaaataaaagtaaataaaaatcataaataaatcatatataattaattaaataactattattttaaaagtctatgagcaaaaaattttttaagtagagcctgaagacattaccattaccattaaccaattgccgttggcttgttctggttatgtctacccagataaaagaaaaattttgtctttgcacaaagacactgtcaggttgagtgaacaggcaacctatagaatgggagaacatttttgcaatctactcatctgacaaaggtctaatatccagaatttacaaggaacttaaacaaatttacgagaaaaaaacaaacaacaccatcaaaaaatgggcaaaggatatgaacagacacttctccaaagaagacacttacatggccaccaaacatatgaaaaaaagctctacaccactgatcattagagaaatgcaaat

SEQ ID NO: 898170 - DNA, 633 bp, Homo sapiens
agacatggccatgcctttgacaagcccgtggtcttgttaaactgcagattcattttcagatgctctggaccaggacctgagagtctgcatttckaacaaactctcaggtgatggctctggtccaggtaccatactttgagtagctcagtgctaaaggacataacccgcattgaaaaggaaaagccaagtacatgttctaagagctcattggaaagccatggatggttgtgaaaatgcatgctatggaatttaatgctcaattctcttggtttttcttcagcaatgtttttttgagaaaaataactgttaacatcacgactttttaaacctgcctaaggagagatgttgatactgtgtaagtgtgagaaggcatatccaatgcagagggtgatggagagaaactcacccctctcaactggcattcaacagagcagagctgagctagatcactacccacctgggcaagctgccagcaaagcacaaagctcaaaatgtatcaggagatgctcagatctgagataggaaatcaaccttacagccacaacttcacttgaggtgctcctatctgagataggaaatcaaccttacagccacaacttcacttgaggtgctcaaaggcagtactttgagctc

SEQ ID NO: 898171 - DNA, 534 bp, Homo sapiens
atgtagagtttctccctagttccccttaaagtgggggctccagaggaagactagttcaactaaaaaggaaattaagaagcaacattttctcacacatcttggggtattgacaaagttgcagccctgttacacgggtatttctcacattagggctgacaatctataaagtacattttctggatagtaactcttaattccctattaattcataagaataaaccctctatcctccaataagccaagtcaagaaattttagtgaagaaaggaatctgggccaggtgtggtggctcacgcctgtgatcctggcactctgggaggtcgaggtgggtggatcacttgaggccagaagttcaagaccagcctggccaacatggtgaaaccccatctctactaaaaatacaaaaattagctgggcgtgaggctgaggcacgagaatcayttgaacccaggaggcagaggttacggtgagctgagatcacaccacagcactccagcctgggtgacagagcaatactctgttgaaagaaagaaac

SEQ ID NO: 898172 - DNA, 576 bp, Homo sapiens
aaaagccttgtctgtgattttaagaacttgtagctttgaagatttctttttctttctttctttctttttcttttctttctttttttttttttttgcgacagagtctttctctgtcamccaggctggagtgctgtggcataatcttggctcaccgcaacctctgcctcctgggctcctgggtccaagtgattctcatgcctcagcctcccaaggtgctgggattacagacacctgccaccatgccctgctaatttttttttttttttttttgtagttttagtagagatggagtttcactgtgttggccaggctcgtctcgcacttctggcctcaagtaatctacccacccgcacctcccaaattgctgagattgcaggggtgagccactgtgcccaaccagaatcttcagatttctatctggtgaagttggggagatgttcttgaaaggtatagctgcagtgagcatgtgtgattggaaagagacttctaaccttttatcttatgaactgcccatcccatatgagttagaaattctctcataactccctaatggaaccagtgggacaacatgttatt

SEQ ID NO: 898173 - DNA, 629 bp, Homo sapiens
ctcactgcaagctccgcctcccgggttcacgccattctcctgcctcagcctcccgtgtagctgggactacaagcacgcgccaccatgcccggctaatttttgtatttttagtagagacggggtttcaccgtgttagccaggatggtctcgatctcctgacctcgtgatccgcccgtctcggcctcccaaagtgctgggattacaggcgtgagccaccgcgcccggccccctttttctttctatccaagtttttggtagctctcttcaacattatcttccaatcctttgactacaattttcatttgttctataatatttttaagttccaaaaactgtttttttctctaaatactcctcttttctttctaaaaaatagcatctgttattttttgattctcatatctctgcctatatttattacagcttgtttttaaagttttcttcttccattttaaattttcctccagatttcttccctgtcatttgagtatctagtttctatactagagtatttttttttttagatgtctggtgatccttagttacctttttatccatcagaataatyagatcatgttgcagtcgcaaagagggtagaaatttcagtagtgtaaaataaccatgttcat

SEQ ID NO: 898174 - DNA, 643 bp, Homo sapiens
tggaaatattatctgtttcttgccagagcactctataccaaagcgtcaagatacttcaacgcacagggaatggattgttggtaagggtttrctttgttttctgtcatggggttttgttataaaataccacacaaagaatgctagaaatgtggatttttgtaggtactttaagttgaaaaaaaaagcctcagttatctacctattttaaatagcaaattgggctttcctactatttcctttctacaagtacttctctaagtgcagacctcatcttagcaggctattagatacataggtgaaatctatgttttgatgtgtaggatgcaagcttggaaggtacattggtccctttcacagagataatgctgcctaacacacaatcccaaacctcagtgccttctaagtataaatgttcattttccctgctggtttgacagcaggcttctctacacatcttcccattgagagacccggcctgaaggagcagctcctgtctggggcacctcatgtcctcatagtggaggacaggagttcaggggatgagtggaggcacaggttgtcctttaagctcagaatgggcaccctgccccttcaccagcgttccattggccaaagcaagtcacatggtcacacacatcgtcgt

SEQ ID NO: 898175 - DNA, 622 bp, Homo sapiens
gataatcaaaagaagactgatactggaatgtacaacttccaagaaaaagaaagaaaggaaaataaaggagagatgaatccagtatacagcaggacaaaaaaaaagtcaatacaaagtaggacaaataggaggcacaacataatataaaaacagaccccaaaatatcagtaatcaagataaatatcaaaggtgcaaacttaccttttaaaatcagttacagattgatttaaaaattccagttatgtactgattgcacttctaacatataatgacagagagagtaaaaggatggagacctgtataccaggaagatcctaaccaagcgaaagcaaacagagctgtactaatacacaataaaattgacttgagacttatttaaatggccataattaactttcaacgtcgattgaagaagtaggaacatactcaagaagggaaaataaccattttcggtatttcctatcacttagatggtgttgcatacataataatgttcagtgattatgaatttttcatgatattgtggcaactgatttattcttttttaaccttcagtgccttgmttggatattttaaaagtcctccttgaaaaagagcatttggaaacagctatgcatttgta

SEQ ID NO: 898176 - DNA, 616 bp, Homo sapiens
tagtattttgtttgcagcaataaaaaaatagtgcattcctacaccgcaattcaggctttgacagtgaaggtgtggtcccaggagacctggagtaggaacatcctgttggatgtgtttcaaacacacatataaaggtccaaggcctctagcttctgaaattatgttctccactttgctggtggaaagcagcctccactcccctgaagaccatggaaagtcctattctctagtggatgctttgcaagatgatacttgtcttcaaatctgcatcaaactcacttcattgctacttgactaaaactagggctgcatttaagcatgacttgatcaaagaagtcttgttctcccttcaagactaaggaggttattcacaaaaggagctatgagatgtggtcaatagacacaataagtaactcagaaaacatgcttgggaatgggtcttgtgggtgctgcactggagaaggtggtgaatacaaaactggtaagcaartagttttatgactgaggatcacagcaggatgctgggcaaggtcacgggccagcagacatactggctaagaatgagaggaatctagaattagtggtagaggaaggaaatgatgaatagcaattatgg

SEQ ID NO: 898177 - DNA, 590 bp, Homo sapiens
ctatggggagctgcaaattaaaactccaatgagatatcactatacacttaatagaatggttaaaataataccaatactaaaggcgggagagaatgcagagctagtggcaacctcagacaaggctggtgggaatgcgaaatggtacagcccttaggaaatcacgttagcaatgtcttataattctctatctatatctgtagtatcgtccagcaatctacttctaagaattatactagataaataaaaagttgagtgcaaacagaaacctatacaccaatttacgtagtagctctgttcataacagcccatgtttttcaaaccaaaatgttttcaactggtagacgtatacaaaatggaatatgaatcagcaataaaaatgaaccagttattgatacaccccgtaagttgtctgaatctcaaagttatgatactgagtgaaggaattcagtcttgaaatgattctccygtttgccagaggctcactgttaggaaagtatacggttgggggattatataactatgaagatgttttctaggatgataaaaccatcctgttttttaatttgtgatagttacacaaatctgtacag

SEQ ID NO: 898178 - DNA, 651 bp, Homo sapiens
cttaaaaatacctgagaattttctagagctagacagtttagaaactatatattttgaaagtacaatraatccctaaagggacatataaaaataacaaaataaaataaagtgacgcctagataaatttagctgacatttcaaagaactaaaagcgatgttgaaaacctaatacttgttagtgggaaaatacaaatcacaaaggaatacacataccacatagtgctttagttaatgacaggcttcatatatgacagtgttcccacattatagtatcttatttttactgtatcttttttatatgtttaaatgtttagatacataaataccattatgttacaactgcctacactattcagtacagtaacatattatacaggtctgtagtgtaggggcaatagattacatcacatagcctgggtttgtagtaggctatactatccaggtttgtgtaagtacactctataatgtataatattgcacaaaatttccttcagtctatgggtatgaggtgtatatgaagcatgcatgaattttgtttcatctttagttccatttccaacatatctcattatgcatattgcaagtattccaaaaataaaaaaaatctgaaatcagaaacacttttgatctatgcatttcagataagcagta

SEQ ID NO: 898179 - DNA, 651 bp, Homo sapiens
cttaaaaatacctgagaattttctagagctagacagtttagaaactatatattttgaaagtacaatgaatccctaaagggacatataaaaataacaaaataaaataaartgacgcctagataaatttagctgacatttcaaagaactaaaagcgatgttgaaaacctaatacttgttagtgggaaaatacaaatcacaaaggaatacacataccacatagtgctttagttaatgacaggcttcatatatgacagtgttcccacattatagtatcttatttttactgtatcttttttatatgtttaaatgtttagatacataaataccattatgttacaactgcctacactattcagtacagtaacatattatacaggtctgtagtgtaggggcaatagattacatcacatagcctgggtttgtagtaggctatactatccaggtttgtgtaagtacactctataatgtataatattgcacaaaatttccttcagtctatgggtatgaggtgtatatgaagcatgcatgaattttgtttcatctttagttccatttccaacatatctcattatgcatattgcaagtattccaaaaataaaaaaaatctgaaatcagaaacacttttgatctatgcatttcagataagcagta

SEQ ID NO: 898180 - DNA, 647 bp, Homo sapiens
tctccactggtaataataagctatacacacaggtacttattattgataaataaatcagaatgagctrttttattgtttaaatgacaaaatagaaaaattatatattttagcattaatacaatcattaatttgttcatttgcttctctaattttatggtaagtattgggtcacatacagaaatattcacagattatactaacatgcagtgtagataaatatatactatgcaggtagctttccttctttatctttgcattttccttataaattcatccatttgtaattgcatgtcaattctcatagaaatccaaacttgctcaattcaggaaactgcaaaagaagttccaaggatactttgggatttataaggtcctcaatacaccggaaaggttttcagacaagcctgtaggatagggtcagccacatctcttagagcagttaacctcttctcctccaggacggtcaactgtggagaccctggggtaagaaggagcagttatttactcttagcagacagggtgtcctggtatgcccacacctgtgaggttttattttctgaaattgtgcaatacaaatggccggggattctgacctaacatcactcttgtgtgtctggatagtttacctctctcttctcctgccctca

SEQ ID NO: 898181 - DNA, 622 bp, Homo sapiens
actattcaacaaatggtgctgggataattggtaagccacaggtaaaaaaatgaaactggatcctcatctctcaccttatrtaaaaatcaactccagatggatcaaagacttaaatctaagacctgaaaccataaaattctagaagacagcattgaaaaaacccttctaaacattggcttaggaaaagacttcatgaccaagaacccaaaatcaaatgtgacaaaagcaaagataaatatataagacttaattaaactaagaaggtgctgcacagcaaaataaatagtcagcagtgtaaacagacaacccacagaatggaagaaaatcttcactaactatgcatctgacaaatgactgatatccagaatcttcaaggaactcaaacaaaccagcaaggagaaaataaataatcccatcagaaagtgggctaagagcatgaatagacaattctcgaaagacgatatacaaatggccaacaaacgtatgaaaaaaatgctcattatcactaattatcaagaaagtgcaaatcaaaactacaatgcaataccaccttacacctgcaagaatggccataatttaaaaatacaaaaataatagatgttggcatggctgtggttgaaaa

SEQ ID NO: 898182 - DNA, 499 bp, Homo sapiens
tcttatgaaagagtcttataatactcatgatccatgaaagaaaatcagaccaatatttgacattctgtattctttattacagaaagatgtagaggttagaggcattgaccaccccctccagccatgcagttgaaaatttgcatataaattttgagtgaccaaaaacataactactaatagcctactgttggccaaaagctttaatgaaattgatcaacacttattttgtatgctatctctattatatagtgtattcctataatacagtaagccagatttttcaaatgttaagaaaatcagaagagaaaatatatttactattcatcaagtggaggtgatccattataaaggtcttcaccctcatcatcttcacactgagtaggctgagaaggtggaagaaaaggagagtttgtcttgctgtctcaggggtggcagaggcagaaaaaaayctgcatgtaaatggacacacaacctcagcttcctcatctatacaggggac

SEQ ID NO: 898183 - DNA, 649 bp, Homo sapiens
aaggattttcctgttaaccttttctttaaaaatttccctcaaccctacagtaccatttatattgactcggtcactatttcagcatattgtatcaaaaaaaaaaaaaaaaaaaaaaaaaaacmcctaagcagtaatgatcattcatgtaaaagtgtttgtatggacctgttttctttctaaaagatattttactttggtaagaacatttaacaagagatataccgtgttaaatttttaattatataatacattactgttgactgtaggtaccatattatacagcaggtctttagagcttactcatcttgctaactgaaacttcatacccattgattattaactccccgtttcttcctctcctccaccccctgacaaccactattccacactgcctttgtgagtttgactgtcatagtacttcatgtaaatgaactcatgcagtatttgtctttctgtgactggcttctttcaattagtgtaatgtcctcagggttaacccacagcattattcataatagccaaaaagtggaaacaatccaaatgttcattaactgatgaaagaggataaacaagatgtgatgcatccacaccttggatacatcataagatattcagtcataacaaggaatgaagtgctgacacatgctat

SEQ ID NO: 898184 - DNA, 643 bp, Homo sapiens
tatgtgcatcagcccaggctatactgcctgaagttcagtwgcctacatcaaatgataagaaacatacactcactttgggattgaaggctattatatgcttaggaaataagccactctatgcttcaaatccattcattttacctgacattgcttaagtacattataatacacgaaattgaataggaaaattttgttttaactttaaaaaaccaagtttcccaaatggacagtatattgttacgaactttctggttatgagagaaacaatgtccgaatttcaactaattttcttgaatgaactttcaggacattttcatgaggagctgttgggaattgcttgattctctcactcaatgtccctttgactggagtctggcaggatgaacaacacgagcttttttcttcttcaggcaattggtttaggagcagaatctgtggttgctgctcatgccaggtcacagaccagcatcccatatccggcctcaggctgcccagacactgggacactggcggggctgcatctccaggcttctgtctccttcctggtcccctggtgtatgcccgggggcttgcggtgcccttcctgctaggctggctgtcccctccctgctgtctgcctccttctcttctaactgccttatgc

SEQ ID NO: 898185 - DNA, 654 bp, Homo sapiens
actttgctttcactcacttccttatctttcattcactgaccagaaaggttaatggtggctgttcctcttttgaaaagyggattgggaacaccagcatagctattttgacactgggatttctgttagaaaagtagatgtgacttattccctttgggtggaactccttttctagaaagggaggcaacacacatgttgggtaaatctcagtttctagagtcaggctgccataagttaaatctcagttccgcccccgagacatgtagctatggggattttacatgaactcccgagtctcagttttctcaccatcaaccattcatcagaatagtgcctacctcaccaatgcacaccttaagcacctggcgcctctgttagctaccatttaagttgagaatttccctgtgaggttttttcagaggaggttccttctacaataaaccaccaagtacttggtccccttttgcagaaatccatccacaccatgtgtaaacacaggggctgggaacttgcatggtaaaccaggtcagccaaacacggattaacaatgccaggcccatttcacctgcaaagtatcagcgactcttcaatcggcaggtccccagctgccttgcagcacagccagggcctagcatagcgctgcctccttccctttca

SEQ ID NO: 898186 - DNA, 564 bp, Homo sapiens
gtacagtggcatgatctcagctcactgcaacatccgcctcccaggttcaagcagttcttctgcctcagcctgccaagtatctgcaattacaggtgcacatygccgcgcccagctaatttttgtatttttagtagagacgagattttgtcattttggccaggctggtttcaaattcctgacctcaagtgatccacccgcctcagcctcccaaagcgctgggttacaggcatgagtcatcatgcccggcctttttgtttttttgagacagggtctggctctgttgcccaggctggagtacggtgttgtagtcattgctcactgtaaccttgaactcttggaatcaaacaattttccctcatcagcctcccaagtagccagaactacaggcaagtgtcaccacactcagctaactttaaacattttttgtagagatggggtctcacgatattgcccaagctggtctcaaactcttggcctcaagggatcctcccaactcggcctctcaaagtgctgggattacaggtgtgagtcaccatgcctggcccctatctcagctttggacac

SEQ ID NO: 898187 - DNA, 564 bp, Homo sapiens
gtacagtggcatgatctcagctcactgcaacatccgcctcccaggttcaagcagttcttctgcctcagcctgccaagtatctgcaattacaggtgcacatcgccgygcccagctaatttttgtatttttagtagagacgagattttgtcattttggccaggctggtttcaaattcctgacctcaagtgatccacccgcctcagcctcccaaagcgctgggttacaggcatgagtcatcatgcccggcctttttgtttttttgagacagggtctggctctgttgcccaggctggagtacggtgttgtagtcattgctcactgtaaccttgaactcttggaatcaaacaattttccctcatcagcctcccaagtagccagaactacaggcaagtgtcaccacactcagctaactttaaacattttttgtagagatggggtctcacgatattgcccaagctggtctcaaactcttggcctcaagggatcctcccaactcggcctctcaaagtgctgggattacaggtgtgagtcaccatgcctggcccctatctcagctttggacac

SEQ ID NO: 898188 - DNA, 576 bp, Homo sapiens
agacagggcatggaggggccccagtggtgggaccctcagccaggaccttcacctgtctgtgcctcagtttctccctctgaaaaatgggggataatgctacctagctcatagattgttgaggaggttaaatgatatatagattcctgggccggccctgtggctcactctctgtaatcccaagactttgggaggcttgggggaggtggggaggaatccctgaacccaggagtttgagaccagcatgggcaaacatagagagatccagatctctacaaaaaaatttaaaaattagctgggcatggtggtgtgggcctgtggtcccagctacttgggagcctgaggcgggaggagcacttgagccctgaagattgaggctgcagtgagctgtgatggcaccaccacactccagcctgggtgacagagtgagaccctgtctcaaaacaaacaaacaaacaaacaacagaccctgaaatatagattcyttgaccggcttccttcaatgtacttccagaatcatggttttttttccccaatttttaaaagatcattcatttaaaaattttagatttagctggg

SEQ ID NO: 898189 - DNA, 576 bp, Homo sapiens
agacagggcatggaggggccccagtggtgggaccctcagccaggaccttcacctgtctgtgcctcagtttctccctctgaaaaatgggggataatgctacctagctcatagattgttgaggaggttaaatgatatatagattcctgggccggccctgtggctcactctctgtaatcccaagactttgggaggcttgggggaggtggggaggaatccctgaacccaggagtttgagaccagcatgggcaaacatagagagatccagatctctacaaaaaaatttaaaaattagctgggcatggtggtgtgggcctgtggtcccagctacttgggagcctgaggcgggaggagcacttgagccctgaagattgaggctgcagtgagctgtgatggcaccaccacactccagcctgggtgacagagtgagaccctgtctcaaaacaaacaaacaaacaaacaacagaccctgaaatatagattccttgaccggcttccttcaatgtacttccagaatcatggttttttttycccaatttttaaaagatcattcatttaaaaattttagatttagctggg

SEQ ID NO: 898190 - DNA, 229 bp, Homo sapiens
ccctgcatgctggtgaattccactttgccctccagcccaagcatcatattttccagacagycatttgccatgctgcccaccaaacaggctgtcccttgttctcatgccactgctgaacattgtttattccttgtgctaggcagggctctgtcagttgtaacaactgaaactccacttagacatgtttcagctgaagggtgacttattgatttttataactgcaaagacc

SEQ ID NO: 898191 - DNA, 229 bp, Homo sapiens
ccctgcatgctggtgaattccactttgccctccagcccaagcatcatattttccagacagtcatttgccatgctgcccaccaaacaggctgtcccttgttctcatgccactgctgaacattgtttattccttgtgctaggcagggctctgtcagttgtaacaactgaaactccacttagacatgtttcagctraagggtgacttattgatttttataactgcaaagacc

SEQ ID NO: 898192 - DNA, 594 bp, Homo sapiens
ttttttgattaagttccaatgaatggtaaaaagctggactcttgttcattaactgatattcaaaagaatttgatgttttagtttcataactttgtcaggttacatcttcatacttattaaacatgattagttcttgtaaaggaaacttcgtatgtgttgagatttggaaataggtgaaatgctaaatttaaagaaatatgggccagtcgtggtagctcacacctgtaatcccagcactttgggaggccgaggcagtcggatcgcttgaggtgaggagttcaagatcagcttagccaatgtggtaaaaccccgtctctactaaaaacacaaaaattagccgggcatggtggcaactgcctgtaatctcagttactggggaggcggaggcaggagaatcacttgaacctgggaggcagaggttgcagtgagccgagattgctctactgtactccagcctgggcaacagagtgaggctgtgtctcaaaaaagaaaaaattwaaaaaaaaaaaaaatggttgctatttttctcttccttggccatgtcattattgcaaacataaattataacagaagattttgaacttaatttagaag

SEQ ID NO: 898193 - DNA, 600 bp, Homo sapiens
atgttatttcttaatggctctaaaacgtcctttgatggctgggcacggtggctcacgcctgtaatcccagcactttgggaggctgaggcaggtggatcatgaagttgggagatcaagaccatcttggccaacatggtgaaaccccatctctactaaaaatacaaaaattagctgggcatggcggtgtgcacctgtaatcccagctacatgggaggctgaggcaggagaattgcttgaacctgggggacagaggctgcagtgagccgagatcatgccactgcactccaacctgggcaacagagtgagactccatctcaaaaaaaaaaaaaaaaggctgggtgcggtggctcacgcctgtaatcccagcacttttggagaccaaggtgggtggatcacctcaggttgggagtcaaaattagccgggcgtggtggcacatgcctgtaatcccagctactctggaggctgaggcaggagaattgcgtgaacctgggaggtggaggtttcggtgagccgagatcttgccattgcactccagcytgagcaacaagagcaaaactccatctcaaaaaaaaaaaaagtcatttgacatgaagagtcat

SEQ ID NO: 898194 - DNA, 571 bp, Homo sapiens
tgtaattactgcagtcgtgcctgccagccagtttcactcctcctcctcactggcactgctgcaattcagaacagccttgcccatggatgctcacctggacagtgggaccttcccrcaccccctgcctccagggcctcctctccatcccagcctccttgccagctgccagagggtggcttacaaggcctgctgcttccctggccccttagcatagagtcctccctgctgggcacggtactcacagcttttgcataatctggcccaaacacgcacctccagcttcacctccttccgcacccactccattctctagctgctctgagccggcttcctgctccctaaagcccatgtccatcacatctttgttcattcacttgcaccacactcacatcttagagtgtttcctccccattacctctgtcaccctggaaaactccaaaggtgctttcaaccctgattgctccatctgccaccccagtctctcgtgagtggctccttggcctccttttcctgttatattcccaccttctcctgttcacataccacattttagcaacaccaactgctcaca

SEQ ID NO: 898195 - DNA, 619 bp, Homo sapiens
cactggggaatcctttatatgaactctcatacacattcccacaaaatcctagaggtctttaagctagatctgctccttctgtcccaggtgggccaggagaggcccctagatggaccctgagcccagggctggaacctggatgaggcaagtgagatgcctggggcatgaagtttaaggagacccttactgtctcagtcacatacatgctgaccctgcacttgtacaacccccaaaataagcaactccttaaattttgcaccccaggtgcctcactcacttcctctggtcactgctaagccagtgtccaggctgtaaggtggactcctcaaccacaacctgtggtgaaacctacaggcctctctctgcttccctcacaggccagcccagtcctgaccattattccactcatccctgggtcagatggtaggaggaaggcagagggttgggcacatagaccaggccacaaacctcaacaccgacgcctgcaggarccaggactctccacaggccagcagcacccacatcacctgagaacttgttagaagggcagaatctcaaacactgcagaggctgaataataccccactgtatgtatacacagcattttgtttctccatcc

SEQ ID NO: 898196 - DNA, 586 bp, Homo sapiens
ttagtacatctaaaactggggaaaccagaataatattgataaattagatcaatgtcaayatccagtctttgatattgtaccataattttacaaattgttattataggagaaaaatgagtcttaaaaagtcttaaacggtcttaagatcgcttaaaaagtcttaaaaagatcttacatgagatctctccatattatttcttaaaactgcatgtgattctacaattacctgaataaaaatttcaattaaaaaaattaaacatagggtcagacatggtggcttatgcctgtaatcccaacactttgagagtccaaggcgggtggataatctgagtgaggtcaggatttcgagaccagcctggccaacacagtgaaaccctgtctctaccaaaaatacaaaaattagctgggcgtggtggcacatacctgtagttccagctactcgggaggctgaggtgggagaattgcttgaacctgggaggcagaggttgtagtgaaccgagatcatgccactgcgctccagcctgggtgacaagagcaaaagtccgtctcaaaaaaaaaagagaacttatcaaactgtgctctttaa

SEQ ID NO: 898197 - DNA, 588 bp, Homo sapiens
atctctttggcagcctgaggcaggtggatcacctgaggtcaggagttccagaccagcttggccaacatggcgaaaccccgtctctactaaaaataaaaaaaaaatccgggggtggtgacaggtgcctgtagtcccagctacttaggaggctgaggtgggagaatcactggaacccgggagacggaggttgcagtgagccgagatttgcgccactgcactccagcctgggtgacagagagggactccgtctcagaaaaagagaaaaaaagaggtccactcaggggcagacacagagccagtgaattggaaaagttattgagtaaaaaagtgagcaaaagagagtgggaggcacaaaagatagcaagctttgaaacatcatttacttaaattattaataaaattattacaaaagtgacattcttgaaagaaaaaacctaaaacaatttagaatagagagygaaattcctccccctctatccaacctttagaactaattcttgaccctttgagtgtataattttcagactcccaatcacacccttcaaaaaagatctcccttttttctctgttgcagtgcactatccattt

SEQ ID NO: 898198 - DNA, 606 bp, Homo sapiens
tcattctctcagggatccatctatcttctgataaacttcctatctacttttccaaatcaatgtgaccagtgtatactttgattagaatttcytgttttagaatccattactttaaaaacaatttataaaggcaaaagattgtgggatttgttctcctcaaaggtataaagcacaaagtgaggcattattaatacttctgaacacacgtaacaaaagaaatcattcagcaccatttcagcatattccccactcaggagattcatgcatatttaaatgaattaatttattttctgcaatttgctctttaagtgcttaagtgctcatttgctgttgcttatttcaagattctgtgcccttgttttctgagtcaccaacttatagcttgagtgctccaggtgtatttatgctcccaaagtattttaaattacccattaggaaatccaatttcctatttataagactcagaagtgattttccactgttacctttttcttaattaagaatataggcctaaattcacagctaagtttttggtacaatatttatttattggctctatgacagtcaatattatagaatgtcaccaatattagactctcagtcact

SEQ ID NO: 898199 - DNA, 590 bp, Homo sapiens
ccaggtgtgagggcatctggtttggaatggtgtgggtcactcaaattcctgtgtgtgggcaaggacacagtgctctctccccaacgtccttccggatccattaaagcaggagtaataggaacaccatctaggggagtgcacattatttctctcaccacctccccaccccagcctccaagaagcagagttcttcctggagcatgttggaggaggaaagcttggcataaacaagagacccttcaggaagtctgcgtgtcagggccagctgcctcagtgaaggctcaggtttagggccagagccagcttcaaccataggtgagtcccaaacttcatcatgtttggggaagatcagaaagttaagaacacgtgagaatgaaaattaaatgccaaaggacatttagtgatctctctagaatttgcttccatttccaaacacatacattatgaataattgagccttgagggtgaagcaactagcggatttgaaattgaaactcaagtttatggtctayatttacactattgtgaatctttggccaagtcgcctttcctttctgaacttacttttccattgcgaatttgagctgaag

SEQ ID NO: 898200 - DNA, 660 bp, Homo sapiens
acttttaatgaatattatacaagttgaataaactaagggctgtagacaggccgaggaatgattagataactctgtgttagaatataattagaggagatgataagtttgaattcaggataaagtacayagaatgaagacagaaaaaaatacaaataaattatgaaaagcaaagaataaaaacaagataaatacttaagaaacaggagaaaaccttattacttacactataggggtcctgtgcaatgcttcctacacattaatgttaaaatgtagattattcagtaggtataaggtgaaaccttagattttatatttctaagagcttccagatgacatcaactctgctcatgcagaaaaacagtgggatataagatagccaagacagcttgtaaactgactgtagacagtgctaaaaatcatgtcaagaaattcatcctctaccactgaagccaggtgatttcaacttgtgccctaaagatccctgaaggagaaaagaactgctggtatcccaacctcaacgcagcaagtttattttatgtgttttacatgatgtcctgacccaaaagctggttttttaacaacaagattcacaagacgagaaaatattttaaaaatatggattgactgcttggagaaaatttaaaatcttttgagcaggta

SEQ ID NO: 898201 - DNA, 660 bp, Homo sapiens
acttttaatgaatattatacaagttgaataaactaagggctgtagacaggccgaggaatgattagataactctgtgttagaatataattagaggagatgataagtttgaattcaggataaagtacatagaatgaagacagaaaaaaatacaaataaattatgaaaagcaaagaataaaaacaagataaatacttaagaaacaggagaaaaccttattacttacactataggggtcctgtgcaatgcttcctacacattaatgttaaaatgtagattattcagtaggtataaggtgaaaccttagattttatatttctaagagcttccagatgacatcaactctgctcatgcagaaaaacagtgggatataagatagccaagacagcttgtaaactgactgtagacagtgctaaaaatcatgtcaagaaattcatcctctaccactgaagccaggtgatttcaacttgtgccctaaagatccctgaaggagaaaagaactgctggtatcccaacctcaacgcagcaagtttattttatgtgttttacatgatgtcctgacccaaaagctggttttttaacaacaagattcacaagacgaraaaatattttaaaaatatggattgactgcttggagaaaatttaaaatcttttgagcaggta

SEQ ID NO: 898202 - DNA, 608 bp, Homo sapiens
gcaaactaaggatagtttgtacatttgtatatggttacattttaaatggtgatgtaagtacctacaaatcttcaacatttgcctttccttcaaagcctagaaaatttactamcttgcctttacagcaaaagtttaccaatttctgctttatttacacagagttagatctattagaataactagtcagttgtttgaatggtagactattgtggctttgcgtccattaacatttttattagaaattttataaaaagcatcattacatggacgctactgggacatacagctccttgaaagatatgcgataattcatatatattgagttttaaaatgttagtcatgtcactaatgactccagaagataccaatttatattttctgtgtagtaaaaataagaacccagtaactatcagggtaaaaaaaaaatagcatttcttaaaaattatacacagtccattattgtcccataaattattaataggtcaaatttttaagttatcacattgaagagtatttgtggaattttagaatgaaaaataaaataagtttttcctgcaggactgtagagagattttatggaggagccatactgtgcattagttttcttt

SEQ ID NO: 898203 - DNA, 618 bp, Homo sapiens
gcccagttaagataagatagctaggaaaaaccatcttaaacaaggtaaggcttactatgtccattttaaaccaatgcctttttcatcttaagagtttctagtgacttagtctttcctcttttactggtgtagagaggtagatacccttgtaaatgaagactttctttaaagatgtaattttttttcactaagattctcaaaataaccagccaaatgtcagaaatgtgtatttggagacagattttttttttttttttcggtaagtggtcttttcaacttagcttgtttcttaattagatatctgagttaagggtgggatcctttaatgaaaagggcaaaaaataaccagtagaagcttcctggaacatccctccaagcccccaacaatgctggtggttaacatagagattaccatcaaaaggtgggccgcctactttttaatgtcctgtttgtttgcacaaatgacaacggttttctggaaactgctatttttggggttgcttatgaaagtaggaccctggggaaggcccaacagtcattctaggttgttggttggcaggagctgctataatcrcaaggccatttatttgaagctttccccgcaacccctcagctgga

SEQ ID NO: 898204 - DNA, 589 bp, Homo sapiens
cattaattagcaatgtaatttgcttttgcaaagagagggagggacaagtttttacataaattaacagacttcaaagtattttcctcacactacttcatgaagatacatctgtctgcccctcactattacccccawaaagaactctaaaaatggagaggggaagggcacacatagaaaatagaaataaaataaaaatctgtaatgctcttttcttcattagcataaatttgatttattgtaggatactgagacacattcataattcgatttttatgtgagctccattttctatcatatacgtgtttcattaagacaaaaagcctgagttttgctggagaacttacttatcttatatcccaacacaagatcaaggagcaaataaatgttgaatcaggtttatcaatattattcaattcaggtatttatctgagtctctactgatatttattttctggtgtatatgtatgggaaggggtacacttgctgataatagtaagtatgaagaacagacagtgcctaatttagagtgtcagaattctttaatgaataaatttagaagcttgaatgttttgtgtttggctgggtgccg

SEQ ID NO: 898205 - DNA, 368 bp, Homo sapiens
tcatatctggccaaactacgcttaacacatgaaggagaaatgaaatcctttacagacaagcaaatgctgagagatcttgtcaccacaaggcctgccttacaagagctcctgaaggaagcactaaacgcggaaaggaacaactggtaccagccactgcaaaaacatgctaaattgtaaaaaccactgatgttatgaaaaaactgcattaactaagggccaaataaccagctaagatcatattgacaggatcaaattcaaacataacaatattwaccttaaatgtaaatgtggtaaattccccaattaaaagacacagactagcaagttggttaaagagtcaagacccatcagtgtgctgtattcaggag

SEQ ID NO: 898206 - DNA, 591 bp, Homo sapiens
taataaagaaaaaaagagagaagaatcaaatagatgcaataaaaaatgataaaggggatatcaccaccgatcccacagaaatacaaactaccattagagaatactataaacacctctatgcaaataaactagaaaatctagaagaaacggataaattcctggacatatacactctcccaagactaaatcaggaagaagttgaatttctgaatagaccaataacagcttctgaaattgaggcaataattaatagcctaccaaccaaaaaaagtccaggaccagatttacagccgaattctaccagaggaagaaagaggagttggcaccattccttctgaaactattccaatcaatagaaaaagagggaatctaccctaactcattttatgaggccagcatcatcctgacaccaaagtctggcagagacacaacaacaacaaaaaaagaactttagacgaatatccctgatgaacatcartgcaaaaatcctcaataaaatactggcaaactgaatccagcagcacatcaaaaagcttatccaccacaatcaagtcggcttcatctctgggatgcaaggctgatttaacatac

SEQ ID NO: 898207 - DNA, 591 bp, Homo sapiens
taataaagaaaaaaagagagaagaatcaaatagatgcaataaaaaatgataaaggggatatcaccaccgatcccacagaaatacaaactaccattagagaatactataaacacctctatgcaaataaactagaaaatctagaagaaacggataaattcctggacatatacactctcccaagactaaatcaggaagaagttgaatttctgaatagaccaataacagcttctgaaattgaggcaataattaatagcctaccaaccaaaaaaagtccaggaccagatttacagccgaattctaccagaggaagaaagaggagttggcaccattccttctgaaactattccaatcaatagaaaaagagggaatctaccctaactcattttatgaggccagcatcatcctgacaccaaagtctggcagagacacaacaacaacaaaaaaagaactttagacgaatatccctgatgaacatcagtgcaaaaatcctcaataaaatactggcaaacygaatccagcagcacatcaaaaagcttatccaccacaatcaagtcggcttcatctctgggatgcaaggctgatttaacatac

SEQ ID NO: 898208 - DNA, 615 bp, Homo sapiens
cctgcctcagcctctcgagtagctgggactaccagcgtgcgccaccaggcccggctaatttttttgtatttttagtagagacggttttgccacattggccgggctggtcttgaactcctgacctcaggtgatccacctgcctcagcctcccaaagtgctgggattacaggcgtgagccaccgtgcctgggaaagttctattgtttaaactactcggttcatggtactttgttacagaagtccttgcacccatctttcttcttcctaaccccagtactgggattgtgggtctgttatcacttagaagccattgccatttgagtttgttgaacttttgcttttccaaactaaatgtttccccttgtattagttccctcttgctgctgtaacaaaactaccgcaaacttggtgactgaaaacaacacaaatttattatcttacagttaagaagtcagaagtttggaatcagtctcactaagctaaagccaagggttggcaggtctggttccttctggaggctctgaggggagaatccattcycttgcctttttcagcttccagaagcttctgtggctccttctttgtgtcacacaaacctcttgcttccattgtcatg

SEQ ID NO: 898209 - DNA, 636 bp, Homo sapiens
taaatgtaaaatctaaaaatgctgaactcataaaagtagagatgaaaaaggaatcagcagccaaaagtgctttctcaacatccaccaatatcttaactgcttagctcttcataggattagtgaccttcatttcaagcatgaaaggaaaataccaagtattggttggcttactgatggtaattttgtttgaaaaggaagcatactaattttaaagggctgaagtataattcccaggcaccatgaaaacaattctcacaaaaattttaacaaatgtggtattttggtagttttgtccaatataagaaatacaatgttcacataagccaattatttgagaatatgtttcagtatatcacactttttaaaatatgtttttacaaataaaataaatgtacatctgtgacatggataaaggccaagcattatgattcatgcattagtttttaaaaatcagaatcattgttattcaacttgtcagtgtcttacaacgaagagcaataatattcagwtgctaatagcagacaaatgctattttccttttgagggtttgacacttagtctaaccatctgtaagtagaacagcttatttgactagttctacaatgaagaatttgccattgtaaaaactgtgttatg

SEQ ID NO: 898210 - DNA, 632 bp, Homo sapiens
agtgcagacattaggagcaagacacatggggaayttccaagctagccctactcagtcctctgacctcacaatccatagtgaccatgacatcctcaccccaccattccacagtctgatacctgcctcactttccccctaacctataacctctgatgccctctcactctcagtgccctagggaccccgctacccacctactctttccgggaatcactttgggtagtagctgccccaggccatcttggctgggccattatccacaaatatgcagccatggccagcaggccaaaaggtgagacgttagacggctggcttgagcagacttttcataatagaaaaaccttgttcctaatcaaggccatcttcaaatcctcaactcacagagtaccagcagctcagggcagggttggagaaggtggcactctacaagcaagagccctgtgtgttaggggagggctgccatggagtgtacacaccgcaaacccaggtggcagggcaggtggcactgattccccaacaaaccagggtttcagagtcaacagcctctttaaagtcaagccttccttcactcattttctccctggaaggctggagtgaggtagggactggagcagcccagcccatggagagca

SEQ ID NO: 898211 - DNA, 698 bp, Homo sapiens
caagccatagataagactgggctcagtaataactggttgggtgatctctgcctccccckcttcttggtaaatagcctaataaagcccctactttccttttagggggtggatgtaaaagcttttgaacaaaaggaactgcaccacctcagtgtaggggattattatttaatgaaagtatgtgctggggctgggcgtggtggctcacgcctgtaatcccagcactttgggaggccgaggtgggtggatcacaaggtcaagagatcgagaccatcctggccaacatggtgaaacccagtccctagtaaaaatacaaaaaattagctgggcgtggtggcgtgtgcctgtaatcccagctactcgggaggctgaggcaggagaatcactcgaacccgggaggtggaggttgcagtgagctgagattgcgccactgcactccagcctggcaacagagtgagactccgtctcaaaaaaaaataaaaataaaaataaaaataaagtatgtgctgggatattttggggagcagggagctggccagttgtggatgctttggcgcaaggctgttaaactacaatttgcttcacattttgagctttccaagaacctagagggctcatagaccagaggaaggaacagaggtaagaaagacaactctgttgactttctcttgtggcattacccaggaactcttaatccaagg

SEQ ID NO: 898212 - DNA, 634 bp, Homo sapiens
atgcattggctctctctggtctgttctctatgtcttttaaatctatccttttcccccaaattctgcaagaacaaggcagcctttagattaactgggttggtagcttctattgttcagcatatctctctggaaaatttgaaaatttggaaatttttaagcaattgtgtatatcatctgaatgtaatcatgcctggttttgggttagcgcctgtaaatttatgcagtttccttcaaaacctgatgctttttctaacaattttgtttcatgtgttttttagttcagatcctctgctcagcatactccaagctaggaatagatatgcaaaaggatttttagggaaatgtctgtgaagactaaagaagatggaaccagagaaggtgcaaagtgccttatcaaccacaagatctgatacctattcaggagagagaaggaaggagaagccagtgggagaatcccagactatagcagaggtctaagaaggttttggcgaggctgctagtgaggctgttagccaaagtcacctattaagagtcccttgtcttgcacgaatggggctgcattcgtgcatagtcactgactggaatagcctgtgggcagcagctgrgaccatcacacaacaggagatctgagtgg

SEQ ID NO: 898213 - DNA, 654 bp, Homo sapiens
attctatcggtattaattaaacaattgcttgatgccaggcattttgaatgaaacaatggacacgatgaayaagatccttttctccttgatcttgcattagaagaaatcaatttttaaaagaaaaagaaatatgatagcaagaagcaaaagaggaagatgaaagacagtacgtttggggctactttagttggggtggtcacagaagtcctcccaggggaagtgatatttaaacaaagacatttttgagaagaagccagccctgtgagcatcttgggagagaactaacaggcaggagccaatggcaagtacagcaaaagaaagacagagggaaaaaaatgaatatggatgaagcaaatggcctgggattaaattgaaggcatagtgggggccagattttttggtctttgtagatcggggaaaggaatttcaattttcaatttgggatttcattttagtgctttgagaaatctttgaagaactaccagtaagggagtggtgtgatttgatttaggctttaatcagatatatcagtagatgtagctttcaggcggccatgcagagagtgcattactggaaagagtgtggatgattgaggaggctctttcagtggtcaacaggagacatgattctgacttgggccaggatggtggccgt

SEQ ID NO: 898214 - DNA, 615 bp, Homo sapiens
gctgccatcatgaagaaagatatgcatgtaaaacatagagacattctacttagagatggcggaagtgaggctcagagaggcagactgactggcctaaggtctctcagtgctctggtggcaaagcaggcctgagctgaggcctcctgactccttgtacagtgctcttcccaccccatgcactttttgcagcagccagcttatttgctgcatttcagctgggaaagggtgggaatgggtccagtggtcaaggctgaggagtgggaggaaagtttcacttgggacagacccaggctcgtgtttttgccctcacagcttccctccgtcttcctactcataaatctgctccctgccctaatccccacatagttgaggaacatactctctagagtgcaccccagtggaacctttggctgctgctaaattaatttcaagctaagagtgcacaggtttggaggctgcaggtgggagctcatgcaatgattctggggaagctcaattcaactcctgctgctctgaacaatgccctgggattgatgaacscagagacggtacgatgctcagagtaaagaagtgataacccactctgtgggacactggtatccagtcctaggcacc

SEQ ID NO: 898215 - DNA, 615 bp, Homo sapiens
gctgccatcatgaagaaagatatgcatgtaaaacatagagacattctacttagagatggcggaagtgaggctcagagaggcagactgactggcctaaggtctctcagtgctctggtggcaaagcaggcctgagctgaggcctcctgactccttgtacagtgctcttcccaccccatgcactttttgcagcagccagcttatttgctgcatttcagctgggaaagggtgggaatgggtccagtggtcaaggctgaggagtgggaggaaagtttcacttgggacagacccaggctcgtgtttttgccctcacagcttccctccgtcttcctactcataaatctgctccctgccctaatccccacatagttgaggaacatactctctagagtgcaccccagtggaacctttggctgctgctaaattaatttcaagctaagagtgcacaggtttggaggctgcaggtgggagctcatgcaatgattctggggaagctcaattcaactcctgctgctctgaacaatgccctgggattgatgaacgcagagacggtacgatgctcagagtraagaagtgataacccactctgtgggacactggtatccagtcctaggcacc

SEQ ID NO: 898216 - DNA, 602 bp, Homo sapiens
tgttttgattggcatgtctcttaactttcctttaatctacagttttcacttccaattccaatctttttttccttcttgctgggtcctttttcctgtagattttcccataatctgattttactgaatgctatggtggattcctgtatccctaaatttcctataggtggggagctggatatatctggaagcttgatcagattaaggtttgatttatttttgccaaggtcactacacaggtggtcttgtgttcttctatggggaggtatcaatgtctagttgtctttcctagttctactaatccattagttgctacaaaatgatacagcagttattcattcttcatttatcatttatttgttattatttatttatcatttattaggactgtgatacttctatataaatttcttcttataaagtatttggttacccagtggtatcatttgtgtaggaaaggcaggataaatgtttgacttttttccytttatttgccacttttcaaaacaagtatcataataaactcactaatttaaacattttgatgtattttaatacagggtagttattgttcttattgatgcttaaattataccatctttgac

SEQ ID NO: 898217 - DNA, 594 bp, Homo sapiens
ttgtcaaggctcaacttacagwtagcgtcttctagaaacctttttgaatgatcttacctagacccagactcctcctctgaactcagacctcactttgttccattttgatggcatttgcctcattgtgagtgtcttggacagtagtgatctagtcatttcctagctttcctctgagtcaaaacctccttggtggcaggggctccctgccttgtgggtgactccggttgttattttgctcatctttattttaaggtttctggtaactttgacttcttggccttgggtcctttctgctaaagtgacataaattacagccagtgcctttttcctccaagtctttcaaatatttggaaacaactctatcacactcttaattatctgctttacaaactaagttcagctaagtaaacattgattggatacctactgtgtgctagacattgtgttaatatctaagacactcaaatagtaacttgtatggtccctgtccttaaagcctgcccaggcaagtggtagaggcacgtaagtgctcagagcagcccatgacaagtgctataacagggcagattgtgggaatatggacaaagggagcct

SEQ ID NO: 898218 - DNA, 647 bp, Homo sapiens
gttcagcccagctcttactatcctgcagaaaatggtgcatccatccaccaatgggaggtgatgggctcctggccttgagggttactgaaataactgcaatcstggaaagtggaattagctttgtccccatatgtttcataacattttgtatctcttcttgcctcatccatatctgtattgcaatcatttgatttcaaagcatcctggggcaatgcaaaagctaggtttcaggacagacatgctgtgttaacaggttgcagttgactgtgagctgtagggtttgggcacatccataagcttgctgagtctgttttttactttgtaacgtaatactaactacacatactccacaggatgttcaagagtcttaggtgatctcatgcatgtagttaccttagggtaatgttggcccaacatattacggttactccaagatgagtaatatgagctttcagcctaaaacgttaccaagagaactaatgaaatgccaggcaacattaacagaaatgtggtgaccaggaaaaagacaacgagagttaacagttaaagtaagctggtaagatcaaacctgaatcctggggtctcttccaagaattacacatcaaaagtgattttggcaagcagacacacagtcagaggacaatggt

SEQ ID NO: 898219 - DNA, 450 bp, Homo sapiens
ttaaccgatggaacatgagagtcagtggatgtgtgccratctcctgaaactccaggtgcctggttccaggttctcagcatgctgccagcaagatgagccccatttgtccagggcagtgacctgatttatatggctttcctccatcccttctctgactttttccattttctcacttttgattccaggaaccactttccaaatgaattactgggacccaaatcctggtctaggggtctggttttgagaaatacagccttcggtactgtcacatgaccaaacataggcctcctagaattaagttcctgtcactttaccaactttcaggacaaccttcacagtttttaagggaggtgagaccagacattagtgctgcattgtaaaactgacctttcagtagggtgtgtgtgtgtgtgtgtgtgtgtgtgcatgtttgtagagctatgacgcaaa

SEQ ID NO: 898220 - DNA, 584 bp, Homo sapiens
ccattagtcaataaaatgaaatgtaagttacccacattgaagagaaagaagtaaaattatcttttttaaaaatggcataattttgtatatagaaagttctcagaaatccactggaaaaaaaatagaaccaataaactcattcagcaaagtttcaggatataagatcaaaatgcaaatattaattgaattttacacatgaaaaatgagcattttgatataaaactaataaaataattcaatttacagtggcattacaaaataaaatattcaggcacaaatttaattaataataatagtttttttttttttttttaaacagggtgtcgctctatcacccaggctggagtgtggtggcacaatcatggcttactgcagttgtgactgcctgggctcaagtgattctcccacctccatgccctgagtatgtcagactaccagtacgtgccaccatgttcagctaattaattaattttttctttttcttttcttttttttttttttttttttgkagagacagagtctcactatgttgcctaggctggtctcaaactgaccctgctcaagtgatcctcctacctcagcct

SEQ ID NO: 898221 - DNA, 503 bp, Homo sapiens
aaaaaaaaacttcctgagtttatcattagttatttcattcattcgtgagacataattaaatgctactctagctatctattgctgtataataaatttcttcgtaacttaaggcttaaaataatcacaattatttattagtatctctcaaaattctggggtttgattatgttcagtttggtgcttcttacttttgtgcatttttagctagacagtgagtagtactggagttatgccaaaagcctctataacacatgcctgcttgttgatattgactacaggcagggatcaaaactgggaatggaacacctacctacagacttaccatgtaactggtgcatccttaaaacaaggtacctaggttccaatagcyactatcccaagagcaggaagtcaaagtggctaagttcttgtagcctgggcctgaaaggtgtcagagggtcccttttgctgtaatctattagaagcacagttacagagcccagtttcaagggaacatagacccc

SEQ ID NO: 898222 - DNA, 557 bp, Homo sapiens
aaacattattattaagacaacacttcacttgcagattatttccccattttcaaaatgaggaaagtatgttctagtgagatttgtacatttgcctaagatacacagatactagtgatggatgtaagtttaaacayacatctgttcaaatctgtttcagagaaaattatattattacattctgtatccagttatatttacaataagtttggtgagcaatttattatctcaatcaagagaaagctgtgacattttttcgtatttattctatagggatattaaaagtacgtagttttttaaaatgatgatgtctatttgatactgctacatacttttccaagacaattttaaactaaaatattttaaaatgtatttccccacaaaattctcactaagttccaaggggtctgtgtgtatgactcacaattcccaagccccagttcatagaactgagaactgaaagagggtcagagaaaatggtgaagcctggaggaattttcagaagagaagatcatgcttgctggggagctcagaagagcccccacagcatccagaatgaa

SEQ ID NO: 898223 - DNA, 660 bp, Homo sapiens
tgtaagaggacatactgatgtgaacccaggaaaggaaaaatgattattgaatcttggggaaagtgtgcatctcccagtctatcaaaaaactctyttgacccaatgacacagagctgtctaccccactgatgatgtgaaatacctatagggaagaataggctcaatggtggcttaacccaggaaagctctagctttagtctctgtaagacatcttcaccccagacttccagcatgtgccttcttgcctacctgctcttccagaactccaactccaccttaggggtgggattctccccttgtaagagtggctgggaagactctctcttgagtaccacctggacttggtagctccatttgatcactgcagactcaatggcatagatgactgacttatctatagaatccaagctgtgaaagacaaaacaacaacaatgataacaacaaaaacaaaaaccctgaggcgtgaaaataaccctgggtgtaccccaagacagaatcccaaatttaaaaaaataggtgagaaatttcatctagcccatgcattcttaacttttttggataacagtctctgttgactagtcaacgaaaattatagatcctctctccagaaaaaaaaaatgcttatgtgtgtgtatgtacatttttcatacagattcaggg

SEQ ID NO: 898224 - DNA, 406 bp, Homo sapiens
ggttttaaagacgggagtttccctgcamaagctctctctctttgcctgctgccatccatgaaagatgtgacttgctcctccttgccttctgccatgattgtgaggcctctccagacatgtggaactgtaagtccaataaacttctcatttttgtaaattttctagtctcagtatgtctttaacagcagcatgaaaacagacaaatacacctgttatctgattttccataggtcttgcattgggcactgaagaaatggcatattggttcagtgttcaaagaaaatgttaatggtcaagctcatttcacttttgggagttcatggttctaggcctggggctgtatacttagaggcccctcctcagctctttctacagcaaagctactcaaagtgttgttcccacatgg

SEQ ID NO: 898225 - DNA, 604 bp, Homo sapiens
ggtgactgtttgcattacagaagaattctttgtggtataaaaggattagctgtggggtttctttaaatagcatctcccytagtgcattaaagtgtttatttatagatcattaactacttgaccaagatgctgcagggcagagtagcttaaagacaactggtcaggaggccctaccagtggaagatcaattaaactcaagacaaagtgcctttgaaatagtacttcaagtcaatgggatagaggattcaattacctaaatttgtttcatctgggtagggagtgcatgcattgagtgaacagcacacctgtgtgttctcattcacatagaaccaacgtgagtgtgttctccagtctatgtgcctaaactctgatatgtccagggtcatagctatgtttggcctcctttttgttgtgctttaattaagaggtaaaattattaaagtggcagatgtttccagcccgagaacctggacccagttatatcaagcagatggtcccaagcaagacaacatcctttaatgaagaagcatttgcaattcatgagaattcatgatgtccatttctttccctctccaatgttctgcttgtcaggggtcccattgtg

SEQ ID NO: 898226 - DNA, 640 bp, Homo sapiens
cagctgtaccattttagatccccaccagcaatgtgtgactaaaccagtttctccacatgcttgccagcttttggtgttgtcattattttttattttagctattctgataggcgtgtggtgagatcttattttggttttaatttgcatttccctcctggctcatggttttgaacatcttttcatgtgcttatgtgtcttctgtccatcctcttcagtgaaatatctgttcatgttttttacccactttctaatcaaattgtttgttttgttaatttggggagttctttatatattttagatggtagtcttgccagatatatggtttgaaaacactttctcccagtctctaatttatctttttatactcttaacatatatttcaattctgagaaactgacaaactgttttgcaaagcggttgcaccatttgacattctattagcaaagtttgagagttccagtttctctacatccttgccaacacttggtataccagtctatttaaccrtagatattctagtggatgtgtagtgatagctcattatagttttaatttgcttttccataatggtttaatggtgctgagcatcttttcatatgtttatttgctatctgcatatcttctttggtcaagtgtttgt

SEQ ID NO: 898227 - DNA, 576 bp, Homo sapiens
acgtggtgaaaccccatctctactaaaaatacaaaaaaaaaaaaaaaaattagccaggcgtggtggcgcatgcttgtagtcccagctactcgggaggctgaggcaggagaatggcgtgaacctgggagacagagcttgcagtgagctgagatcgcaccactgcactccaggctgggagacagaacgagactcagtctcaaaaaaaaaaaaagattcatactcatgccctttgttcggcttcacagacacacatatgcaacaaagtggcaaaaaaatgtcagtgtctgagatgtaaacaaagtctttgctttcctgttttggctctcaatactgtaaatgagtgtcctttgtgaagtattttaggtattttagtacaatattttaactttttttgtgcttatcgttggtgatttattgtttttaatggcctccaagcgtagtgctgaaatgcygtctagtgttcctaagtgcaagaagggtgcgatgtgccttatggagaaaatgcttgtgttagataagctttgtctgggcatgagtgatagtgcagttagacatgaagtcagtgttaatgaatcc

SEQ ID NO: 898228 - DNA, 535 bp, Homo sapiens
gtggtcctctgctttgctggctgctactcaccattcctgattccgtgcctagatcactgctccatgcagccttctttgaactccctagttagagttagatccctttcctctatatcagagctctcacayatgtcaaatgccaccatgcctgtctgcttatgtgttgtctgtggctgctttcatgctacaatgggagacttgagtaattgcaaaaggggttggcagacttttactagaaagagtcagatagtcaatatatcttaggctttgtgggatagatggtctctgtcatggaaatactggggaggtaagaaaagtccagtctctatctgtggacgctgtaatgaccatgatatctggtttggtggatcacattccctaacagttattttataaattagaggttagagtaggctagacagctgaggataaaataggtagattttactggggaagcaagacggtcacaatgagatgagaacatactgtattttacttagttaccatcttcaagtgacttgttctcctatctgtg

SEQ ID NO: 898229 - DNA, 504 bp, Homo sapiens
tttatttgtataattgtccctagtgtttgtcctgttgctcaatgtctcactacttggttagttttaggtattgtaataggagtgaagaatgamagagaaacatagggtgactttaaaaatttttttttttttttttttggtgagatggagattcactcttgttgtccaggctagagtgcaatggcgcgatctcaactcactgcattctccacctcccgggttcaagcgattctcctgcctcagcctcctgagtaactgagattacaggcgtgcaccaccactcctggctaatttttgtatttttagtagagacggggtttcaccatgttacccaggctggtcttgaactcctgacctcaggtgatccgcctgccttggcctcccaaagtgctgagattacaggcatgagccactgcacccagccaactttttaaattttatttatgtaatctttatcactttcctggagagtgcttacttatgtccaaggaagctgttatgtgc

SEQ ID NO: 898230 - DNA, 562 bp, Homo sapiens
accaccgtttatgaaaaagagtgttttgtctcttattgtcagaaatcaatggccgtaaatgtaagggtttatttctggactctcttgcctatttcattaatctataggtttatcttttcaaaatgttttaattagcatgtaataattgtacatatttgtggggtacagagtgatatttcaatacctgtatacgacgtgtctaatgatcaaatcagggtaattagcatatctgtccactcaaacatttaatatttatttgcattgggaaccgttaaaatctcttctagtcatttgaaaatatataataaattattgttaattatattcaccctgtagttctatagaacgctagaaattattcctcctatctagctgtaatttcatatccattaaccagcctctccttattccccctctttccgacctttcctaccmtgtaataaccacagttctattctctacttctatgagctcaactatttagctcccacatatgagtgagaatatgcagtatttagttttctgacctgcgttatttcacttaacataatatcctccattc

SEQ ID NO: 898231 - DNA, 460 bp, Homo sapiens
cagttgttggttaatggcttcttggcttctctgtctctctcctggagcaacctgcatggtacatttacacaaccacataggcagtggtacgtggacacaccacatgcatgagattaacctctcactcacacatcccctctatcttccactttttgtcattttatactccctggtccttccctaagaacactagggaattaatatcatacttctccacctcttccaccttcttcaagtcatctgtacctctgagctcttgcacactgtgcagcattgctcagactgtcttaactcgccagtcctcaccagaatatcctaactcaccctgcgaaatggctggttcccacttgtctttcagctctttctttcttgcctttggacatcaccttcccaggcaccacaattctcggcaactcctctttgctccrtggaaatgtctactataatccttagcacgttg

SEQ ID NO: 898232 - DNA, 615 bp, Homo sapiens
ggactcacatgcaagattaacaataaaatagaaggtcatcaaactcagaaggaagcaatattctagttcatggggctcttgtccagtgttgtctgtattagaaaaagacagtgtcgggccrggagtggtggctcacgcctgtaatcccaggctgaggcgggcggatcacgaagtcaggagttccagaccagcctggccaatatggtgaaatcctgtctctactaaaaatacaaaaattagccaggagtggtggcgcttgcctgtagtcccagctactcaggaggctgagacaggaaaattgcttgaaccagggagatggaggttgcagtgagccgagatcgtgccatcgcactccagcctcggggacagagcaagactccatctcaaaaaaaaaaaaaaaaaaaggaaaagaaaatgacagtgtcatgtctgttggagaaagttaggagttcttgggatatcatctcaaccacatacaggtaatatcacaaaggatcagtgttccagggcaagaacttacctggaatagtgccaccaccaaaatttacctggtgagaccattggtatgacctaacatgttgcttctgatacatgcatctttggtcattttccatt

SEQ ID NO: 898233 - DNA, 620 bp, Homo sapiens
ctaacaattgatttcacagattacagtttaacatcagggatatggcatcaatctgctacagataagatgtcggaaataagttatcagcttacatttgtctggatctttgttgttttgagatgaaaggaaagaaaagatcaattaccactagatctggtttaactaataaggagatttgggtcctgggctgccccctgcccccaggatcagtagttattggtgaggttcatcagtattctctgatataagtttgctctgaaacatcccttcacatacatacttgaagttctcagaactagagacccttccagtggagcaagctgaccccttcacctcagggtagaccaggcatgtgaggaagcatgctcccctgatggtaagacgtggtcattccagagccctccttcgttgtttgcaaggaggaaggactaaaatggcatagctgtggtggcattgttccctcagtttccaggcttggaccagtttgggccatccagccttgccacagcctttggtccccactgctacactctctaggtgacccagtggcctgtygccttccccatcttataaaagagagatgaccaagtattacataaaggcctagtcatttgagttgg

SEQ ID NO: 898234 - DNA, 584 bp, Homo sapiens
aagttcttgctcagtcattatggagggcaaggtcaaacggacagaaggggaagacccagaagttgaacccaggcctctgatgttggttactatgacagcttctcttgctctatctttctaaaagaccagagataccaattctcttgaggctgttgagtatcactagagaataggtagttctgcaaagaatatgtcctcctatgagaaggcaagtttccagtgtgaaatccacctgcatattcacattttagttaaactgagttttgtgttttgggtagtaagggctagtaagagatagtcaaagaattcttaggggaaaatgaatgcactttctatgggtccctgtttacagtagataaatgggcatgtaggtaaatgtgcttacgagtgattaggagtgaaggatagactgcctacgactcgcctgcctccctcatgttgctttgatttgaagtcaagtttgaaagaaattcaccggaccaatccatattaaacatttatgaatgagacactagattaacttstatggatacagcagagaatgacacaggcatattccctgcgctcatggaataaacatgtcg

SEQ ID NO: 898235 - DNA, 681 bp, Homo sapiens
aaagccattttagagaaagtcattgtagygtcaccatgaaaccagtatgctcctagggtgaccgaccattccagtctgcctgatactgtctcagctttagcactggaaatcccacacctgggaaccccttcattctcaggaaaactggaagagttagcctttcaaatctccactaatggctctgctgtcggagtctgaagtaccgggtatgtatggtctcaatgttaggtggacgttttatattttaaaaagttacatttgtggttggcatcccctgtgtaccagcttcataaacaaagcagactctgctctacacctttaaggaaatagaatgtatactgggtttgtttttctccttaactcacagttgtgtaatttttcttctcgttctctgcaagggcccaagttttggtaaaaaatatactttcagaaatcaatacaaaatttgatccaaccaggtcaagctccccagctgacctaatcttaacacattgtgaaaagtatttcaatttattatactcttgtagttctaaggagaagctgaaaaaatggtgtttaggtatgacagaaaaggagcttggaaggctaaatttagattacacctgagtcactttgctgctaagtagaatttcatagaggtgcatctttgcaatctttttatgtgtttggcatgacaattta

SEQ ID NO: 898236 - DNA, 652 bp, Homo sapiens
ggtggtgatggatttcagtgtgggtgtttgtgaaagacgcagcgagaatcttggttccagaacttttgatgccagttaaattaaataatcttaaatgtcacctacagtgacttcctctttcccattctatccaagatcaagcctggctatgattctttttgcgtggaattccttcctctcccttcttataagtaggcaacttctcactcctcaaactcagctcaagtattgtctttttgtgacagttttcctgatctagagaaggttggggttcagtgagaggactgtcttctgggctgcctcattcccccacctcgtcacaggtggcaatggccttgtgttacccattttccccagttagagtagacatcttgtctatcttttgctagcatctagcacacagcttcggggcatcagagtaaagtacagagtaagtgagataaatttgagctcagctctcattttgcctcagagttgaaaagaaagcccagctgtgcttggctcagaagtaaccctaataggatgggaatgaacaytgtgctaaaccaaaatgtgtggccggggattttgcattctgcatttttcacagcctaactggggtatgtgtgcaagcctgaggggtttaccagcctgatttaccagcctcaatttc

SEQ ID NO: 898237 - DNA, 608 bp, Homo sapiens
gtcttacatggtggcaggcaagagagagaagtgaagggggaggagccctgtataaaaccattacatcttgtgagagctcactctctatcatgagagcagcataggcgaaaactgcccccatgatccaatcaccttccaccaggtcccttcttcaacacctcaacacctggggattaccatttgagatgatatttgagtggggacacgaagccaaaccatataatgctaaatcctttattagcaatacctcatttagttttcacaaccaccttctaggagattagaaatattatatttattatgtagacaagtgctctaaggcttagggaatttcagcagctggttggcattacaggctggcacctgccaggaccagttattgggctcagatctgattccaaaggtttggctttcacgcatgctgatgaattcttatctcaagagcagagggaagagtatgtgaggcctctcagagaatgactgttagcggctggtgttctaggggcttttcatcatctatgagctcacttaattcscataacaggtaggtgacttatgtgttatttgtcctcatgtgtagtttaggaaatggaagtccagagaagttg

SEQ ID NO: 898238 - DNA, 630 bp, Homo sapiens
aaagcaaaggagaacattttaggtcacttttaatactcgaaggtttcaaagagtccctaaaaataaggccttttagtgactctcctgctacccagagactctttttgagacggagtctmgctctgtcgcccaggctagagtgcagtggtgtgatctaggctcactgcaagctctaccttctgggttcacaccattctcctgcctcagcctcccaagcagctgggactacaggcacctactaccgtgcccaactaattttttttcttatttttagtagagacagggtttcaccgtgttagccaggatggtctggatctcctgacctcgtgatccgcccgcctcggcctcccaaagttctgggatcacaggcgtgagccatcgcgcccagccacccagagacttttaaagctcgtacccaggtggggaaaagctcctgagaaccccctgagttcctgggatttctaaagcacaggttcatgttcctcatcccccacctgggaggcacaaggacagtgtctgtgattgtgtctggctaatggattccgactgccagccactagctgaagggcgctctcagctactgcaatgcatatgcatcaggctagctggcttggacacagccaccaatgc

SEQ ID NO: 898239 - DNA, 647 bp, Homo sapiens
caggtaagctacttcatatggtacctatcacatgtatgcattcartatactaaaaataattattattctgtattagagacgatgtcatgagacaactagccacagtctgatgaacgagagtaaggatgaatatgggagttacacctgctgggttcccaacccacatcaatctctgtgtcccttgggcaagcccttttacctcttgtagctgtttcctggtcaacgttatttgacccccttaagatggagatgctaatagctaccctgtatgttgtggtgagaatcaaattaagcagatgaaaagtgcatagcatagtgacagctcagtacatgagagccatcatttttgttgttgttgtatttttcagcaaggcaagggctttgatgtcttgtaggaacagttgaattttggcttcatgtaattacacacaatatcagcggtgatttatctggaaatagcactcacctccaggccctgtccacgagccacctagcccaactatgtttatttgtcttttgttttggagcctataagggcatattgggaaggtttaatacagccgcatcactgtgatttagtgagcacttactgtcccgcacatgctgctgtgataacactttacaaagtggtcatgaatgagccttcc

SEQ ID NO: 898240 - DNA, 647 bp, Homo sapiens
caggtaagctacttcatatggtacctatcacatgtatgcattcagtatactaaaaataattattattctgtattagagacgatgtcatgagacaactagccacagtctgatgaacgagagtaaggatgaatatgggagttacacctgctgggttcccaacccacatcaatctctgtgtcccttgggcaagcccttttacctcttgtagctgtttcctggtcaacgttatttgacccccttaagatggagatgctaatagctaccctgtatgttgtggtgagaatcaaattaagcagatgaaaagtgcatagcatagtgacagctcagtacatgagagccatcatttttgttgttgttgtatttttcagcaaggcaagggctttgatgtcttgtaggaacagttgaattttggcttcatgtaattacacacaatatcagcggtgatttatctggaaatagcactcacctccaggccctgtccacgagccacctagcccaactatgtttatttgtcttttgttttggagcctataagggcatattgggaaggtttaatacagccgcatcactgtgatttagtgagcacttactgtcccgcacatgctgctgtgmtaacactttacaaagtggtcatgaatgagccttcc

SEQ ID NO: 898241 - DNA, 556 bp, Homo sapiens
ggcacagagctcctcctgctggatgtggtttggggtaatgagctctcatttgggggaacataattttctgggttatgaagactcaatgggctaagtcttttgtctataattaggttattagagggatcatttaaaaaaagaaggcatcgcatgttctcagtcataagtggaagttgaataatgagaacacatggacatggtgatcgggagggaacgtcgcacaccagggcctgctggggcattgaggggcagggggagggagagcattaggacaaatacctaattcaagcagggcttaaaacctagatgatgggttgataggtgtagcaaaccaccatggcacatgtatacctatgcgacaaacctgcacgttctggtattccagaacttaaagtgaaataaaaaaaaaaaataaaggaaaacatcacacctttttacccacccatttgtgtatccattcatctatacttgcatctatcacttattaaggtaacttttatgaaacatttattgtrtagctgcccatatatgtgtgtgtgtgatattacatatcatt

SEQ ID NO: 898242 - DNA, 561 bp, Homo sapiens
atgaaaacacatttcagagcaaggcagcacatatttcaatggcaaaatgtctgacagtaacattgagcagagtaagcattttaaacaagaaggataagacctaaaggaaaacaaataacttctgttggagctttaagatgaagaagttttagattaatgcaaatgtattcatatggagaaataaagcacaggcttcaaagttggacataaggcacaacttgaaattaatgaccttagcaaaagatgtgccaactaactcaacatgttgaccaactgtattaaattgcacaaatatgattgaaaatatctatactgttttgtgtcctctcttctgaatagcaaatgaaccaatctatactttttatatttttatagaagttggctaaattttcttaataatcactttatcttttacataagaacactttttttaacttaaaatttattaccaawagaaataactcttttattgtgatttgttaatcagaattttgtattttaaactttaaattttatacagcaaaacttctgaagtaaatgtttagctttcttgtacttgga

SEQ ID NO: 898243 - DNA, 544 bp, Homo sapiens
aattcttaatattaatatattaattaataatttttactaaggataaaaaactatattaataattcttactaagggtaaaaaacttattggtagaaaggtactcaaaaaagtccaaagtcgatgcagtggaatgtcctaaggtacattcaaaaattgaattactgatactatattgaattgtatcagcatttcaatttcctagcaatttctctatataatagatatgacgacaattgaacacaatggattaaatgacaataagcaacactggatacaatgacaataaacctggataaaaggctgggaaaatttgcttttaagtcacccatttacctttaacatgggcttaaaattgtatagataagcctcaaaaatataaacctatgaatagggtaagttatataagttcaggtgactacaaataaaggaatcaagaaayaagtggactgaaatgtttaaattccagttcacataaggaggtatttctgttggaagtgcctccaaaagtggataccagttggttagcagagctcattatttaaaa

SEQ ID NO: 898244 - DNA, 561 bp, Homo sapiens
tctaagaaccacctcactaacatatgtgggactcacagactcaattggcaagggccagcttggtgacttaaaagactgacattcattatctgacattcagggagtgwataccccatctaaagggcaacacctcttggcttttagtcatttgtagagatgaggaaataaagtctcaatacggcttgagtattacatttcaaagggatgttcaactgttttcacagcacattctgatttttaaacctaagtcaaacaattcaaaatattgtcaaggcttaatagaatatgcctagttgcataaggcaatttacacagcagtacttacccagtggcccatcctgggctcactccttggctccatctgagagactcctatgtaagcatcatgatccaaactgcaccaacaacattccttactggagatttgaaatctgataaaagatactcggatatccactgtgttgggtacaaatcatcctataaggcagcggcaaaaatagtaagaaaggtcccaaaactctaggaagtcattgatttctaaccatccttcaattttcaggt

SEQ ID NO: 898245 - DNA, 571 bp, Homo sapiens
gtctatgttgttccccatgatgtgtccgtgtgttctcatcattcagctcccacttatacgtgagaacatgtggtgtttggttttctgttcctgtgttagtttgctgaagataatggcttccagctccatccatgtccctgcaaaggacatgatctcatttctttttatagctgcattgtattccatagtgtatgtgtgccacattttcttgatccagtctatcatcgatgggcatttgggttgattccatgtctttgctattgtgactagtgctgcaacgaacatatgtgtggatgtgtctttatgatagaatgatttatattcctttgggtatatatccagtaatgggattgctgggtcaaatggtatttctggttctaggtctgtgaggaatcactgcactgtcttccacaatggttgaactaatttacattcccaacaacagttttwaaacgttcctatttctccacagcctggctagcctcttttgtttcttgacattctaataatcatcattctgactggtgtgagatagtatctagcttgtctctttgtttaatgtaccagaatc

SEQ ID NO: 898246 - DNA, 593 bp, Homo sapiens
ccaacaccatttattaaatagggaattctttccccattgcttgtttttctcaggtttgtcaaagatcagttgcktgtagatgtgtggtgttatttctgaggcctctgttctgttccattggtctatatatctgttttagtaccagtaccatgctgttttggttattgtagccttgtagtgtagtttgaagttgggtagcatgatgcctccagctttgttctatttgcttaggattggcttggctataggggctcttttttggtttcacatgaaatttaaagtagttttttctaattctgtgaagaaagtcaatggtagcttggtggggatggcattgaatctataaatcactttggccagtatggccattttcatgatattgattcttcctatccatgagcaagaacgtttttccatttgtttgtgtcctctcttatttccttgagcagtggtttgtagttttccttgaagaggtccttcacatctcttgtaaattttattcataggtattttattctctttgtagcaattgtgaatgggagttcactcatgttttggctctctgtttgtctgttattggtgtctaggaatgc

SEQ ID NO: 898247 - DNA, 625 bp, Homo sapiens
caaaataatataaattattctaccataaagacacatgcatgctatgttcatagaagcattattcacaatagcaaagatatggagtcaatctaaatacccatcagagtatattggataaagaaaatgtgctacatatacacagagtggactgggtaaagaaatgtggtacatattccacatttggaatactacacagctataaaataagaatgagatcaagttctttggggcaacatggatggaactggaggccacaatcctaagcaaactaatgcaggaacagaaaactcaatactgcatgttctaaattatacttaagagttgggagctaaacaacaagaacacatggacacaaagaggggagggacagacaccagggcatcctcaagagtagagggatgaagggagaggatcagaaaaaatatatctatggggtactacgcttattacttgggggatgaaataatctgtacaccaaacccccatgacatgcagtttacctatataagaaacctgcacatgtacccctgaaccttaagtaaaagttacgatacaataaaacrtatgcatgtggcagacgctatgttagcctctgagatgcaaagttgaatgttcgtttctgccc

SEQ ID NO: 898248 - DNA, 637 bp, Homo sapiens
tgcatggttaccagcctcctactctgggcagtgactccaagccaaacccaagtctgaactggggctctgaggccactggaggacacccagctctgcagtccccacagtctgaatgttgaaccaggacagtggaactccactgcctcaatcaaatcttgaatgttccaaaagcagagttgaaggcatcaagatggccgaccacaagcagctggcactcacctcctttacaaagaaggaccaaaacagtgagtatatagccacacatcaaatatagcatctaagagagaatactggaatataacaagtaagtgacagaccactgtgaagcacaggagagagaagtgaagcagccatcccagtcacaattggctcagagataggagggacgtctcatcttggggaaaaggcaaccaagcaatccctaatagtatactatcataacatggacacctgtaatcctagccacagaagagtcccttagctctcccaggccctgagcctagtatagggagatgcctggagtccaggtgactgcattgttccagagaagaaattcatgcttggtccayctcatcctgtgaaacccaagctactgcaacattgtgcaatttttagagattagtccctaccatactac

SEQ ID NO: 898249 - DNA, 680 bp, Homo sapiens
tctgtggtcaggagaggatgaagactactagattggtcagttagaaaatctgagacctgaaatgctagaaggaaccaaccatgcttcaagtggtatarttagagaattccagctagaggaacaagtaaaccatttctaagtttagaacctttatgtattttagaaataggaaaaagaagataaggatagctacaacacattaagtgaggacaagaggataagagttgagagagattagaggttgagatattcagggatcaaattattttagtattcaatcatacattaaatagtttacactgtattctaagagtcatgcaaagtgattgctggccaggcaggagaggggtctaaggagaagaataacaggaattcattcagatttatagtgatcactcccagtttctgcttggagagtgaaccatagatggtgtgagaaacacattcactagtccaaacacaaagaatggactcagagacaagaacaggagaagcaagacttttaatggctgtcttgcaagatcgggtgtatggtaggcaggcacacctggggcagttaacagcaggtaatttatctcctagcacacaattctctcccccagttcctcattggttgagtactatggagttacaattttcctaagttacaagttgcctaagtttcattatcccccttataa

SEQ ID NO: 898250 - DNA, 605 bp, Homo sapiens
ctaactattgagtacacatggtcacaaagaagggaacaatagacacttgggtctacttgaagatggagggtgggaggaggctgaggattgaaaaactgtctctcagatattatgatgactacctgggtgacaacattatttgtacaccaaaaccccatgacacacaatttatccatgcaacccacctacacatgtatcccttgaatgcaaaatacaagttggaaagaaaaaaaatgttttaagaactcttttttaaaaacattatgcacctgcatttaaacctgtatttcccagctttctttagaaatagtagtagccaatgagataaaagcagatagttaattgtaagcaggtatttagagaaatgttctttagagttggctcactatatttgaaatgtgtccctttacgtttacccttccttcttcatgcctcaaagaagaaaacctctgtcatcatggttccttgaggctattttgggagatgaaaaagggcaaacaaaagagaagttgggtaaccataccatactagtawattctggggctgctaacaataactgcatgcaatttgattctcataactttcattcagagctctctacatta

SEQ ID NO: 898251 - DNA, 578 bp, Homo sapiens
aacagatccaggaaagcatcatgatgagccccagggccagccccagccttcttgtccatgctgcttctgctcgcctttcaaagcctccaacgcccaatacatagccaaggaccgtgtgacactgaagcctgggtcccagaagggagcagatctgctggctgagatgcaagcttcaggttgcagcagacgtgagcagcaattgagcacccatccgtcccttcccctcccatccctggattctttctgcactaccaaaaacccaccacgcgccaaaaggcgagtgtgagccctaagaacagcttgtgggcacagctggcatttggaggaggagcctggggaactgaaggaagcagcaagctggaagtggtcgtgcaaacaagttgaagaccctgggccaagaacttccagggcgaaaggctcagtgtaaaaataaagaagcagagtagtacgcccatgcaatgaaatacttcccggcaaggagaaggaacaaaccacacgcacacatcrtgaatgactcaaaagcattaagctgagggaaagatgccagactcaaaaggcgacatcagtgtgactccatt

SEQ ID NO: 898252 - DNA, 626 bp, Homo sapiens
taaacagaaggagaagacacatgggccacactggagcccagctgttcaaagcagccattggttgattcaagggatcaatggtcctctggcttgaaggaaagrcaggagttgggaaggaatttggaagatggcagaggcttgggtatattgtagtcttggagaacaggcctcagaggatacgatggtggggcacagtcggggatttacacattgaaaggtgatccgagtgttcttgaggctgttgtgttttgctcatcattgtctagcaccagagagctatggtactgattggactgagcagagatatttttttttcttctaagaacactgaaggaaaaaaagatggagagtaaatgtggatacattttgaaggagaaggaagataaattgaaacaggttatgcctggcaaccttcacttccccagtgaatagcagagggaaatatatgtgctgagaataaggagagcagctgggcgaggtggtttatgcctgtaatccaagcacttggggaggcagagacaggaaaatcacttgaaccaggagtttgagaccagccagggcattgtagcaagaccctctctctccaaacaatttagaaaattagccaggcaatgtggtgcacacct

SEQ ID NO: 898253 - DNA, 493 bp, Homo sapiens
tctggtaggagcatttggtgagaagatgygtgcaaatcccttagcacaattcccagggcacaggaagacttgatacttgtcaaccgtaactgttagtaggcagatagtaggcccagcacagaagtcagttctgcctctctaccctccttaggattttttctttgcacaaagggcttcagaaagtgtaaaccccctcctctctctcgtgcatgtgagggacagaggtgtccctgatgtgaggcagtggtagaagccaagggcacgggaggagctgtcggatggctggagccgtttcagtgcaccagctgatcgcagcacacgtccaggtagggggatgcccttggtttcaagttctttgtgttctttccccaaaacaagcgccttctatgccaagccatctttcctgtgcaacactttaatttacatcttttaataactttggttgccatggaagcattggaattcagttttaaaatagacaaactaattgttt

SEQ ID NO: 898254 - DNA, 612 bp, Homo sapiens
ttgaaagattgcaaccactggkcttggcagacaccagcactttgccttttttcctggatatgctcccacacttgagggggaagtgatgggctcttcctttcttcccaagttgagcagaggatgtggaggacagagaaagcctcagccaggtgtctcaacccccatgcctcttcccaggggactctccacaaggccttggatggttttcacattaacctcttccgctgcttgctggagcagctgataattttgctgtgcaccaaatgatgcatatgagagatcagaaaaatctgtaaccagagaggaaaaacggctgctaatgtagtggtaatagggtagtttaggcgagacttccagggaagagatttacaatttaaataagaaaaataataaactctaaattaacaaaaagagaggagaagaagaatgctatggctgtgtgattggggatggggatggtggggaccttgcaggaccctcagaacaaggctggaaggggcctcactgagtcagagggatgccaaaggtggaggttgaataatgagggccttcaggattagccccagctccagcaaggacaggggcacatgggattggagcagctccctgaag

SEQ ID NO: 898255 - DNA, 656 bp, Homo sapiens
aagtaggtttactttcaaatatacctacttattttgagccaatattatcaactattctttctgataatgtgtatgaagaagagacatggactagatctagtccttgtcaaccaagatgagatagagaagaatggagagggtgcagtctatggtggaatttcctaaatgccagggaattccagttaatcactactgtctcatagccccctaatcaaacaattcttcaggtttggattttaccttccattcacctttttccagaaaaaaagcattacatgaaagagttactgtaaattataattcaccaacaatgggatttgaggtgaggggaaggggagggtgaatgtccaaggctagtcagtatacagttaattaatataaatttttgacccaagcagattttttaaattgccttgactgttacctgtgatgaaaactatacccgcaatctgaactgttgccacttacttccagtgagaaggcaggaaatcactgtccaaaggtgggaataggagatttattttaaatatatcataccacaaacatgatggcttaccctccttcccaggctgcagccaccactaagccttaacacaccagtattaaacagactcyatcctcctcaaaagcttcttagggttttttcattatttcct

SEQ ID NO: 898256 - DNA, 587 bp, Homo sapiens
attcgcttgtaggaaataccttccagatctagtctttaggtttgcaagtgtgaactttggygagacaacaacccttggggttacatatttaacgagagagattggggatggttgatgactgtgatagctcgtggagtgggtggtgatggtgctctgggtatggaggtgagggacgtgttaggcagccctccagacttttttatgcccatctcttgttggagactgtccattactttctagttgcattaactaggaccagcagttaatggacaagcaagaagggagttagataaaaatgggtgaatatggattaagatgtgaagatgaattttattattattattattattattattatttgagatggagttttgctctttttgcccaagctagagtgcaatggcacgatctccattcactgcaacctccacctcctaggttcaagcaattctcttgcctcagcctcccgagtagctgggattacaggcgcgtgccaacacgcccagctaattttttgtagaaacagggtctcaccatgttaccaggctggtctcgaattcctgacctcaggtgatctgcctgcctca

SEQ ID NO: 898257 - DNA, 587 bp, Homo sapiens
attcgcttgtaggaaataccttccagatctagtctttaggtttgcaagtgtgaactttggtgagacaacaacccttggggttacatatttaacgagagagattggggatggttgatgactgtgatagctcgtggagtgggtggtgatggtgctctgggtatggaggtgagggacgtgttaggcagccctccagacttttttatgcccatctcttgttggagactgtccattactttctagttgcattaactaggaccagcagttaatggacaagcaagaagggagttagataaaaatgggtgaatatggattaagatgtgaagatgaattttattattattattattattattattatttgagatggagttttgctctttttgcccaagctagagtgcaatggcacgatctccattcactgcaacctccacctcctaggttcaagcaattctcttgcctcagcctcccgagtagctgggattacaggygcgtgccaacacgcccagctaattttttgtagaaacagggtctcaccatgttaccaggctggtctcgaattcctgacctcaggtgatctgcctgcctca

SEQ ID NO: 898258 - DNA, 620 bp, Homo sapiens
aagccctctggaaagtgaccaccaacaatctcacagcaccctaatctagtacttaataagtgttttccctagattacttgattgtgaaaattattgacagtaggagaactgatttaagtgtgtgggaaaattgtcttatggttatctttaaaataatgctgggttctatttaaacacatttaaaacattttgttcaataaaatatacatacagagaagtttctaaagccttgttttaataaaatttggtcttataagttcaagcttattcctttatacctaaaacatttttgagatccttcatgtattaggtactgggtcaagaataagacatgatccctgccctgaggagacttacgataaattagaggacaaatatgtaaataaacaaacaattacatatagattctgatgggtgtgaggtaatggaggtccatttggggtacagtggagcacaaaggagggaaccccaatggagcagatggaggatgacgaaakgtcagggcaggggtcaaatagatgtgagaggaaacttaggcaaagaggaatcaaaagcccagctaccaaattgaaaagaccttgcaacattgctaactgaagaaagtacaagcaaattgaaac

SEQ ID NO: 898259 - DNA, 620 bp, Homo sapiens
aagccctctggaaagtgaccaccaacaatctcacagcaccctaatctagtacttaataagtgttttccctagattacttgattgtgaaaattattgacagtaggagaactgatttaagtgtgtgggaaaattgtcttatggttatctttaaaataatgctgggttctatttaaacacatttaaaacattttgttcaataaaatatacatacagagaagtttctaaagccttgttttaataaaatttggtcttataagttcaagcttattcctttatacctaaaacatttttgagatccttcatgtattaggtactgggtcaagaataagacatgatccctgccctgaggagacttacgataaattagaggacaaatatgtaaataaacaaacaattacatatagattctgatgggtgtgaggtaatggaggtccatttggggtacagtggagcacaaaggagggaaccccaatggagcagatggaggatgacgaaatgtcagggcaggggtmaaatagatgtgagaggaaacttaggcaaagaggaatcaaaagcccagctaccaaattgaaaagaccttgcaacattgctaactgaagaaagtacaagcaaattgaaac

SEQ ID NO: 898260 - DNA, 560 bp, Homo sapiens
ttatattacccctacatatgaagttagccccatctgtaaaataaggctaagcataaaaacattcactttgtagaattgttattaggttggtttaaaagtaatcacggctttccccattacttkttgcgattaccacgattacatttgcaccaacctaaatagattaattgaaaagacacatgtaaattatctggcccagtgaatgtcatactctgggccctcaacagatattatgtccttttttttttctttttcatttcaattctgattcctgctgccaaacttgatgaaaactgtcatcaggatctgatgcttaaaagccattaattagagccttgttaaacctacaacactcaatctctacgaccctaacaggcctctgctgaaatctcctctgacgtcaacccatcagcagtggatttctaaaactcttaggaagtcgttttgacttgctcagaatttctcttggctgctgaattatttatgtgccttgatggattctgaagtcagcctcccccataggaggtgggtttataaatgaggcctggagcagtctgatg

SEQ ID NO: 898261 - DNA, 736 bp, Homo sapiens
acctatagaaactgcagtcaaaaagatttggaggttatttaggaaggtagagcagggcagttatttaagctcacgaggcttcttgagaagagatgagaattgctaccttgaccrtgcttcggggtcagcagaccacagggcaggaattacacaggggatgttggacaaagtggttgtaaagcggaacgggggcctgacagcagaaagccttgaacaagaggccatggccaagagcattccaaataatgctgaaatgtatgcttgcagatgccatgaagactgagttagtttcagagaacaaagtcctgcgggaagagaatgacttggaagccggcaatcttcatcctcagcaggatcaaagctgtctcaaggagtgcccttgcatgaaaggaggcacagatatgcaggtagtgtctgacccagccctggggatggagaaggcacagagagctttgctatctattataagcgtcaggtagaggccagtccccaagcatagtggatccacttggaatcagaagaccctgtagttcctggagtagaattccagccaacttactgcctactccatgctactggaaaccaggagactgagactgtagcagaatcctcccaacgctatatcatcggcttctgggaaactggaaactggcttaggatctcattgcatgttcccagtcaaaacaagcaaagcattatttaaaatctaccatagtatgggctgaagtatctgatc

SEQ ID NO: 898262 - DNA, 689 bp, Homo sapiens
gtgcatagtatatttcttcttatcggctgctttcaagattttctctttatcactagttttcaacaatttgrttatgatatgccatgatgtgattttctttgtgtttttgttataggctcattgaatctatgagtttacagttttcatgaaatttggaaattttatggccatttcttccatttcttttcctgctcttgcttctcttctaatattgtcccacaagtcattgaggttctcttcgttttcagattccttgtctctctgtttcagtttggataatttctcttgctgtatcttcaagtttactcatctttctttctgtaccatctaatctttttaaaaacccattcagtacatttttcactttagatattataatttttagccttagaaattccattctgttcttctttacagtttccttctccctcctcattattttcatgttttcctttaaattattgaatacatttataaatgttcctttaacattgtcatctctgtcacttttgggtcttttttattctgctctttatgagacacatttttctgcttctttgcctatttagtaattttttattgaatgctggacattgagaatgttaagttgttgaacatctagtttttgttgtcctctttgctgaattttgttttgacaggcagttaaattacttgtgaaccagcttcat

SEQ ID NO: 898263 - DNA, 593 bp, Homo sapiens
gatcagtgatactgagcttttcttcatatgcttggtgactgcatgtatgtctttttttgaaaaagtctgttttttaataactagtgagatttctcacttcatcacaatattttttaatttagattttctcatttaaatttcttaccactttttagacatagatgcattctttatatttcatctgttttcagatgaatattaattgacaatttggtactagatcctcctttaattttttgttcatgacttgtctgtccacagtaaaaaaaaaaagtataaatagtagcaaaatatagaaaccaatggttttcaggcattggataacaggaaattcaagtctacaattttttttttttttttgagacagagtcttgctctgtcgctcaggctggagttcagtggcgcaaccttggctcacttcatctctgcctcctgggttcaagcaattctcctgcctcagcctcccaagtagcttggattacaagtgtatgccaccatgcccggctaatttttgtatttttagtagagatggggtttcgccatgttggccaggctggtctcratgtcctgacctcaggtgatctgcccacctc

SEQ ID NO: 898264 - DNA, 635 bp, Homo sapiens
cacaattcacaatcacaaaatcgtgcaaccaacccacatgcccatcaatcaacgagtggataaactgtggtatatatataaatatayatactatataatatatattatatatataatgtgtatatacatactatactatatatatacaatatacagtatatataatatatatatatagtatatatatacacaatggaatactactgagccataaaaaggaatgatttaacagcgtttgcaatgacctgggtgagattagagactatgattctaagtgaagtaactcaggaatgagaaaccaaactttgtatgttctcactgataggtgagagctaagctatgaggacgcaaaggcataagaatgatacaatggacttcggggacttggggggaaagagggagggggcgagggataaaagacaacatatatggtgcagtgtatactgctcgggtgatgggtgcaccaggatctcacaaattactactaaagaactcacccatgtaaccaaataccacctgtaccccaataacttacagaaaaatataataataatttaaaaagtgtactttgcttcctttcattcctgctttaaaactttttagtaaactttcattcctgctctaaaatgtgcctt

SEQ ID NO: 898265 - DNA, 635 bp, Homo sapiens
cacaattcacaatcacaaaatcgtgcaaccaacccacatgcccatcaatcaacgagtggataaactgtggtatatatataaatatacatactatataatatatattatatatataatgtgtatatacatactatactatatatatacaatatacagtatatataatatatatatatagtatatatatacacaatggaatactactgagccataaaaaggaatgatttaacagcgtttgcaatgacctgggtgagattagagactatgattctaagtgaagtaactcaggaatgagaaaccaaactttgtatgttctcactgataggtgagagctaagctatgaggacgcaaaggcataagaatgatacaatggacttcggggacttggggggaaagagggagggggcgagggataaaagacaacatatatggtgcagtgtatactgctcgggtgatgggtgcaccaggatctcacaaattactactaaagaactcacccatgtaaccaaataycacctgtaccccaataacttacagaaaaatataataataatttaaaaagtgtactttgcttcctttcattcctgctttaaaactttttagtaaactttcattcctgctctaaaatgtgcctt

SEQ ID NO: 898266 - DNA, 641 bp, Homo sapiens
gacaccatactcccggtgcatgtaatcatctttaccaaatattcctcatgtatattccgcagctctattgattttgttagactcccattcccttcgagagatgacgattggagtgtagaggkagatgaggtacccatttggttattaattggtagaatcctgaacactgaattacattagtgaacaattgacccaattagatggcaagatgatgagtataccaaatggctaatgactagtttattacaactgtcttaattgattagagtaagtcagctgatcaacaatttgctctgttgccttcatatttaaccatattctcacttaacgcaaaacacaaaagcacatcacctggatggttacttcattctcctcattgtatatgcacaacctacttttattttatcttgatggtacacccatgatgacagatgcagtgcagtacttggtgctttgcatattttgaaatgatcagagtatcatccttgaaaataattccaccttcagtttgtgcctccagggacacaatagtttattcacataagaaacaaaaatgtcatccatctctgttggcttcactctctgacaaattgcctcactgtttgagactttcccctttctgcctgcccctatataagatt

SEQ ID NO: 898267 - DNA, 556 bp, Homo sapiens
acagtggaaatttggccttgtcctccatgactaaacacatttcataacaggcagcctttcccctactgctaagtggtttcaggtactaaaatattaaagaaatatttttggctttcctagccaacggtggagcttaaattttcaacctgcttcatgaaaatacaaagtgttaaatattaactaaattgggctatttttagctttctgttctgcttaagctttctcttcctaaagcactttgcctgcctactggccccttgtaagaaactttttgcctggagaaaagccaggtcagtacagatggagcaacctggatgtaaaaccaagacatttaggcaagttgatggatccaagtaaaaatattggcactataagccatcttggggctttcctacaaactatgacccctcaggagcattggagttcttaagctgtcaagtctttatattttgacaaaaagaaaagaatttgagattattttgttagtgaaaatagccttagtactcayattgttttctcccaaagcagatgttccagaggatgaatcgattaagat

SEQ ID NO: 898268 - DNA, 561 bp, Homo sapiens
tgagaaaaatggaatacccataccatttgagggctgtagatacaaagttcaagttgacactgacgcacagggacccaaaactccatctggcctccaatagagtaaaagtacaggggagtcatstaataaatgaagtcctgacccaggtctatctcacaatgtccactggatccagataccacccagtggtcgtttcctcagttcctgaatacgtaatggaaagggacacattaagttgttggcaaaatccttacactggttcattgacctatacacttagagctatttaataagaaaggttcagtgcaagcaactgaaactcccttcatgtccagccaagatagcaaatgtaaagtaatcattatatttttggggaaatggtagataaagatttaaaggatgcaggggcaatcgtcctgcaaaaactaggttcatcatggagaataacagtgtgccactgcaaacttaaccaattagtacagccaattgcacctgctgttctggaatggtgtctttattagagactctggcaagtggcatgaagctattgatctggcaaat

SEQ ID NO: 898269 - DNA, 608 bp, Homo sapiens
taacttgtgtttatttctaaagaagaaaaagataatttcatggcttcttgcctcttaaagcatattccaacagtccaaattaactatttcacattcatctctttatctcatgattggaatttyctggaatatctaaggatttaagatgaatgccttattattgaagtagttaagaaaacagcacagtagcaaccataactgcataaatgcctttacttgttaaattaatttcaactaacagcaaaattgcagttcatgaattcatgaattacactgaagctacgatggctccttttaatactttcagactagagaactgtgagtatatatgagtgtgtgtgcgtgtgtgtaaactagtgttaatatacatatcaaaatgctatcatttcatacaaatctagcactggcaaggaaggtctctgtagaatccttgtgcggactaggatgcagttttttgacataagagtcattcatggtcaagattaatcttccatgtgagtggtcacagtttgaaataaaattctccaattctagggcagacactgagatggctgaacacttgaagagactgagggacgtaccctataaaggcttgtgtatactttttc

SEQ ID NO: 898270 - DNA, 536 bp, Homo sapiens
aagtgtcgataaaaatattatgaaaggcaagatgtgtttcttcctggctgcgtgtgccatttatttggggaaagacaataaatgactcakggattgtccctcagcctgctgcttggtgggtgattagtgattaattaccttgcagcaaattgacatggcacgaggaaattgacacagccctgattaattaactttttatgggtggtagttactcacaaaacactgcgcaccataattgaatctctttacataacgtcatggtagaaaagttttagtcaaatccaaattagccagaagtttctaggctgttataggtctgattgggatgcatcgaaggaattggcaagaatgtgaacttggagagaaatgcacatttttgaaagggaaaaaaaagatggtgacaacgtgctggcctgattgtccaagctgaatatattgatctaaatctcgacttcagctagacttcgggaataagattgtaagaggctaaaatgtctcttttttctccagcctcacttggctgtatttcagtggct

SEQ ID NO: 898271 - DNA, 574 bp, Homo sapiens
cacctgctgtgtgtccagttggggacccctgacctacaaaatgactaaaaatgcagcaaartctccaaaaatgataaaactagaagtggaagaaatgctccaagataacatggagtcatctctacttggctctgtttgagtttcattgctgctgacttccttagcttgtctttaaagcgcttaacttcagaaatcacttagcacatttttcaacctcgtgatttccctgcctcccctgagaagtaggagggaacacatctgagctttttagaccctacatgagaagccacagaacttgcttttttttgcccatggatacctgtcatacatcagaactatgcatacataatacgtacacaaatccaacactgtggcatctaaaagactcagaccatttacccatggcaaatcagatcacatcatcttttctctagcccaccaatgccattcaaaacctcttcctattctgaaaacctcttcctattctgaaacccaacagcagatttgagggaaagcagaatagcagccactctcggagtagagaagacacagtaagtaagtcccacttttggtg

SEQ ID NO: 898272 - DNA, 574 bp, Homo sapiens
cacctgctgtgtgtccagttggggacccctgacctacaaaatgactaaaaatgcagcaaagtctccaaaaatgatamaactagaagtggaagaaatgctccaagataacatggagtcatctctacttggctctgtttgagtttcattgctgctgacttccttagcttgtctttaaagcgcttaacttcagaaatcacttagcacatttttcaacctcgtgatttccctgcctcccctgagaagtaggagggaacacatctgagctttttagaccctacatgagaagccacagaacttgcttttttttgcccatggatacctgtcatacatcagaactatgcatacataatacgtacacaaatccaacactgtggcatctaaaagactcagaccatttacccatggcaaatcagatcacatcatcttttctctagcccaccaatgccattcaaaacctcttcctattctgaaaacctcttcctattctgaaacccaacagcagatttgagggaaagcagaatagcagccactctcggagtagagaagacacagtaagtaagtcccacttttggtg

SEQ ID NO: 898273 - DNA, 612 bp, Homo sapiens
gaaatattgtgtgtggatcacttgcttataaggcagggtttaagtcacggggcaaaatcaatatctttttcatgtttgatctaagatgtccaaatataacctaacatactggaacatgcacaggggttaacagaaggcagaagctctagtgcactgaggcatctatacatgaggcctatgaacattttaaattaacattattccccacccctacctcccattccaagcggtctccccttttgtttcatgctccattccactaaggctctgaaaatgttaaacaacttttgtattgcaggaacattccctgccactcccagcaattcaattaaccattgcacctagcactgggcattagtaaagtgttaaggatgtcgccacctctcacaatgagaagcagagatacgagtctaggggttaagagggaaattgcaggaccatcagcaaagaggttttatagaaagagtataccattgttttaaaatgtcagcatgcatcatgcatacctcttgaactcaccaggtaagactttaamccgttatgaaggttgaggctgaccatataaataaaactgaccctgccttttagaacagagatagttgggtgcatgtt

SEQ ID NO: 898274 - DNA, 612 bp, Homo sapiens
gaaatattgtgtgtggatcacttgcttataaggcagggtttaagtcacggggcaaaatcaatatctttttcatgtttgatctaagatgtccaaatataacctaacatactggaacatgcacaggggttaacagaaggcagaagctctagtgcactgaggcatctatacatgaggcctatgaacattttaaattaacattattccccacccctacctcccattccaagcggtctccccttttgtttcatgctccattccactaaggctctgaaaatgttaaacaacttttgtattgcaggaacattccctgccactcccagcaattcaattaaccattgcacctagcactgggcattagtaaagtgttaaggatgtcgccacctctcacaatgagaagcagagatacgagtctaggggttaagagggaaattgcaggaccatcagcaaagaggttttatagaaagagtataccattgttttaaaatgtcagcatgcatcatgcatacctcttgaactcaccaggtaagactttaacccgttatgaaggytgaggctgaccatataaataaaactgaccctgccttttagaacagagatagttgggtgcatgtt

SEQ ID NO: 898275 - DNA, 611 bp, Homo sapiens
gctcctagagcagtggagaggcagagtggatgagctgtaccagaatttgcccttggcctgtatctcagaaaactccccatgaaataayacattttagagggaagaagaaagaccatatacttagagataggagattaaatctgactatggtaaaaaatgtttgaaaaattcgttatctctgtttgttcacaacactcactccagttacacccgtcaccccagagcagcagacttttgccttcttaacttgtcagagccagtgcccagttctcctggggcgttttagatgctgatctcaagctcgccaggtggtgtgagtgggcagccaggtctctcatccacatgagtgatctcagcatctgttctgcctgtgccatgaagctccgcaggggcccttccaaccctgggaatgtgttgccaacaagatcccttctgtccctgtcaggcagaggtggcagagcactctttggcagtaagctttgtacccgaaccatttcttttttcacagtctttagataaggcagtttgagttcatttcaatagctggtacttcccgggttctgccaactgcctgtgtgctgtgaggagaggagagagcttttgtgaaatta

SEQ ID NO: 898276 - DNA, 595 bp, Homo sapiens
aacaaaggtaaaagttgttatttgaaaagattaacaaaatggaaaatccctaacaagacaataaagagggaaagtgaatgaawacggcatgtcactatagatcttacattttaaagaggttattaatacaatatgaacaattaaatttctttaattatggaaattcttctagttatccttttaaaaaattgaattctagcttaatcacactgtgtctctaaatgaagtgaatcctttgaaatttatggtcaagtttcaacatattccaagtatgcttgaaaagaatggttattctgtagatgctaggtgcaaggttttatataggccaattaggtcaagtgtatcaatcctatttcatgttgttgttgatatttttgtttactgttctattagatactaagaaagataccataaaatctccccctatgaattaggatttatatatttgtacttgtagttttgtcaatttttgctttatagattttaagtctatattattaggtacatatatattagaattgtcgtgtcttgatgaattaaaacttttgtcactgggaagtggtgctctttggctctgtttccttaaagtctactt

SEQ ID NO: 898277 - DNA, 632 bp, Homo sapiens
gcagctgagaggaaagtcagaggccaccaagcatgaaaagagagagatgaggctgtcattgctcaaagtcacccactctgggtgtgttttatgactgtttctggattttggaatattctcccctttgtgatcattccagggactcaccctcctcctatttccttctcattgcactttctgtccccagtgcaccctttttatggccagagactggctgtatgactagatgacaattcagtgaaagttacttgttgtgaggactgagagccaggcccaccctgctttttcccagaagagactggaggttcataaaagccagctttaatgcagggctgtgcaggtgtgagtgtggtgttagggaacaggtgcaaaagtgaagagtgagacagaaaaaaaagatgctggctgttcatcaaatcctgaaagtagagggagcaaaaattattctggaaggtggatgtcattcaggagaccttggaagacctagagtgtcctctgcacaaatraagtggaggatggggttaaattacggagttggatgacactcattacctgacttcacttctctgcctcagttttttaaatctgtaaaaatggggatgctgacactcaggattttttatgaggactgt

SEQ ID NO: 898278 - DNA, 563 bp, Homo sapiens
tcatctgcaaatttatgaagagctcgcaacctccttacaagcttgaaaggatgagcagacaaactccttgagcatcaaggagcgagaattctttcttttgctaggtcagatctacctgttcaaatttaacagaataaattcagaccctgatatggtttggctctgggtcctcacccaaatctcatcttgaattgtaattcccatgtgtcgagagagggacctggtgggaggtgattgtaccatgggggatggtttccccatgctattctagtgatagagagtgagttctcatgacatctgttggtttaaaagtgtgtggcagttctctctctctcctgctgccttgtgaaaaaagtgcttgcttctccttcgccttctgccatgattgtaagtttcccgaggcctccccagccatgtggaactgtgagtcaattaaacctcttttctttataaawtacccagtttcaggtagttctttatagcagtgtgaaaacagaccaatacaggccccaaatcccttatcctcaattcttaaatgaaaaaatctctgaagccaaaagagt

SEQ ID NO: 898279 - DNA, 622 bp, Homo sapiens
ttcttgcttgtccttctctgaccctaacctaccctggcaggggcattggagtgttttgttgtagtaagagtggaagcccagacttttcatttggactttactgatgtgggtggagtrtgctcacaggttttttttttatggtgtttgatcgaagcaaagtcatttttgtctttaagttttctgtctgctaggatgccccttttctgcttttttggctgcagcggtcaggctcttgccaaggcttttgttttttgtgcctgttggcatttctggattgctagctttttttggctccaagtcagatataggaggcaaaaagaaaagccacagaactcaccactaactcactccttggatcctggggtccttagccagtctgccttttattcatctttctgaatctttttatattttacttatatataatgttcagtgtttttagttgtacttagcagaaaaaatagaaaaatgctggaggtgggagttttatttttcctttatttttgaagcatacttttgctgggtatagaatttaatgttgacagtttttttcctttcaagcatttaaaatatataattctattgttctctggcttccactgtttctaaacagaagtcactc

SEQ ID NO: 898280 - DNA, 712 bp, Homo sapiens
agcttcatccactgcctagctgtgtggccttgtgcaattccttaacctctctgctcctcagtttcctcgtctataaaatggggatatgagctatgcttgtaagagggctgkggagaaaactagataaattaatatgcatacagtgcttggaccagcacctgataggcagtaaactccaaatccttatttgctgttactcttattatgtggtccttcttgggctctcagtgtgccaccagaaaaagataggcagagtcttggtgtaggacaaagcccttggtaatgtccatgacatctggtggggtgtggttatgtggactattgccagaatgaaagtcttaccctcactcgaccaagaaaaacacacaaagtccagagggtataagccatttccttcctgcttcgtttgaccaactttctgtccatatcgaactcccattactagatgcctgggaggctgttttctctctgacccccttccttcttgtccgcttcccaccctgggatcgtcttggtcttttcaggctcttgcttctccccacagagtcgcagctccaccttgaagggcttccgtaggcccaaccctgggcactgcaggtcttgccaagtcttctgagtgaaacctccatatgaccaaaaacccttgctttgtcattatctacagcctcttaaaggagaacctgggggtgacattatcctaacaaagtgcctc

SEQ ID NO: 898281 - DNA, 572 bp, Homo sapiens
cctctgagtctcagatcccttttttgttcccctcacaaatctattcccacggctttaccattcagcttattatctctgtccagataaacattagcatagcacattatcrtatctaaaacccaaccatacttcaacctctctaatttcaggttagggtgacttaatccttttggagaacgaaaatttcacaacatttctgtcctttggtaataggagtaggattgtgattttgccaggcctataggaagaataagggggctatgtgaaggattctgctttgccaaacctgtacacactagcccttgggagggttcaaaggatcctaaggatcagcagacagataagaagcattgtaatggtaagagcctggtaatgcaaaacaagccttctgcaaaaacagggctgaaccatgaggctgagcactagggcccagtgaagtctcctcatgtctaaaatctttgtcctcacgtctaaaatctaaacacttctacctgaaaacatggatgatcttgtctcaatggcatgtgtgcagagacagaaagagatggaatgccccatgaaaaggacaaact

SEQ ID NO: 898282 - DNA, 613 bp, Homo sapiens
cccagcacaatccaccccttttcccgtttaaacccacaaaatccttgcaacacatatttagcttctaaccaacaccagcaacaaattaatgagtctgcctaatatgatgtgtctgctcttatataaatgtagatgcactcacccactcttggaaaggtggagactcaaagtttcccttcagaactgtagccatctctggatagtgttaattctccttctagtttagtcacagtccttctttgataatcagtaaactaaaaattaaattacaaattaatcacaactaacaaacttctgtatggaaaagagaagataagaagatgtacgtacatatgcaagaaacaatacatagttaacatggtcctcatttttgcaagcagttacaaggccatacttaggctttaaacttctttcttctacaacccactctgtttcctttacaatcaatcagtcagcatctaagccagtcatagctttttatctgttggaataactcaaatctctactcctgaargtgcctgtagtgggttgctgtatgcttccactaacttcctgcataaggaatgcataccaataaatcccctaggctcccaacacaaattccctaggctcc

SEQ ID NO: 898283 - DNA, 526 bp, Homo sapiens
aggaaaacgtcacatttggaagtcaggtattaaaaccacagccaggcagctcctggccctagagctgaagcccaaacgcctccagggttttccattcatattccgttaccacctgttcaccgatcttgtctccacagtgagaggtgacagcgtgctggcagccctcacttgctctcagtgcctccttggcctcagtgcccactctggccacacttgagaagcccttcagcccgccactgcactgtgggagcccctctctgggctggccgaggcggagccggctccctctgcttgcagggaggtgtggagggagaggcacgggcaggaaccagggccgcgcatggccctcgtgggccagcgggagtgctggatgggcgccggctcagcaggccccacactcagagcggctggccggcrctggccccagggagtgagcatcttagcacccaggccagcaggggaggaggcagcaccaggtcccccagcactgccggcctgcccgcaccacgcttgaattcttgccagg

SEQ ID NO: 898284 - DNA, 526 bp, Homo sapiens
aggaaaacgtcacatttggaagtcaggtattaaaaccacagccaggcagctcctggccctagagctgaagcccaaacgcctccagggttttccattcatattccgttaccacctgttcaccgatcttgtctccacagtgagaggtgacagcgtgctggcagccctcacttgctctcagtgcctccttggcctcagtgcccactctggccacacttgagaagcccttcagcccgccactgcactgtgggagcccctctctgggctggccgaggcggagccggctccctctgcttgcagggaggtgtggagggagaggcacgggcaggaaccagggccgcgcatggccctcgtgggccagcgggagtgctggatgggcgccggctcagcaggccccacactcagagcggctggccggcgctggccccagggagtgagcatcttagcacccaggccagcaggggaggaggcrgcaccaggtcccccagcactgccggcctgcccgcaccacgcttgaattcttgccagg

SEQ ID NO: 898285 - DNA, 446 bp, Homo sapiens
acctgaccgcagccgcggcgccggccgctcggcccgctgggaaacgtagtcccgggtgrcctggcacgcgcaagcgctccgcggggagtccccaccgccaggacgcagagccgacggagctctcgggctctggcgaaagggggttgggaagcggactccggcgaagagcagtcaggaacggctggacggggccgagagacgacgcagcggagtctgagggggccggggtcacagggagaggcaaatgagggcagaagcactcttcagacggagacggggctgacggctgagcaaaaaaggggcgtgaacttggagtattggcatgaaaaaaaggtgggggcccagatggggagcacctcctcttcctcctgcccaatcgcgatcgtccggcctcccaggcggaaaaagcgtttcgcgggctttccaactgcccgctaattccgctc

SEQ ID NO: 898286 - DNA, 446 bp, Homo sapiens
acctgaccgcagccgcggcgccggccgctcggcccgctgggaaacgtagtcccgggtggcctggcacgcgcaagcgctcsgcggggagtccccaccgccaggacgcagagccgacggagctctcgggctctggcgaaagggggttgggaagcggactccggcgaagagcagtcaggaacggctggacggggccgagagacgacgcagcggagtctgagggggccggggtcacagggagaggcaaatgagggcagaagcactcttcagacggagacggggctgacggctgagcaaaaaaggggcgtgaacttggagtattggcatgaaaaaaaggtgggggcccagatggggagcacctcctcttcctcctgcccaatcgcgatcgtccggcctcccaggcggaaaaagcgtttcgcgggctttccaactgcccgctaattccgctc

SEQ ID NO: 898287 - DNA, 521 bp, Homo sapiens
gtgcgcaaaacacacacacacacacacacacacacacacacacacaaccctggttctacctctttgagctctctgcacttgagcaagttactctgtctccatgagtctgcttcctcacataaaaaaaatgagggtaattgttgtgtttactcacagagtagttgtgcagtttaaacaaattaattcaggcaaggtactttgtgcctggcacagagcaatctttcaatcactgttggctattatcaatttttgtgtaacaaatgaatggtaattatcaccccttctaaatactttttagacctatagatcacctttatgcagaaaattcccacttctctcctcaaggataacatctcttctgaaccccagataaatgtcttccattgattactgcacactttctctctgtatcatcctccatcattcacattacatcaaactcagtcttctgactggctyctttggtcttccctatttctcttaatgctatttttgtttatagctttttagaggtaattttg

SEQ ID NO: 898288 - DNA, 521 bp, Homo sapiens
gtgcgcaaaacacacacacacacacacacacacacacacacacacaaccctggttctacctctttgagctctctgcacttgagcaagttactctgtctccatgagtctgcttcctcacataaaaaaaatgagggtaattgttgtgtttactcacagagtagttgtgcagtttaaacaaattaattcaggcaaggtactttgtgcctggcacagagcaatctttcaatcactgttggctattatcaatttttgtgtaacaaatgaatggtaattatcaccccttctaaatactttttagacctatagatcacctttatgcagaaaattcccacttctctcctcaaggataacatctcttctgaaccccagataaatgtcttccattgattactgcacactttctctctgtatcatcctccatcattcacattacatcaaactcagtcttctgactggctcctttggtcttccctatttctcttaatrctatttttgtttatagctttttagaggtaattttg

SEQ ID NO: 898289 - DNA, 656 bp, Homo sapiens
tctcccaccccaagacccaagaagtcctacagtgggcttaggtccccaacccggtgtgtctcggaaatgcttgtgattcaacacagggagaggagggagaggagccggtctcggagraaacagcatctactgcctccctgtgtggatgagccggagctgctcttctcagaggggcccagtacttcccgctgggccgcagagctcccgttcccagcagactcctctgaccctgcctcccagctcagctactcccaggaagtgggaggaccttttaagacacccattaaggaaacgctgcccatctcctccaccccgagcaaatctgtcctccccagaacccctgaatcctggaggctcacgcccccagccaaagtagggggactggatttcagcccagtacaaacctcccagggtgcctctgaccccttgcctgaccccctggggctgatggatctcagcaccactcccttgcaaagtgctcccccccttgaatcaccgcaaaggctcctcagttcagaacccttagacctcatctccgtcccctttggcaactcttctccctcagatatagacgtccccaagccaggctccccggagccacaggtttctggccttgcagccaatcgttctctgacagaaggcctggtcctggacac

SEQ ID NO: 898290 - DNA, 653 bp, Homo sapiens
tgtcctctgcaatgagtaaatgttcacactacawaaacactcagaaacttcaatggcctgcggccgcctcaggagttcagcccaagctcctcagaaagacattcaaggcctccccagtttgccttcagttctctcctccactctccacgcatttgtaggctacagccaagcaatatgactcactgtggttaaaacgcatcctacattttcttgttccatgtcttggctgaggatgttcactctctgcctcccacctctcctattcccacgctgcaccccgcctttgtcttggaatccttcttatgtcatttgagttcacttgatgctctctgcatctcccacacagcctccccagcacagtggtggaaggatgggtctctcctctgtccacagttggtttctatctgtcttagtccattttctgctgctataacagaataccacagactgggaaatttatttttaaaaaaagagatttatttggcttatggttctagaggctgggaaatccaagagcagggcacttgcaactggcaaaggtcatcccatggcagaaaacagagggcgaaagcgagcacacaagacagagagaacgtcaagccaaactcgtccattccatcagaagcccacttccacaataacacaataatagc

SEQ ID NO: 898291 - DNA, 618 bp, Homo sapiens
caaggaacgaatcatcttgttcctcaccagtcataccaattaattaattaaactgtttgtttgctcttttgcccaggatggagkgcagtggtgctattacagctcaatgcagcctcgagttcctagggtcaagtgatcctcccagctcctgagtagctgagactacaggcgtgtgccaccattctgggctaatttttttttattttaattttttgcagagacaggttctcactttgttgcccaggctggtctcgaactcttgggctcaagtgatccccccaccccagcctcccaaagtgctaagattacaggtgtgagccatcgtgcctgaccttagatcctttttaaatcaaactgctataatccatcagggactattctaactagggatgcaatgacaaaagataagaccctgtcctcatgaagcttatattctattctcaggctctacatggttgtcttatttccccctcatttcaagtgctacatggctaggataactttattctgtgcctacagcacaaagcctactgcagatagtgccatatgccatctaagctgctgctttatgttccactgtgcagacacgaagcatgggactgatgctcctcagacagg

SEQ ID NO: 898292 - DNA, 618 bp, Homo sapiens
caaggaacgaatcatcttgttcctcaccagtcataccaattaattaattaaactgtttgtttgctcttttgcccaggatggagtgcagtggtgctattacagctcaatgcagcctcgagttcctagggtcaagtgatcctcccagctcctgagtagctgagactacaggcgtgtgccaccattctgggctaatttttttttattttaattttttgcagagacaggttctcactttgttgcccaggctggtctcgaactcttgggctcaagtgatccccccaccccagcctcccaaagtgctaagattacaggtgtgagccatcgtgcctgaccttagatcctttttaaatcaaactgctataatccatcagggactattctaactagggatgcaatgacaaaagataagaccctgtcctcatgaagcttatattctattctcaggctctacatggttgtcttatttccccctcatttcaagtgctacatggctaggataactttattctgtgcctacagcacaaagcctactgcagatagtgccatatgccatctaagctgctgctttatgttcyactgtgcagacacgaagcatgggactgatgctcctcagacagg

SEQ ID NO: 898293 - DNA, 677 bp, Homo sapiens
ataccgcttcaaaaaaaaaaaaaaaatgaatcatgaatgtctcctctaccagactcaactgtagaagagcaggaatggtgtcttcttttgctctccactctgttcccagcttgtagctacatagtgtacacacaataaatattagctgagtggatgaaccatttcttctctgtctttaaatgtaataccttgctccaaatagattttcgataaatacgaataaatggagaatgccattttaaatcattcaaaagggctcttgcagaataaaagacttagaagagaaaaagttgaacctcaaggctcaaaaatacaatcatctttccactgttgatctatgaactcatgaaagagaagcttctcctagggacagggtaacattcatcgggggaaaggggttttaaaacattaaataataagtttgcaaacttttcctttagggactaagaattttagcttttttgccagttattattcccaaactctgctaagtgatcactatgtgaaaacaacattaagtaggaagaaatggaaagagagtggtcttatgaatccatgcaattcaggccartttattacagttgtaattttcctttaatttttgagagtcagggttttccacagtaaatataccaggaagcatgatggctctccagacacataatggttaaatgatc

SEQ ID NO: 898294 - DNA, 570 bp, Homo sapiens
agagctgaaataataggaagggaatgcttcaacctttaacactcgaaaatcttttcccaatttaattcaccaaaactgccccttgaattattcagtctatcctaattaactccccagagagttatcttcaaggcacagttagttggttgttgcctaaggtcaaactccaagctagctctggatgtgggaaggatacaaaagtttctttgcacttgacaatttctgttacctgaggtgagacagggagacaaaactatcccattaaggttactgttgaacccaaagggacatacagaatttcatatcataggctgtcattggcagcttatcagaaaatgtcccttacaaaataaaattccagataagggagcattgcaattttaaatatttgatttgagataataagattcttcctaagacaaggtgataattttccttaagtatcccaagtagactgggaaatcctaaaaagaagactccagcaggaaatcccagaggaacctccaagctaggcctgctgagataacgatgccaaaaatccacagtcrggcattaaaatagctttttagc

SEQ ID NO: 898295 - DNA, 655 bp, Homo sapiens
gctgcaggctggcctgacattgaggataacagctcmattaaaatccatctcttatgtcttacattatggctttctgaggggttaaatgacttgaggtcctctaaagactttctttattcagtggtgtttcttctccctcctggcaatgaaattctaacagtgacatcctatccaccatccataggaattacagatttgcctcttacctgagcacagacaccactgctgaaagagtttaagtgggtgaaatgggaaaataccaatacaaagccataaagcaatggctgaaatactagtggttgatatactctcctcaaagggcagagtatggttatgacactaggagaccttaaatgcgtaattatgtctctaatcttaggcttcctagtgtcaactatcagccaccccagaaataccatcagacaaacatgttgatgaagtagagctgagttttttataattgtggcagcaagaaaacctcaccttgattgagtattggtaatctctcaaaaagggaatggtaagggaagatatgtgtcaggtcctgggtcttgtggtacaacaaatgactggtgatctgcgaccttggaggaaaacactgtctgtgttgaatttattgagccattttgaccatgcctaattttcatgctcgtgc

SEQ ID NO: 898296 - DNA, 632 bp, Homo sapiens
ctcacacctggatcccaaacctgccaagggcaagccaggcagagagcagcaaggggttgtgagcragtgagcacagggtccagccattgcgcacagccaggtactctggctgctgcagcagggttggcagctccaggccatggcataggtgctggctccatgcaaggctgcagctggaccaaatttatcacacatggcttctgctgcaggcacctgcatctggacttggggaatgtggtggtgcctgggagcttggagacgccgggaaccacagagcccccaaaagggtgtcacagccctgtcttggggagcccctagatctgggctccccaaaagtccatagctcttctgtccttctcatcacccacaatgtggtgagcaagggttgtgttacagctatttcagtcccatcatttggcgggtcccaagttcttgtcctgtgtctaggaagaatgaggtatgtggacaactggagggtaagaaaggcagagaggtgcttcattgagtgacagaacagctttcaggagacccgcagtgggtagctcctttcctcaagcaggtcatcccaacaagttgaagagacctaaagtgggtagctccttcctacagctggtagtcttgatgtctgtttg

SEQ ID NO: 898297 - DNA, 616 bp, Homo sapiens
tccacagttggttatccctctggtcagtttactgcttagtcaaggcttttgttaaaagccaaggctcattcaattgaggcctcatcttgcttgctatgacatcattaatcatggacttggctgggcagccactctgggacttggctgagccccagcagctgtattgttagcagaaggttgccctgaaaattgtgatgctgcttttcttcctgggtttgcagcaaaagcttcgtttgctggcaaggttttagggaggacattcgaagagaggactttttagctctacagttctttgctttcacctttcctctgatggggacacttgtgagatctgtgtctctcgagttttcttaccacactgacaataaaacagctgtcactgccttctgtacagcaacagatacagagattaaaatggtgagaggagggacaggaacgctgacgcctggcataactgcctgttctatgggtgcccatgacatcctgtgattctttagattagagcacttgccacagtatctacttgttgtatctctcaacaggcacwattctgcattttattggtattgcatcactaacaccacattcctgctacataggagtgccattaatattt

SEQ ID NO: 898298 - DNA, 552 bp, Homo sapiens
aggaaatggctttcaggcagtgaaaaacaggcagtataagactgcaatcattcggaaaagggaaactcgttagaaaccctataattgctttgttcttttccttgagacaattttccgagtaaagagggagctggattctgagcagaacccagtagttttttaacctggtaggtagctgataagaaataattaaaaattcagagcagctgaagtgtctaggatctgtgagggcagcagagctgagggagctctatagaggggcagcccctaaagtctgtttagaggagtctcctgtgagtctgtagctacacataagagagcgacttcattcaacagagatcagttgatttggggctgagatacaacagatactagagatcaagctatgctaggggaagagtactgcccagggatgtgagagctatggtcctacagagtagagagrttttcataattcatcaacatcttggcatcccactgaaacaccagaaaaactatatcttcagagtgaaaaccaagctttagaatgaaacttggtctagagccacccta

SEQ ID NO: 898299 - DNA, 602 bp, Homo sapiens
gtgtgaagaagctttgaatgtcagagtaagaaagtggcaggggaaggggtacagagagaaaaatgagttgcattctatttggggaggaataaatgagcatgtcagcatgatgtggcttgcttgactctgctccctattttttgtttgtttgagacagggtctcgctctgttgcccaagctggagtgcagtggtgtgatcacggctcactgtagcctcaacttcccaggctcaagtgatcctcctacctcagcctccccagtagctaagactacaggcatatgccataatacctagctaatttttatttatttttttggtctcactatgttgcccaggttgtctcaaactcctaggctcaagtgatccacctgcctcagcctcctgaagtgctgggattacaggtgtaagccaccatgcccaggcctgctccctcattttttcaactgctatgtattgatcacctataaygtgccgaaaattgggatggagctttcaagtatgtgcatacaagcatgtctggaagatggaatggctttcaaaaatcatctcaaaacattccatttcaataatataaaatgatatctctttcatattactactg

SEQ ID NO: 898300 - DNA, 602 bp, Homo sapiens
gtgtgaagaagctttgaatgtcagagtaagaaagtggcaggggaaggggtacagagagaaaaatgagttgcattctatttggggaggaataaatgagcatgtcagcatgatgtggcttgcttgactctgctccctattttttgtttgtttgagacagggtctcgctctgttgcccaagctggagtgcagtggtgtgatcacggctcactgtagcctcaacttcccaggctcaagtgatcctcctacctcagcctccccagtagctaagactacaggcatatgccataatacctagctaatttttatttatttttttggtctcactatgttgcccaggttgtctcaaactcctaggctcaagtgatccacctgcctcagcctcctgaagtgctgggattacaggtgtaagccaccatgcccaggcctgctccctcattttttcaactgctatgtattgatcacctataacgtgccgaaaattgggatggagctttcaagtatgtgcatrcaagcatgtctggaagatggaatggctttcaaaaatcatctcaaaacattccatttcaataatataaaatgatatctctttcatattactactg

SEQ ID NO: 898301 - DNA, 490 bp, Homo sapiens
tgaattccagtatgatgttatgatacatgtatacattgtagggtcactaaatcaggataattaacatatccattacctcacatacttattatttccatttaycaaaaagatgaaagatatcaagtgttggcaaggatgtgaaggaaaggtaacatttgtgtactcttagtggtaatgtaacttagtacagcctttttggaaaacaatatagagattcctctaaaactaaacatagaactaccatgtgatccagcaatcacgcttctcattatatagccaaagggtctgatttaatgatcatcttgatatctgaaattttgattgggcttaaagaggaaaaggaattcttttccctttgtaaacttgataaagactgggttgtgaatatgtgggccatggcagaatgtgacaaaaatccagaccctatgttcactaactcaagaacttctctaacacattgctaacctttctgacaccctcttacaacact

SEQ ID NO: 898302 - DNA, 490 bp, Homo sapiens
tgaattccagtatgatgttatgatacatgtatacattgtagggtcactaaatcaggataattaacatatccattacctcacatacttattatttccatttaccaaaaagatgaaagrtatcaagtgttggcaaggatgtgaaggaaaggtaacatttgtgtactcttagtggtaatgtaacttagtacagcctttttggaaaacaatatagagattcctctaaaactaaacatagaactaccatgtgatccagcaatcacgcttctcattatatagccaaagggtctgatttaatgatcatcttgatatctgaaattttgattgggcttaaagaggaaaaggaattcttttccctttgtaaacttgataaagactgggttgtgaatatgtgggccatggcagaatgtgacaaaaatccagaccctatgttcactaactcaagaacttctctaacacattgctaacctttctgacaccctcttacaacact

SEQ ID NO: 898303 - DNA, 532 bp, Homo sapiens
atgccctttgatgacagatgcatgttattgcacctgcaatatttctcagtcagaaagatgatatgattctatgtgtccagcttgtcttgtgcacacccgttttctactgtttgtgttctagaatgccaactgtttgcttcattattgtttcaaggatctatcaccccatcataaactactccaaattaggagcttaaagcaatcatttatttgctcaccacttttgtatcagcaatgcagacaagctaggatgagaggggctttctctgctccacgatgtttggatccttggctgggatgtcacaaatagtggtgactcaactgggatcacacacctcaggcctctgtggtcactggcggcctggttacttgggtcatccctatccacatggcttgtgtgagcttcctcacggcatggcagccgcatagtggctggagttcttacacagtgcctggttttccccagagagaaagcaaaagctgttggacctcttatagackgtgactggaatcatcacagtgacccgttacc

SEQ ID NO: 898304 - DNA, 676 bp, Homo sapiens
gtataaagtggagaaacttggaaaactgaatgtttgaaactagctagatacgtgttggtttcactgaattttcctttgctctttttttttggagaaatttagatctttgaagcaaagcagaagaagagaaaatggctgtcatggagatgcaaaaataagagagaagttcaaaataaagtgatggggaaagggtcaatttctgcagcacaatggccaggattatcactgagaggaggcagtgagggtggatgggaaggtctctcctttcgacctctctattacacagacagcatccagagggacagtcagtaaggaaaggtgaaaagctaagagatagactattgggctaggtacaatgatctctgcaactgaaggttaggaacatgatttcaccaacactcttatgaggactagaacaagtaaatgaggtaccaccactttggaaaactctgtggcactattaactaatggcaaagcaatattatctaacacctgcagttagtatctattcatcagtactactcctggttatctgccaaggaaaatgggygcatatgcccatcaaaacgcgtgcacaaaacatgtttctagcagccatattcataacacctaaacctagaaataatctaaatcaccacttaaagttgaatggataaaaaatattgtggtgtattta

SEQ ID NO: 898305 - DNA, 693 bp, Homo sapiens
aggctgaaatgtgtggttgctttgtatttacaattgtgatgtggtctgtatcaagaaaactactgatcaacrtaagttaaaattacaataaaccatcaaatgaaagctataaacagagtctttgagtggtaaaaggaatgcctcatacagatgctaaaaagaaaagtgatacttccagttttgtaaaagcactttactgaaatatggaggctccaagtccaagaaatgagaggctttgtacaaaggtctccgagtctcatcaactacttccatttagaaaaagcagaatctagaattcagatgccaaaagctgtgactcaaagatgacccctctgaggacgaacaagttaataggaaaggagacacttgcaggaactctagagaactgcagaagtgaatccaagatctgtttgttaactcaatggaaattgcaggaagaaaacaaattccttctaagtcccatgacacagtgaactctatatttttgaacctaaaatggaaaactaatttgcaaaattaagaaatggcaaaggctcaagaataggtgtactgatttataaaaccatatttcctgatgtatacaattaaaatgagcaaaaaccaattaaaatgataatactaccatcacttttggttttgcattggtgtagcaatgtagcaactgagcttatcaacattgagcctagtattgtt

SEQ ID NO: 898306 - DNA, 636 bp, Homo sapiens
attcaccactagccctacagaatgaagaataggtgcatctttaacctctctattggcaaggtggaaactggtamattaacattaaggatgaatgtttttcctgcagagaatgagaactgaatcaaagaaaaacagcagggttgtaagctccacaagggaagggaatgcatttctttgagccagtttctagcacagtgccaggtgcctggcatagcattcaaataatgtttgttgagtgagtgcaaagccattaatcaatgctgccataagcacctgttgggaattttcctgttcttaacccccactgtcgcagaaacatcaaagggttgcctggtaaccattatgtctatataaccctgcccacctagctgctgtggattggtccaaagatgacacacattgggccaatgagccattcccttggggaattggaagaaataatggattccagccttggtctacctctcatttgaaagaaggagacgttaactcaggaaagattggtagctactttctgccacatgacctgggaagtggagaaggcagggaagcatgaagcagaggtgccgacagaagcagagatggaaggtggaagaaacttcctataagcctggagctttgggtccagctcattcc

SEQ ID NO: 898307 - DNA, 614 bp, Homo sapiens
ctcaggcaattaatgcccaataaatatttgttaatatcaaaaccaggagcaacccatttaagattactatattttaaaaaagcatcacagccaagataaaatgacttagaaktaatgtccaccggcaaggagggccatgaaatggtaatgtttcaaaagcagttcttgttacaactgactcagcactgaaaaggagagtgaagatgaccttttcatggggtaccacaagtgacaagggtcaccgactttgtccaggaaaattagagcctatagcactttagaagcactagtaattatcagtgattatttaaatgccactagagcaaagaaggaaattaaatgtccatctgaaagaaaatgtatacacatgcacacacacctagaaacgtatatacaaacatacatacttatgctttctgttcagaagaaaaaacacaagtgagatattcaaaaactgtagttcaaagtacatgtcctgaacatcctctaagtgcaaagacactgggctataaagacaagtttaaatactgcctccagccccagaaagcttgagaatttattgagggaattatgattacctccaagtggaatggcatactgaatcccatttcaga

SEQ ID NO: 898308 - DNA, 605 bp, Homo sapiens
tgcctgatggcagatgctgcagctttttcttatcagggaaatagcccctgcatcacagcatttacaaagtagtgatgcagtgtgttcattttatttttctccttacccttacatgttcttggtgattagggcatcgatcccaggcttgagatttgagtgagagtcattttagggcaacagttggtgacctgggaatcaatatcccatctgctcattgctcgattgtcacttagtttgtgcttccctaaaattaattcaaatgaacataatttttaccataaaattatatatatgcattgtgaaaaatgtctctaaaaatcacctgaaaatataccatttaaagatagtagatttttgtttttgttaaacacatcccttttttctacacacacaccagctgaagtcaatttaactttttgatattttactaaaaatagataattgcctgatcatctacttttatctccatagrgaagttcaaagtcttcattctgtattttcctggacactagggaattaaatttcatttttgtttgttcatttatttcaccaatgctccttgggtgccaagtctctacaggacctggggtagagagaaagctggt

SEQ ID NO: 898309 - DNA, 636 bp, Homo sapiens
cagaaacaaaacattagtatcaagaataaataactggctgggtgtggtggctcacacttgtaatcccagcactttgggaggcctatgtgggaggattgtttgagcctaggagtttgagaccagcgtgggcaacatagcaagaccctgtcaccatttttaaaaagaataaatgactaatcaaataagtaataagagagtaaaatagaaagatggacaaaagtcataagtagaaattttacacataaccaataaatatgttgaagatatttgacatcattagtgatcagggaaatgctagtcaagagtatagtaggttatcaccttatactcattagattggcaaaaatttataagactaatagttccaatttataagactaatagtatcaagtgctggaaaaaaatatagatccttgagttctatgaggtacaattattttgagacattagttcccaaagttaaaaatattatgtaccaaataactcaccagttccgctcttaggagtacacgtaagagaattaagcatgcagcagaaataaacaagttcttaagttcttartggcactgtttaccatagcaaaacaacaacaaggaaataatgcaaacatccattaagagaaagtagatgaatgaa

SEQ ID NO: 898310 - DNA, 559 bp, Homo sapiens
gtcagttatttagaaaaaaacagttaataaggacttataaatggaagccatgtctgtgtctagggcagaggctagactaaatggtggatacccaygcgattacccctccagagtcagggcttgtataccatagggaaatggtatatgtgattcagaaggggtgtgtaggacaattgaagtacgacaacatcaaggttgtttgacttaagggcaggatttacggtaagcacctctcttacccaaggaataatagataaactggaaatctgaaaggacttcctggaactggggttattcagaagtcaacatggctgactagcatccaagatggagttgctttggcttccatactccacctccctaatccagcttttagaatctcacatgcacctctcttccacaatggttgctgagcctttagggagagtgcttgatgtgggatagctttagcagcagtgtgttggcaatggaaaacagattaggcccagtgggattccaaatgagaggcatttacaggctttgttgaattgtctgtagtctttaaaatactaagactttg

SEQ ID NO: 898311 - DNA, 559 bp, Homo sapiens
gtcagttatttagaaaaaaacagttaataaggacttataaatggaagccatgtctgtgtctagggcagaggctagactaaatggtggatacccatgcgattacccctccagagtcagggcttktataccatagggaaatggtatatgtgattcagaaggggtgtgtaggacaattgaagtacgacaacatcaaggttgtttgacttaagggcaggatttacggtaagcacctctcttacccaaggaataatagataaactggaaatctgaaaggacttcctggaactggggttattcagaagtcaacatggctgactagcatccaagatggagttgctttggcttccatactccacctccctaatccagcttttagaatctcacatgcacctctcttccacaatggttgctgagcctttagggagagtgcttgatgtgggatagctttagcagcagtgtgttggcaatggaaaacagattaggcccagtgggattccaaatgagaggcatttacaggctttgttgaattgtctgtagtctttaaaatactaagactttg

SEQ ID NO: 898312 - DNA, 649 bp, Homo sapiens
aactcctttttgtcgcctgcttcttgctcatgtctccagcttactgccagtccctcttgcacactgactctggcagtactgagtggctttctgttccctgagtgcccgggtctcccacttctgctaatgtggtttcccctgagtagaatggctgttagcctggcttcctcccacttctctttggggactcagccaaaatgtcacttcccccttctccaggcccagtttggttggccagaccccctgctgcatcatagaacctatcacattgggttatacctcaattgtccacgttgcctgctagtctacaagctctgtgagggcatggatcacgtcttttcgggaggttaagtactgcatagtacttaacttgtaataggtgtgtagtaggtactcaaatacttgaataaataaaaggattaatgaataataaacagatcatccattacaaaggtcaaatatttaggaattaccctgtattctttcttccccacctcctcccattactatctaacctatcagaaatgctagtcagctctccttccaaratgcaccccaaatcaactcacatctccccacccctacaatttccaccctggtccaagtaccatatccctttcttgggtcactggggtgttctcctagctgg

SEQ ID NO: 898313 - DNA, 649 bp, Homo sapiens
aactcctttttgtcgcctgcttcttgctcatgtctccagcttactgccagtccctcttgcacactgactctggcagtactgagtggctttctgttccctgagtgcccgggtctcccacttctgctaatgtggtttcccctgagtagaatggctgttagcctggcttcctcccacttctctttggggactcagccaaaatgtcacttcccccttctccaggcccagtttggttggccagaccccctgctgcatcatagaacctatcacattgggttatacctcaattgtccacgttgcctgctagtctacaagctctgtgagggcatggatcacgtcttttcgggaggttaagtactgcatagtacttaacttgtaataggtgtgtagtaggtactcaaatacttgaataaataaaaggattaatgaataataaacagatcatccattacaaaggtcaaatatttaggaattaccctgtattctttcttccccacctcctcccattactatctaacctatcagaaatgctagtcagctctccttccaaaatgcaccccaaatcaaytcacatctccccacccctacaatttccaccctggtccaagtaccatatccctttcttgggtcactggggtgttctcctagctgg

SEQ ID NO: 898314 - DNA, 649 bp, Homo sapiens
aactcctttttgtcgcctgcttcttgctcatgtctccagcttactgccagtccctcttgcacactgactctggcagtactgagtggctttctgttccctgagtgcccgggtctcccacttctgctaatgtggtttcccctgagtagaatggctgttagcctggcttcctcccacttctctttggggactcagccaaaatgtcacttcccccttctccaggcccagtttggttggccagaccccctgctgcatcatagaacctatcacattgggttatacctcaattgtccacgttgcctgctagtctacaagctctgtgagggcatggatcacgtcttttcgggaggttaagtactgcatagtacttaacttgtaataggtgtgtagtaggtactcaaatacttgaataaataaaaggattaatgaataataaacagatcatccattacaaaggtcaaatatttaggaattaccctgtattctttcttccccacctcctcccattactatctaacctatcagaaatgctagtcagctctccttccaaaatgcaccccaaatcaactcacatctcccyacccctacaatttccaccctggtccaagtaccatatccctttcttgggtcactggggtgttctcctagctgg

SEQ ID NO: 898315 - DNA, 597 bp, Homo sapiens
tttcttgcgtctgatctgagaggaaatgctccaatcttttaccattgtgtaatgttaattattgattgtttatacacatttttacgaactcggctcactgcaacctccgcttccaaggttcaagcaattctcctccctcagcctcccgagcagctgggattacgagtgcatgccaccatgcccggctaatttttgtattttagtagagactgggtttcaccatgttggccaggctggtcttgaactcctgacctcaggtgatctgcctgccacggcctcccaaagtgctggtattacaggagtgagccaccatgcctggccagtaattcctcttcattcataatttcctgagggtttttattataaattaggtactgtgaaatgccttttctgtagcaattgaaacattatagaaattttcttctttagcctattgataggggagattacattgatagatttttgaatgttaagccagtcttgcaaatttgaaatatgtaccatgtgattatktcatatgattattttcatgtagttttatttaatttgctaatgttttgttgaggcttttacatctaatttcatgagacatgcatg

SEQ ID NO: 898316 - DNA, 736 bp, Homo sapiens
tgtctctactaaaaatccaaaattagccacgcgtgttggttgtgcatgcctgtaatcccagctactcaggaggctgaggcaggagaattgcttgaacccacgagatcaagccattgcactccagcctgggcaacaagagcaaaactccatccaaaaaaaaaaaaagaatgtatcaaaatttatataactaattttctattgttagacattcagtatgcttccaatttttagctactataaatagtgctgcaatgaaaaaatataactactttggtataaactccaaagaacagaattatgaatgaatgtttctaaggcctttgatataaacttccaaataattgcactaaaaataattctaagcaatgttgcatttttgcaactctagacataaatgggactatatctcagtattttctacatggacagtttaagtcatgctgacagataaatccgttctgtgcgccaggaatttctcacttctgttttgaagtgtcttctactagttgctcatataccagctgaaaatgtgcttccaaactaccctggcagctccactgctagcaccaaccacattgtatcttacatcagaggcagctggtggcctgcctgcttcctgcactccaggagtgcaaggaccaagcccrgctcacctctgcctcctccctgcacagctccttttaaacctctcatccttcatcaacagttctcaaactattttttaaactcttccgca

SEQ ID NO: 898317 - DNA, 637 bp, Homo sapiens
ttatattcttcattgtagtttcattttttctctatagtagtcttgcatagtcttggttaaattaattcctaatactatatagttttaaattgtaagtggtagtttttctttygaattttctaatatgacttttgtgattttgtaagttttaaatttttatattaagtgtttatctggcatccatgctgaactatctgaatagttatagtaatcattttattcattctcgtggatttttataggtagatgatcacatgtttacccaaaattttgtcttatttctttcaatttttacactttgtacttattttctttatgttttggtcatgacttctagagttacaataagcagtagtggtaatcaagcacattcctgttttgttcccaatcttaaaaggaatacacctaaagtttctccagtaagaattgtggttggtattctgggaagatggccatataactttgactctctccatattgcctcataaaaatagatagaggaacagtaacatctaaactaaggactcacgacgatatctaaaatacagctagatgacaaggtatcgtgatgaccctctaaatagtgggaacaaaccactgttgtatcccagtcctgtgtatcagaatttgagtagga

SEQ ID NO: 898318 - DNA, 637 bp, Homo sapiens
ttatattcttcattgtagtttcattttttctctatagtagtcttgcatagtcttggttaaattaattcctaatactatatagttttaaattgtaagtggtagtttttcttttgaattttctaatatgasttttgtgattttgtaagttttaaatttttatattaagtgtttatctggcatccatgctgaactatctgaatagttatagtaatcattttattcattctcgtggatttttataggtagatgatcacatgtttacccaaaattttgtcttatttctttcaatttttacactttgtacttattttctttatgttttggtcatgacttctagagttacaataagcagtagtggtaatcaagcacattcctgttttgttcccaatcttaaaaggaatacacctaaagtttctccagtaagaattgtggttggtattctgggaagatggccatataactttgactctctccatattgcctcataaaaatagatagaggaacagtaacatctaaactaaggactcacgacgatatctaaaatacagctagatgacaaggtatcgtgatgaccctctaaatagtgggaacaaaccactgttgtatcccagtcctgtgtatcagaatttgagtagga

SEQ ID NO: 898319 - DNA, 574 bp, Homo sapiens
caaaggcctgatgtccaaaagcatctgtcaccagctcataatgagtcaagggcagmggctgcatatattgttgctggtaacgacgtttggtgtctgcaaagtctagtctaaggtggtgatctgggccaccaagtgggaagtcctgcatatgggtccaggcagcgtgcactgcatccaggctttcatactggatatacacccaactatcacctttctgtagtctgtggggtgtatggtgccaagttggtcaaactctcatgtcagggcagcaagaggcatccaaggtttcaggccacccacccagaggtgggtggtgtgtgtagctttaccataaccaattttgataggattccaaattataattttgctgaacattgctaatttggccctgtgggacatatctaggttctcaaatttgagaaggctgtaattactgctctggccaagaaaagggctcttgatatctacttctgtgatgactccaaagcaatcaaacgcccttcttatgtcactctctgttacagttgtgtctaggttgcccaagaaaagcatctggttagttctatgatgatcc

SEQ ID NO: 898320 - DNA, 624 bp, Homo sapiens
tgctatacaaagtatttactgtctgagaactacccaagtatactggagtcatcagggaaacccaatgttctctacagcctaccacaagctactggacagggcttcacagattcgttccttgaaaaccactaatgcaatctgcgcacaacaataccatacaggagcttcccctcacccccaaaagtaatgcataactagggtcatagtaaaatcaaaatgcttttattatggtcaaaatcagagccattgagtcctaacagcttaaactagatatagaaagcagggcaagtagtgtaaaacctccacattttctaggcccttcttcatatagcagtttgattatacttcaatttggtgttaagaggacaataatacaaagtaaatgtccacaaaggaccaaaacaccaaattttccatgtccaacaactctctataattaatctactatgtagctagtgtccacgccaaatgttcagttcttaacattcgccaagaaggaatgggaagaaacagatgagtgacttcagatagggagtacactttctcttcctagtctccatcgaacaatctcacttttttaacwgagaatcccccacagctacatccaagttaagagcaaaatac

SEQ ID NO: 898321 - DNA, 589 bp, Homo sapiens
tactgtcctcctctagtccctgtctctgtggtctagctactttgcctcagccactgggcatcagatctggggcagcatggtctaatagaaatataacccgagccacacatagaatataatattttcttttttctttttttttgagatggagtctcgctctgtcacccaggctggagtgcagtggcgtgatctcggcttactgcttgctgcaacctctacctcctgggttcaagcaattctcatgcctcagcctcccaagtagctgggattacaggcgtgcaccaccatgcctggctaatttttgtatttttagtagagacggagtttcaccatgttggccaggctggtctcaaactcctgacctcaggtgatccacctgccttggcctcccaaagtgctgggattataggcatgagccactgcacccagccagaatatagtattttctaatagccacattyaaaacaaggaaacaggtaaaattaattttttgaatatattttgcttaacccaatatgtctagaatattataatttcaacacataaaccatttaaaaagtaaagagatcttttatattcttttttcata

SEQ ID NO: 898322 - DNA, 639 bp, Homo sapiens
aacatgtatatatatgttatayacaagtttgaaacatatttctgtttttatatgttttcttatgatgcaagggcatactcttatgcaaataattaaaacttcataggtcttaatttcccatatctctatatattattatgacctatccaactggtaaccctatgaacaccttaaaataaacttgtatactcttatttaggtgagtttttcttgttaatactattattattgctatctaattgaatacttgaaggaagttgtgtgaaagaccttggctttgattttagttcttatattcttctagtttttgaaaataaaacacttccatcaacccgtaagaatattcgtctgagaccttgggccaagggccccagacttcttattttttttaaaaaagagacattaatactgatcctactgagtcacttgacttttataagtcacaaatgagttgatacaagtcaacccattgaaaactatagttcactttacgtacatcagtaatagagtaagtgtttcttgcagtgagccaaatttccaaagactgtgccattatcattgtatataaggcctatgccttaaataagacttgattttataagactgggttcatccgcactaatgacacactcagactca

SEQ ID NO: 898323 - DNA, 615 bp, Homo sapiens
attttgttttccatttgcttggtgtattttcctctagccctttattttgagctaatgtgtgtcattgcatgtgagatgggtcttttgaagatagcatagcaaygggtcttggttctttatccagcttgccactctgtgtctttaagttagggcatttagcccattaatatttaaggttagtattgatatgtgtggatttgatcctggcatcatgatgttagctaattattatgccagcttgcatatgtggttgctttatgctgtcactggtttgtgtatttcagtgtgtttttgtagtggctgcaaatggtctttcttttccatatttagtgcttccttcaggagctcttgtaaggcatgtctggtggtaacaaattctcagcatttgcttgttagaaaatgatcttatttctcctttgcttatgaaacttagtttggccagatatgaaattctgggttggaatttattttctctaagaatgttgaatattggcccccaatctcttctggcttatagggtttcagctgagaggtccactgttaatctgatgggcttccctttgtaggtgacctggcctttctctctagctgcctttaccattttttctttcattt

SEQ ID NO: 898324 - DNA, 615 bp, Homo sapiens
attttgttttccatttgcttggtgtattttcctctagccctttattttgagctaatgtgtgtcattgcatgtgagatgggtcttttgaagatagcatagcaacgggtcttggttctttatccagcttgccaytctgtgtctttaagttagggcatttagcccattaatatttaaggttagtattgatatgtgtggatttgatcctggcatcatgatgttagctaattattatgccagcttgcatatgtggttgctttatgctgtcactggtttgtgtatttcagtgtgtttttgtagtggctgcaaatggtctttcttttccatatttagtgcttccttcaggagctcttgtaaggcatgtctggtggtaacaaattctcagcatttgcttgttagaaaatgatcttatttctcctttgcttatgaaacttagtttggccagatatgaaattctgggttggaatttattttctctaagaatgttgaatattggcccccaatctcttctggcttatagggtttcagctgagaggtccactgttaatctgatgggcttccctttgtaggtgacctggcctttctctctagctgcctttaccattttttctttcattt

SEQ ID NO: 898325 - DNA, 586 bp, Homo sapiens
attgtgcacaaagggtgcataagactatgcttagtcacagtagagtgacgctgtcacctctttacctgggtagtcggcatctccagggtaaggcacatgtctgtttaagctctatgtctgcaggagccagcaagggagcacctcttcagaggcctcatgcaatacccaccaccctttattatactgataagtaaattccattttaatcaggtggcaggtagcaatgtgccactgtcctaggaaagcaatcatgattggcctaagccaatatgagcaacttgtcttttttttttttttttttttttttgaggtaaggtattgctcattgcccaggctcgagggcagtggcatcatcatggctcactgcagcctcaacttccctgacaaagcagtcctcccacttcacctcctgagtagctggaactacaggtccacaccaccacacccagctaatatttttttggttttagagatggggtctcactatgttgcccaggctggtcttgaactcctgagctcaagcaatcytcctgtcttggcctccccaaattctggcattacaggcgtgagccactgtccctgacct

SEQ ID NO: 898326 - DNA, 530 bp, Homo sapiens
tggtgtgtttgacataagtcagtatttcacacctgaaatttcatggagattatgattcaataggtttgccaatacctaagaatctgtatgcctttacaaagctcaaatgattctcacaastagtcaaatttaagagagctccaattacagaaattgtagttaagttggagtatgagacaatttacgtatagaataatcagtacagaattaggaaagtcatgtccgttgatctgtttttgaggatcacataagatttctatagctggagaaatgaaggcatggagaacatttcaggttaagggaaaaactggggcaaagcacaaaggcaggaagttaccaagtctatcaggggagagagggaaatcaatcaagaaaggaatgttgagccagaaaacagggtattgatgaataagctaataaatgagtttagactttaatcatctgggcctagcaaaataactgataaattttcaacagaagaatagtataatcaaactattactttatgaagaattatttagcaaacaaga

SEQ ID NO: 898327 - DNA, 480 bp, Homo sapiens
cgcttgctccattaacatggaatacattgattagttgggaattgtgagtatcctgataatcaattttccccttaattttgtgagcacatatgtgtccttttcatgaacagcttcacttctcatactatccatcccaagaaacaaacttagatgccatatgaacttgttttgtcagaaaatgcccagagcctaatagctatatggactttaaaactttaattaatgtaatcacttacttcaacatttggtcttctttcccatgttatcttatttcattttcacaagaacgcattaaagtaggtattttattcccatttttacagatgaggaaagttaaatttgaagtgtgtgcacagaacggcagaacttggatccgaacccaaatctcttggatgccaaaacytacttttcggttgctcctctaaaattgttggaatcttgctaactggccacttaaccttttacactttcaattgaaaa

SEQ ID NO: 898328 - DNA, 635 bp, Homo sapiens
ttgcctctggaacatttattgagctattactacatgccagatactgtaaaaagggtgttgcattcattattaaatttaattcttaaaataaccctaggggatagtttcaagtcttcctcttattttacagattgcagaattgtgcatttggaaagattaatcaacctgcccaaatgtaaaaaccactaaatttctagggaaaattaaatcacaggttactgactctagaaccaagctcttaatcaaagcattctatactacctacatttatcctacaaattttattcccgtacaaagatcagagaagaaatcaccaacagtttcttacaatgtgggcatattttattacattaaaatctaatgtgttttttgaggatataaatgatgcaggatgagaacttagctgtgtactaagtttttagatatttgaaggtctgggtcatctagcctgttcattgattaatccatccacctctgtgccagtagtgtagccttttaattattgtggctttatggaaaagagttttgacagctragcaccaaagaaattattcagttttccctgtactgtgatcttttgatatactgaggcaaaactccaaatgcagcctcaggaaggttacacaaatttcagc

SEQ ID NO: 898329 - DNA, 635 bp, Homo sapiens
ttgcctctggaacatttattgagctattactacatgccagatactgtaaaaagggtgttgcattcattattaaatttaattcttaaaataaccctaggggatagtttcaagtcttcctcttattttacagattgcagaattgtgcatttggaaagattaatcaacctgcccaaatgtaaaaaccactaaatttctagggaaaattaaatcacaggttactgactctagaaccaagctcttaatcaaagcattctatactacctacatttatcctacaaattttattcccgtacaaagatcagagaagaaatcaccaacagtttcttacaatgtgggcatattttattacattaaaatctaatgtgttttttgaggatataaatgatgcaggatgagaacttagctgtgtactaagtttttagatatttgaaggtctgggtcatctagcctgttcattgattaatccatccacctctgtgccagtagtgtagccttttaattattgtggctttatggaaaagagttttgacagctaagcaccaaagaaattattcagttttccytgtactgtgatcttttgatatactgaggcaaaactccaaatgcagcctcaggaaggttacacaaatttcagc

SEQ ID NO: 898330 - DNA, 616 bp, Homo sapiens
ttctaggaaattccccaaattcgctaactataagtaatgtttatcctttagctctttggattatttcccccaagcacacatactccaatgtaataagcacagaaaaatkgtgttataaacacacacaacacacacacacaacatacagcacaataatctgatgaaactgggatttctctgaattgtggaagcagaggtaggtccacgttagcacacatgttcgcatagaaggatcaacataagcattacactttattttgcaatgtttcatctttttctcctttaagagagagtccttcttcggtgtctcctagacactggtaaccctggagaagtgtgacaactctcaatattcactccataaaattgtgacttgcttttcccagaagaagtggctataagagcccaaaaatcttggcaaattagaaaatgaccctgagaatagacgcatcttaaagtcttatccgcatattgcaggaaatagaaggtgagcattaagataggttgatactttcctttttaaaaagaagggaaaataacattgaagaacttatcatgtgcaaagcactgcattagggcactttatattcaatacctcatttattctccattacaa

SEQ ID NO: 898331 - DNA, 608 bp, Homo sapiens
tattttaaataatatctttcttttaaaaaattggagaactgcttctacccatgacagaataactgatatgagacttgccttcctgccaaaaataactataaaactagacaaacatatgaggcaactgttttcagacactgaacaacagacagtgcatcactgtaattttgagaaaaggcatacacatgaggtgagccccactgttcatctagctttctggctggaggcacctttctgtcaaggcacaaagatgggaagtccaaatggagcaatagttgcactgagctgaggaggtggagattggagtcctactttgttgaaatggctggattttatgaagcagaataacagagaatagtgatcttcacaaagaacatggggccttggctgcgggcacagaagtgcatgcagagtgagattccaggaagcctagcagaagactcctactatggagctgtgaatggtatggtgataccagaggtcatgcactgytaaaaagcactgaaattttggctaagccaaggtagagaaagttcactgaatgccccaagcctccagctgagaccttgaaaaggccatgcctttgggttaaggaccaaggccctaag

SEQ ID NO: 898332 - DNA, 664 bp, Homo sapiens
agatatcttgtgctaaacagaagaggtactctattgtgccgactacaccaatttcttaaatttgcgatctttaagatgcagagctcttgccaatgattgcgagagacataagatgaaaataaagatttattacttacaggtcctgggggatacaggccctgtctggaggacacacacacacacacacacatacacccacacccacacacacacacagaggtcaggggcagtatggggaggacagagggggaacccatgggtcaaggcctttattagggtacagaatattattcaaacagattgtcctcagggagttttaattggtggatttaatgcaagcagacatgagatccaggtaattagaggtggtcactgcagcaggcagggtgtggggtcagtggggcagtcatacgggctgtatccggaagtcccatagggaggaggtcaccaggaggcagttgtataaatcagatatctgatcaatcacactgaggaactggaaggaggtggagaactggaaactatttcaaaggtgactgagccctgcttctggtatgagaaagtccaacttccatccaaaacggatgccaaggcattrtaaaattgtaagcattcacaaatactttcgatgcattcttatttagctgacttctagtttttacag

SEQ ID NO: 898333 - DNA, 591 bp, Homo sapiens
gatttaaatcagtgagttttgagtaaagtcgatttccctccaaaatgcgtgtgggcctcatccactcacttgatggctttcataaaacaagagcgacctaccctgagcaggaagaaaatcttcccacaaatgatcttcagatttgaactgcatgatcagctcatccctgaatctccagcagatagcctactctgaagattttggacttggtaacctccataatcatatgagccaattccttaagatagatagatctctctctctctctctctctctctgagagagatctaagatctctctaagagagagagatatatatatatattggatttatatatataatttatatatgtataaaattatataattaaataaaaatcaaataaaattataattaaataaattaatttattataaattcaattataaataaatttataattaaataaaaattatatatcatatataatttatatatgtatatactttatctatataatttatctatataatttatatatgtatatamtttatctatataatttatctatataatttatatatgtatataatttatctatataatttata

SEQ ID NO: 898334 - DNA, 619 bp, Homo sapiens
taactttgaacttgtggtctcaagcagttctcctgcctctcagcttcctgagtagctgggactacagctgtgcaccaccaatattttcatcgtgtgcattattaaccctgcatcttatctgtaatgtttaaaaagttattggaagtgtttattaaatgcattagtgtgtgtgtgttgtattctcctgcagaaatttctcagaggagaagctctatgttgacaaatgctagaaaatggatagcatttactttaaatatatgtagcttactttttataattatatgaacagatttgtattcaaaaggactctgaaggtcatatccaaattattattgtggagaaaatcataaaaggagattgtatggattgactggaaagataatacttagttcatcatttggatcagtttgtggtcatatttttataattagagactttaagacaatatcttaatgtattactttacattattttcaattttcttacyatttaaaatattttcttcaatctttaaactattaaagcattttaatggtataatttatttatttggcatagttctaatgtcaagaaacttgtttctcagactggaaaccaggtcaaaaataagaataagcca

SEQ ID NO: 898335 - DNA, 502 bp, Homo sapiens
tcacccagtctgccccgttcccctgacctaaagtagatcagaccagtcctttggtttggggtaaggtggatctggagccaggaggtgaacagagcccccaactgtgcagacagcaccctgcccaccttttctagagggacagcattcagcagctggtgctttggaaatccagcccagcctgtgttgagagagttattattggcacattcctgaattttatcgggtgttttaaaacagcaattactgcgaggatacgcagagatctataaacactgggaaatgtatttatctccttgctctgtgacagctgggccagcttccacatgccaaatgttttgcggcagggtcagatcgagacttcagatggttgccagcagggagctactattttgggggcacaggtcatgggaaagtcttatagctcaaagytggcttctgtgcctatcccataacttttccttcggcctcgtgtatcacaattatcaacaagcctgtcaaattt

SEQ ID NO: 898336 - DNA, 524 bp, Homo sapiens
gtcccactgagtactaaaatgtttcctcaaaaagtgtcagtttgagatgtaaaaagaaaatgtttatttaaaagtactgcattctgctgtttttaatcccaagctgaatggagtccttcttagttgctcctgagctaaatccttttcactaataatagttttattcttaaaggtttcagtagctctgaatcaaattctgttgtgactcatgcgatgtgtgggtagcagctaaagactttcaagaagggtaagttactacagaggaaacatcccaaatgattttgaaaaataaattgtaacagttataaaacatccatggcagaatctgcaggcagccctagaattaactgtgctgaggattagcagcaggtaaatggttagaaagggaataaactggaaaaataacctttggaagagtgggttggaacaaaggtctatgctcatcaaaagcatctgacarttggcctaacaggaagacaggtgccatagaatgaggggttaggagagctgaagtaccggcagat

SEQ ID NO: 898337 - DNA, 606 bp, Homo sapiens
tctatagctataatgggttttctgtctttcaaaatggatattttactttcaatttagcccactgaaggataagtcattttcctttgttggrgaagcttgttaagttcagtttgagtctcagcagtgactgtagcaacagtgtttagagagtaattttgtttcccccaattactgtcatttcaacataattccatttgcaaggcaaaggatggtctccctccacctgggaaaggtcccctggaatcacagtcatggtagtcacattggagctgggggctgagagcctttctaatttcactttcttctggcagacaagtgatcacttgttggtataatgcagataagaaacctacttgctcatctctagctgctagcatcttcagtgctaacactcacaaggttaagccaattttaaaggcgaatctggcatagaacctaaaatgcaatactttgaaaatgcaaggcaggtttttacacctgtcccagcccagcatgacttcctcagaagcagagctcgaggcaaagacttaggtgttattccttattaaggagtacaatcccagggaagtaagagtgagcaaaaagaggggtgaggcagaaaaggag

SEQ ID NO: 898338 - DNA, 566 bp, Homo sapiens
aataaaaatacaaaaaattagctgggcatggcagtgcacgcctgtaattccagctactcaggagactgaggtaggagaatcgcttgaacctgggagacagaggttgcagtgagccgagatcgcaccactgcactccagcctgggtgacagagcgagattctatctcaaaaaaaaaaagagacctaatagtttatatgtgtgtctatatgtatatatgtatttttccataagtattcatatagcagatttttatactttttacataatagtgatagttaccatttattcagtgcctagaatctgccaggcactgttgaaataatgtatgtgtattagttcctttaatcctcaaaaacctatggggttgttactgttaccatcaccattccacaagcgataaaactgaggcacatgcagagaggttgagtaacctgccccagttcacgtggttaacatgttctctaagtatcaggtatttttygctattaaaaatgttgatcactggttagccagaagatccttctgatgagggcaattgatagtatggagtattagtatgcatagtg

SEQ ID NO: 898339 - DNA, 674 bp, Homo sapiens
tatttaactactgtgtgtatatatacttttacctataatgtatatttatgttatgtaatttacagcttatatgttatacattaytgttactatatattatactacttatacagatttatttatacctgaaccctctgaaaattttaatgtaaataattaaaaataatggcttgttctaatttatatacacataaatacacatgtgcacgtgcacacacacacaaactagtgagcattcacatatatttcacaaagctatggtatttaagcacagaaacagacaatgaacatgttcaagctcccttctcgaacatgttcatgaactacattatgtgattttctaaaaggaggatttttctaagcttcattttgccaggcttttaagcagatatgttttcacttttacaagaatgggtgagacttacttaaccatggcaaagcacttgtaaagtgtgaatacaagactataaatcattaatgtgaatttaatgttggaaaccttttcactagaagttttaacatagtaattcgtcacctgtaacagtgacatatgtgacttttcccatagcttaatatgaaatttcagacagtatctttagataaaatatagttcagagagctcacaggaaaaaagaaattgctcattttgaagtatattaccaacactattgaag

SEQ ID NO: 898340 - DNA, 508 bp, Homo sapiens
aaatataaataattgttttgcattttcaaaggtccttgaatatctcttgattttgctttaaaagactgcatttgaaaattataaatatcataattaaggtaataaatatgacattatggctgggtgtggtagctgatgcctgtaattccagcacttttggaggctgaggttggtggatcacttgagggcaggagcttgagactaaaccagcccggccaacgtggtgagaccccatatttactaaaaatacaaaaattagctaggtgtggcggtggtcgcctaaaatcccagctactcaggaggctgaggcaggagaattgcttgaacctgggaggcagaggttgcagtgagccaagatttgtgccactgtactcctactccagcctgggtgacagagcaagtctccagctcaaactaaataaataacaaacatgccatttataygtgtataaattatatttataagcatttctatagtcaaatatctaaatgttgagaaaagtaaaat

SEQ ID NO: 898341 - DNA, 640 bp, Homo sapiens
gtattctctatgaggatgagtttgactaagcaaatcaataatgtaaacaaaactgaactacttaagagaaaaaattattttcacacatttaacatatcagttatctttcttgtcatgttaaacatacatgacatacaatataccattttaaagtgtagaattcagtagtgttaagtgcactcacaatgttgggtaaacatcactgctatcttgttcccgagatttttaatgataccaaatggaaacctcgtctttctaattggaaatatcctcatttgaagtctacaagaatgctcattacaagcaattgtaatgctgatgagaagttggaagttggaaacaacctaaatattctttaccgggagagcattgggacaaatacctaatgcttgtagggcttaaaacctagatgacaggttgatgggtgcagcaaaccaccatggcacatgtatacctatgttaacaaacctgcacattctgcacatgtatcccagaactttttaaaaaaaaagaaaagaaaaaattatctatagaggggggaaaagagtggaaatgtgatatgggyataaaaaaattaacagagaaacaacaacaaaaaagccttattggctatcactatttctacttaacatgatgctag

SEQ ID NO: 898342 - DNA, 608 bp, Homo sapiens
tggcatatgctgtgaaaacgccctcaatcttcctcaaagggacctgtagccatttacttaggcttctttatactgaggaaaaaagaataacaagccatttcaaagactacttaataaagggcccgaattgacattgattgacccgaataaaaatccaaagatccatcatagcccagctttggagcacagagggctatgagagttaggccaaattagaaattgtggctaaagtccacctttcagtggtctgctaggtccatgaatctactcaaaggtcatttctacaatctccaagtacataattggaacggacgtccttagtaattgtaggaacccccttattgggtttctgcaatgtgagaaaaaaactgtcatcatggagaaaggccaagtggaaacctctgaaattccctctcacccctctgccaaaatagtaaataaaaaacaatattgtatcctgggagagacagcaaagacttgtgccaccattaaagatccaacataagaatacagcaagggtgatccctgttacgtctccatttaactcatcaatttggctcctgcaaaarctggacagatcctggaaaaagactattgatgagcacaga

SEQ ID NO: 898343 - DNA, 597 bp, Homo sapiens
tttggttttgacttagagtacacaaccagcattgaaacattctttgtgtgttaataccttaagaggcagggtggggtggctcacactgtaatcccagcacttttggaggctaaagcaggtggatcaccctaggtcaggagttcaagaccagtctgaccatttggtgaaaccccgtctctactaaaaatacaaaaattagccgaatgtagtggtgcacacctgtagtcccagctactcaggtggttgaagcacaagaattgcttgaacctgggaggcagaggttgcagtgagctgaaatcatgccattgcactccagcctgtgtgacagaacaagactgtgtctcaaaaaaaaaaaaaaatcataagagagctactgtaggtcatttgggacctaggaagatgtgatctaacatggcataatttagcaatttctttaatttgtctttgggggaaccaccaagtgctctcacccaaaaaaagtcaactaaaattgaaaaatctcagctgggagtggtggcatgcaccygtagccccagctacttgggaggctgaagtgggaagatcacttgagactggaattagagattgcagtgagct

SEQ ID NO: 898344 - DNA, 587 bp, Homo sapiens
ttgtaatccatttggctttcttgcaaagaaaccttcttctgtccaaagctccttctccgtgactgggagaaaggcatttcaaattggtgaggactggaaagaacgactacagctcattttctgagaaagcttctagtggaagtgcccagcctggagaatattccgtcagaacaatgattccaaaacaaaagaacccagagaaggcagcaaatgagcttaaaaatatcacaaatgttaaacagcaaacttagagggagtcaggaattgctttgggaaagtcagggcaaggccctgagagtcaggtgagcaactggttgggttacctgtgaaaatgaatggttaggacaagagcagatggtaggctgtacaaagtctgtcttcccagtccactgggcctcacagcactgcctctcacctgcactggggcagcaggtggtacagagacagaaagaccccatgcagacagcaggccacygtgccctctctccacaccagggactggtcaacaacagcaaatgcagccaccccatcctcgaatcccttcactccagcctcaaaagagttgtttaactcaagatttatgacaa

SEQ ID NO: 898345 - DNA, 674 bp, Homo sapiens
aagtcccgctcacgagccatcattgttatccacaacaacttagttcctttcagtgctatgaaccaaagaattgattggctgtaactattttttccatcctatcactgcattctaggctcaaagtaccagggggacactggaacctgcagtagggatctaacccctaaacagggcctaggagtctacacctatatttacccgaacctctggaggttacaccacatctgatacacccatgattacctgtgtatattaaacactatatacacatgatacgtacatcattctttctcacttggttagaatactgtattcatgggttctggataatagattcattctttcctaaagaaatttgattctcatacatgcaaagggctagcaaacggtgcacaccaaaatctaaccccatctagctatgcctagaatgtgaccaggaataaggtgaagagttaaggcagaaaaacccagattccccaggcaccttgtccatcaaaccctggccattattctttttttttttttattattatactttaagttttagggtacatgtgcacaatgtgcaggttagttwcatatgtatacatgtgacatgctggtgccctgcacccactaactcgtcatctagcattaggtatatctcccagtgctatccctcccccctcccccaa

SEQ ID NO: 898346 - DNA, 621 bp, Homo sapiens
acagcctaacacaggtggctaattacacgtcactgtttttctggaaaatctttrgtaatgcaaacgggaagacagcaaaatattttaaccaagaagcaatgtaatcagtttcacattttgaagagtaatgctggtgatggtgagtggaatttcattattttattaactaaaaacaaagtgtgtgtgtgtgtgtgcatgtgtgtgcacatttagtatctataatactatgggtcaggcactgggatgcattacagttacaaacataaaaaaaaaatgcgaaccttaaccccatggagacagttaaagtagttacaatgtacattaattggaagggaaattaggtaaaagattactggaaaaccccaccaagaaatattggaagcagaaatgacagactagctatgagatagattacagagatattggcaagacctaatatattataacaattgaatgtgtgatggggtagcttaagagtgaaaaagaaatctaggatgatgctaaagtttctatcttggaaacagcagaaaaatagcattaggcgtggaagaaggaagaacaatttgggagaaatggcatggatttcagtcctgggcaagcaggggttgaggtgtttgtgag

SEQ ID NO: 898347 - DNA, 621 bp, Homo sapiens
acagcctaacacaggtggctaattacacgtcactgtttttctggaaaatctttggtaatgcaaacgggaagacagcaaaatattttaaccaagaagcaatgtaatcagtttcacattttgaagagtaatgctgktgatggtgagtggaatttcattattttattaactaaaaacaaagtgtgtgtgtgtgtgtgcatgtgtgtgcacatttagtatctataatactatgggtcaggcactgggatgcattacagttacaaacataaaaaaaaaatgcgaaccttaaccccatggagacagttaaagtagttacaatgtacattaattggaagggaaattaggtaaaagattactggaaaaccccaccaagaaatattggaagcagaaatgacagactagctatgagatagattacagagatattggcaagacctaatatattataacaattgaatgtgtgatggggtagcttaagagtgaaaaagaaatctaggatgatgctaaagtttctatcttggaaacagcagaaaaatagcattaggcgtggaagaaggaagaacaatttgggagaaatggcatggatttcagtcctgggcaagcaggggttgaggtgtttgtgag

SEQ ID NO: 898348 - DNA, 625 bp, Homo sapiens
taattcttctggaaagctgataacttttgaatgcaggcagcagggaatctggcacaggctgctttttctttgggtttcatgcaaagatactgccaggttgactagagctacccagggcaggaaagtagggcagtagtctctaataagaggctaaaattaacaggaaaaaaaaaaagccttctttgcaaatttcacttaaaaatagtttaaatatttaataattatcaacaaacttatctacagattttttgaaaaggactgaattatctatcagtaatatgtacatgacattgctcatgttaccaactgctattatttgtcataagaaaataagcatttcaaatgtaaagcctctctttttctttgaaataatttaggttaagcgtcctttcttcttcactttgaaaactcttgtgctcccaaattttaataatacaataattaaaggtaaaacatattgcttttatttccaaagcatctctagctgagaagtctgcratgttataataagaaaccccagaggtcaatggtcagtagtggaaagatggcatgcacttgagcaagcaaacaaagcaggccagctttgccagctatatacctgacatccaaagcatacagatctcct

SEQ ID NO: 898349 - DNA, 616 bp, Homo sapiens
agccaaacagggcatatatctgacttctggagcagtgttcaccagagaaagcttatggattcaggatcagtagcaggtaaccctgtcaccgtcgccccatcacattctggggcaatgcacagccatctcacaggatcagacaactgactctggaagccagatgtcccccagatgtgtggtgctgaggggtttttaagacttgtgtgacatggcagaatcttgtgtccagctctgtggggcggaatactaggcctttatataatcaggcatccaagccttaaaattacagctacaaggcataggaaggtcatagtaggattcatcacaccaagattctggtcaagaatgcactagcccctgccttggcatgatggggaagctgggttccaagttcagtagcttgttagtaccagaaacataaagtcataactgctttccatggtactttgcaagaagcagttctttctaagggatcagcttgcaggagatcagccttagacaaatttcactcttatctttcctacattcagagttctaaaacaacatgaattgtatttgygacacaaaattcaggtattaggagactgacccgtatgtacaccatgcaaaccactcc

SEQ ID NO: 898350 - DNA, 621 bp, Homo sapiens
cagtgagccgagattgcaccactgcactccagcctgggcaatggagtgagatctgtctcaaaaaaaaaaaaaaaaaaaagattctgttcttgtcatcagagattctaacccagcaggtctgaagtggggtctgagaatctgcctttcagcaaactcacagggtggacatggtgctgaatgactgcaaaataaacgttacgtttactacatagattactgtctgctctgcaaggtataaaggttacatttcccattagcaaaacttgagtttgatattactgtgccaaatcagaagccagttccaaagtatactttattgaaaatgtattttttactagctcaacaaattatgtaataacaggcccagagtaaaaacctaagctgtgtacccactgcaaatgtgagtatacttgggcaggcacaatggcaacagagcaatgtggaactgccaggagctcccaggtatctcacagatgagttcagctgccaactaggaccccastaaggaccacaaaggctgtgattatgtctgtcttattcactactctatccccagcacccaacattgagtctgacatgtagtaggtacaatatttaatgaaatatctgtggagttacacg

SEQ ID NO: 898351 - DNA, 611 bp, Homo sapiens
ttttccctttcccccaatgtactacacaaataagaaccctttctgcatgtgcaaatttagagcaaagttagagagcactttttatttttgtttgttaagtgtggaccctgctgaaacccctctgagggtctgccctagttgtcaaggacaaggtctgggtaggcagttgtagcccacaggcagctggccagaagcagagctgcagtgcccactgaagccagaaagagtgccatgatctgaatatttctgttcctcaccccaaacccaaccatatatgtattaaagcctaaattccccaatgtgatggtatttggaagttcaattaggtcatgagggtagagccctcaggaatgagataagtgcccttagaaggggataaagagaccagagagctatttctctttgctctatgccatctgaggaggcagccatttgcaaacaaggaaatgagccttcgagaccagcacctagatcttggactccccagcttccagaactgtgagaaataaatgtttgttgtttaaggtactcagtctttggtattctgttayagtggcctgaactgactaagacagagggcttgctggtggccacaaaaagtgtccttccag

SEQ ID NO: 898352 - DNA, 585 bp, Homo sapiens
catatgaactataacaattttttatttgaaaaataatgtttaaatctaacattattttctacatataacactgataactgtggttcactgtgtaagataatacatgtyattttcttcttctaattcaatttggaaaccaactccaaatgaatagaatatgtcagtgaaatatctcattgaagaaggattaacacagtaaactgtactccacatttacaaataagcagtttcattgttaaaagatgcttgcagcttctcattctcaccacagattttcactatatgtccattgttcatagaggaccatgctgcctagagagaaaagttcttttaaatcgagtaaaagggtttttctgtaccacaggataatcataagattgagtaccccaaagggaatcaaggtggctcttcaataatttaactctctgccctgaactgacacattaaattatcatatactgtgaattcacaccctctgagaaaaaacattttcacaatacctgaattgtattgactctaaaagacaaaaaacgcaaaggcaagaagcagtttcaggtacttgactaaataacatctgggtagata

SEQ ID NO: 898353 - DNA, 584 bp, Homo sapiens
gtatcaccataaatggaacaaattaatatcctgccccatctgaggaagcttcaccaccgtgtatttctgccaaaatacctaccctgaatttcatcctgaggaatcaaaagacaaacccaaattgatgcattgtcaatgggagaactggcctgtgatatagaactatcaaggctgggtgtgatggcttacacctgtactccctgccctttgggaggctgaggcaggtggatcacctgaggtcatcagttcaggaccattttggacaacatcatgaaaccccgtctctactaaaaatacaaaaattagcttgacgtggtgacacatgcctataatcccaggtacttggaaggctaaggtaggagaatcacttgaacctgggaggcgaggcgggggttgcaatgagccaagattgcaccacttcactccagcctggacaactgaatgacactccatctcaaaaaaaaaaaaaaaaaaaaaaaaaaggaacaaggttgtgarggtaacagaaagaaaagcaactgttctggattgaaagaggcataaaaactaaatgtgacatgggattctgaactggatccttttgg

SEQ ID NO: 898354 - DNA, 591 bp, Homo sapiens
gcctatctacaatctcagagggaaattargtatatagcatagtctcttttcacgtggaatcttttgagggggactagattcatccgaaacactcaaataaaaatataaatagacataaatgcagaggcagaaaaagcacattgcctgtcggggaaaaatgagctatcaattcttctgtagccaaaaccacatatggttagctcattttcaaggttcaaatgctctgagaagtgtcatcgtattaaccacacctaagaacggatattcggggaattctgagatcctaactgacagtctgatcagaagttgggtcctagagagctcagaaggactgttagaatgctgatctgatccagagattacccaatgctaggattttagtctttgatttctatatagcctacctgtggttccagggaatttgaagagctttgcatttgtcattaaactgaaagagtcatatagccttgccagggaaagaagacagggatgcaactgctgattaaggccccatgtttttatgtccttcttagagtacggattccatgtcaggcaactttaactagctttcacaaatttctcttgaatata

SEQ ID NO: 898355 - DNA, 591 bp, Homo sapiens
gcctatctacaatctcagagggaaattaggtatatagcatagtctcttttcacgtggaatcttttgagggggactagattcatccgaaacactcaaataaaaatataaatagacataaatgcagaggcagaaaaagcacattgcctgtcggggaaaaatgagctatcaattcttctgtagccaaaaccacatatggttagctcattttcaaggttcaaatgctctgagaagtgtcatcgtattaaccacacctaagaacggatattcggggaattctgagatcctaactgacagtctgatcagaagttgggtcctagagagctcagaaggactgttagaatgctgatctgatccagagattacccaatgctaggattttagtctttgatttctatatagcctacctgtggttccagggaatttgaagagctttgcatttgtcattaaactgaaagagtcatatagccttgccagggaaagaagacagggatgcaactgctgattaargccccatgtttttatgtccttcttagagtacggattccatgtcaggcaactttaactagctttcacaaatttctcttgaatata

SEQ ID NO: 898356 - DNA, 644 bp, Homo sapiens
gggtggttttgaaagaagcaacaattgggcaggaaaacrggataactgttctcatttagcaccacggtttgcgggcttgagggcggagcctttgccggggaaccaccctcttgtctcctgttcatatcagttggatttaagagaaataagaccaaaggatgagaattggtcatttaacaatgttaatacaataggcaacatgtgaggtaatggtaggctcatgatagtacatataaaagtaaactatgagttttaaaaatatcaaagtgaaatatcaaattgaaatatcaaatttcaattaacaatcattgcacctcaaatgaactcattggctatatgatactgccactgcacaaagctctatatttcacaggtcttggaagtcgctaaatgtaggtaggcaaaaagaaaaaaaaaaaaaaagaagctcaagaaagttccagatctctggcttgagtgactggataatggatataataaaagtagtggggcccagagaaagaattatatgttgagcaggtagagtgagatgtgcctgtggaatatccatgtggatcagccttccaagttactggattggaatctaaatggtatgcagaaatgaaatcagagtcctttgatattgttgtcactgtcctagggaa

SEQ ID NO: 898357 - DNA, 602 bp, Homo sapiens
ttgagtgaatgccacttaagttagtattttcattttgacaaatgtgccaggttatataaaatgttaatattagaggaagctgggtgaaacatatgagaattctatctttccaactaccttttcagcttttctctaaatctaaaatttttccaaaataaaaagtttgtgaaaataaaaacaaaacttccaccacaatttttattgaagaagttggacatttaactaatggtacatttttagctaatcaaaatcctgttttagaaaacaaaattatgaaataaggtttaaaaaatgtacagtaacaaaaatcaaacacaaactatatacagtattatccatatgtgtatctatgtacatacgtaaagattctttatatgcaatttaaaataatcacaaatagtatattatcattggttatttcagtaaaaaatgaaataatgccttttaaattttttttctttaaacctttttgtttctttcggatcccctataaaagtaactgaaaacatttgatggggaaayggtattaaaagtaactcttgaatatttatttgttgatatgctatatttacatactttttaattttttcaaataagtagac

SEQ ID NO: 898358 - DNA, 611 bp, Homo sapiens
ttggaaaacctaatctgaaaaatattacagcagggattttgacctgtattcagtagactttatccacaagtgggtcttaagggatccaaaatgctccatgtcgtgatatttccatgcaatgtttgttctttgatttttctttgatgtccaacatgataacaaactgtggctgttgaactacatgtaacaagtagaaggtaaaacgtatacactgcagcaaatgcagagaagaagcaagatacacaaaagtctttgatgagttcccctttttcaaaaagcactcatttgttttgaatctttttctattacagaaagcactggaatttctctttcttcaactaaatttcttcacctgaaagaaggtacttatgatcagttggcatcaatgaagcatcctcaagaaatgtaaggaaatgacaactggttctcaggttgtgtctacaggagggaataaatggagacaaaacattcctccccttggaacatctcaggacctcgtctcaatgtcttagctcttacttggaaggcctctgtgtttgtctctaaccccctaacaacctaggaccctggttacagaagattyttaatagagtactggaagaattccaggt

SEQ ID NO: 898359 - DNA, 564 bp, Homo sapiens
gagatcccaaaatacataaaaagcatcaatgaagccaaaagctttttgtttaaaagaatcaacaaaattgatagatcactaagtagattaagaaaaaagacagaagatccaaataagcacaattagaaatgaccaaggttacactgcaaccaatcccacagaaatacaaaagatcctcagagactattataaacacttctatgcacaaaaactagaaaacctagaggatatggatacattcctggaaacacatgatctcccaagaccgagtcagaaagaaatcgaaaccctggacaggccaaaatcaagttcagaatttcaatcagtaataaaaaaatctactaaccaaaaagagtcctggaccagatgaattcacagtcaaattctaccggatgtacaagaagagttggtacctattcttctgaaactattccaaaaagtagaggtggagggcttcytccctaactcattctacaaaggcacaatcactctcaattcaaaatctggcaaagacataacaaaacaaaacaaaaatggaaactacaggctaattcacaaaatgct

SEQ ID NO: 898360 - DNA, 682 bp, Homo sapiens
acaaacgcccagttccttgtgtcaaaagcctaaccaccctttattgctgttaaatccccatgcctataacctgggctagggcagattgraaaaggaagaatcagaagaagctgggattgaatgacattaacttttttatctctgtagattaattgtatctattatatgtactgtgtttgtcaaggttctccagagggacagaactaataggatatatgtatgtatgaaaggaggtttattagggagaatttgctcacatgatcataaggcaaagtcccacaactggtctgcaagcttaggaagagggaagacagtagtggctctgtcctagtccaaaagcctcaaaaccaggggaagccgacaatgcagccatcagtctgttgctgaaggcccgaaagcccctctgcaagccattggtgtaagtcccacagtccaaaggctagagaaccgggagtccaatgtccaagggcaggaggagcaggaggaaacatccagcacgggaaaaagaaggaagccaggagatccagcaaacaaagtgagtctaccttcttctgcctactttatttttattgtgctggcagccagttggatggtgcccacccgcattgagggtgagtcttcctctcccaatccacggatgcaaatgtcagtctcctctggcaacaccttcacagacacactc

SEQ ID NO: 898361 - DNA, 682 bp, Homo sapiens
acaaacgcccagttccttgtgtcaaaagcctaaccaccctttattgctgttaaatccccatgcctataacctgggctagggcagattgamaaaggaagaatcagaagaagctgggattgaatgacattaacttttttatctctgtagattaattgtatctattatatgtactgtgtttgtcaaggttctccagagggacagaactaataggatatatgtatgtatgaaaggaggtttattagggagaatttgctcacatgatcataaggcaaagtcccacaactggtctgcaagcttaggaagagggaagacagtagtggctctgtcctagtccaaaagcctcaaaaccaggggaagccgacaatgcagccatcagtctgttgctgaaggcccgaaagcccctctgcaagccattggtgtaagtcccacagtccaaaggctagagaaccgggagtccaatgtccaagggcaggaggagcaggaggaaacatccagcacgggaaaaagaaggaagccaggagatccagcaaacaaagtgagtctaccttcttctgcctactttatttttattgtgctggcagccagttggatggtgcccacccgcattgagggtgagtcttcctctcccaatccacggatgcaaatgtcagtctcctctggcaacaccttcacagacacactc

SEQ ID NO: 898362 - DNA, 636 bp, Homo sapiens
gtcagtgaagacacaatgccaagatgcttcaataatcatattgctttgatgttgagattaaaacttgaagaaatggctgattggcacctttcacatcttacattcgtgctagataaatgacacrtcactgtgactacatatctgagacatttataaaagcctttaggaatttttttaaccataaaggtttacaaatcagtcttgtaaatctctttcagggattgaatttatacctaacctggaaaagttggtatagagtgttctggtaaggagatatttcaatttaagaagcatgtacatgggctattaaaacaggtatatgcagaggcaatgctgaatgacactccactccaagctcattctgatagaattggactttgttttcacttttttcaattactgaaaatgatgaaggcagtggagtggtaagaagttaagacagggtttccattaatcacaggaaccagaaacaaaaatcgtccagccctggagcaaaacaaatccaaaattatcctggtagtcaagattcctgactgggtcattgcaggatttcaacagtattagtatagttgtcatcagagcatgtagaaaacaccagataggcaaatgggccctcttattgacaataatactaga

SEQ ID NO: 898363 - DNA, 582 bp, Homo sapiens
gagcacactctaaaataacaataaaagtatagtgtagtaaataaaccagtaacgtagtagtcatttattatcaacatcaagtatgatatactacaygcaattgtatgtgctatacttttatacgacttttatatgaccattgcagtaggtttgtttcaattcattgcactatgatgttatgatggttgtgatgtcaccaggcgatagcaatttttcagctccattataattttatgaccattaataatggtcatattaattattgtcttcaacaaccacatcatggcgtatgacgccatgaccactttatatgtggtctattcttgaccaaagcgtagttatgtgatgcatagtgtatatgctaaacttcagatagaattagcatcaatacaacaggtgatttttagctacttccatcactaggtaatttcttctctattaagagttgactttagtgatcttgtccacgaaaacacaacgattataatgagcctaaatgtgatgcatcactgcaatactataatagtttgctagggctgccataacaaatactccagattggagggcttaaggaatagaaat

SEQ ID NO: 898364 - DNA, 586 bp, Homo sapiens
gccttttaaccacaccctatttttcacttgggctaatttgagttaatttctggggtttttttttgtactaaaaaatcttatctaagaaaataatagaggtatatattatttcccatgtagatgaaaaataaatgaattcccatttgaattaaaaataatataaagcataatctaccaaattctgattgtctatatcttgagccattttagaaatgagtacttttgaatgtgactaatttagatccttctaaattcatcagtacttttggttctctgaagatttggactgcttttgagtgtacttgtaggaatggaagaagcacaacaacaacaacaaaatattttactttcactgacaagaatcatatttctggcctttaatgtcatgaattaagctctgccattttagtagaagaaaacacagtaggcttgatatattaagtatataaaggaacaaagtgatgctaatggtatttgactagcacytgagacagaaaattaaacattaatagaaaaaactttaagtgaaatattaatgctattcaaaaaagaaacctcaacttttaaaaaaatgtaagcactaatt

SEQ ID NO: 898365 - DNA, 586 bp, Homo sapiens
aaaatatgtggacaataccatgcttcctagtgattcatacgtgcaaaataaaagtataaagacaggtacagactatgcatttatggtcaattgacctttgacaaaagcgtcaagaacacacagcagttaaaggayggtctctcagtaaatggtgttgggaaaactggatatccacatggagaagaatgaaactggatccttatctcactccatgtataaaaattagctcaaaatctattaaagacttcataagacaggaacttgtaaaattattaggaaaaaaataaggaaaatgtcttttgaaattgacctgggcaatgattttttggataagacccctaaattataggcaacaaaaacaaaaacagacaaagggtgttgcatcaaattaagaagttgctgtatagcaaaagaagcaatcagcagaggaaagagacaacttacaggataggataaaatattttcaaatcatatatccaataaggggttcatatccaaaatatacatggaatgcaaacaataacaagaaaacaaatgacttcattaaaaaatgggcactgcattcgaatagacatttctcaaaaga

SEQ ID NO: 898366 - DNA, 616 bp, Homo sapiens
accccactcctgggtaaatattgaatggaattgaaagcaacatgctgaagagatattccactcccatgttcattgcaacattattcatgatagccaagatatggaatcaacctaagtgtccctgaaagggttatggaaaaataatatttggtacaatcatgtgccacatgacaatgtttcagtcaataatggactgcatatagggcagtgatcctgatatgattaggctttgtgttcctacccaaatctcagcttgagttgtaatcctcataatccccataatccctatgtgtcaagggagagactaggtggaggtaattgaatcatggagatggtttccccatgctgttcttatgatagtgagtgagttttcatgagatctgatggttttataaagagctctttcccccttcactcagcccttcttcttcctgtcaccttgagaagaaggtgccttgctttcccttcaccttctacaatgattrtaagttgcctgaggcctccccagccatgctgaactgtgagtcaactaaacctctttcttttttaaattatccagtctcaggcagttctttatagcagaatgaaaatgagctaataaagtaaattggtactg

SEQ ID NO: 898367 - DNA, 589 bp, Homo sapiens
tgatttcctctcttttcagtatatacccagcagtgggattgctggatcatatggtagctcaatttttactttttgaagaacctacaaactgttctccatagtggttgtactaatttacactcctaccaacagtgtatgaggaagggttcccttttctccacatcctcgctagcacttgttattgcctgtcttttgaataaaagctattttaaatggggtgagataatatctcattgtaattatgatttacatttctgcaatgatgagtgatgttgagcatcttttcatatacctgtttgccatttgtatgtgttcttttgagaaatgtttatccaaatcttttgcccatcttttgattggatttttaaattttttcctacagagttgtttgagtgtcatagctggaggtcttagatttaagtctttaatccattttgacttgattcttgtaaatggtgagagataggggtctagtttcatttttctgcatatggatatacarttttcccagcaccatttactgaagagactgtgttttctccattatatgttcttggcacctttgtcaaaaatgagttcactgtaggtg

SEQ ID NO: 898368 - DNA, 604 bp, Homo sapiens
ctatgtgtgtctttataggtgaagtgcgtttcttgtaggcaacagatcaagggttctcatttttttcacccattcagccagtctatgtcttttgattggggagtttagtccatttacattcaatgttataattcatgggtaagaatttgctcctgtattttattatttgttttctggttgttttataatcttttcttccttcttcctttctttcatctcttcctctagtgaaggtgatttttttctggtgatttaatttagtttctttttttaaaaaaattttttgtgtattcagtgtattttttttgttttgaagttaccatgaggcttgcaaatactatcttacagcccatcattttaatctgataacaacactgttttcataaacaaacaataaaaaaataacaaaaactcaccctaacttcctccttctgcttttaaattttttgttttctatttatatcttattgtactatgtcttgaaaaactatagttattatttttaattggttcatcatgtagtctttctmcttaggataagagtagtttacacaccacagttgcagtattataatattccatgtttttctgtgtacttactgtt

SEQ ID NO: 898369 - DNA, 604 bp, Homo sapiens
ccaggccccaggtggtccagaagtgctgtctgggagtcagggactagartcaaaaatcttagaagtctacctgatgttctattgtattgcaactgagctagcactcaaaccacaaggcgcagtccttctcttcccttttccaaaggcagaggagcctcaccctgtagccaccatcacccctggccatgaggagtactgccagactaccatcaatgtttccttaaggcccagggtctcttaagtcagcttgtggtgaatgctgcctggtttgggactcacccttcagggcagcgggctcctctgtggcccagaaaaggtccagaaatgctgttcaagtatcaggtactggaatcagggactccaagagcctgcttgatgctctatctgcctgtggtggcattggtacctaagatgcaaggcaaagtcctttttacttttccctctgcttttctcaggcagaagttttgccctgtagccaccatagctggtaatgtgctgaatctcacctgaagccagcaagtctcagtgatttaccaaggcccttgatatagcacctggctgtcgctgctggttattcagggcccaagggctttttagttagcag

SEQ ID NO: 898370 - DNA, 646 bp, Homo sapiens
gagaaaaaattacagaggctaatgcatttgaagctactataatacaatcctccataaagtataatactctwtaaggtaggactattttggatttcttccaaagccatttatttctaaagaaccataagaaccttattaaggaggacctatcttgggcaatgtaatagtgtccttttaattctctctagcctacttttcccacacacttttcctcaaagaatattttatccagtcttcaggaactctcatactatgtctccttcctactacacccaaggttttagtaattatttacatcttaaattacgatgttaggattccatctttaactccaaagaaacaaggtgtctttcaccttaattaaaggtgagttgaatgagttgggagttttgagccccttaaatctcacttcgtaggctgagaaggaggatgatcctagtttaacatgatatcacttcaaaggtaatctcacaggtagcattttagtgatgtccttgattgatttatagttctaagagatttttgttgtaaacaaggagtttggcaaagaataccaagtaaaaacatcttaatttttgtaatgataggatggactttacttttgaagaataccccacacccaagttctgctgtatttgactgctta

SEQ ID NO: 898371 - DNA, 565 bp, Homo sapiens
tgatgaactctcaggcatgacagccatagaataataatttaatarctattattattaaaattacaataacaaccaacatatattaagtgtttacaatgtctcaggcactgctctaaataatttagaagtgttgatacattgacatggtggagactccaatcatctccatctcacaggtaaggacagtaagcacagagaagttaaggtcccacagctcaagagtcagaccagcacccagatccaggcagtctccagagcccctggtcttaaccactatgccactccagttctcaagagaggcagccagaatggaagacaaacagcctccagagaaggtacctgagaaatttttgtccacttgcctattccaggaattgctcatgaaattgcttttttgtctgttacataatgaagtttcataaacaacaagtacagaatcagtgaaatggtcagggagacaaaatggcactcttttcaggcttgtcccagacacactgggaggcttgtcccagacacagtgggaaacctctgtcactctctaaatgtgcctttgcaaaacaggagc

SEQ ID NO: 898372 - DNA, 565 bp, Homo sapiens
ttttgacatttctgtatttctcacattcaaatttgacaatgggaggatcatgccctgccccccaccctcattctccatctctctgaagcccaggcttttaaccattggccagagggctgaatataaagrtcacatgattttggccaggcatggtggctcatgcctgtaatcccagcactttgggaggccaaggcgggcggatcacctgaggtcaggagtccaaaaccagcctggccaacatggtgaaacccagttactactaaaaatataaaaattagccaggagtggtggtgggtgcctgtaatcccagctactagggaggctgaggcaggagaattgcttgagcccaggagatggaggttgcagtgagccaacacggtgccactgcactccagcctgggtgacagagtgagactcctctcaaaaaaaaaaaaaaagatggcacaatttcagggacagcccaggttctgcagttcttgtggccattgctaataagagtggactctgactcatctaggagaatgggactgagtggaagacgtttgtgggattgctcctcatgcca

SEQ ID NO: 898373 - DNA, 633 bp, Homo sapiens
ttttacagtgctccattttgcttgtttgcttataattgtttgtgaggccacargtgttatttagaactccctttttccactatccacaccatgttccctcagctttggtttctctccggttgggtaacaaactttacatcatgaaatatcagatccctcatgaaacgtggccatggctatatttgctacactcttcaatcaacttaaactataaggaatggaattactaggagcctctcccaaaagaaaaatattcccagatttcagatctgcacctcttcgaatttattcccatccatattccttgaaattctaacaacactaattacaaatgattgctattattttgataacaataggtcagaccttgcacacatctctctaggaaaaactgaggtttcacctagagacaatgagaggtggcagtggtggctcttgagagacttcttgaggttggttctttgccagatgactctctcagataacatcattgcagactttaagcaaagagagatgggattcctcaggcgtggaggagctacttctgcctttaaggtgtctcagtagaattgggcagatggttggaggggaagacaagccgctcatattcattagaatcactaatactaatag

SEQ ID NO: 898374 - DNA, 675 bp, Homo sapiens
ggggagcagggacccttgatgcgtctcctgcatctagaaaatgtctcacatgcacctaataaygtttttattattgatttacttatttatttttagagacagggctttgctctattgtccaggctggggtgcagtggcacgatcacagctcactgcagcctccacctcccaggctaacacaatcctcccgcctcagccccccgagtagctgggattacaggcacacaccaccatgcccagcttattttcgcttttttttcttttttttgtagagatagagtctctctgtgttgcctaggctgatctcaaactcctgggctcaagccatcctctcgccttggcctctcaaagtgctgggcttataggcgtgagccgctgcacctggcccaccaaataattcttatctggaaccccccctccacatccaggacaaggcaagaatccccgttgaaagctctaggcttacaggaagcactggagctcgtgaactttatttttattattttattttattttttccagatggagtttcgctcttgtcacccaggctggagtgcagtggagccatctcgactcactgcaagctccgcctcctgggttcaatcaattctcccgcctcagcctcctgggtagctgggattacaggtgcccacgaccacacccagctaatttttg

SEQ ID NO: 898375 - DNA, 573 bp, Homo sapiens
gccctccaccacgcttggctaatttttgtatttttagtagatggagtttcaccatgttggccaggctcatctcraactcctgacctcaagtgatccacccgcctccgcctcccaaagtgctgggattacaggcatgagccaccactcccggccccacttagcaaagtttctaagtaaggaaaactagagaatccgcgaagaagccactgccttcaaggaagggtgtgggatccatagagtagaaatgtggcaggggatagtatgagattaaaagccaagatgataaaaatagcaacaagcatttctattctccttgactttaaaaaacccttccaagtacatctgccattctggctgttaacatctatctgaaaggctgtcttggggaagaaaggttagcgtcttctctctgcccacagtgcaaaaccagaatgagcaggtaaatgctccagcacggcagatcatggcttagacagcagggaagcctgcctgcaacagggctgttcagaggaaaaaggtgccggctgccttgctcacccctgcttcacttgttccttcactctgtcagtaaag

SEQ ID NO: 898376 - DNA, 589 bp, Homo sapiens
tgatgttcccctccctgtgtccatgtgttctcactgttcaactcccagttatgagtgagaacatgcagtgtttagttttctgttcctgtgttagtttgctgagaatgatagtttgcagcttcwtccatgtccctgcaaaggacatgaactcatccttttttatggctgcatagtattccatggtgtacacgtgccacattttctttatccagtctattactgatgggcatttgggttggttccaagtctttgctattgtgaatagtgctgcaataaacgtacatgtgcatgtgtctttgaggcttgttttttatagcagtgagtgttttagtataccttgttttttatagtaagcctacctacactccactttgtatagtaagcctacctacactccactttcaatagcattcttacagcaataatgctcatactgttttataaaacattccaaaagctttctagaaatggaatgggggaacttgtgagtatgtgaaataagtaacaagaaatgtttaaggaaatgttctgtggctatctaaggatgctaaggaaaaggaaagacagtgaatgaggtgacctgtaataa

SEQ ID NO: 898377 - DNA, 601 bp, Homo sapiens
gtgctgcatgtagtagacgtctaggagctttttgtcgctggatgyttgataaatgcatttgccttatctgattgttggatgccttaatttttgtgtgcttaagaggagagctgtgtataaatgagcattctcagtttgaatacaaaacaggtgtgtgtgtgtgtgtgtgtgtgctgtgcactcatactcaaagagaataaaaaaatcctctattatagggaagcaagctggaagcaaggagatgggccttaagtgatcaccaggtgaatgcctggcttacagcaggtgctcaataaaacatgggatgaatgaaactgacatagaaactgtgtgttatttactcgttcaccagataaacaagatgtggctgaagactcagacataatgggaagtgaatatttaaaaataaaatagcgtaacaaggttcccagcttgaccttggctcagaaaagtttgagctcttctgagcttcacccagaaggaagctcaatcccaaagccagaagcagtgctggtgagtggggagtggagtgaagatctagcatctagccactgcatttcatggtggggtttccctccaatttaaccttggaggaccacgc

SEQ ID NO: 898378 - DNA, 639 bp, Homo sapiens
tactctcaggttttttttattattgccaactcctttcatagtatacaaataataaaccataagcaaatactaaacttctgtaaagtattccactattgatatcatgaacacttggcaatatttcagattaaatcatagttctttgtgcaaaaagcgaagagagacaattcattaaaagtttcagtgttttcactgcaaagttgtcaaggctatatgctttgtgagttctaaatgtgagtggtgcatctcaatggagtctttgttccttttcttttttttttttacaaggcatggaggagtgacggcaggaactttctgtgctctgacaacccttatgcaccaactagaaaaagaaaattccgtggatgtttaccaggtagccaagatgatcaatctgatgaggccaggagtctttgctgacattgtaagtaacaaggcagtgaacgaaatttttcactgatagagtacaactaacttcctagaggctgctgaaatcttatgtatcaagaaagatcttattaactgataacattagtatgtagttttcaagctgaattacaagtccacaawccatagaacaacaacatttaaaatttatacttcagaaaatttatggataaaaacttttaaatctcatgt

SEQ ID NO: 898379 - DNA, 699 bp, Homo sapiens
atgctggttacattaggttgagtttagggccctgtcgccaaattcatgggcatccacagcctcagaatatggcctcacttgaatgtttgcagatagaattaattaaggacctcaatatgaaatcaacctggatttagggtgaaccctaagtccaatgactagtgccctaataagaagaggatgcaacacagtgagacacacagaagaaggtgatatgaaactgatgcacaaattggatggatgtgtctcaaagtcaagcctccaaaaggcaccaaccctactcacacacatcttgatttcagacttctggcctcctgaatggtgagagaataaacccctattgtttcaagctacccaatttgtgatattatgctagaaaactattacaccagttgtcttgattaggtcacacttgtaactgctttttttgtgatcaataaatgtgtagtggacatttgcattaatgctcctagaatgtactccccattttgtggtttaaaaacattttggatttgctctggggaagcccctttcatcccgtccgtttcctcccgccccagtccatgtttttttaatgacattgactccatytccagttctaggacatataacataggccaaagtagatgggcacattttatcccactgaccttagggagctaatgagacaaaaatcgtatttttggctattagaacggt

SEQ ID NO: 898380 - DNA, 658 bp, Homo sapiens
cagtacccaagcctccagttcttccccagtcctctgagtcagcataactggcctttaactgggatatgcacaccttctctgtagttccaggtccmcacgctactcctatcatattatgttttgtgcaactaaatatcactgagttaattgattttttgccttctagattttaagatctgtgagagcgaggtctgtgttgacctaattcaccagtgtatttacaggggccccaatatttcaaggaatgaataaatgcatagattaaaaacaaacaaacgaggttttcagttgtaagctcaatattattcaacagagtagtggaattttaaaaaagtcctactgtgaacctcagcttcacagagaccataacttcagcacaaaaaatgccctgtcccactcctggcactgttggcctacttgcagagcactctcagcaacacaaacaaacccagttagcaggcagggtttacatcagtgaatagtctccaaactacactaaatgaggaaaattcagtgagagaatggaactactttaaaatagttttgactgtctatggataagatatttccttttttttttttttttttccctacaaggtctgtgacaaagaccactgaagaaaagttaagtacatattgcttttagttcaggaagcac

SEQ ID NO: 898381 - DNA, 647 bp, Homo sapiens
gtgaccagaggagagaacatatagttaaaaatgacatttatgtaaagtctaacacaaagtagaaaatgctagatctcaaagaagtgggatrctttgggagtttaaagagggaagaaaatgtctcccttttaagagaaccaggtgctaacatgtggtagaggctccactccactttccttcatgaaatttcaaatgtctgcagtccccttaggtgtggaaaagaactgagactacagagtctctgtcttggatccaaaatatgctaagtcttccattcaaattatttgttctttctcaatactgatgggaggaagaaaaaaagacaaggaagaaaattaatcatctttatgtgaagtaggagatagttgggctccctcaggctttgcataggagataatcccagaaaatgaacggtcaagactcttactgtttctattttaacaaggatctggccaattattgttgacaagctcatgaatatgataatcagcttggtctcctgtttctctttataccaagctttgcagtaatagtctgcaaagtacatatatctctgcgccttcctctcccagggccctagccttgtttctgacacataagttaaattcctgaggtatcgatactaaacccctgctgctcataattcc

SEQ ID NO: 898382 - DNA, 647 bp, Homo sapiens
gtgaccagaggagagaacatatagttaaaaatgacatttatgtaaagtctaacacaaagtagaaaatgctagatctcaaagaagtgggatactttgggagtttaaagagggaagaaaatgtctcccttttaagagaaccaggtgctaacatgtggtagaggctccactccactttccttcatgaaatttcaaatgtctgcagtccccttaggtgtggaaaagaactgagactacagagtctctgtcttggatccaaaatatgctaagtcttccattcaaattatttgttctttctcaatactgatgggaggaagaaaaaaagacaaggaagaaaattaatcatctttatgtgaagtaggagatagttgggctccctcaggctttgcataggagataatcccagaaaatgaacggtcaagactcttactgtttctattttaacaaggatctggccaattattgttgacaagctcatgaatatgataatcagcttggtctcctgtttctctttataccaagctttgcagtaatagtctgcaaagtacayatatctctgcgccttcctctcccagggccctagccttgtttctgacacataagttaaattcctgaggtatcgatactaaacccctgctgctcataattcc

SEQ ID NO: 898383 - DNA, 647 bp, Homo sapiens
gtgaccagaggagagaacatatagttaaaaatgacatttatgtaaagtctaacacaaagtagaaaatgctagatctcaaagaagtgggatactttgggagtttaaagagggaagaaaatgtctcccttttaagagaaccaggtgctaacatgtggtagaggctccactccactttccttcatgaaatttcaaatgtctgcagtccccttaggtgtggaaaagaactgagactacagagtctctgtcttggatccaaaatatgctaagtcttccattcaaattatttgttctttctcaatactgatgggaggaagaaaaaaagacaaggaagaaaattaatcatctttatgtgaagtaggagatagttgggctccctcaggctttgcataggagataatcccagaaaatgaacggtcaagactcttactgtttctattttaacaaggatctggccaattattgttgacaagctcatgaatatgataatcagcttggtctcctgtttctctttataccaagctttgcagtaatagtctgcaaagtacatatatctctgcgccttccyctcccagggccctagccttgtttctgacacataagttaaattcctgaggtatcgatactaaacccctgctgctcataattcc

SEQ ID NO: 898384 - DNA, 632 bp, Homo sapiens
agtgtatagtgattataaagtctacagtagtgtatcctaatgttctaggccttcacatttgcttagcactcactcactgtctcacccagggcaacttacagttctgtaagctccattcatgataagctccctataaaagtgtatcattttttatctgtcatacttccaccttccaccaacttttctaagtttagataaaccaatattcgccattgttttacaattgcctaccatatttagtacatgatgtacaggtttgtggcctagaagcaataggctataccatatagtttaggtgtgtagtaggctatcccatctttgactgtgtgagtacactgtatgatgtttatacaatgataaaattgcctaaggatgcatttcactagccaagtttctccagaaaaacagaatcaataaaatagatgattggtaggtagattagatagatagatagacacctacctacatacatacatacatacatatagatatagatctaaagatacatatgytttcacactatgtagatagaatataacagatatcatatatctgtatctatatacacaatctataggaagatatttatcataaggaataggctcacgtgattatggatgctgagaaatcct

SEQ ID NO: 898385 - DNA, 584 bp, Homo sapiens
taagaaaatgcaggaattcaagcaagatatttgtcataaaataaaatgattaaggtggggatttcatgtggttctttyatttgctcctcttgcgtcagaacaattcaggaggtttgtgcttatgagccgtttatgacacttaattcgtctttaaattaaggcatattttcactccaggattgtttttcccctccatataaaaataaaagacaagctttgtaaggcctatgaacagtttaactaagttgcttgcccttcatgccagtgacaagtaatgagtaagaactagtaggtgtcattgagaaaacagacattgtcactccagtgtcaatcaaaattatctggtagtgaaaactggactttaaattttaaaaataatgtgagagctgctagaaaaattatgaagaattgagtagggtcacagcactcgacaaatcttccaatttctctgccactggcttagtgtcacctgtacattttctagtctaaaagaatgtaatagcccaacagggtcagcagcgatatgcacctctcccaaatacatttctgtttacattcctgaggtccaattatgataacaatga

SEQ ID NO: 898386 - DNA, 573 bp, Homo sapiens
tgtcataaaataaaatgattaaggtggggatttcatgtggttcttttatttgctcctcttgcgtcagaacaattcaggaggtttgtgcttatgagccgtttatgacacttaattcgtctttaaattaaggcatattttcactccaggattgtttttcccctccatataaaaataaaagacaagctttgtaaggcctatgaacagtttaactaagttgcttgcccttcatgccagtgacaagtaatgagtaagaactagtaggtgtcattgagaaaacagacattgtcactccagtgtcaatcaaaattatctggtagtgaaaactggactttaaattttaaaaataatgtgagagctgctagaaaaattatgaagaattgagtagggtcacagcactcgacaaatcttccaatttctctgccactggcttagtgtcacctgtacattttctagtctaaaagaatgtaatagcccaacagggtcagcagcgatatgyacctctcccaaatacatttctgtttacattcctgaggtccaattatgataacaatgacataatatgaattctaaaca

SEQ ID NO: 898387 - DNA, 625 bp, Homo sapiens
gtcattgagaaaacagacattgtcactccagtgtcaatcaaaattatctggtagtgaaaactggactttaaattttaaaaataatgtgagagctgctagaaaaattatgaagaattgagtagggtcacagcactcgacaaatcttccaatttctctgccactggcttagtgtcacctgtacattttctagtctaaaagaatgtaatagcccaacagggtcagcagcgatatgcacctctcccaaatacatttctgtttacattcctgaggtccaattatgataacaatgacataatatgaattctaaacacatttgtattgttgatatagtaagaaatttttcaactaattagaaaattctaccttttaaaactgcacagttaataaatataacacatacgcatgtgctgctgtttctgcttttgttttttgttttagctaagagctaagcctatgactactacttcaggaatgtttgtcaatttaatatgagctgaggaccatcgcacttctagccttcaagcttgtattctatcaggaagaagggatagagaagaattggtagaaaacattgtatatctttgccrggcacatgtttgtagtcccagccatctgagagactgag

SEQ ID NO: 898388 - DNA, 574 bp, Homo sapiens
tcacatttttccacagcactgatttttggctgctgttcaccttgcagkctcttctgggaggcttcacagatccggataaatgatggtctctgctaatgttacatgttagaaaagcagactgcgggttggccaggatagctgaccagaaacaccagtattataggtcacctactaaattccagctctaatgatatacttttggaaaatataaagaaattttctgttacttaatggcaattgatagattgcttattttacttttatttgaaatgtttcagaaaaattccatccatgtaggctccaggacagagtgggctcttctcatgattcctctaaaataacctggcctggactggacactcttacctatcataatcccattatttcagtgtctggcctgtaagctgatatgttccataatgggcctgcacttagcacttctatgaatctcttagttcttgatattctctcatatttatgcgtcattctcccctaaagctcataagccaccaggatggtacagtgtattctcaaaagcatctaaccatgctcagcatttaattgtcatataaaa

SEQ ID NO: 898389 - DNA, 574 bp, Homo sapiens
tcacatttttccacagcactgatttttggctgctgttcaccttgcaggctcttctgggaggcttcacagatccggataaatgatggtctctgctaatgttacatgttagaaaagcagactgsgggttggccaggatagctgaccagaaacaccagtattataggtcacctactaaattccagctctaatgatatacttttggaaaatataaagaaattttctgttacttaatggcaattgatagattgcttattttacttttatttgaaatgtttcagaaaaattccatccatgtaggctccaggacagagtgggctcttctcatgattcctctaaaataacctggcctggactggacactcttacctatcataatcccattatttcagtgtctggcctgtaagctgatatgttccataatgggcctgcacttagcacttctatgaatctcttagttcttgatattctctcatatttatgcgtcattctcccctaaagctcataagccaccaggatggtacagtgtattctcaaaagcatctaaccatgctcagcatttaattgtcatataaaa

SEQ ID NO: 898390 - DNA, 544 bp, Homo sapiens
gcagcataagcccactcactttgtccccatgtgatttaatcacctacgtagagtgaaattactagataaaactctttccaatgggaacacggtcaggctccttgtataagaatttaatttccttgattrcattgaatgtaaaatggaataacattaagtagagtatttatttttaccactgatataaggactccagtttcagctcagacatgtaaagacctgggaagtcgttatatctgccccacagcaacaagagatctgagcaaaatgaaaatcaatgacttttcttggacccatcagaaaactgaggttgtagcatttgttagtctgcattgctatgaaggaatacttgagactgagtaatttataaagttagttggtatattttggctcatacttctgcaggctgcatgggaagtgtggtgatctgcttctgatgagggcctcaggaagcttacaatcatgacagaaggtgaaggggagccattgtcatgtgtcaagagagggcacaagagagaaggggctaattttgtgtttttagtag

SEQ ID NO: 898391 - DNA, 607 bp, Homo sapiens
catcagataaccttcttcttagccaggaccaccaccactgtaaaaaacagcagtaaaagtagcagtggaatacaactgtgaagrggcacatggggagactcagtcaagtgggagccaaaaaagggcaccaatggagtggccagaaagcgctggtgcccatggcacaaacagtttcagatgcagcttgtcttctgaccagatgaacatccatctccacatttaaggcctcacacaaggaaacttgtgcttttctcccaacatataaaatttatctaatatctgctgttcttttcatgtctagctataaccaaaaaattataaggaatattaaaaagcaagaaaaaaagtcattaagtgacaaagcaattgttagaactagacagagccatgacacagaggctggaattatcagacaaggaatttgaaaaagaaaactctgcttaacatgttaacggcttcaatggaaatgctagacaaaatgacaacactcagtgccaggtggataatttgaatagagagatggaaattataagaaaaaatcaaattgaaatactggaaataaaaatatagcaatggaaatgacaaattcctttgatggactcattag

SEQ ID NO: 898392 - DNA, 620 bp, Homo sapiens
tttttttgagatggagtttcactcttatcacccaggctggagtgcaatggcgccatctcagctcactggaacstctgcctcctgggttcaagcaattctcctgcctcagccaccccagtagcgggaattacaggcatgagccaccacacctggctaatttttgtatttttagtggagatggtgtttcaccatgttggccaggctggtcatgtactcctgacctcaggtgacccacctgccttggcctcccaaagtgctgggattacagacatgagccaccgtgccctgccccaacacacatttctaaccctctccttgacaattgccatcatagagcctggaaaactaagtactggattggctttcccagttttctctataccaaggtgtggccatgtgagacataaatgaaaatttttttgcagaggcctctaggaaaactctttgataaaagaaacaaatgatgttggtggccctcctttttcctttcttgaatttgggtatgatttctggagttgtaacagctcttgcaaccatgaggaaaatgctctaaaccaatgtgagcaactacctacccccactcttctttaaagcaataaaaaataaaatttatgtttaat

SEQ ID NO: 898393 - DNA, 633 bp, Homo sapiens
atgtatctgtttcttctagatttctactttatttgcatagaggtgtttatagtattttctgatggtagtttgtatttctgtgggatcagtggtgatactccctttatcattttttattgtgtctatttgattcttctctcttttcttctttattagtctggctagcagtctattttgctaaccttttcaaagaaccagctcttggattcattgtgtttttgaaaggtttttcatgtctctatttccttcagttctgttctggtcttaattatttcttgtcttcttctagcttttgaatttgtttgttcttgtttctctagttcttttaattgtgatgttagggtgtcggttttagatccttactgtttctgatgtgggcatttagtgctataaatttccctctaaacactgctttcactgtgtcccagagatctggtacattgtgtctttgttctcattggtttcaaagaacttatttatttctgccttcatttcattatttacccagaattcattcaggaggaggttgttcagttcccacgtagttgtgtggtttkgaatgagtttcttaatcctgagttctaatttgattggactgtggtctgagagactgtttcttatgatttatgttct

SEQ ID NO: 898394 - DNA, 618 bp, Homo sapiens
tggagctcttggccaggtggtggctcatgcctgtaatcccagcaccctgggaggccaaggcrggtggatcacttgaggtcagcagtctgaaaccagcctggctgacgtggcaaaaccctgtctctactaataagcaaaaattagctgggcgcagtggtgggtgcctgtaatcccagttactcaggggactgagacaggagaatcgcttgaatcctggaggccaaggctgcagtgagccaaggttgcactacagcctgggcaacaaagcgagactacatctcaaaaacaaaaacagaaacaaaaaaaaaagaaagaaaaaaaagatttgggctccttttaacagttcttgtagttctgccttggtagtggtgaattctctcagcatttgtttgtctgaaaaagactatctttccttcatttgtgaagattagttttgctggatacaaaactcttgacttaaaattgttttgtttaagagggctgaagataggaccccaatcccttataacttgtaaggtttctgctgggaaatctgctgttaatctgtaggttttcctttacaggttacctgatgcttttgtctcacagctcttaagattctttcctgcatcaaaaagg

SEQ ID NO: 898395 - DNA, 642 bp, Homo sapiens
aaaatataaccaacttcagccagtttctgatatgaattatacaaagtgacatgatcaagtgttaactactagttttaaatagctatggctattttgaaatacttaacgcttttcacaattgaaatacttattgatattttcgaagaatcataggcagttggaaaaaataacacagagatggttttataaatcttgcccagtttcttcctgataacattgtgcaaaattatagtataatattgcaaacagaattttgacattgataacattcattgatcttattcagattttcccagatttgcttgtcctcattcgtgtatgttttctttttcttttcttttttgcttcttgagacaaagtcttgctctatcacccaggctggagtgcagtggtgtgtgattttggctgtctgcaacctccgcctcccaggttcaagggattctcctgcctcagcctcccaagtacctggattacaggcatgtgccaacaagcttggctaatttttatatttttagtacagacggtgttttgccatgttggccaggctggtcttgaactactggccygaagcaatccatccgactcagcctcccaaagtgttgggattacagatgtgagccaccatgcctggcctttgtatgt

SEQ ID NO: 898396 - DNA, 620 bp, Homo sapiens
atatgaataaatgtcactcatgagtctatcactctaggacagtgactgaaaatcattttctgtaaagacccaaataataaatattttgggctttgtgggtctctgttatagctacagtcatctctcagaatcttcaggggatttgttccaggatccccgacagataccaaaatccatgtatgctcaagtccctgatataaaatggcatagtacctgcatataacaaatgcacatcctcctctacacttcaaatcatctctaattatgtataatacctaatacaatgtaaatactatgtatgtagttgctatattatattgtttttatttgtattatttttattgctgtattgtaattttttatttttttcaaatatttttgatccactgttggttgaattcgcaggtatttaatgcacagatagtgaagactgactgaatgtactctaccattcaagtgcaaaagcagctagcaaaagcagccataaacaatatataaataaataggcatggttgtatttcaataaaactttatttacaaaactggagactgctggtcatagacwtagtttgctgaccttctgctcaatagtaaccagtattaacatgaaggttggtatt

SEQ ID NO: 898397 - DNA, 627 bp, Homo sapiens
gcaaatcaaattaacaaatctcattttcagaaccacagagcttggattgccatcattattaaattaaagtatatgacttagggaatgttaattaaccccccaatttcttatgttacattcaacggtactttaaamccttaatgaagtttctgtgtagattaaataaaatgtgcatgcaatgtgcttagtacattaactaccagaatgtcagcacccatatgtaccatcaatattattattatcattattcatttttttgagacagagtctcactctattgcccaaactggactgtagtagtgtgatattagctcactgaaaccttcaccttcctggctctagaaattctcctgcctcagcatccaaagtagctgggattacatgtgtgcgccacaacagccggctaattttttgtatatttagtagagacagggtttcaccatgttggctgagcgggtccaaatctcccggcctaagtgatcctaatgactggactggccaaatgctgggattacatgcatgagccaccgggcgtggccagtattattgttattaatacagtaattattgtataaaaattcctgatggatcaatgatgccatcattaaataatcaacacataaaaac

SEQ ID NO: 898398 - DNA, 608 bp, Homo sapiens
ttccaagccattaatatgtaattgaaaatgttattttaattatactataatatcttacaaatgtgcccaaatagagaaactcmaacatttctgtattactagataatttgcttgcagtttttatgctacggtaatcattgcatatttttaccacatttaattattcattcattcagcaagattattaggcactttatgtgacagtcactgtgactatggtggtaaaccaacaaacatagcccctacttgcttcgagaatatggtcagctgagctacatttgaatagcttccaggaaaccaggtcagaaagatgttgcaaaacgattgttacacatcttggatataaatgatgagaaaaagagtcaaagataacttaaaagcttcaaatttggggaattaagtgatcaacgatgtcattgaaaataatgggaacattgaaaaggagtaccactggagggagaggaagaagagaactcaaggtactggactttatgtgatagcggcggtgacctcagatggacatgtccagtatataactcatacacaacaaaatcagggagatgcatgggaatcaaggagccattcacccaaaagagacaatcttggtt

SEQ ID NO: 898399 - DNA, 594 bp, Homo sapiens
cataacagtctctcagaccacaatgcaatcaaattagaactcaggattaagaaactcactcaaaaccacacaatttcctggaarttgaacaacctgctgctgaatgactcctgggtaaataatgaagttaaggcagaaataaagaagttccttgaaaccagtgagaacaaagaaacaatgtaccagaatctctgggacacagctaaaccagtcttgagagggaagtttatagcactgaatgctcgcatcagaaagctagaaaaatttcaaattgacaccctaacatcacaattaaaagagctagagaggcaatagcaaatgaatccaaaagctagcagaagacaggaaataactaagatcagagaagaattgaaggagatagagacacataaaaaaaaaactccaaaaaataaatgaatccaggaactggtgttttgaaaaaattaacaaaatacacagcctcctagctagactaataaagaagaagagggagaagaatcaaataggcacaataaaaaatgttaaaggggatatcaccactgaccccacagaaatacagactaccatcagagaatactataaacacctctacgc

SEQ ID NO: 898400 - DNA, 643 bp, Homo sapiens
aatgtctgttgtttaagcatcccagtctatagcatcttgtgattgccccccaagcagactaagacactgccattgttcctttgtccctgtgtgatcctagaagctccctacagctcaccccagttagagatttcatctgttccttggaccagtggccccagccactaccatagcaactatagctgcgccccgactgtgcaacgccacttgcagcctgtgtttagacatcaggactcagcctggtctgctaaatatctggaagtgccactttctcactcaaattcttcctcttgccaagcagtctgatctgacaggggtcttgagcaagaaagaaagatagaacttgtcatctttgcagtacataacattctatagagtaattcataacttgcccctttcccacttctcttacctacatccttttgtgaccactaacattccaaaatcactgaggaaatgaaataacatattgtgaaatgcaatataaaattattctcatgatcaaaattaaatatcttgttgcaacctggaaagaaaaataacacagaacagaatagccctaggaggctgcctccaaacttgaggagggcaccggctgattttcaggmtaagacatcaccaaaggtgacaagaactgaccgtc

SEQ ID NO: 898401 - DNA, 600 bp, Homo sapiens
tcaaggatcccaaaactccatggctttgcctccaaatgtacctcaaatctatctgctccccgcatcctccctgccctgacttgagaccccacaccagcatctcaccatgatcagtttctcccctcacaccccactccacacagcagctggaaagattgcaatggactgtttgtccccctgccccaatccgtatagtgaaactctaatccctgatgtgatatttggaggttgggcctttgggaggttattaggtcttcaaggtagagcacttataagtgggattagcatccttataagaagaggctggagagtcagctagctctctttctgccatgtgaggatacagcaggaaatcagcagtctgcagcccagaagagggccctcaccagaaccagaccatgctggcaccctcatcccagatctcagcctcctgaattctgagaaataaattggtgttttttatgcaccacctagaccatggtttgttatgtgttcgtggtactttgttacggtggcccaagctaagcagagatgttttgcaaatgcacatgtccctaggggmtacccattgcccttaaaacagacctcaaactcctcaaa

SEQ ID NO: 898402 - DNA, 551 bp, Homo sapiens
cccttccttacaccttatacaaaaattaactcaagatggattacagacttaaacgtaaaacctaaaaccataaaaaccctagaagaaaacctaagcaataccattcaggacataggcatgggcaaagacttcatgactaaaataccaaaagcaatggcaacaaaagccaaaatagacaaatgggctctaattaaactaaagaacttctgcagagcaaaagaaactatcatcagagtgaacaagcaacctacagaatgggagaaaatttttgcgatctatccatctgacaaagggccaatacctagaatctacaaagagcttaaacaagtttacaagaaagagattttaaggtgtttgctcacacaattgtggaagctggcaagtccaaagtgtgtggtgtaggctgggaggcttgagccccagtgaagagttgcgtttcagccaaaggcaattgactggcagaatatcttcctgctcggggracatcagtctttttctattcaggcctttgactgattggatgaggcccacccacataatggagggtaacc

SEQ ID NO: 898403 - DNA, 615 bp, Homo sapiens
taatcagcaacatgagtatgatacatatttctggttactttgacataactagaagcagaagtctgtgaaatatcttttgtatattataatttagaagttggattacaggtttatgagtcagattattgtgctttgaaaacaaatttactgcttttccgatgcctgaatataagcaaagtagttactcactctaggccttagttccttatatgtaaaatagaaataacagagttccaaaattacagaattgttgtgagaaggtattataagggttttatgtgtaatgtgctatgcatagagtttggcacttctgaagcacaaagaaaagttacaaatatgaatatcagtaatgttctactctaaagatactcacccaacagagaatagagacattgccctatttttaacatgagccttgccaatgcttagcaattaaaattattctaaataatcaaaaaattttaataatctgcacaagaatttagtcagtactttttgtcaaacttacaaaactgtatgctttaattattccttttaaaatatggcatttttctatccactgtcctctatcacctcaattgtyctgcaaaatttctctaatactacctgaaataa

SEQ ID NO: 898404 - DNA, 611 bp, Homo sapiens
ttggattctatcacagaatgcacattagtaktaaattatttaggatagatatatggagaatcctctatagttatctgtgtagatttggtgttcagtgtgattaatttttaacagagattcttgtgatacccctatgggaaggagaagtatcatagtttgttatggcagattgattgaactgtgtataatgtctgtagattttgggttctttttacctctgtcccttgtttgcatctcttgttcagtattcctctaggactcaaattcttcgtctgtgaatgaggaagttgaattaaaatataaagttatttatacatgttatttttgtatagctctgaataaattcattaagtgagtattgaatgttggttcctatttagtctgtagggtttaaacttatgttgtgatgggagagagaaacaggcttagggtgccatgaaagcagagacaggcaagtatatcttagaaggaaggcgagaggaaagggcattagggaaactttcacagaggcagtgtgacatctgaactggtcttgaagataaatgagtttgtcaagtaaacaagaaagagagttctagctcaggaagtagaatgtacagaggcagaaagaa

SEQ ID NO: 898405 - DNA, 609 bp, Homo sapiens
tcccaggttcaagtgattctcctgcctcagcttcctgagtagctgggattacaggtgcctgccaccatgcccagccaagtttttgtatttagtagagatggggtttcaccatgttagtcaagctggtctcgaactcctgaccaaaggtgacccacctgtcttagcctcccaaagtgctgagattacaggcatgcgccaccactcctggcccagaaatattatcttattcgctcttcacaaaaattctgaaaaagaagagaagccagagaaagagcgaaaggctaagtgaaaaactggaatagtgaagccttagaagtcagaggagaaagctattctaagaaaggaaaaaattgttgacagtatcagatgctaaagagaggtcatggtgattaaggaccacatttagggatcagaggcacattgtcttggagagtgcagtattggagataatgccagagtaggagaccctactatttgagagttaagagagtgatgtggagatagaaggaaagaacgctggatatgtttcttacacatgtctgatwttttatctgtgcagtggggttaataaaacctaacccataatattactgtgtgattaagtatgat

SEQ ID NO: 898406 - DNA, 610 bp, Homo sapiens
cacaggggtgtcttgcctctctgttagatgattaggacagagaagaaaggttttagttaaatcctctcctgcattggaagttagcttgaaaggagctgaagatatgaaaaaacaaycggaagaattaaaatagggcaggggccagcaaactacgacctgcaggcaagatttgaccagctgcctgtttttgtaaataaagttttattggaacgtagctgatgttgctgatggttgctttcaagctacaacagcagagctaagcagttataacagaggccgtattgtcctccaccccaaatatttgctatctgggtttttatggattttgccaacatatggactaaggagtggttctttttcaatgattctgtgaggaaatatactaaagataagatgtgatatgcctcacactcagttctctttccttacatggaatttccttgaatatcggatgtagtaggcttagacacagtacagtttgattcagtgaattaagacaagctagcatttatttgaaatatttagtgttatatttatttagggaccgtaactatgttatttaaaacatgtaggtactttaattcatcagcaatctagtgggacacagagg

SEQ ID NO: 898407 - DNA, 706 bp, Homo sapiens
cagaccctgataactctataaaatggatataaaatggtagaaagggatggaaatggttattttgatagctggcaacagagttttcatgagaatgtttatattcaggaaactaccttaataatgctcttyggtggtaaaaagtaaggccttagaagccttactttttaaaaagaaaccagaaagaaaagaggaatggtaaactgctctgcatgagaaatgaagataaatttggggataggaaaaagaagaagcagagaaggattgagtctataaaaatacactggcgtcaaggtggccagaccaaagtagttgtgaaagtaaaaatgtataatatcacatttgaaattcctacacacacacacacacacacacacacacacaccccttgtcttacattgcccaaaccatcaataagttcctttgatgtattgcttgtaatgcctcatgtgacaggtttctaggcaaatcaaggaagcagggttgagttgcatatctgggttggcctggagaagaaaacagccatgaaaattgaagtataagtgagatcaagagtttggcaggcaggaacttagagctaaggtatgactttgtgaatgtaatcctccaggaactcacagaaacctgagttagggctcagaaactcgaagtctaacattttatgaacatttacagacttctaagattgagatataaaaatcaagaagat

SEQ ID NO: 898408 - DNA, 617 bp, Homo sapiens
tgtttcagttctgatgatcactatgccaaaattttacctagcagtactgcccatatcctggccatatcatttaattaacaaaactgaaatacttagcttggccatgtaatttgagtaaccaaaatgagaaatgattgtaaaccgtattgagcaaagttcttgaaatgaattatttttgcatgatgactttgaggaataaaaaggattagaaaagagaaagaaaggaataaagttcgagttgcacaggtcagaggtaacggatcaaaaggtaaggagtacataaagtgttccaagttgacaaattggacataaataaatcactaggaccagatggcattcatccaagagttttgaacggactcaaggatgaaattgtggagctgttggccaaatgtggaaactgttgttgcaaacaatcaccttgtcagagtactgggagattgctgatgggattcccatctgtaagaaggactctagagaaaaccctaggaacaagatatagatcagcaagactggctttcctggcataaaaagatgaaaagaataaaaaaacagggtcagtgccactgaacacctttaygtaactcacttactggggtaaaagctgcatagtttgg

SEQ ID NO: 898409 - DNA, 608 bp, Homo sapiens
atagcagaaacttccaactctattttattcacctttttagctttcataacatctgataataacagtacctagctgatataatttggctgtgtccccacccaaatctcatcttgaattrtagttcccataatccccacatgtcacggagggaaccggtgggaggtaatttaatcatgggtgcagttgtcctcatgttgttctcatgatagtgagttctcatgaaatctcatgatggttttataaggtgcatttccccctttttttttggcacctctccttgctgccgccatgtgaagaaggacatgtttgcttcaccttccaccatgattgtaagtttcctgagacctctctggtcttgctgaactgtgagtcaattaaacttctttcctttataaattacccaatcttggctatgtctttattagcagcctgagaacggactaatacactagcccactgtcacttttctataaatgcttattaaaataaatttctaaaaactgcttttctgtctataaaacaatgtttggggatttcctttatttatgatcaaagggaaatatctaaacatatatctatgtaaagctatggtctactatatcacataa

SEQ ID NO: 898410 - DNA, 595 bp, Homo sapiens
gggtaccccgtttttgttgttagaaacttctttgtcccaagaccagggagctgctttataaattcacatcagggtcatctgatgcttcagtggaaagtacacttgcttgacttgctattggttagagccaagggatttaacaactctgtaaagttggatgttagctgtagaaacctgataaaatacaaatgactttttatctaatcacaaatgcaaataatattaatccaatgaagaaaactgaaaaagttaaggtatactttattggcctatgagaaattaaccggtcttttgtaaagcagcaattttatcaaacatttgtctttcactcatcatataagcaaacctttctcataccgtcctttaaattagatttattatcttgctagttccctcattaatgagtttagtaacatttgtacaattattatgtatttaaatgaagttattttctaaaatcactttgaaarttatacattttacacaattaacttaatactgtaatttgtatgaataggtttgattatactaaaaggaaaataaatttgggatgtaaatctgcttggtttcttaggaaggaaatcagttgcttttt

SEQ ID NO: 898411 - DNA, 593 bp, Homo sapiens
ttacattaggttctagttgtgaaaaaaattagagtctggaatgtctattttattcacaagtgccattttcaccatgtattgcaaataaactaaagcttaatrtatcatcatactataacataaatactagtaaaaatctccattttagatttaatatatttctaaattttagaattcctcatgtactctaaaagctatttgatgtaacttttgctggcaaactggactaaataattttgtgactaacagagattatgcttctccttttatcctaaatttataagcaacaatttttattcatttccagatcagttaactaaaatgtttgttttcaaatccacaggaaaggaaaagaaaaaaataacttgctatcttctctttctgtcttgctataaaatcactgaacttaaataaatttaaaacattagatgaaggagtaatcatcacattgaagtgatgaattaaagatatgactagtattccattagatctgaattcaatttcttaatatttgaatgcctcttataagaagatgattgctgatgtcctctcaaagattgttgaaaaaaaaaaaaaagacaaaatctgctgtt

SEQ ID NO: 898412 - DNA, 564 bp, Homo sapiens
ttcattcggaaatgattatggaaacttgatgagaattattttatttttatgctgtcatgcgcacttaatttggcataaaatagagcaaacccttataaggtaacattgagtgactggaaaatgggtcaaactactgtatccatgttctccggtttgtcatcttcctactttttgtgctgttctcttaaaactgattccccaggtcccaggtagcagtttccacttcaaagttgttcaaatgcatgagtaattaaaagtattaaggattagagccacagaaatgaggaggcaaaaaaagaggagaaaaggcacttcacaaaacaacatggttttgcattttgaaaataggaaatagcaaataatattttgtcccacaatttatcttgtattatttgggtggggatggcaaatatatgtgctgtttggagcttagaaagaaaaaatgctattcagagagkgtggatgaactggataggagttaacactcagtggaattgctcactgattcaagttctacaagtgattaggtgagaaatcttgcacaaccgacttccaccatgaggg

SEQ ID NO: 898413 - DNA, 581 bp, Homo sapiens
actactaaaatcagtacattgtacaatgtattagaaagccacattcactggaagtaaaatccataagagattatattttaatattaagatgatttctaggaggagtagaaaccaattatggtgtagaaaacttgacaaaaatattagacgtctgttctcaagccccagcttctccattccataccttacaaggttaactggttattgagtgagctaaacttaaaaatgttttcaagaagcccctttatttttcatgaactcttcaaaatctttccaccccctgatagcacattatgagcatcccataactttcaagtcacttctattttcttttcaatcattatgactcactctctgttattcagatgttctttccaatctaaatcagagctccaaactctaattccattcaaagtttctctcttctgcacaactcaagattgatccgtggctcaaaggcttctagtgacaaaaggcatattgacattttttttcactttccatcatccttttctttmtttttctacctccttctagaatgaggtgagaaaggagagttggtggaagagatacaaatgtct

SEQ ID NO: 898414 - DNA, 617 bp, Homo sapiens
catcataagtcatctctagggtttaataagaacctgtcatatattaatctgttcatatttctcattgcgtaaatatgcaacttataaatgacaccaatttctccaatgaaatgttatttctaaataagagcggcagaacaggaataacaaacatacgctatacctgctaccactagcaacaatcacaaataaatgattaaaacattttgctgatgattccagaggcagcagactcaggatctccgcagagcacactataggcaaatactaccggttgactgatgttggcatatgtgatgaaaactatttgtcaacacctgctctagaattgcagaatttacagaaagtaacttcacagctaagtttctgccttatgttatatgcactctctatgcttaacgtaggtcctatttaaggtagatactggataaattttggttaaacgaataatgtagtattttggtgaatgtttataaagcacagtgacaccattatactcactgtttaaagaaactaagttgttgcaaaaattctgaaatcaaagcttgtttcacagacattagatactgtgyggcctcaaggtttctttactcaaggacactcttgtagcttcactc

SEQ ID NO: 898415 - DNA, 610 bp, Homo sapiens
catttcttttctggctactagtggctctgaaaattaacttgaaacattgtttmtctgacaaaaaactagctgaaatgacacaccaaagtgtagaatatgtacacttagagcacagagtgaagtgcctcagtgtacatctatccatttgcaaactggatagatgacaagataggcatttttcaaaccagctgatggtcacaaatagtaataaaatattcccaaactggcatgggttatattccaaaaacagtgtaaaccagcaaaaaataaaaattgcaactgcaaaacctaggtcaaccctctcctcacctttccttcactcctccatcttccccattctccacccacacacatgttaatccaggtgcgacctacttaaaattaactccaagggcaaagtcagtgagtgagaagggcggggagcctggagttgctggaatggaggaggtgggaaaggaggaggctgcctgggttgccttggcaatacaaaggagaatgtcaagggggagggatttatgcgctgatgctaattgcatttgttaattacattctattgtgctgacctgcctgcttccccggtttatctttctgagtcaataagcagttccaa

SEQ ID NO: 898416 - DNA, 610 bp, Homo sapiens
catttcttttctggctactagtggctctgaaaattaacttgaaacattgtttctctgacaaaaaactagctgaaatgacacaccaaagtgtagaatatgtacacttagagcacagagtgaagtgcctsagtgtacatctatccatttgcaaactggatagatgacaagataggcatttttcaaaccagctgatggtcacaaatagtaataaaatattcccaaactggcatgggttatattccaaaaacagtgtaaaccagcaaaaaataaaaattgcaactgcaaaacctaggtcaaccctctcctcacctttccttcactcctccatcttccccattctccacccacacacatgttaatccaggtgcgacctacttaaaattaactccaagggcaaagtcagtgagtgagaagggcggggagcctggagttgctggaatggaggaggtgggaaaggaggaggctgcctgggttgccttggcaatacaaaggagaatgtcaagggggagggatttatgcgctgatgctaattgcatttgttaattacattctattgtgctgacctgcctgcttccccggtttatctttctgagtcaataagcagttccaa

SEQ ID NO: 898417 - DNA, 654 bp, Homo sapiens
atgggtatctgtacctatgtcagttttcgagagcaaattacactttttctcattgagcatgtactaaattgcagagttcatctgattccaaaactgccttggaaaactggtttacctgttatttgagattcaaatactagcggggcaggcaaaggcagtccccagctagacccatcccctgaggatagtcaaatgcccagtcatcagtgacagctgctaatattttgtatagtggtgacttgtgtgatactgtcattactgaataataatagtaactatttcacagctttcctccagtttcacaccatttcccccaacaagctgagtgacatcagcattaaagcctggcataacccatactattcatcaatgaacttgtgcttctttctagacaggaaaggcaccaagaaagaatcatgcagaaatatacatatatattcattaaatataaaaactttataattcctccatgaaaactttatacctactagctgaactttcctaaaatatatttcaagaagagacagctattacaatcatcagaaaactgtttayatttttgttttaaaggcatttttgtatgactgaaaacagtaggtattattcctttacggcaccaaaaggaaactccacatctgcttagcatgagatact

SEQ ID NO: 898418 - DNA, 631 bp, Homo sapiens
tcctcccacaggctgtgagtatacgtgactaacaaagtgctgtagatcgcatctgtccagtgtcaggtggcatgtgtttggccatctgcttaaccctagggtgaaatccatcccgcaccaatgggaagaatttgaggcaattaaaacaattggcataatgaacaggatggcccaaccataacctaggacacctggtcagctttaattaactgttctttgctaactaacttgttctgtgatacggtgaagcctttagagacagaatcgccaattactggtcggtttatgcttttgtctgtgcagtttgttaccttttttgagtttttccatcaattcccaccctaaaacactcttctccctaagaccagaattgttattaattgactataccttaacatagcctaatgtcagactgagcacatgtttggcaagtcagaaaggcagtgataacacagggccttgactaacctgtgcttgagtcccactaaacagaggacagactggagctctttgctcactgcatctgtcctggtgatggtcagtggcagtttgggacagccatatcaattggcattacaaacagaatggcccaacakaatgggatggtggataggtggggataggaccagta

SEQ ID NO: 898419 - DNA, 644 bp, Homo sapiens
agaaaaaagtcatggaagaaaatgaggtgggtcaagctactggatattgrtgggaggaagagagagcaatgttatcacttagtgtatctcatgatttcaaagtggagaagttccaggtaataccaagatccagaatggaggcaatgcccagtggataacgtggaaagaagtagaatgtcagcgaaggtaaggcgattaagggatttctgccaaggataattgacttaccttacctatgtactctaaccaatcctaacgatgacaagaggtataaataaaggaaaattgccatacagacctctaaatcagaaagagtaataaggaagataatagatgacactgaggggtagatggtggtaatgtaatcaaggcaaaatgaaaaacatatacatatatatttacatataaataaatgtgtatatataaatacatatgaataaatttacacattaaggtaaattgttatcattataaattcatgattatcttgtcaaatatccatctccacctgcccccacaatacaacctagatcatagtacatgactctggtccaaaacctgtctaattttatccataaacttcaaattttctccaccttgttcaaactctacagagaaaatttaaaatccagaaatatccctaa

SEQ ID NO: 898420 - DNA, 597 bp, Homo sapiens
aagacagtttggcagtttcttacaaagttaaacatagtcttatcatatgatccagcaatcacactcctaagtatatacccaactgagttgaaaacttatgtccacacaaaacccttcacaggaatgtttatagcagctttatacataattgcaaaaaactgaaagcaaccaagatgtttttcaacagaggaaaagataagtaaactagggtacgtctctaaaatgaaatattatttggtgataaagggaaatgagctatgaagccaaggaaagacataaataaacttacatgtatttttctgagtaagcctgaaaagactcccatactaaattacattttctttttaaattaattttttttcattcccactttaaattttccattcccactctaggttcagggacacatgtgcagatttgttacataggtaaattgtgtgttgtgaagagttggtgtacagattattttgtcacctgggtaatgagcatagtacccaataagtagtttttcaatmctcacctcctcccatctgacatttcgaaaaggcaaaactagagagatagtaaaataatcagtggtttccagaggttttggag

SEQ ID NO: 898421 - DNA, 613 bp, Homo sapiens
ttggaaataaaaactcaaaatttgacttggattatctaagaatgtatatcaaactcatggtggataacttatacagaaaaggaatttgcataagattgtaggagagttcacaaaagtagttttagaataggataagagccagaacagtgccaaggatctagagaacattgagtaataatctcatcatgatagctgagatgaatcaagttctattttaaaatttattttggtaattgttttactctttccaagatttaaagtcctgggagaggcttgtatttcttattcttggtactttgatttattcctgcaccaagacaaagaccaagacaaactctgacctttcctcagattgaaagaaaattcctcaaaaagaaaaaaggggaaaaaaaagaaaaggaaaaaaaagagaagaagagaagaagagaagaaaaggaaaaaagagaacaaaaaagagaaagaaacgatatgtgagtattgttgaaaccacaataaggaacaactgggaaacaacaatacttccttctaggatcaagtaaaatgaatcagcatttgcttttgttccagatatctacagytgtgtcacaaatcactggaaatcatagagacttaa

SEQ ID NO: 898422 - DNA, 628 bp, Homo sapiens
ctctactgcatctctagtacctagaagtaggcctcacagatagttggtatctttaaatatttatgaaataaatgaaataagcctgtgcactcaattattctagctgcatacagttggtatttactcaatcaaaggtgtgacacccatccttgtacataaatacacaaataaaactcttgctaaaataatttcacttataaatgggggaaagaatacatgctatatgctattctgtagttttacaatgagatgggtttcagcaaagcaggatgcttgaatggggtaaaaattatacctctatactgctttttggcatcagatttcagtgggattcctaatagttggctcagcgccgtaatgagcttcaaagagaaaaaaaaaaaatcataggttttgaagtagcttaaaacacaccctttagctcctcagtactagagcttatacctggcagagttccaagtcccttttcttcagctacatggtgacatggagcctgccatgaggatccaggatgctcggctgcctctgatccraggagctgacacagaaataacttccattgctcatagatgactcttcacaaggccagagttggaactgctctccaaataccaactcgaggccattt

SEQ ID NO: 898423 - DNA, 602 bp, Homo sapiens
caaacctgaacctcctccccatgtctgccagctctgctgtccatttcccactctctccaaacactgcctataaccattctgtgctttctgttaagacattttcttcagtctggaaagcccctgtattcatttcactgattagtcgcattctacccgttattcaatgcccaattaaaattccacctttttcatgaagttgattctggcccttggagcctacatgttaatctcccatttctgaagtccgatagcactcgtcgcaagaaaggcataatacagcaatgtgatagtaatcttctattttctgtttcttctatcttcacttggtttgccccagacaataatggatattcttagggtaaagaaaatgtgttgtttatttttcttatatgtttcgactctacctagcttattcctggatacctactaacgtttcaatttgcattaggttaacggataaagagttgcatcagtctttaaaataagcatttgttatccagtaaaagttcgctcatgggaatccagccaagcattgtgtcctcagttgatgytgcttaggtgggccagtgtatggtaaataaaaaaaattactataatgaata

SEQ ID NO: 898424 - DNA, 649 bp, Homo sapiens
gaatatcagtatcaatttaatggataagtcttcttttctacttcttttctttcctttaccttctttttctctttctttcccatcaaaatacatatgataaaatcccattgagttgaatatgyatatcatgtaatagtaccctagcgtcagatgaaagtgcccattgccttgtaaataaagtcatatatctctccattatgctcttagtcattcacttgaaaataattgaggatatgcacagagcttctgcccatcaaaggtggcaacttgcatggtccaacagatgggttttttgtcttaacccttcattgtctcttatctttgaattgtgttaatagatctgattaagcaaaaagaaaaaaaatgaagtaaatattttccatcattaaaattgtttttgcttgctttgcttgtcgcatgggaaggctttggatctgttttttttcccctgtgtctctcagtcaagatgcgatgaacaatgatgttggtgaacctcaccattgcactgctgaccggagtcagcctggcttcatcttccctctcaacttcagagtgagtgacagagctggagggaatggcattgagagtctggctgctcttccactaactggaaggaaacagtatgcagatctgagtacttcagaccagc

SEQ ID NO: 898425 - DNA, 581 bp, Homo sapiens
gtaaggaggggtccagcttcaatcttctgaatatggcaagacagttatcccagcacaatttattgaaaaggragtcttttcccaattgcttgtttttgtcagctttgttgaagatcagatggtcatagatgtgtggccttgcttctgggctttctattctgtttcaccagtctatatgactgtttttatatgagtaacatgctgttttggttactgtagctctgcagtatagtttgaagtcaggtaacatgatgcctccagctttgttctttttgcttaggattgccttggatattcaggctttttttgttccatatgaattttaaaattgttttttcaagttctgtgaagaatgtcatggatagtttgataggaatagcattgaatctataaattgctttgggtagtatagcaattttaatgatattgattctttctattcatgagcatgggatatttttccattcgtttgtgtcttctctgatttctttgaatagtgttttgtaattctggttgtagagatcttttcctcccgaattagctatattcctaggtattttataatttttatggcaattgtg

SEQ ID NO: 898426 - DNA, 622 bp, Homo sapiens
ttggatccagtgagcaagaagtagcaaactcactggacttactggagagacatctgcatgmcagaggatgggaaataaatctgactcaaattcaggaactttctaccttagtaaaatttctaggggtccagtggtgtggggcttgtccagatattccttctaaggtgaaggataagttactgcatttggcccctcctacagccaagaaagagacacaacacctagtgggcctatttggattttggaggcaacacattcctcatttgggtgtgtttctttggcccatttatcaagtgacccaaaaggctgctagttttgagtggggtccagaacaggagaaggccctacaacaggtccaggatgctgtgcaagctgctctgccacttgggccatatgacccagcatatgggtgtcagtggcagatagggatgctatttggagcccttggcaggcccccataggtgaatcacagtggaggcctttacaattttggagtaagtccctgctatcttctgcagataactactctccttttaagaggtagttcttgacctgttactgcgctttggtagaaactgaacatttgactgtgggtcatcaagccaccatgtgacctgaactg

SEQ ID NO: 898427 - DNA, 622 bp, Homo sapiens
ttggatccagtgagcaagaagtagcaaactcactggacttactggagagacatctgcatgacagaggatgggaaataaatctgactcaaattcaggaactttctaccttagtaaaatttctaggggtccagtggtgtggggcttgtccagatattccttctaaggtgaaggataagttactgcatttggcccctcctacagccaagaaagagacacaacacctagtgggcctatttggattttggaggcaacacattcctcatttgggtgtgtttctttggcccatttatcaagtgacccaaaaggctgctagttttgagtggggtccagaacaggagaaggccctacaacaggtccaggatgctgtgcaagctgctctgccacttgggccatatgacccagcatatgggtgtcagtggcagatagggatgctatttggagcccttggcaggcccccataggtgaatcacagtggaggcctttacaattttggagtaagtccctgctatcttctgcagataactactctccttttragaggtagttcttgacctgttactgcgctttggtagaaactgaacatttgactgtgggtcatcaagccaccatgtgacctgaactg

SEQ ID NO: 898428 - DNA, 637 bp, Homo sapiens
ccagtagtggaattgctgggttgatggtagatctatatttaagtttttttgagaaatctccacgctcttttctgtagaggttgtactaatctacattcccaccaacagtgtrtaaaaataccctttttccacatccatgccaacatctgtttcaaaaacattttataatcatgtaatgtatgccagaatctacactatgaaatgaggggagagataaaaacacaatgatacaaatagtagtctcaagaattttcagaaatacaggaaatacagatgtgaaaaccaataattaaaataaaacctaatagtgcaataatacaccttggtccagcatcattgctaaaatagaagatatatattaatgctgagaaatggcagagtatgcttcgcaagaaaggtagcatcatacaagcattttttttcattttttaaaggctgcatagtattccactgtgtatatatgccacatttttaaaacccatgcacctgttgattgacaatgctaagtgaaataagttaggcacagaaagacaaataccatatgctctcacttaaatgtgcaatctcaaaaagttgaactcataaaggcagacagtaggatggtggttactaaaggctggagctagggtttggggtg

SEQ ID NO: 898429 - DNA, 718 bp, Homo sapiens
ttagtttgtctgttaaaatataaatactcccaacatgagtgagatgttatacaggtctcttaaagtgaataagtcataccttgaccaaggcagacactaaggacctgaaaacagaagaggcaccaccaaaggtggataaaagaaggatacagaatgggaatgtagaggcatgaaagtcaaacagcacttcctccactatttggccctcagccagcactaatagtatatggtacttcatctttgccctgtacaatattgcatacttccaatgtggaatatgggaggaaatttagagtaagaaaattacacccactagggtgactacaagaaaaatgagaaataataattgttgatgaggatgtggagaaattggaacatacctacactgctggtggaaatgtaaaatggtgcagccactgtggaaaacactagggtagttcccccgtaagccaaacatctaattatcatgtgatcctgtatattagtaagggagctatctgggcatccctttgcctagtcaagttgacacataaaattaaccatcacacccagcaactccactccttatgtatattactcaaaagaatataaaatgggtgttcaaactaaaacttatacacaaatgctcatagcagcacttttcacaatagccaaaaggtggaaamaacccgagtgtccatcaagtgataaatggataaacaaaatgtcatctattttt

SEQ ID NO: 898430 - DNA, 664 bp, Homo sapiens
cagttagaatggcgatcattaaaaagtcaggaaacagatgctggacaggatttggagaaataggaatgcttttacactgytggtgggtgtgtaaattagttcaatgattgtggaagacagtgtggcaattcctcgaggatctagaaccagaaataccatttgatccagcaatcccattactgggtatatgctcaaaggattataaatcattctactataaagacacatgcacacatatgtttactgcagcactattcacaatagcaaagacttggaaccaacccaaatgccatcagtgatagactggataaagaaaatatggcacatatacaccatggaatactatgcagccataaaaaggatgagttcatgtcctttgcagggacatgggtgaagctggaagccatcattctcagcaaactaacacagggacagaaaaccaaacaccacatgttctcactcataagtgggagttgaacaacgagaacacatggacacagggaggggaacatcacacactggggcctgtcgggggttgaggggctaggggagggatagcattaggagaaatacctaatgtagatgacgggttgatgggtgtagcaaaacaccatggcacatgtatacctatgtaacaaacctgcacgttctgcacatgtatccc

SEQ ID NO: 898431 - DNA, 611 bp, Homo sapiens
attttacacacaaattatttgcaatctgtttacacaaatgagtcattgtgttttaagtagataaacatctaagggacacacaatgacttaaakaaattagttttaaggaggtatggcagatttttgcacatttccctagggctgagtgcaatgtactttgtgctgattttaactttaacattctaggaatgatcgactcaatatgcatgtgatgccatcttcaatttctgtcagtgaattgttttcataaagtggccgagcacataacaagtctgtttagaaaaatccatcttgtccaaggaaacaaaatgtttgagtacgtaaaaatctatagatttgaaaaatcatttcactgagagaaatcctggtgcacatttatagtctagacgtggatttgagaaaagaaaaagaagagtgaaatcctttattggctagaaaactaaagattgcccaaagtaggaagaataatcgagtttcagattaaggtaatacttaaagattgagttttgcacaattgactctgattattagcatgattctgaccctgggtcagaggctttcaaaactggctgcctattagaactcccaggggagcttttaagaagtccagt

SEQ ID NO: 898432 - DNA, 558 bp, Homo sapiens
tttggtgccaagtctctgaccatctgctgctgcaggattccagctttcagagtgtccctcctctggggctccagccctggcatctgatgaccctgatcyttcctttcgctcttcagacctagaggccataacagcatcctcctgtccccaacctctggaaggttttccgcttccggtgtcttcccttacccctgctcacatctgtgtaaatagtcctttcatggaagtacccctggttggaccatctgggtagatgctgtttcctactggccaccgagataggtctggctgctgaccaccaggtggtcaccaggcagcaaagaatctggggaatcagccaaggcatctcttcttcagcttagcttggtgcagagacctccagggggcagttaagaggctgggtgggggttggggggatggctggactagtgcagcccctccttttctggattatgcagccattctgtggggtgccagggatgttttgcgggcctcctgctccccccaagattaacacaaagtcagtatcgaagtgcaaattgttaaaacttttagatt

SEQ ID NO: 898433 - DNA, 638 bp, Homo sapiens
tagggaaaacccgggtgttcttttgttcatttttgtctttgttcatttttcttctcacataatcagaaccaacctcaactctcctcctcagagataccagcagcagacagccagaatttccctgccccaagaggagtctgggtttcaatctgtgtgactcttcctccatatttccagattctgataaacccatcctcttccatttgtttttccctgggcctaggtgtattagtcagttcttgcactgcaataaacacctgagactgggtaatatataaagaaaaaaagacttaacaggctcatggttctgcgggctgtataggaagcatagcggtttctgtttctggtgaggcctcaggacacttccaatcatggtggaaggtaaagggatagccagacatctcaaggccagagcaggaggaagggtggcagggaggtgctgcacattttttgtttgtttttaatttttacttatttgattttttttttattatactttaagttctagggtacatgtgcacaacgtgcaggtttgttrcataggtgtacatgtgccatgttggtttgctgcacccataaactcatagtttacattaggtatttctcctaaagctatccctcccctagccccccacccc

SEQ ID NO: 898434 - DNA, 638 bp, Homo sapiens
tagggaaaacccgggtgttcttttgttcatttttgtctttgttcatttttcttctcacataatcagaaccaacctcaactctcctcctcagagataccagcagcagacagccagaatttccctgccccaagaggagtctgggtttcaatctgtgtgactcttcctccatatttccagattctgataaacccatcctcttccatttgtttttccctgggcctaggtgtattagtcagttcttgcactgcaataaacacctgagactgggtaatatataaagaaaaaaagacttaacaggctcatggttctgcgggctgtataggaagcatagcggtttctgtttctggtgaggcctcaggacacttccaatcatggtggaaggtaaagggatagccagacatctcaaggccagagcaggaggaagggtggcagggaggtgctgcacattttttgtttgtttttaatttttacttatttgattttttttttattatactttaagttctagggtacatgtgcacaacgtgcaggtttgttacataggtgtacatgtgccatgttsgtttgctgcacccataaactcatagtttacattaggtatttctcctaaagctatccctcccctagccccccacccc

SEQ ID NO: 898435 - DNA, 546 bp, Homo sapiens
gggtcttcctcacttacccaggctggaatggagtggtacaatcctttctcactgaagcttcaatttcccaggctcaagcaaccctcctgcctcagcctcttgagtatccaggactacatgcatgcaccaccatacctggttattactttttttttcatttttagtagaataaggtctcgctatgttgcccgagctggtcttgaactcctgagctccctcggcctcccaaactgctagaattacaggcatatgccaccatgcctggcccaaatattttcttatacttattcacatacaagtacttaacaattaaaaaatatgacataccattcatacagtgaaaataaataatgtgacttgtcatgtcatgtggcactcaaaaattttcagatttggagcatttaggatttcagattttcagattagggatgcttaccctgtaggaggatgaattttcatcagcctaaaatataatttaarctcacattaacaaactttaaaagcaaggcttgagaaaccaaacttagtttaagtaacaaaactgtg

SEQ ID NO: 898436 - DNA, 601 bp, Homo sapiens
aaatagttctgttggatataagttttttttgtcaacagtgtttgttcgtttgtttttacatttaaaatatgtcattaccttctagcttccattgctttttgtgagacatcattcactyatgttattggggttacctgtatgcaacaacttgttctcattttaccttcaagattgtcttattgtcttaagcttttagtgtttttgccgtgatgttgctagctgtagatatctttgtatttattttttgtttgttgagctcctttggtgggtagactaatgtttttcagcaaattggggagattttccaccattatttcttcaagtacgtatttgtttttctttatcactcctctgtttccagcacacccattgtgcatatgctggtgtccaatagcatctcgcatgtcttttagattctagttatttttattcattcttttttcttttgttattcaggttatataaccttggttgatctattatcaagttcacagattctttcttcttccagttcatatctactgttgagcctctctagtgaatttttcattttaatgattattcttttcaaatccagaattttcatttggttcttttttat

SEQ ID NO: 898437 - DNA, 635 bp, Homo sapiens
ctctcataggatggtaccttacgagggactcagggccactctcttgctggcaggtcggatgttcagcagtggtgtcctggtatgctgtagacaggatgcttaaaaatattaccagtrtggcagcctctggaatccttttctcttctcttctagagcacatggatccttagcaaggtctccacagtattcacattttgtgttcatcaaatctgattcacatgacattatcaatattgtggatcagcatgctgtattgtaggatgctcacaatgcctagatcttttgcgactatactgtgacaaagatcaggagaattaccatatccctagttcagcacagagtgttaacaccactgtctgttccaggtgaaatggattcacttctgatgctgcttcctggtggttattgaaaaggacacatttgccagtttggttgccatacaccccatattggagactgtgttcatttgtcccagaaatgattctacatgcatcaatcacattggctataattagatttttatttgacagagtttgtgttcatccactgtcatctgccatgatctatgtggtttttgttgggtctgaactagtgaatcatatgaaggtggtattcacctctcctgcatttgtaag

SEQ ID NO: 898438 - DNA, 541 bp, Homo sapiens
cctgagaagatggctgcgggtatttatgggaaaggactagtgaggctactatttgctgtgaccccgtttttgggaggactggcctctccttcagttgatamattctaggtccaataatcaactcacatctggaaactggataaaggattatgaatttccattggagcaacttatctttttgcttgtttaatcttaagctgttgaaatatacatatacacaggtggagatacagatatacagttggccctcaaatgagacaagtgttatggtgccaataccctgtgcagccagaaattaaagaataactttgactttcccaaaactcagttactaatagcctattgttgaccagagccttactgaaaacataaacaatcaacacacattttatgtgttatgtgtattgtattctgtattcttacattaatgtaagttagagaagagaaaatgttattaggaatatcacaaggaggagaaaatatatttactgtttattaagtggaagtggatcatcataaggtctttatcttggtcatcttc

SEQ ID NO: 898439 - DNA, 636 bp, Homo sapiens
agaaatatggcaagagaaataaagtaaaggtatctagataggaaaagtggaagttaaactatctctgtgtgtgaagaagattttacacccagaaaacctcattgtctctacccaaaaactccttgatctgattagcaacttcagcaaagtttcaggatacaaaattattgtacaaaaatcagtagcattcctatacaccaacaacatccaagttgagagccaaatcaataatgtaatccttttcacaatagccacaaaaaacaacaaaatacctaggaatacagccaaccagggaggtgaaagatctctgcaacaagaattgcaaaacactgctcaaagaaattaaagatgacacaaacaaattgaaacatattttatgctcatgggtagaaagaatcaatattgttaaaatggccatactccctaaagcaatttacagattcagtatcactcctatcaaactaccaatgacagccttcacagaatgagaaaaaaaatgttttacaattcatatggaaccaaaaaagagcctgaatggccaaggcaatcctaagcaaaaataacaaagctgaagacatcrcattatctgacttcaaactacattacaggctgcaataaccaaaaccgcatggtact

SEQ ID NO: 898440 - DNA, 633 bp, Homo sapiens
cttctcatagagataatggattgtgccaagtcttacatgcccattgcacactttctcaattcccagctttgttcttacttaattttcctcataacgtctcaattatgggacaaattttcttaatgtggcataaggtacagtctgtgttttacaaggaataacttagtttcatttacttcgtcaataggtgttcaggagatggaggccatataacaattttatttacatgatatcgagaataagttccttcagatgagactctctcatgagtccacaatgaattctcaagcattttttgatgcagatgaattgaatgaatgactggtcagaggatgagacaaaaagagatccctgctttcagggcagccattaaatgcagtccctgctgccatatcatgcagctgttgctcactgaggtgtgggaaacttatttgggaaaacttttttgtgaacaaaaatgttatctgcaaatataagagatcattcctctcattgttaaataaactcaagtgcatgtcttgctagtgctgacttccaatgtcatttctactatrttgagagttaaatgtaagtgtccttgggcagaaagagaggacctcagcttggatcagaatctgtcctttattagctaca

SEQ ID NO: 898441 - DNA, 645 bp, Homo sapiens
aggacctatgcagacagatttaagtaaggagaattatttcttttgaattggagagattattctatagtatccagatgagtccagtgtaatcacaacagtacttacaagggggaacacagaggtgtagagtcagagtcagagaggaagaaaatgtaataacagaatcagaaactggagtaatgcattttgaagttggagaaagagaccacaaggtaaggaattaaggtggtcattagaagctcaaaaatggcaaagaaaccgatgatcctctcagagcctccagagccctggtgacaccttgactttacgtcagttgagaaatcagaactaaaagagaatatgtttgcattgtgtgaagccacaatgtttctggtaatttgttataacaacaatagaacgctgataaaatcatcattatcattgtcatcatcattatcgtcatctcagtaggtgcttggttttagtttgggttcttataattttgcattctcaaatagaaagtcaaaacaatttcttagttatttgaagaaccacactgataagcaatggcaccttttattttttgagattttcttattggcttgtgaatgatttcttctcygagagtggttatggaggcttaaacagtatgtcatgagttagcaa

SEQ ID NO: 898442 - DNA, 604 bp, Homo sapiens
atcaaggttgcagtaagctcagatcgtgccactgcacttcagtctgggaaacagagtgagaccctgtctcaaaaaaaaaaaaaaaaaaaaagtgcatgaarccacacaaataagttcctggtgcttgtgaaggagatgagggtgggaggcagcttccaaatagttaggtgtggtccaagaagcaggggtagagagatccactataaagctgcgtgttaaccctttagttagttgctggatcctaggaagccctagatgattccagggagaggcattgaagggcagctcttgaccaaccagtatggaaaccgtcctatattttaactaccagtgtggtcttcctggtcacagctcttgatgttggctatatttgctatatttgagtatattcacaggtttccaaccctagaattcttgggtcaaatggtataaactcttttagtcttaatgagtctgttatcaaactttctcttggagtcttttttttcataaaaataaaacagtaatagtaatagatggcatttatgagagcaaagcaacatactaaaggctttttatacttgatgtcctgcaattttcccaagagggctatgccacaggcact

SEQ ID NO: 898443 - DNA, 604 bp, Homo sapiens
atcaaggttgcagtaagctcagatcgtgccactgcacttcagtctgggaaacagagtgagaccctgtctcaaaaaaaaaaaaaaaaaaaaagtgcatgaagccacacaaataagttcctggtgcttgtgaaggagatgagggtgggaggcagcttccaaatagttaggtgtggtccaagaagcaggggtagagagatccactataaagctgcgtgttaaccctttagttagttgctggatcctaggaagccctagatgattccagggagaggcattgaagggcagctcttgaccaaccagtatggaaaccgtcctatattttaactaccagtgtggtcttcctggtcacagctcttgatgttggctatatttgctatatttgagtatattcacaggtttccaaccctagaattcttgggtcaaatggtataaactcttttagtcttaatgagtctgttatcaaactttcycttggagtcttttttttcataaaaataaaacagtaatagtaatagatggcatttatgagagcaaagcaacatactaaaggctttttatacttgatgtcctgcaattttcccaagagggctatgccacaggcact

SEQ ID NO: 898444 - DNA, 604 bp, Homo sapiens
atcaaggttgcagtaagctcagatcgtgccactgcacttcagtctgggaaacagagtgagaccctgtctcaaaaaaaaaaaaaaaaaaaaagtgcatgaagccacacaaataagttcctggtgcttgtgaaggagatgagggtgggaggcagcttccaaatagttaggtgtggtccaagaagcaggggtagagagatccactataaagctgcgtgttaaccctttagttagttgctggatcctaggaagccctagatgattccagggagaggcattgaagggcagctcttgaccaaccagtatggaaaccgtcctatattttaactaccagtgtggtcttcctggtcacagctcttgatgttggctatatttgctatatttgagtatattcacaggtttccaaccctagaattcttgggtcaaatggtataaactcttttagtcttaatgagtctgttatcaaactttctcttggagtcttttttttcataaaaataaaacagtaatagtaatagayggcatttatgagagcaaagcaacatactaaaggctttttatacttgatgtcctgcaattttcccaagagggctatgccacaggcact

SEQ ID NO: 898445 - DNA, 642 bp, Homo sapiens
cttgcctactccctcctgctgctgtttttctgtctcctggtttctaatttctccatcactttgytgcacatcaaaactatttagagggaatggcagatttagatttcactccagcctgagtccgttgaggatagacaattaagggaccttgagccaagtccctttatctctctaagtttccattttatcatctgtaaaatagaggggttgaaacattaatatttcttcccatattctgtagttctttggagaatttatgttctcaatcacactatgagtggtataacaacaaccaccacatataaaaagggaacaaaatttgccttaaaatgtcaacaaacatggtgcagcaaggttattacacacatcagaggaggaaggtttttgtaagtcaagttcccaaatgagcttcttctttgtctagttttagtcattctgcagggaagtgggtggcatacaagtcttgagtataaaccagatcccaaattcagaggtccattgtaagattgcaatatgccatcaggagcatgtataaatcattgttttttgagggtttgccatctacaagtgttttgagtgttgatgcagactagaaaactttctgaacacaacctccagtccttggtgtgtgatcctgtctga

SEQ ID NO: 898446 - DNA, 642 bp, Homo sapiens
cttgcctactccctcctgctgctgtttttctgtctcctggtttctaatttctccatcactttgttscacatcaaaactatttagagggaatggcagatttagatttcactccagcctgagtccgttgaggatagacaattaagggaccttgagccaagtccctttatctctctaagtttccattttatcatctgtaaaatagaggggttgaaacattaatatttcttcccatattctgtagttctttggagaatttatgttctcaatcacactatgagtggtataacaacaaccaccacatataaaaagggaacaaaatttgccttaaaatgtcaacaaacatggtgcagcaaggttattacacacatcagaggaggaaggtttttgtaagtcaagttcccaaatgagcttcttctttgtctagttttagtcattctgcagggaagtgggtggcatacaagtcttgagtataaaccagatcccaaattcagaggtccattgtaagattgcaatatgccatcaggagcatgtataaatcattgttttttgagggtttgccatctacaagtgttttgagtgttgatgcagactagaaaactttctgaacacaacctccagtccttggtgtgtgatcctgtctga

SEQ ID NO: 898447 - DNA, 591 bp, Homo sapiens
ttttaagtcaaaaacttgaacatggcttggaggagagagtttaagctccataatccccggtcctgagcaaagcagtaacatgcctgcaatttcctttttggaagagagaagtcaaggaaacagccattgggcagagcatcctggcgccctccgtgagcctggtgggagcagacgtttcacaggctcctggggccactgctaggcagctgggcctgttttctctcaatgcccacacagttatgtgctgggtttcaatcgttgagaaaagaaagaaagaaagaaaaccacggggcagcttttctgtccctataccccaatcttttccactttccgtgcctgggttgagccagccctttgaggtagccaccataccagctaccgctggtctttgctgaacctgctgtcctggaatctatgcgttctgcctacagcctcttctgtccttgtccaccagtcatcacagcatcactgagtcatcatcaccaggagagtgaagtggacttcagatcaaatccctcaagctccccaggtttagattttctcatcccagacrtgagaaaattgaaccagataacactctaaggtatcagc

SEQ ID NO: 898448 - DNA, 628 bp, Homo sapiens
ttgaactgaataaaaattaaatcacacatactaagatttgtgggatgttgctaatgtagtacctacagggaaatttccagcactaaattcttatattaaaaaataatgcatgcaaggtttttagctttcagcttaaaaaactagaaagagcagagaaaactgaacctaaaataaagaaaaagacataataaagaaatcaattaaatggaaaacaaagaaaaaagaaaatccatgacaccaaccaagaactgttcttttgagaaattgacaaaattggtaagcttctagtaaaaaaaaaaagaatttaataggaaaataatatataaaaggtataaattatcaacagtacaaagggaaggaaggaatttatcactaagattctacagacaccgaaagtatactaaaaggatataatgagtaatgttatgctaataaattttacaacttatatgaaaatgacaaattccttgaaaatactttctaccaaagcttactgtagaagaaataatctggatagtcatataacaattcaagataytgaagtagttataaatctttataaaaattgtgtaggcctagatggtttcattgatgcctttctaccaaacatttaatcttctagaaaata

SEQ ID NO: 898449 - DNA, 563 bp, Homo sapiens
cttagcttctcctagattacacaaggaggctctccttgatctccagactatttctactaggctttttaaaaccttgagtactttccatttatagcatgtactacagattgtactgatgtgtttgttactattattattttataactcaatttaagggttgaggaacagcctttcactctgtctcccgagtcaagcctttgtctttttctttaaggaatattgctgtctattctgacccaagtttgtttggcaaacattgagcccctggtgcatggaaggcctgaggtatatcctcgaggaataggtggtgggaagagataaggtccctaactctagaagctgaaccatccctaggcccctcactgctcctatcttagctcatatggccctcttctctgactttgaattctgtaagagtttcaatctctcctttgattctttagggtaaaatccaaacttctagttcctttcrggtaaaatccaaactcccagttggtatggccctccataatcaggcccctgctgctctccaaggccttaattcccagagctcttcttgcact

SEQ ID NO: 898450 - DNA, 623 bp, Homo sapiens
aacatcctgaggaaaccagtgtgaaagtgtattaggcatcattcaacatctttcagtatactcctacaaacayacatacaaatatatacacatgtatatatatatttgagaggttcttttctaaaaaagaagtatttttataaaaagtaacattatgccatggatgtccctccatgtccatactaatagagcttctctttcttgtgtaaagctacagaacttctacagtttgaatgcacttcacttttctcaatcattccctagatgaaagacattacagttatttccatcttactttaccatgaaaatcaatgctgcaataaatagcctcagagatattctttttcatactggtgctttcatttcagtagaaaagattcctaaaggtagtattgttcagtcaaggtaggcacatgctttattttaatagatgctgtcaaattagtttcaaagatactggtagtgactatgatgaacatttactctcctatcggcaatgtgtgatgcatccatttccccaaaatctccatagtattggatgttatttattatttatttttagcaatctacaggaagaaatggtatctcactgattgaatttgcattttctagctactagaaat

SEQ ID NO: 898451 - DNA, 703 bp, Homo sapiens
ttacatagaacaactttgtgggtttattcaaatggtcaggcttacaaggagtagatcgaccaatttcagagccttcttggagagaatgtacaactgataccagctttttaagatcagcatcaaaagcttatcttgggtgtgtgtgactgtttctgccgctgtccaggagatctaccagtcttacctttttaactaatgtaaaaccatttgtctcaggctgcttgacaggtggagctagtctgtaaaacttagctcatgtttttttcttttctctcccatgtttagatggatggtaagagagctgagctgcaagcagtattatgtgaataacacattttgttgcctatgtttaagaggctggttgttttgtaaaatgcctgttagttgttctctttgtttgattgttcgtttgtttttgagatggagtctcactttgtcgcccaggttggagtgcagtggcacgatctctgctcactgcaacctccacctccctggttcaagcaattctcctgcctcagcctcccgagtagctgggactacaggtgcgcaccaccacacctggctaatttttgtawttttttagtagagacggggtttcaccatattggccaggctggtcttgaactcctgaccccatgatctgcctgccttggcctgctaaagtgctgggattacaggcgtgagccactgctcctggccaaat

SEQ ID NO: 898452 - DNA, 703 bp, Homo sapiens
ttacatagaacaactttgtgggtttattcaaatggtcaggcttacaaggagtagatcgaccaatttcagagccttcttggagagaatgtacaactgataccagctttttaagatcagcatcaaaagcttatcttgggtgtgtgtgactgtttctgccgctgtccaggagatctaccagtcttacctttttaactaatgtaaaaccatttgtctcaggctgcttgacaggtggagctagtctgtaaaacttagctcatgtttttttcttttctctcccatgtttagatggatggtaagagagctgagctgcaagcagtattatgtgaataacacattttgttgcctatgtttaagaggctggttgttttgtaaaatgcctgttagttgttctctttgtttgattgttcgtttgtttttgagatggagtctcactttgtcgcccaggttggagtgcagtggcacgatctctgctcactgcaacctccacctccctggttcaagcaattctcctgcctcagcctcccgagtagctgggactacaggtgcgcaccaccacacctggctaatttttgtaattttttagtagagacggggtttcaccatattggccaggctggtcttgaactcctgaccycatgatctgcctgccttggcctgctaaagtgctgggattacaggcgtgagccactgctcctggccaaat

SEQ ID NO: 898453 - DNA, 617 bp, Homo sapiens
tacagcatcttagactttcacattttgcttatctttcatcacttttcactgctatgcactgaaatcttccgctccctgcaaaaagctctgctctgagtataaacacaactaccttgrtctcattttaaaatctgtaatcaaaatcctcttttataacattcattttgctctgaatccttcattccagctactcagagtacaatataccaaaggagagagcctgtatccaaaactttgaggaataattttgatagtggttaataagaggacaatgcaagtttcttccaatgttagtgctttaaagggtgttttcctttaggaggatttacatcctagttaaatcttcattccaggatggctgcaagcaaatatattccacacgtcccatctaaccactgctcatacagaatcaaagtacatcaaggttggaaggggattcacaggtcaagtcaaagctctcatctgatgcctcattgtgttctacaatttcaagtacccctcagtgcccatcagaactctttctgtgccacgggtctccatgaaacagaaggtcattcaattttcacatagcttgaattcttattttgaattgaagtctggccaaagttactttcaaa

SEQ ID NO: 898454 - DNA, 617 bp, Homo sapiens
tacagcatcttagactttcacattttgcttatctttcatcacttttcactgctatgcactgaaatcttccgctccctgcaaaaagctctgctctgagtataaacacaactaccttgatctcattttaaaatctgtaatcaaaatcctcttttataacattcattttgctctgaatccttcattccagctactcagagtacaatataccaaaggagagagcctgtatccaaaactttgaggaataattttgatagtggttaataagaggacaatgcaagtttcttccaatgttagtgctttaaagggtgttttcctttaggaggatttacatcctagttaaatcttcattccaggatggctgcaagcaaatatattccacacgtcccatctaaccactgctcatacagaatcaaagtacatcaaggttggaaggggattcacaggtcaagtcaaagctctcatctgatgcctcattgtgttctacaatttcaagtacccctcagtgcccatcagaactctttctgtgccacgggtctccaygaaacagaaggtcattcaattttcacatagcttgaattcttattttgaattgaagtctggccaaagttactttcaaa

SEQ ID NO: 898455 - DNA, 606 bp, Homo sapiens
aaatcacgacacatttaaaaatctaggctcaacatttcaatgttctaackcacacacaaataaaatggttttatttgtttttgcaaaggcaaaaaaaaaaagtcatttaagggctacttaacagatgagaatttttgtggcagaataatttccctttagaattttgaataaaacagaaggtgctataccaatttcagtttgagtgacaatgatgcatcactcataatctctagacttaattctgtttgaaatgtcccaccacagatggcaatgtcctaagctataattgtattctttacaacatcgttgcggggcttataaaagatattaatttgggcctgacaggcagtatggcccagcagtggggcacaagcttaaagttctatgatgaatgtagccttgccattctgccaacatatctgggtaacctgctataagcctttatttggtgaaaaagtcaaaaacgtaaactgtgggcccttcataacaaagagacataggccaaatagctctccaatgttcctaaccattcctcctcctgccattatactggaggtgttagaattctatcccacattgcacagtaaagggctgacttcaagaaag

SEQ ID NO: 898456 - DNA, 657 bp, Homo sapiens
gtagctgggaatacaggcgcccgccaccatacccagctaatttttcgtakttttagtagagacggggtttcaccatgttggccaggctggtctcaaactcctgacctcaaatgaaccacctgcctcagcctcccaaagtgttgggattacaggcgtgagccactgcgcctggccaatacgcttattttcaatggaagctttatatcaaccctataaatggaaaccaatgtcactcacacacacacacaaaaatggaaggtaacatcatgataaatataacagaaactaaggttattgagtgctagctagcttctgttgcctatctaacattcagggtttgatgtctgctctcactttactaaaatggaagaataacaagatagacatgctaacaccaaactgatattctctacgtgataccatcagaaggcttaaaggaaaattgaagaacttctttttcaccaacagattgaaggattatgtcatgctgtccatgtactgcctaaaataatcttctatttagcccactgtactcattccacacttaggaagacaatgtcccaggtgatatataagatctctattaacacaaaaccttcagtgttaaagaagccaagggctcacaagatagaaatgctccaggtcactgcatgagag

SEQ ID NO: 898457 - DNA, 626 bp, Homo sapiens
atggttcacagtgggatgaaaggagatggggcaggtctttgcgggagggggggttgttttgttgaacaagaagggtgggactgaatgtgaaaggtgacagaagaaatggggatgagtaaaacagaatgatcaaattgttctcaaacattccttttaactgcaaatcaatgctctgtgtacaggtctgggatgaaaattaaaatcaagctaaatggagttttccttattgttaagaaacagtgtaataaagcacactgcccactctatacttggcatacaataaattctcaaggtgagacctatcacttctatcttttggaataacaataacaacaaaaaatatttctgatggattttccccaaatattttattttttaaaattatggaaacatgttttctatcttagatacaggattttcatgtaagtcaagaatttcttggagatgaaagttcatcattatgttggaacataacacaagcatttttcttcatgggaaaaaccatggagataacttttattgagtgcacaattttctatcaagtgaaacractgactcaaacatcctcttattttggatcccgaggttggatcagatctctaaggcttttccaagccctgaccact

SEQ ID NO: 898458 - DNA, 630 bp, Homo sapiens
caaaacattttcacatacagcttgtctctagtttttattgtgggatattagtttcttactataggtctcaaaaagctaagaaatttctatttgtagattctaaaaaatagtgtttccaatgtgttgaataaaaacaatggtttaactttgtgagatgaatctatacatcacaaagtattttcacagataggttgtttcaagtttttaccatgggataattgatttttcacaataggcctcaatgggctctgaaatgtcccttcgtagattctacaaaaagtgtgtttccaactgggtgaatcaaaatacaggttccatttggtgagatgaatccacacatcacaaacattccacacgtatcttgtttctagtttctatttcaggatatgtggtttttcactatacttctcaatgagctcagaaatgttttttcatagattctacagagagagtgtttccaacatgttgaatcaaaacaatggtttaactttgtgagataaacycacacatcacaaagcattttcacacatagctggtttccagcgtttgttcaagaaattcagtttttcactgtaggccacaatgggctcagatatgtctctttttagaccttttattttccacaaaaag

SEQ ID NO: 898459 - DNA, 619 bp, Homo sapiens
tgcagaacagcggatattggtgaacagcaaatgttgatgcctgattgttcctctggaagttttgtctcagaggaktacccggccttgtgaggtgtcagtctgcccctactggggggtgcttcccagttatgctacttggggttcagggacccacttgaggaggcaatctctccattctcagatctccagctgcgtgctgggagaaccactactctcttcaaagctgtcagacagggacaattaaatctgcaaaggtttctgttgccttttgtttggctatgtcctgcccccggaggtggagtctacagaggcaggcaggcctccttgagctgtggtgggctccaccaagttcgagcttcctagccactttgtttacctattcaagcctcggcaatggtgggtgcccctccccaagcctctctgccaccttgcagtttgatcttatactgctgtgctagcaataagcaaggctccatgggtgtagaaccctccaagccatgcaagggatataatctcctggtgtgccatttgctaagaccattggaaaagtgcagtattatggtgggagtgacctgattttccaggtgccatctgtcaccactttctttgactaggaaag

SEQ ID NO: 898460 - DNA, 524 bp, Homo sapiens
gacttttaagtctgatatgaaacatttacaatctagtctcactgaagcctgttactgctacttggaggcttcatctgcaggataaaactttggtctccacaaccctttatcttttttttctttttgagacgtaatcttgctctgtcacccaggctggagtgtagtggcgcaatctcggcttactgcaacctccgcctcctgggttcaagcgattctgctgcctcagcctctgaagtagctgggattacaggcgcccatcaccatgcctggctaatttttgtatcttttagtagagacagggttttgccatgttggccatgttggtcttgaactcctgatctcaggtgatccacctgcctcggcctcccaaggtgttgggattacaggcacgagccatcatgccyggcttcacaatcccttatcttaatcacagtataattaaatctacctatgacctggaagcaccccctaatctgccactgcttcaacttgtcccacccttccagatcaaaccaatgttaatc

SEQ ID NO: 898461 - DNA, 524 bp, Homo sapiens
gacttttaagtctgatatgaaacatttacaatctagtctcactgaagcctgttactgctacttggaggcttcatctgcaggataaaactttggtctccacaaccctttatcttttttttctttttgagacgtaatcttgctctgtcacccaggctggagtgtagtggcgcaatctcggcttactgcaacctccgcctcctgggttcaagcgattctgctgcctcagcctctgaagtagctgggattacaggcgcccatcaccatgcctggctaatttttgtatcttttagtagagacagggttttgccatgttggccatgttggtcttgaactcctgatctcaggtgatccacctgcctcggcctcccaaggtgttgggattacaggcacgagccatcatgcccggcttcacaatcccttatcttaatcacagtataattaaatctacctatgacctggaagcaccccctmatctgccactgcttcaacttgtcccacccttccagatcaaaccaatgttaatc

SEQ ID NO: 898462 - DNA, 560 bp, Homo sapiens
cactcaggctggagtgcagtggggtgattttggcttactgccacctgggttcaagcgattctcatgccttggcctcccaagtagccgggattacaggtgcccgtcaccatacytggctaatttttgtatttttagtagagacggagtttcaccatgatcatctggctggtctgaaatgcctgacctcaagtaatctgcctgcctcagtctctcaaagtgctgggcttacaggtgtaagccactgctcctggccaagagttattctcgtgactattaacttctccagtggtagatattacagatatccagtgaacgattcaaaacataagtgattttcagcatggaggagctaccaataacagtagtaacttgtacctttctgggcactcaactatgggccaggcactggtctcctgctacatatgtgtcatctgacctcattctcccaagtcctaaaaagtaggttcctttttttttcaatttcacctagacgtatcaactgttaatatgttgtaacatttttctctctgtttctccatagaaagatcccttttatttcc

SEQ ID NO: 898463 - DNA, 560 bp, Homo sapiens
cactcaggctggagtgcagtggggtgattttggcttactgccacctgggttcaagcgattctcatgccttggcctcccaagtagccgggattacaggtgcccgtcaccatacttggctaatttttgtatttttagtagagacggagtttcaccatgatcatctggctggtctgaaatgcctgacctcaagtaatctgcctgcctcagtctctcaaagtgctgggcttacaggtgtaagccactgctcctggccaagagttattctcgtgactattaacttctccagtggtagatattacagatatccagtgaacgattcaaaacataagtgattttcagcatggaggagctaccaataacagtagtaacttgtacctttctgggcactcaactatgggccaggcactggtctcctgctacatatgtgtcatctgacytcattctcccaagtcctaaaaagtaggttcctttttttttcaatttcacctagacgtatcaactgttaatatgttgtaacatttttctctctgtttctccatagaaagatcccttttatttcc

SEQ ID NO: 898464 - DNA, 600 bp, Homo sapiens
tttttttttttttttactctgtcgcccatgctggaatgcagtrctgcaatctcggctcactgcaagccctgcctcccgagttcatgtcattctcccgcctcagcctcccaagtagctgggactacaggcgcctgccaccacacccggctaattttttgtatttttagtagagacggggtttcaccgtgttagccaggatggtcttgatctcctgacctcatgatccacccgccctgccctcccaaagtgatgggattacaggtgtgagccactgcacccgccctttttttttttttttttttttgagacagagtctcactctcattgcccagcctggggtgcagtggtgtgatcacagctcactgcagccttgacctccccagggctcaagtgatcttcccacctcaatctcccaggtagctgggactataggcttagaccaccacacctggctagtttttttgtttgtttgtttttggtttttttttggtaggtccggggtcttgtcatgttgctcaggctggtctcaaactcctgtgttccagtgatcacctgcctctgggcctcccaaagtgttgggattacaggtgtgagccacca

SEQ ID NO: 898465 - DNA, 674 bp, Homo sapiens
ctttgataacaggactgagaaatttcagctggagtagaagacacgggtagtttttttgttttgttttgtttgttttttttgagacacagtctcgctctgtcacccaggctggagtgcagtggcaccatctcggctcactacaacctccgccttccggattcaagcaattctcctgcctcagcctcctgagtagctgggactacaggcacacgccaccatgcctggctaattttttgttagagatggggtttcaccatgttgcccaggctggtctcgaactcctgagcttaggcaatctgcccgcctcagcctcccaaagtactaggattacaggtgtgagccaccaacgcccagcgacacccaggtaggttttaactggaggatgaccaaacccagtgaatcctgataaatgaagttttttgatatggtctgcatgactctctatcagcccctgagctgttcataattttttttagttttttgaagtctcgctctgtagccaggctggagtgcagtggcgtgatctcagctcactgcaacctctgcctccygggtacaagcaattctcctgcctcagcctcctgaatagctgggactacaggcacatgacaccatgcccagctaatttttttcaattttttttcgcagagacggggtttcaccatgttgtccag

SEQ ID NO: 898466 - DNA, 574 bp, Homo sapiens
ttcccagaggagttggctgtgtggtttacattggcttccatagcattcctgtgatacccaggttctatttcatcagcagtggagctgtggtggcaaaattctaacagattgtcttctgaaaaaaagcctctattttactgcttaagagaaatgctttgaaaaattacaatgcatttttcaccaatctcctttgagttctatattttcacaacttagtacaagtaatgcatagccaatattaaatgcttatgatgccttttgttgtttcagaatgctacaaagctgcgctgtaaacagtttggaaactattattgcaactactgccttatgttaggcagagaagttaaatgacttgacaagtttacccagccagttagtaggagagctagaattagctgtctgtcttctgtcttccagttcctctgatatttttagtagactttgcatatggaatatttagtgtgactgaatgtccaggtagaggtatccaggactggactttggaaaggagggagggtttagagttaccyaatcgagatttacattgagtgaagagtggaatccacgttggcag

SEQ ID NO: 898467 - DNA, 509 bp, Homo sapiens
attccattggtacctttcccccatcttgacatgaccaaactatttccaaggtccagcacaaaaacagttcttctacaaaacatttccctatgcccatccctctacatcttcagcttctgaaatctcttagctcttttcattgtgcccctaattttgattattctattttatgtccagatgttggagtgtcatttcttcatttaattatcacaaaattgtgtttagtttgtgaaaggaaaaaatgtagcaaagagaagttaaaagttttgcccaagctaaatgactctcatgggtagcacaggacataacaaataataactgtttgaaaaatgtgtaattttaaatgcattattttcaataagtgaaagactgataacacaattcagctasaatcatttgggtatttttaacctactccaaaagttagcagcatgataaatgggcctcaatagagtgtacctagcacatccatttatttcccaagtataatatcatttgcacatttatag

SEQ ID NO: 898468 - DNA, 590 bp, Homo sapiens
gcccactaaaaaggatcaatgatccttggaaaaatgctgcttgaaggtctggagcagaatatatacaagatgaacttggccaccttgttgatgttggrtgctatgtttggagacaacagtaaaaaaggtagtaaagactaatgagttttaataaaaagacttagtagccaaattggagaggctgcttcaccagcaatgtgataattttgagcaccaaatataataacaactaaagtttattaaaacataaaatatataaaaatccatgaatttatacttcatcatgatattaaataatttttttaaaaacctcaattttctgaaaaaatgacaaagggaaattatcaaacaatgttctatctttcttatatgaaccatattttgggatgaccagtagttgacaaatgattctttttatagaagatttctagtttgtaaattcagaaggaggaatagaatttttttaagttacaatttacaatccccccacccccaaaataatgtatctaagcaatggacatcaatggatactaaaatcattaggtaaaatagttctttataacagatgaatagaataaggtttcaaatac

SEQ ID NO: 898469 - DNA, 488 bp, Homo sapiens
ttctgccagcagacagtttttgtacttgaactgtgatgttggtcagttccctggtctccagcctggcagcctacctgaagattttgaatttcwtaatagtataagctaattctttaaaacaaaatttctatatatacacacatcctattggctctacttccttggagaaccatagctgcctatgaaaaactaggctttattataggtctttttatacttctagccattgaaggttggggtttttaatttttcttgttagatttagcctttgaacatagctcagagccagtctttcaatgtagggattatgaatgagctttaaatcagggctcactggatcaccacataatcaacttgattggctcttgaatgctgtatcagtccattctcatgctgctataaaggtactgcctgagattgggtaatttacaaataaaggaaatctaattgactcacagttccacatggctggggaggcctcaggaaat

SEQ ID NO: 898470 - DNA, 422 bp, Homo sapiens
attaactgagttaaaagacagaggcctgggcttccaggtgcttgctgcctttatttttggtcactccagggtgctgytcctgcatagcagccctgtgtcaaactggagatcgcattgctcctttcccatggaattgccacaatcagaaagtcaaacttgttttcttgtctgaacctgatgtgatcatgtattgtcttgtttccctctctctcccttcttgttcttacttctggatccccaggtctaagttcaaggcctggcacacacaggtatttaataaatatttattagaaatgaagacactggaattgacacaaaatgagccagattagatgagcaggtcaggaaatccatgttttatacatatacatatatgtgtatatatatatgtataatgtgtattgtacataatatttttacat

SEQ ID NO: 898471 - DNA, 580 bp, Homo sapiens
ccatttgagtcagtgccagttagacataattccatttcatatcctttagtactgggtaactcaaagtgtrgtccgtggactagtgccaggctgagaactgttgccagtctaccatgagataactacagatagtaagcattatgtctgtttattctaaaaaatgtgactttatttgatgtcttttatggcatttttgtcatgcatttttttctagtattttacaaaagtatgagtctacaaggaattgcaaagttaaaaagaaagtgtcctttgccattgttaatttgaaaagttccactctagaagatccagttttgtcttgaggaatagcttttcatatggcaaactcatcaagtgttgcacttctccacattatttcatatgtatctatatttggtgttggtagatagcttataactttgctacatgaatttttccagatcctctgagaagcaggccacaagacagattgaaaataaaagagatttattggggcaatgtcagaaagggaaactgagaaaggggaaggcagggagaacaccaaaaacatcaaactgcaatgcagggctgacccctggga

SEQ ID NO: 898472 - DNA, 635 bp, Homo sapiens
atgtttatggagaaactgctatgtgacagacaaatagggatataaaagtaaaagattgttctctgatctcacagactttatggtatagtgagagacataggaattaatttattaactcaacaartaagtattttaggattaatcatatgaaactgccaatacttgatagttctgatctacgtaaacaacagtgtcatatgggtcaacctaatgtagtaacagaatgtgaaggaacgacataacaacatgtgaaggaaaagtagagggaacaattagagcttataataagggaacttcatcgatttcaaagcgtcagacaagttttccttgagaaaatgatgattaaactgagatctgaatgactagtggcccttaactacttgaagtgcagaagggtatgagtgtttagaccaagtgaagaacacagcatagtagcactcatggagttccttcgcttttttccttttcttttagaagaatctaataaatcaaaagtcttcttggtagagtaataaaaaaagctaggctaataggttgatggacttaaacaccctgagaataaaggtcaaacagcaaaggatagttagcaatggctaactagatggctaagctagagcagaatcaacattgagaac

SEQ ID NO: 898473 - DNA, 605 bp, Homo sapiens
tctgttgtcaaatcccttaacttgcattttattgtttggctaaatatcataataattgactttccagatactgatctcaaagtttccctacaayataattaaccctgctaaatataaaattcagtgatgtttagtacattcatagagttgaccaaccatcactatatctaacttttttttttttttttgagacggagtctcgctgtgtctcccaggttggagtgcagtggcgcaatctcggctcactgcaagctccgcctcccaggttcatgccattctcctgcctcagcctcccaagtagctgggactacaggcgcccgccaacacgcccggctaattttttgtatttttattagaaacggggtttcaccgtgttagccaagatggtctcgatctcctgacctcgtgatccgcccgtctcggcctcccaaagtgctaggattacaggcgtgagccaccgcgcccggcctatatctaactttaaaacattttatcatctcaaaaagaaagcttgtacttaatgatagtcactccccattttgccccttccacacaacccctggcaatgattactctactttctatctctgtgggtttgcctattt

SEQ ID NO: 898474 - DNA, 681 bp, Homo sapiens
gctatttttttcttcttcatgatcaaattttctattaaagctctctattgaatatttagatttgtccttgtattctttagctctagaatttctatttgttcttttttatggtttaagcagtttatatttcttaagcttctcattttgtttatacattcctttactaatgtaatttagttgtctgtgtattcttaaatctcactgagcttccttaaggatgatcatttttaattctttttcaagcaatttatgagtctccctttatttggagttctgatgctagaattttattaattcctttggcttgtttgcctgattctttgctactcatgcagtcttgcatttgtgtatgtttacatggagtaaaacatttctttgtagtatttatgactgattttggcaggtaaaagccttctcctggtgggtccccaggctgataggattgcctctgggatcacagttgagtgggggtgggatccaggccaagtggctgctgctgagtctgcagcggggtctgtggttggtgcttgtcaccaggggttgaagtagatatgggtcctatgtggttccttggtggactagactgtcacccaggtctgcaggcctgtctcttggggcacagatgggcatgtctccttctgggcctgtaagtggrcaggactgctctcagaccacagctaa

SEQ ID NO: 898475 - DNA, 610 bp, Homo sapiens
aaccaattttgttccctaaatttatggtcattctaatcacgttctcaagttataaagtgataatactattgtgtgatttacagactatttggttttattttacttggctgagcatattttataaagtgagatttaagagttctagattttgatacctgaagcagaaattcagactgtccacaagtatttagtagctccttgtccttaaaatgcttaagtttaatggtggataagacataaagccccaaaacatttaagtcagtaatttaaaaatgtttttacaatagcaccttttctcctcagtgaagcactatgccatattctagtggtgcagaagtaattgcgattttggactgtgaattttaaatcattatatctgggctcaaacacatctttattaattaaaataggagccattacaatcaatgcatttttgccaatgagaaatgaatttgtttatccctgtagtgtaaaaatccacgctttgggattcaacaaactcttggagagcactttctgcatcctgctggttgtggaagcattttccctgcaaaaagttgttgagatgcttgaagaagtgrtagttggttggtgaaaggtcaggtgaata

SEQ ID NO: 898476 - DNA, 613 bp, Homo sapiens
cagtcaattaataccacagtctctattttctgacctccatttggccacatggccccttatgtgggtggcattggagtgaccacaggcatttttgacatgacactctaaggaaaagttaagttgataaatttaagtttgcgtttaatggaattgtatttatttggtttgtagtcacattgtgaacagggtgttttctatctatccaagtgaaggaatggtttccaaaaattcttctacacccctttgaaaaaacagactcaatgacattaacaacaacgtgattatgagcactgtcaattcaaagagtattacagagtagttacaacacaacagaacttgaaatgccctaacatattacagatcatacaaatttttaaatcttattgctcatctacaaaagaaacttgatagataattccccaaatttaacaacaatttaaagaatttacatgacaatgatttgggaagctaaattgtcaataacagataacaaataacttgtcatcaaccatgctagagaaaatactaaattcctttcctactatctttatagaaaatattaatgtatwtgaagaggtaatcagaatgtattccaaaatatagccaataagta

SEQ ID NO: 898477 - DNA, 662 bp, Homo sapiens
tattttgctggagatgataatcttcttatttttaatgcttctttaattatctttaaatagttaaattttatgcagcctccaggaaatctgaaattgttttctatgcagtctaacctcgagatctttyatcagttgcatttttgttctgtagaaccagctcctggaacactttgccctctgctacatcagagggctttgcttgccaagcttggtgaagcagtggtatgactttgctgctattcagagacttctatttgactcttctctgtgttgcattcctggtttcttgattctcatgtcttcctctttactggtttattcctgcattttgttgaagtacatgttctaatagcttcctgagaaatcgtgcatgggaggtaatttttttgaaattgtacacattttaaaatagctttattctaccctcatatttgatcaattgtcctatggctctataattctttcacagcactttaaagggaaagtttgtttaattgtcttctagcactgccaatgtttgcgatgagaaatcaagtgctatttttacttctaatctttattagttgctttgttttttcttttctggaaacttactatcttctctttattttggggaagtaatatgtcagtatcttctgttctatgcaacttaaaagaattga

SEQ ID NO: 898478 - DNA, 606 bp, Homo sapiens
tttaagtgattatgctggggcagggttgtgggaatggctagagagtcagtaaattcatctacactgaacttaattaattccttctataatcctgatcactgagagaatracaaaccatccttgtggtaatggacatgaaaggtcttgggcaatgccatacggggtgcttttaacaaaactaaggaacacatccatgatttctggctttgaatcatgcactaacttccatcaaaacaaaatagagtaaaagggcatcaaaatagtgttcactttataataattgtgggtgtctataaagaaagatttttacagtactttcatttttgcatatgaaattatcttttaatgttgctaacctccacgtagacactcttaattactgctattcacttcatgcatttcaaagaagaaaagctttcttattactcactttacatacttaaaaatcacaacaatgttggaagacaatttctgcaaaccaaacttaaaagctaagatttcaattttctagaagaaagcgaataaataaatctttatgaccttggaatagaaatagatttcttagcaggacagtaaaaagtgacaaattatgtttcataaagttaa

SEQ ID NO: 898479 - DNA, 627 bp, Homo sapiens
taattagttgtttcaaaaactaagggaatcaacttttagactcccatgctagtagtgactatgacagtgtcagcagggggcagccagctcctaaaatttggaaacatgcttccttcttgtcttttctstttaagtttccaaatcaggctttataaaatcaagtttcataaaacactttatgaaatagtgatactgcttggttaaatataagaagaacattctgctttaacttcagctattccaaggccaactggtacactgaaagtcaattctgacactaaccacccagagatagtgtcaaaccagacaaatttaaggccagggtccccaacaagaccacccccactttagatgccagacacaagttaagggggttctcaggttacctacacttctgattaactgggtgtaaagttggggattccaatgactcccttcagatgtaataattcacaggaatgactcagagaactcaggaaagtgctgtatttttttatcttttttgtaaaattatactttaagttctagggtacatgtgcacaatgtgcatgtttgttacataggtatacatgtgccatgttggtttgctgcacccatcaactcatcatttatattaggtatttctcc

SEQ ID NO: 898480 - DNA, 622 bp, Homo sapiens
cggtactgataatgttaaggttgcagtgagctaacttgcatttttctatcagctgagggtctggtggtaagttgggcasaggtagattttgacttatttgtgcaggagggccaggtgtcctgaaccatgaagaaaggcagatttatagcttctctgctttttctgtttgcttccccttggtcctgccagcctgactccttttctctaattagccacactgctgactggcttctgccctccccctctagccctctccccatcttggtgaaaggatcagtgccttgtggacctgaactggggaccccttccggagaaccagaagttctgactcttgcccagctcaatgaggccttctcagtgcacctgggcaagttacacataatggaaactatatctgtttccttaggttttgaagacttgagatattacataggtttcaatagatattactataaatagtgatttaaattcattcattgaaattgcagttattttatgccaatttggtgccagctgccctgctggatactacagacataaaacaaagaaagacatggttcctgctctcaggcattaatgagagagagatgggccaaaagaaagaagttaatatactgcctgc

SEQ ID NO: 898481 - DNA, 536 bp, Homo sapiens
aagaaatactagttgtttttgatatcatggtgtgtgtgcgtgtgtgtgtgtgtgtattggggagcaggaaagcttgggatagtgagaaataaaagagaggaagatacacttataggacagatatattcattaacttgcagatatattgattttataaatcctttaatacaagcaaaataattttaaatgtggttatgtgaatcaaatttttccaaatctttgtttttttcacaaactatgtggtgattatatgaacctaataatgtaactcttgaaatatttattaccataagtaaaaaattagtgtagggattaaaattatcaatgcttctaaaacctgttctgtttatgccacttcacaaagagcactatttaccagaggtacagtctcctgttcttgattatttattctaccagcatctttctctagagaactttcgcatttgcttgacgtacgactttggggactattaatattactttggcttcccaktgtagccctctgacactgcttcattgtaagagtggttgttatt

SEQ ID NO: 898482 - DNA, 657 bp, Homo sapiens
caagtgatatttacaaaataatggtayctctgagtggctcaaagtaaatttactttggctgttggatttggtttattccaataccaaaatgctttgaataaatcctctctttctcacctttcttctagtgtaagccattggtttctcataattctcatagttctaaccctcatcacgtgatatgacatgtagctaaatagtaaaaataagggttggttacaagtgaggaattttttcttagtcaaatctttttactagctgaactggcatacacaagcctatgaaaaaagaaatgtttcacgtgtaatttcaaatacagaggcacagctatatctcatgcctcagaaggtaatgaaaatgatggcagcacattcttatagtccccgcctcttcataaatgggtagaaagaatgtgacaatattcagctgagattccctgcggtgcattcacaagtttcctgttcccctgcagaagtctttctttaggcacataaaatgagtgtcaggagggatccactttgctggcttttagcaagcagtctaattctggctttctcttctagtcagtggatgtgccactttgcttagtttgtagcaggaaataactacgttggaagagttgaagaaagctctttgggccactgtacctgggctaaa

SEQ ID NO: 898483 - DNA, 560 bp, Homo sapiens
ggtctcactatgttgcccaagctggtcttgaactcctatgctaaagcgatcctcctacctctgccgccttaaatgttgggattacaggcgtgagtcactgtgcctggcagaattttttagttttcaccacacaagtcttgtacatattttgttagacttacatctaagtattttggggagttgtaaatgatattgtattttgaatttcattgtcaatatatagaaatacaattggctttgggatgtttatcttctatcctgcaaactttctaaactcagtaattctaagaagctgtttttggagattgctggaggttttcaaaataatcatgtcatctgtaaacagtggtagttttatttctttatttctgatataatttttttattttctttacttgtcttattgcactggctagaaattcaagcactatgttgaattraaaaagggataatggacatctttctcttcttcccaatgtttgcagaaaagccttcttttaccattatgtagatgttaagctgtgggtattgtatagatgctctttgtcaagttgaggaaa

SEQ ID NO: 898484 - DNA, 560 bp, Homo sapiens
ggtctcactatgttgcccaagctggtcttgaactcctatgctaaagcgatcctcctacctctgccgccttaaatgttgggattacaggcgtgagtcactgtgcctggcagaattttttagttttcaccacacaagtcttgtacatattttgttagacttacatctaagtattttggggagttgtaaatgatattgtattttgaatttcattgtcaatatatagaaatacaattggctttgggatgtttatcttctatcctgcaaactttctaaactcagtaattctaagaagctgtttttggagattgctggaggttttcaaaataatcatgtcatctgtaaacagtggtagttttatttctttatttctgatataatttttttattttctttacttgtcttattgcactggctagaaattcaagcactatgttgaattgaaaaagggataatggacatctttctcttcttcccaatgtttgsagaaaagccttcttttaccattatgtagatgttaagctgtgggtattgtatagatgctctttgtcaagttgaggaaa

SEQ ID NO: 898485 - DNA, 637 bp, Homo sapiens
actggtggagtttatgttgaaaaataaagtcaatgtttttamtttttactttttactttcatgtttttcatgatctttttgaagtcttcttgtgcaagcagcaaagttctaggtcaagtgaacaaaagtctcacctgagtcatggcccctcaatcatttcccatatttgagccagtttacaaacctagaactccttgaatgaaaggtagtccaggtcctcttgaggaaggaccccaatgcacttccaaaatattataatgttaatatttcttctagccttttcccaaaggacctatggcattttatcaggataattatactcaaggaaaccaaaataattcactcacaaatatacttctttgacatatttcaagatgcttatccagaagggctacaaatataaggataactgaaaagctgtctttcgtggaatatatttccacgaaatatatatccaaatctgcatggataaaatcaggctttttcagaggctctccttgtctggatctcagaaagttataacttagagtctgaaacctttaaaattctgaaaggaatatttaccatctatttattttttttttttcctgagggctgccatctgtgaggtttcatctacataataatgttggagctt

SEQ ID NO: 898486 - DNA, 577 bp, Homo sapiens
caggagtgagtgttactgaaacacacacataaatcctctaacattttctccttgaaaaataaaacccaataaaaatgtcttggaaacctttgtatatataatttcaattaataagatcagtttttaattattccttacttgtatgttcacttttaaagaaaatctccacagggggtttttataatgcacatatgagcagacagattccatgcaaaacttctctttcctgaagggctatatgatccaacacgactttgcatcactaagtgtatgacacagtcttttaccttacaggtcctcattatgtaacactatccaaatgttactatgttttaggaactgcactaaatatgttatatgtgtgctatcatttagtcatcacaaaacctatggacaaagaaactaaggctcagaaaagttccttaaattgcccaacaccacaagcttctaattgacactgaagacataaatatttctagcttcaatgcacattatgttatagttaaagcatamttttctaaacagattttgcaatattaacacatggtataaggtaatttcccactggtttatcagt

SEQ ID NO: 898487 - DNA, 723 bp, Homo sapiens
caggaaagactggtgactgagcttacagtgggaacagcataaattaagagaaatggtgaaattattttagatagttgacctgctggtagttggtatgttgagagtgaggacaagtcatcttggatgcattaaggttgagtcataactttattttcccccaaagttatggaatgatggtagcacaaattaaaaatgcaatagcctaagggagagacagagatgtatttaattttcagtttactttaatcgggcagaaagggattaaataatgcattttttaactgttaaatgtgtaattccagtgagccatccaattgaagatgtcaattagacagctgcttattcaaacctgaaattgagaggagaggtttgggttagaaatatacatttggaagtcattgtcacacatgtgatatttaaagctttggaacagatgatcacagaggaaatgaaagttaagttttaaaagggaacataatccaggaaccagccaagatttagaggtcaggtttagaaggaagactttaaaaaggagaatgaaaaggataatcagatatagggtaggaaagaagaaattatggatctagaagcgagacagttgaggatttgggggagaaatgattggtyactaagtcaaataatttgaagagctcaggtaatgaagttaaaactattgaccattagaaccttagccttaatagttttagagattgttaagagcag

SEQ ID NO: 898488 - DNA, 440 bp, Homo sapiens
gtaaacaacactagtgttgctgaatattcttattgtcaatatgagatagtatggaygtgatttataaaataaattctgaaattgcaacatcttcaataggaaaatgttaaaataaattcagaataaagctattcttatactttccaatataatgagttcctgaaaagaactgcaagtcaaatattaaaaacattccgtagacttcacatttcacgtggaagattccattttttttgtagttaaaaaataaagtacagatttctgggttctggtccagcagataaggggcttagaatttgctattccatcttaacaacaagtaaaaagctgaacaaactaaaaaatcagcaagtctttttaaatttgtcagagaaatgaagtcatagggcaaactttgcaccaaaaatttgagacagacaggcaaatacaagaatcacaat

SEQ ID NO: 898489 - DNA, 638 bp, Homo sapiens
atttcaggaaaattaatgattaatttgtcattgtggatgttgatttgtcaataatcataatatatcaagatggatacgtacgataaagtagacgctacagcatagtaaaagggttggatagaaaggaagagaaagccaaagatagaatcctggcactgtctacttttaagacagagaaaggaagagacctgagaagacacaaatgaaaaataaaaacaaaaaacagtcacactgagagaactagaaaagaacgttttaagaaaacaacatctacataccaagaaaacacattcctcaaagacaagaaagtgtaaactattacagaaactgagccccaagtgttcaagaactgggagtaaagcccactattagagggaagttggtgttcttgttgagtttgttggtttggcaactgagtatgaaaggcaagccaaatgggactataaaatgcaataagcaggtagaaattactccattatgttcttcgacatggagaggaagcagactagtttaacggttgcatgaggaagtagaaggtttgagaaagtwgacgacattttaatgcatggatgaactaagcatacattcaggaaatgagcaaacagccaagtaagagaggagatctaaagaccatggaa

SEQ ID NO: 898490 - DNA, 532 bp, Homo sapiens
tccttgttggtctgggagaagggaaaggggcaaggaagaaggaagggaagcgtggtggtttttgttgtagcgttttggaagaggaatgggcgacgcctttttcttcgccggggaatcgcgacgttccgtctgatggaagtgtgcatccttttagatttagagggaaagttggagtcaaacagcagccacaaagctggctgtctgaaatgtggttaaggcaaaacactcgggggatctctttgtagtagtgggcttggctcgctttggaaaggccggatttgactcgtgctgggcatttaaccaggagtgcggtccccagggtgtttcctcccggcttctgcccaacgagcctggagttaatgcgttaatgggctaccctggtagcgcacgggccgttttcggcactgtttctccttctctgatgactcgagttcaacctcctgggctgagttgctttgcctccgtcacagtgcaaggagggaagttgacaggaggaggagamgccgcgctgtggcagggagctttgggatcc

SEQ ID NO: 898491 - DNA, 558 bp, Homo sapiens
atgtatatttgttcaattctctcccttttctctctctgtctctttctctctctctttctctctttttaacccaatgcatagttatttacttakccttccaagttgggtctgctctcattcccatctccttgcccacagtttacttccactgtgtgattacaaccttgtttcttttgtgccttgttccttatgccttttctaaaaaggtattgctcttgggatcttttgttaaatgctctcactattctgctgtttcagaatattctattttagtctccctcataagaaagtgaggggaaacaaaatgacctaattcaccatccactcactcaaggatctggaactcagcccagtaacattctccatagtgcagtctcatgcccagagacgggatcgtttgtagaccacacaccagtgctcaacttgctctacttgagctgtctagttgctaagagagcccagaatgcttgcttcctaaatttgggcttcagaggaccgtgtaggaacctgcagtacagcacttgtgcaatcaagttgcctaacagaagctaagcattc

SEQ ID NO: 898492 - DNA, 599 bp, Homo sapiens
ttagataatagttctgatcagttgctttggctataatccattatcacctttgtacaaaacctctaactcatgttttcttatccactttaaagttcttccagcccttcagatataaaatgtcaaaaataaaacggggctttcattttttattttttcccttaccgactcactgaacctcttttctttatttttatcagcaccatacggctagtaatttgaactttacacatcagtcatctctaatgcaatacagagaaggtcctgtgaacctagtcccacctgggttcccatcccaattctgtcactaacaagcttgtagccttgggcaatttgctttatctctctatgccttagattcaacatctgcaaatgaagtgttaagagtatttaataaattactgtgtggattgagttaatatgtgttcacaacttagaataatgtctggtccttagtaatacctcataaatgttagctactattattatcactttcctttgctctttttttccaatcacttcagcaagttttcttaaaacttgcctcctttccatcgtcactgccaacacyatgattcaaactttcatgttcttttgcctga

SEQ ID NO: 898493 - DNA, 543 bp, Homo sapiens
acatttaccaagataagccatattcttggtgataaaatatatcttaaccaatttttaaaaatataaatcactcaaagtctgctgtcagaccacaatggaattaaactagaaatcaataataagagatggataycccaaaatacttggagattaaataataaacttataaatagcacataggtcaaaaatatcaaaagacattaaaatattttgaactatatggtataataatttatattcatctggatatatacgcagtaatgggattgctggattgaatgatcgttctattttagctcattgaggaattgtcctactgctttccacaatggttgaactaatttccactcccaccaacaatgtataagtgttcccttttctccacaacctcaccagcatctgttattttttgactgattagttatagccatcctgactggtgtgagatgatatctactgtggttttgatttgcatttctctaatggtcagtgatgttgagcttttgttcatatacttgttggccacctgtatgtcttcttttg

SEQ ID NO: 898494 - DNA, 593 bp, Homo sapiens
tgttgaacacattttaataggactgtttaccatttatatgtctcttgagaaacgtctattcagatcttttgcccatttttaatcagaatattagacgtttttctattaacttgtttgagatccttatatatatgggtattaatcccttgtcagatgaatagtttgcaaatattttcacccaatctgtatggtgtctcttcactttgttggccatttcctttactgtgcagaagctttttaacttgatgtgatcccatttgtccatttagcttggttgcctatgcttgtaaagtattattcaagtaatttttgcccagaccaacatccttgagagtttatccaatgtattttttaatagtttcatggtttcaggtgttagatttaagtctttactccattttgatttggtgtttgaatatggtgagaaataggggtctagtttcattattctacataggaatatccagtattcccagcatcatttattgaagagactgtctttttcccaatgtatgttcttggcacctttgctgaaaatgagttcaccatagrtgtgtatggatttctctgggttctctgttctcttcttttgg

SEQ ID NO: 898495 - DNA, 609 bp, Homo sapiens
atgtttctcaaagcttaagatggtctccaccagcagttcagcaactagcagcacaaagtatgagcaaacactcaaacacaagcatgagctaaagtaaaacttagggtcaaatgyacctctcaaagtatatgattggagctaacttttttattttaagttacagaaaaaaaaacaggagaactgaagagaaatcttcatctaatatgttgtttaaaatctggaaacatattttctgtactcttgcatcattttttttttctaccaagtaacaaatggatgtgtcttcttgcaggaccaaaaacaaaaagaaaagtaaaacacagagttctcaaaagcaccataatccctttaaatttgtgtttgagatgtcattagttaacgtactgttcaatgtactaataaaccacataggcctgaaagaatccatacaacttgaaatttgtggagatatttaagaaaaagacttgacttatcgaaagcattataaagcattctcattcacagaaaggcttatattaggattgattctcagatctcaaatttatcggaccacctatcactaaataaatacctttatcaataaattatactgcaaagcctttgctgaaa

SEQ ID NO: 898496 - DNA, 609 bp, Homo sapiens
atgtttctcaaagcttaagatggtctccaccagcagttcagcaactagcagcacaaagtatgagcaaacactcaaacacaagcatgagctaaagtaaaacttagggtcaaatgtacctctcaaagtatatgattggagctaacttttttattttaagttacagaaaaaaaaacaggagaactgaagagaaatcttcatctaatatgttgtttaaaatctggaaacatattttctgtactcttgcatcattttttttttctaccaagtaacaaatggatgtgtcttcttgcaggaccaaaaacaaaaagaaaagtaaaacacagagttctcaaaagcaccataatccctttaaatttgtgtttgagatgtcattagttaacgtactgttcaatgtactaataaaccacataggcctgaaagaatccatacaacttgaaatttgtggagatatttaagaaaaagacttgacttatcgaaagcattataaagcattctcrttcacagaaaggcttatattaggattgattctcagatctcaaatttatcggaccacctatcactaaataaatacctttatcaataaattatactgcaaagcctttgctgaaa

SEQ ID NO: 898497 - DNA, 566 bp, Homo sapiens
ctatgggcaggacctggttctcagctactagagttaggagaaataatgcagaatctctctgctcattctcataaaggtatgaaattacatrtgattccacattaccattattaccattttttttcaaacaacccctcataccaactttatctacttcaaaatacaatacacaattaatgtccattttaacatggattcaacagaatgaaaggagatcaaaaaggctcccaaactcctcagggctgactctgatacttgcactccaccaccattactgccagtaaaacttgtccaattctagcctcatatatcaaaaatctcatgcatagcttccacatgcatatagtttcttgaatcatttagataaaagaagaaaaactctataataagggcttgcaatcggagagactgtcacttgatctactaatactcaatttatggtaggccctatgcaaaaatctataattcgtaattttgcacctatttctgaaatttaatggcacttaacaagatttaaaaatactgaacgcttatcttcattctcagtacagaaacccttcagagaa

SEQ ID NO: 898498 - DNA, 627 bp, Homo sapiens
cacattcaggatggctctcaagagtccagataatgattaaacaaacaagtaaacacctacttgctcctgagctatagcttaaggaactgagtgaagctaaaagatcttacacttgctccccatcaggtgaccaatttgaacctacacctaacattagctctcctccagcatctcttcctctcctctctgtcccctctcccaagcccaccatcctcttgctgtacctgatgcgttagtaaagaagtatgccaagagcatgtagtgtaggacccctcacctgtgaggaccatttgcaactgaccacattctcccactcagcagtgtctcccgcaataaaagctttgtgcccagactaatcacctttcagaagaagtcaaaagcgaggcagtcagcataagatgtaggagtgaaatgaaaaatcatataggagataataaaaatatacaggagctttaacttgctacaactccacactgctctacttactttcaaataaatgtgagccttaaatcattatgcagactctgtgatgagtrtgcactgcataaaaaatgttagcttcctttactcttccaaaatgtgattgatcatcttccactccatccgctctgcacacttgactcgttt

SEQ ID NO: 898499 - DNA, 472 bp, Homo sapiens
acagggagggaaggagggaggaagaggtggggmcaacagggagggaaggagggaggaagaggtggggacaacagggagggaaggagacttcaatctgtgactttgtcatttggctgtgtgtgtgtgttccttcctcaccactgcctcttgactacaagtgatttcttaattatcctataaaacaagggtcagcaaactatggcccacaggccaaattcagcctgctgtctgttttggtataataacattttactgaaatataaccccactcatatgtttacacaatagagttaagtaactgcaacaaaaagacacatagcctgcaaagcctaaaatatctggccgtttgcaaaagaactttaacaacctctgctctaaaacattacccaaatggcatttcatcccctgtgaaattttcctgactctcattaatattatagtcctgcatttcctgatagaagatggcaaatgt

SEQ ID NO: 898500 - DNA, 401 bp, Homo sapiens
attttgaggatgagtggagggttcactggtcaaatgctgttgcaaatacaagaaagatcatttaaaattgtccattggcttcggagacagttaatcttcatgttggtggartggtgatgatggacgcaagatgggaggggtctgagaagagaataggacttcagatcaagttgcctctgtcagtatgtaaaccgttatgccccaaacacacatcactgatagaaaagcttgcattcataacaaaaaaaatatagccaaggggatttccactttggtatttttgaatgtaaactttaagcactttcccaccaccacttatcaatgttttcttttcatatttataaccataataaaaaagataaacttttgtgtagccagaaggccaacagaaacaaacagca

SEQ ID NO: 898501 - DNA, 593 bp, Homo sapiens
tgttgaacacattttaataggactgtttaccatttatatgtctcttgagaaacgtctattcagatcttttgcccatttttaatcagaatattagacktttttctattaacttgtttgagatccttatatatatgggtattaatcccttgtcagatgaatagtttgcaaatattttcacccaatctgtatggtgtctcttcactttgttggccatttcctttactgtgcagaagctttttaacttgatgtgatcccatttgtccatttagcttggttgcctatgcttgtaaagtattattcaagtaatttttgcccagaccaacatccttgagagtttatccaatgtattttttaatagtttcatggtttcaggtgttagatttaagtctttactccattttgatttggtgtttgaatatggtgagaaataggggtctagtttcattattctacataggaatatccagtattcccagcatcatttattgaagagactgtctttttcccaatgtatgttcttggcacctttgctgaaaatgagttcaccatagatgtgtatggatttctctgggttctctgttctcttcttttgg

SEQ ID NO: 898502 - DNA, 606 bp, Homo sapiens
gagccaggattgaatacttggaccccaggtctggagattgggatactgtaatacttctttgttattataacataaaagcaccactgttctgttcatttcctagctgttctaattaagaaaactattaagatgagcaaccacatttagaaatgtttattgacaggtcttttcaaataatgcttttctaattaatagccaaagatttcatatctaactttgtaaccagaattatacagtaagttgacaccacttagatttaaaggcagacagttttgctttagtacaatagtatacattttataatgatgaacttataatgattaagggacatttctataaaaatactacaatagttttatgcacaacttcccattaaaaatgagatttcttatttgtttgtctgtttttactctgggagtaatactttttaaattacctttacatatatagtcactggcatactgagaatatacaatgatcctggaaattgcagtaacaaaagcacacaacgattatagtaactataagatacaataaaacaaataaatrtgaaagtagattcatgaaaatgtattcctttaaaatattgttttcctacaggcctat

SEQ ID NO: 898503 - DNA, 586 bp, Homo sapiens
ctccaatcacatggccttcagccttcccagtttcgcttttggacaacccaaatccctagtgaaaggggcatggaatctgaacaggagtgsaggaaattgaagtcagctaaagacttttctttttatccacaaaggaaagttgcttttgtcttactgaatgaataggaccctaggagtgggcatgagggctctgctggaaccatgtgccctaaagacaatgccgaagcgtgcaactgaaaatgaaaatgaaactgtaacttgtgaccatctatctgtgtcttctttcgccttgcctctctgtgctgttgactgttgcggcatgtctgcggcaaagaaagaccatgctgcagtcagagaaatcagaggacaccacttcaacaattaaccaaaaataggacagggacacctatctgcctgtgcttggacgtattaggtcattcagctcagctgtgtgactggagaaatcattttgcctttataggaaaaggtaggggtgtaggatgatgagagaaaggaagagacatgactcagagtgggaaacagcacgtagccaagggcaaatatttctctcagacataaatggatc

SEQ ID NO: 898504 - DNA, 619 bp, Homo sapiens
aaagcctactccccaatagttatttttctgctcctctccctccccgacgctccacccctcaagtgggccccagtgcctgttttttccctatttgtttccatgagttctcatcatttagctcccactaatgtggtatttgggaaaatccaacttttgaaagatctttagtctgctaatcatgaatggccaacataattacaggcatgccaacatttgtaacattgtgacactttccctgccattcttagttaaaactgatcttttgttccaaaaatttttgctaccaacaatagcctgtcctttatagttcttttatacttttgtgtcttctctctaactaaataatcaactctttcagcattccatccatttccctttctcctccctcttactcccaacccacattcccctctccattttaattttaacctgtgccccttcaagtgtactccagctttttttttaaaataatttcaagtgatactttgacttttgactgcatatggaagcrtaagtaacatgtcctttcatttttggataatgagtttcctgattaattacagctcaagagtaaaatgactgattactatttaattcattttgtgcttctttacaataa

SEQ ID NO: 898505 - DNA, 619 bp, Homo sapiens
aaagcctactccccaatagttatttttctgctcctctccctccccgacgctccacccctcaagtgggccccagtgcctgttttttccctatttgtttccatgagttctcatcatttagctcccactaatgtggtatttgggaaaatccaacttttgaaagatctttagtctgctaatcatgaatggccaacataattacaggcatgccaacatttgtaacattgtgacactttccctgccattcttagttaaaactgatcttttgttccaaaaatttttgctaccaacaatagcctgtcctttatagttcttttatacttttgtgtcttctctctaactaaataatcaactctttcagcattccatccatttccctttctcctccctcttactcccaacccacattcccctctccattttaattttaacctgtgccccttcaagtgtactccagctttttttttaaaataatttcaagtgatactttgacttttgactgcatatggaagcatragtaacatgtcctttcatttttggataatgagtttcctgattaattacagctcaagagtaaaatgactgattactatttaattcattttgtgcttctttacaataa

SEQ ID NO: 898506 - DNA, 729 bp, Homo sapiens
cctatagaaactgcagtcaaaaagatttggaggttatttaggaaggtagagcagggcagttatttaagctcacgaggcttcttgagaagagatgagaattgctaccttgaccrtgcttcggggtcagcagaccacagggcaggaattacacaggggatgttggacaaagtggttgtaaagcggaacgggggcctgacagcagaaagccttgaacaagaggccatggccaagagcattccaaataatgctgaaatgtatgcttgcagatgccatgaagactgagttagtttcagagaacaaagtcctgcgggaagagaatgacttggaagccggcaatcttcatcctcagcaggatcaaagctgtctcaaggagtgcccttgcatgaaaggaggcacagatatgcaggtagtgtctgacccagccctggggatggagaaggcacagagagctttgctatctattataagcgtcaggtagaggccagtccccaagcatagtggatccacttggaatcagaagaccctgtagttcctggagtagaattccagccaacttactgcctactccatgctactggaaaccaggagactgagactgtagcagaatcctcccaacgctatatcatcggcttctgggaaactggaaactggcttaggatctcattgcatgttcccagtcaaaacaagcaaagcattatttaaaatctaccatagtatgggctgaagtat

SEQ ID NO: 898507 - DNA, 560 bp, Homo sapiens
aaacaaaaaaagttgtgtgtctttgctttatcacaatatttgctttattgtggtagtctggaactgaacctacaatatctctgaggtatgcttgtaattattaatacttttgtcttttaacttttatgctagaattaaaagtgatttgcacactactattacagtaatttagttctatatttgcctatatatttaccttttctaatgagtttcatacttttaggctaccctgttgctgtttagcatcctttcatttcaacttgaagaaattcctttagcatttcttgtaaggcaggtctagtgatgaagaactccctccacttttgtttgtctgggaaaatctttcatttatttttgtttgttgttgttgttttaaatttttttttatttccataggttattggtgaacaggtggtgtttggttacatgagtaagttctttagcagtgatttatgagatttggtacaccgatcacctgagcaatatacactgcactcagtttgtagtcttttatcccttacccccttcccamcctttcctcctgaatctccaaagtccat

SEQ ID NO: 898508 - DNA, 684 bp, Homo sapiens
tagtatatttcttcttatcggctgctttcaagattttctctttatcactagttttcaacaatttgrttatgatatgccatgatgtgattttctttgtgtttttgttataggctcattgaatctatgagtttacagttttcatgaaatttggaaattttatggccatttcttccatttcttttcctgctcttgcttctcttctaatattgtcccacaagtcattgaggttctcttcgttttcagattccttgtctctctgtttcagtttggataatttctcttgctgtatcttcaagtttactcatctttctttctgtaccatctaatctttttaaaaacccattcagtacatttttcactttagatattataatttttagccttagaaattccattctgttcttctttacagtttccttctccctcctcattattttcatgttttcctttaaattattgaatacatttataaatgttcctttaacattgtcatctctgtcacttttgggtcttttttattctgctctttatgagacacatttttctgcttctttgcctatttagtaattttttattgaatgctggacattgagaatgttaagttgttgaacatctagtttttgttgtcctctttgctgaattttgttttgacaggcagttaaattacttgtgaaccagcttcat

SEQ ID NO: 898509 - DNA, 577 bp, Homo sapiens
attgcctgagcacaagaaggtgacctgtccagtgaataatttttttttcttttaaatmcagacctgtgttgattagaagctggattaagagtaagaaggaaaaataggtattaacagatgagaggcagtataaaggaaaacaaatagggcatgtctaaaaaagcttaataagcaagataactgaagtcatttactctagagcctaggaataacatggtcacaaagtgaatgtttttgtgagtcataaatttagtaaacatggtactggacacagagaaccagaggatgtcagaataatcattttatcacaattcttcctttattgacatggtgactaagttaaataagagtttagtaggtggagtctctcagttgaagtataaattttaaaagtataaatttatatttgttttacatttttaaagccacttataaaattgtacatgctgtacaaatgaaattttgtgaacaaaattcacattcaaagcaacaccaagtaaggactctgtgttctcagcagaggtaacagctggtcatagcaaatgggcattctgattgaaatatatatttgcacata

SEQ ID NO: 898510 - DNA, 577 bp, Homo sapiens
aatatattgtaaagaaaacttttgacaaractaaatacatctccaatacttttttttttgtcctatgttaaagcttcattccttgtatgaggccatcggattggcttagcttgcattgagattgtatcaaagttgaagacatcatagtactgttgggggaattgaaaaatggtcagccactttcttctccttccaccctctcaaaaaggcaaagggtcactatgataactttgtgctgtgtctgtttagctaatctacaattaagtttcttagatttctctttcttgtgtaagtttaggaaggcaaaaattaagcaagaagcctgtattagttcattcttatgctgctaataaagacttacctgagactgagtaatttataaagaaaagaagtttaatggactcacagttcagcattgcttgggaggcctcaggaaacttacaatcatggtgaagggggaagcaaacatgtccttcttcacatggcagcaggaaggagaagtgcagagcaaaagggggaaaaagccccttataaagccattagatctcatgagaactcacttactatcaagagaaca

SEQ ID NO: 898511 - DNA, 586 bp, Homo sapiens
ccaagccatagcagagccatatgtcctgtgttagcaggtgcaggatgccaagcactatggtattttgctcgcattattgttgatctgctagctttccaaatgggtcttggaaagaatctagactaacagatatcaccagatctcttattttcatttcatttgctaagtgtggcaaatgctctgtgtcaaagagtatcaatttcttctgcaggtcaaccgtggcatggagtctggaggtaaaagaaggttatagatttcacagagtaatcctaggttcctgttgtcttcatgcattccagtttgtcctagagttccagttgatctcataggcttttgcttttctccaaccatccttctaatttgtggtgtgaatgatttgtagtgacttcaaactcaatattaaatgtggagccaagagcccatagactgctccattagctcccacaattgcaaaaaaktctgagtcccatactaatttcctcattctatgtaacccacagcagttctgcttccctgattgaatccttactgatacagccaaacctgaaatgaaagcctcgagaatattcatagaaatgtaattgat

SEQ ID NO: 898512 - DNA, 586 bp, Homo sapiens
ccaagccatagcagagccatatgtcctgtgttagcaggtgcaggatgccaagcactatggtattttgctcgcattattgttgatctgctagctttccaaatgggtcttggaaagaatctagactaacagatatcaccagatctcttattttcatttcatttgctaagtgtggcaaatgctctgtgtcaaagagtatcaatttcttctgcaggtcaaccgtggcatggagtctggaggtaaaagaaggttatagatttcacagagtaatcctaggttcctgttgtcttcatgcattccagtttgtcctagagttccagttgatctcataggcttttgcttttctccaaccatccttctaatttgtggtgtgaatgatttgtagtgacttcaaactcaatattaaatgtggagccaagagcccatagactgctccattagctcccacaattgcaaaaaattctgagtcccatactaatttcctcattctatgtaacccacagcagttmtgcttccctgattgaatccttactgatacagccaaacctgaaatgaaagcctcgagaatattcatagaaatgtaattgat

SEQ ID NO: 898513 - DNA, 617 bp, Homo sapiens
gtactgaataactactttaggccggccattgtaagaagtgacttatatttattattactactcataataaaacctggaaaatagatatccttattcctattattatttatagaggaagaaacagagattcagagaagttcaattgcttaatgagttacttaaagtctcaaagctcttggatgaggacacggaattttaaactatgcctgtatgcttctgaggcttatgcagatcatgatgtgacacccagcgtgaggcagtgtgttgtggggggaaataagtttataggcatgaagttctgtgttcacatccagagtttgcctattcctaactaaatgactgactgaattattctgtcttactctcctaatctgttaaatggggatagatggaagaagaaaattgatttatgttcttggaatccaacaaaagcaaagatttgcaagagaactgacagtgtctaggaaattttaaattgccttgcatgaatagaggataatacgtatgacaaatattccttccactaagtacaastaaaatccctggacattatgtataaaacagacctaagaaaacgtaattaaggcaaactggctgggaacgtcaggacccaagaa

SEQ ID NO: 898514 - DNA, 621 bp, Homo sapiens
tacatccgtgccatgtattactactcagcaataatggaacaatttatacatgctgcagcatatatgaatttcacaggaatcctgccaaatgttaaaagcaaatcccaaaaggttacatactgtrtgattatataacattcttgaaatgacaaaattatagaaatgaagaaaggaatagtagttgccatggttaagaaagtagtgaggatggaaggggttgtgtgaaaaggcaagatgagtgatcctgtatggaacatttttttcttgattgtatcaatatgaatatcctggctgtgatatttgtactgtagttttgcaagttgctaccattgtgaaaaaacggacaaaaggtacaaaggatctctgtgtacttttttttataactacatgtgaatctaaaattaggtaaaatagtaagtttgattaaaaaatgtatgggagagaattatggtgggtaaaactggaaatgcacctggagccagactgtaaaccattttgcatcccatgcccgaagaattctagactttggcttttcttctaggtcaggaggactcatctaaagattttaaatatagagcatttataatttgaaaatataatacttttctctgtagtaatgta

SEQ ID NO: 898515 - DNA, 621 bp, Homo sapiens
tacatccgtgccatgtattactactcagcaataatggaacaatttatacatgctgcagcatatatgaatttcacaggaatcctgccaaatgttaaaagcaaatcccaaaaggttacatactgtatgattatataacattcttgaaatgacaaaattatagaaatgaagaaaggaatagtagttgccatggttaagaaagtagtgaggatggaaggggttgtgtgaaaaggcaagatgagtgatcctgtatggaacatttttttcttgattgtatcaatatgaatatcctggctgtgatatttgtactgtagttttgcaagttgctaccattgtgaaaaaacggacaaaaggtacaaaggatctctgtgtacttttttttataactacatgtgaatctaaaattaggtaaaatagtaagtttgattaaaaaatgtatgggagagaattatggtgggtaaaactggaaatgcacctggagccagactgtaaaccattttgcatcccatrcccgaagaattctagactttggcttttcttctaggtcaggaggactcatctaaagattttaaatatagagcatttataatttgaaaatataatacttttctctgtagtaatgta

SEQ ID NO: 898516 - DNA, 647 bp, Homo sapiens
ggctgagatggaaaaacctgtcgggacagcaacaagtggggtgcaggggaaagacacaatcaccccgtggggatttttcctctacccccaatctgagtgaaaggcactgtgggagagtttcactcctctacccacctcagccttccccactccctgccagcccccaattccctgcctctgtaaccatggagatgcctggagtgggtccaaggccgggagtggcacccacaaaatcccctgaagggcataagaaaacacagttgctggggcccactccagagttcctaattcagttggtcgtggtgggcctcagaatctgcatttctaacacattcccaggtgatgctgaggctgtgggactgggaaccacactttaggtacaactcatctaggttctcaggaaccaaggctcccttgatgggactccagtgggaatgccgttgtgctcaaagacctttctgcggaataggatgtgatcatatactatcctgagaggatactgatcatgtcataytccatagaaagactccagagctatgtgatttccagggaattctctacgtgcacacactacacacacacacacacttgcaggaagatgcagggcatgctgggaataactcaaattaggcacacaacttattggc

SEQ ID NO: 898517 - DNA, 630 bp, Homo sapiens
aggcacaaaagacaaatatcacatattttacttacatgttgaaggmaaaaggttgatctcatggaggtagagagtggtaatacagataacagagactgggaagggccagcagaggggcaggggaaaggagagcacaggagaagtgaagtcggttaaaggatatgaatatatagtaacataaaaggaatcaattcaatatttgatggcagagtaggatgactatacttcacaaaattatattgcactacagtgaggaacaccctgaacactctgatgtgatctctatgcattatatgcatgtaacacattttctcatatactccataaattctcacaaataaaaaaagaaagaaaagggtgagctgaaaataaaaaataaaatatagttgaagagtatgtgtttcggagcagtcactgccacttactggctatgtgaccctcagcaattgtcctcacccggaatgtcaggtgcacacttggtggggtgtggtgaagcttcaccatgacagtgccacaggagcaattcactagcatgcattaagcactccataaatgtactagaattatgggacaacagtgaggagaaactcagaaatcaaagaaagcctgggaaataatgaaggataaggg

SEQ ID NO: 898518 - DNA, 680 bp, Homo sapiens
ttcagtctgccattggttgaatctagcagcatggaacccacagatacaaagggtggactgcaatacatgtgagaaaccgaaagaagatggttatgtgaaatgaaaagtgcrgtgcaagatgtggctggaaatctccctaggaaccagactgtctagagccttctaagtcattttgagaatttggatgtttatcctaagagcaatgcactaacattgaagagtttaaagcagaagggacataagagggtttgctgttttgaccaaagctagactggagtgggttgagaagtaagtgggaagtgagaaaatggagatagcaaggattgttatcattcacaagaagtttggttttgaaagaaggaaagctttaagacagaaattggataaggaatatatgaccaattgagagttttattaaaagataaaggagaatgagaatgggaatgtaggaaggaatgtaaactccaggtagcagaatgcagtacgatgtgcatgaaataaataaagagagggttagagttagaaggcaggaaaaggcacagacgatggcactggccataaatagacagagaagcccctgttccggtgtaacaaaagagaagaggatggatgcaaatagaagccttcgcatttgcataattgttgggcagcaggaaattgatggtggggctttccatcag

SEQ ID NO: 898519 - DNA, 621 bp, Homo sapiens
catatatttgaggttaagttcccattgagaaaaattgaatctggtcacccctcccactctctctaccctcaactcccctaccactggccacagcaaggagattcctggcaatattacatttcctgcagayaagactgcttctggagtgacatgctactgatattaaagaaagaagaatcaaacagggaaccaaaagaagtggtcgagaattttaaaatgtaaaaataagtctaaaaataactttaaaagaactcagcctgttgtgtctctagatacaccagaagtaacagtcagcaattgttgaaatcaagacaaagtgtgaaggttagtctttccaactgcatactctttacattttcctatcaggaacagagcacagaaaaatgccataggcccgtgaatcatctacacttacgcctggcaggaaacttctaataatttatacattccatctggttgcaacttaaaagactaattaccagtggtaccaactaatactaatgattaatgggtgaggttcttaaaaatgaggccaataggagccccaaactcagcatgactacaaacagacaaaaagttttactttgatataagcagatggtatttagagctttcagtctg

SEQ ID NO: 898520 - DNA, 565 bp, Homo sapiens
aacaccaacaatgaattagctaaaaagaaatcaagaaagcaattcaatttataatagccaataaaataaaagraaatatgtaggaataaatttaaccaagaatgttaaagacttctgcaataaaaactagaaaacactaatgaaagaaaatgaaaggggcacaatcaaagggaaagacatcccctgttcatgaatcagaagaactgatataataaaaatgtccacactacacaaagctatctagagattcaatgcaatgcttatcaaaatgccaatgatatttttcacagaaatagaccaaaagccttaaatttatataggaccacaaaagaccctgaatagccagagcaattctgagcaaaaagaacaaagctggaggcatcatacaatctcacttcaaaatatactacaaacctatagtaacccaaacaccatggtactggtataaaaacagatgcgtagattaatggaagataatagagactccagaagtaagtccatgtatttcagccaactgattttcttttttttttttcatgtttgatattaatttattaaagcattc

SEQ ID NO: 898521 - DNA, 611 bp, Homo sapiens
ttgcatatatctgtaatttattgctttttgtgactgagtagtagtatattgtatgrctgtaacacaatttgcttatccatttaacagtttatggacatttgtgttgtttcaagttttggaataatatgaatcaagttgttgtgaagatttgcatgcaagttttcttgtgaacatattttcacttctcatggataagtacctagaagcaagattgctggatcatatggatcaagattgctggataagtggctgtatcatttgcattccctacagaaatacacaagagctgtctctcttccccaatacttggaatcaacattttttttttttaattaacttatctcatgagtttgtaatgctcttattgtggttttactttacatttccataatgattagtgatttggaacatgtctcacacgcttatgtgccatttatatatttccttggtgacatgaatatttaaatattttgcctgtttaaaaatttttttaatttttaaatcttatttatttttataattttttaatttttaagaataaaaaacacttttaggttcagtggtacatgtgcaggtttgttatataggtaaactgtgtatcatgaggggtt

SEQ ID NO: 898522 - DNA, 515 bp, Homo sapiens
aactgtgtatcatgaggggtttggcatacagataatttcttcacaatggtaataagcatagtacctgrcaggtatttttttctgatcctctctttccttccacccttcaccctcaagtaggccccaatgtctgttgttccccccctcatatttatgtgttttcattgtttagctcccatttataagtgagaatatgtggtatttgggtttctgttcctgcatgaatttgcttgggataatggcctccacctccatctatgttgttgcaaagaacatgattctgttctttttatggctgcatagtatttcatgacatatatgtaccacattttctttatccattctaccattgatgggcatttaggttaattccatgtctttgttattgtaaaatagtttttgtctgttttttaaaataggatttttttgtctttttgttattggtttataagatttatttataaattctggatgaaaatcttttatcagctatatttggcaaatgttttctccca

SEQ ID NO: 898523 - DNA, 544 bp, Homo sapiens
aaagaattgtcttacctaatctttcagaaatctctctyttttttttttttgacggatctttttctctctgttgccaaggttagagtgcagtggtgcagttatggctcactgtagcctcgacctcctgtgcttcagtcgtcctcccacctcagcctcctgggtacgtgggactacaggcgcctttcaccatacctggctaatttttgtatttattcaagggacaaagctttgccatgttgcccaggctggtctcgaactcctgggctcaagcaatcagctcactttggtctcccaaagttcttggattacaggtgagagccatcatgcctggccctttgcagcagtcttttgaagaaggcattattttccccctctttggggatgagaaaatgggtcctcaaagaattcacacagctagtgtcagggtctaggctctatctgacttgtatttgttttcaagtacagagttatttccaccatactccactgctttgccataaggaggtaggatttgtgtgtagctggtatgagaaatttgtcacgg

SEQ ID NO: 898524 - DNA, 652 bp, Homo sapiens
tctcttacaaatataaactatcacctggtgttcaattgatcagtagagttactatagttaacacgaatcaattatacatctcaaagtagccagaagataatattttgaatgtctatagcataaaaaagaatatttggggtggtagatatatataccaattaacctgacctgattatatgaatgtatcaaattatcacatgtacctcaaaaatatgtatacctaatatgtatcaataataaaccagatggatagatagatagataatcatgagtcttgcttttccagaggggcacataacatagaattaattccaattccactggaaaaattttatttggtctgattagtgtcaatgaggggggaaaattcagtagttttcatctaaatagtcacaaattccattttcaataacgctcatatcatacaatgaactaatttttcaagcaacttttcaaaaatctatacattaccatgcttactgtacttactatctaaaataacaaaagaagcatactgatttgggattaatatggcttctagtccatgcattcakggaccttaatgaggatggtaatattttaaaaaatacatgaaattcacggttctttagctccatgggacagaaaagtgatttcctacacaagcttaaag

SEQ ID NO: 898525 - DNA, 567 bp, Homo sapiens
gtctttaaaaacagggagcttttttttttttttcccagaagttctctggaaaactcasccctccccaaacataactggaataaattgggttggatactcattactaaacaaattgcagatgcaaagtgaatcattcagaccatttattttagtcttggtttctaaaagcaatcactggccagcaaattctggatactatacccacccaagagctgaggatggggtgctgagctatgtggagatggtttaaatatacagactaaaatcaggttcttagaaaggggaaacggatactagaaagtaatgagccactatccactataacatattttcaaaataaaaatcatacatgtgatctggtactaataaatattctaatatgggagcaaagacagactccaaaattcatacccttccagaaaaacctaggaaggtttgcgctcatcctctctacagcacagcgctataattattttggcaatctgggggagacccagtaggttaacttatcagtcctttaaattccagcactgattagtctgatccttttccacttgtttccttcag

SEQ ID NO: 898526 - DNA, 615 bp, Homo sapiens
ttatatttgtttggaaaagaagttaaaattaaaataatatagaccctatctaccttcaaggcaaataggagagggttatataaattgacagttacggttcaatggcataagtactatgatatagaggattaaggaagcatggaaaagaaatttatcacgtggaaaagtcaaggaggacttcttggagatgttttatgaaccatgcttgatgagttggaattagctatatgaaggagagttggaaagtgcattctagacaagtggaaaataatcactaagttacaaccaagcaaagatcatagtctgaattctgaatttaggaataggcagtgaaagtaaagaggtagggatgcacatgatagacagtaaatgaccagagcatacagcatttgttgagagaatagaaatgaaggaaatgattgaaaggaagccatctagaatgattctataggttctagcattttaggtaaggtgaaggtgatggagaagatgaggtcagttttgactatattacttagtttgtagtagaagwgagtaattcaaggaaggtaaatttgagagaaattaataacttacaggcaatccaaacattttaaaagtaagcaatagaaacat

SEQ ID NO: 898527 - DNA, 481 bp, Homo sapiens
ttggtgccagttcctgtaaattcaaacaatatgaaaaatgtgcattttgaaaaatcaaggctggtatgtttttcacatacataattatttgaatcattgctcacagcaatgtggcagaacatggcatctttggtgatttcttccaatctttgtctttaaaaaatatatatacatctctagttatctcaaggctttgccccaccatttactgaaattgtttactacattgtatctcctctcccagattgttaaattacaaatattatgaaagctattattaggaatatatgttacacaacaaatcaatggataacttaattggaaaaggtcctcaaatgtttcctataacctgggtacacagaaggaacatttatccttctggatcatgttcaaatagaaaagccattgtactgggttttacagcctttcttgggcatatgtgcraatgagaagctaaatattttggaagcctattgtgtac

SEQ ID NO: 898528 - DNA, 590 bp, Homo sapiens
tcttaaacttctcagcatgttttctatggaagattcagcactttgaagttttccatatattctttttggaagctcgcatttctattcagtgctcctaacactcctctgggtttgtgacatgagctctgctttgaaatctgactgcatttcctggcccctggcctcttctccagctcatccttggtttatagagtttagcaatggttgctaggcagtcggccatctcccttttcagcacccaccaaggctggaccccttagtcctttgtcagatggttgtgaattaggaagttattcctcaagatttagctgctttttgtggctgctgggcctgctcaggtaccaccatgcctttgtctgtgttgtcgtcactggataagccctccttttcctatgccaacctcaatcacacccatctgacatgtagctcaagaccatgtaactgtggccctgagtaatctctatgtcctctgaattcctcattataccctatagtctatcatggaataattcagtatattagactaatgttgtactcatgatagtggrggcaaggacaggaaataggcttcccttcttggggcaattctg

SEQ ID NO: 898529 - DNA, 765 bp, Homo sapiens
aaaacataatttattctggtgkatgtgcacggaatgtgtattctactgttgttggatacagtgtgctgtaaatgtgaattagaacaagttggctgatagtgttgtttaagtcttcaatcaacgttttgtctacttgttctgtcaattactgagagaagagtgttgaaatatctagctatagttactgactttttatttctcccttaaattgtaccagtttttgctttgtatattttgaaatgttattactaggtgcacacacatttaggactgttataaactattgaggaagttactcaaatatatcattattaaatatacttctttgtccttggttatgttcttctttctaaagtctactttttgatattagtatagccattctagctatctcatgatgaatgtttgcatggtatatatttttcttcattttattttaccttatcttttattttaccttatctgtgtctttatatttaaattgaatttcttatagaatgtatttagctgagtcttgctttcttttccaatttgacaatctctgctttttaattgtggtgtttacaccatttatatttaatgtgtttaatgtttgggtttaaattgatcatcttgctatttgttttatctttgttccatctattttttgtttccttttttctcattttttggtcttttcttttcttggttaattgagtacttttgttattccatttcatctatattattggcttattagctttacctctttgttgtaatttttaa

SEQ ID NO: 898530 - DNA, 678 bp, Homo sapiens
ctgtgcctgcagctgctcctgtaaggaggggggacggcatctactcagctcatggatcatgtcaaaggccaaaaggaatataaggtcagattctcaggtgcstgtgcccttgtgtgctgagaataatagatttggaaacaaatagaaggtcgtaaatcatcaatggtatatcagtaatggtaaatctaatcaatacgtccctttaaagataaaggctcttttgccccaggataaaccattcagggaattttgcatttggactgctcccagagaggactggtaaagcttttctctttggaggtcatgggagtgtgggcggcagcaggttggggcaggttcttactgaccaagggattggagggacacagtggatggtgtaggagcttccagtcccagactagctgtttgaccttcttccctatttcctaatctttaaaatatgaaggtgaaatttaatggtttcaaagttcgcttccagtagtaccattctgatgactttatgaaatctactttcctctcaccgctgggtacagagaaaggaaacgtgtaaatggtcatgagaagaattaaagttaaatcaaaggaagaactctccaacctttgggattgtgaatgaaaaggcaggaccctgagaaaagttgtagatctaatttccctaatattttaaataattaaatc

SEQ ID NO: 898531 - DNA, 678 bp, Homo sapiens
ctgtgcctgcagctgctcctgtaaggaggggggacggcatctactcagctcatggatcatgtcaaaggccaaaaggaatataaggtcagattctcaggtgcctgtgcccttgtgygctgagaataatagatttggaaacaaatagaaggtcgtaaatcatcaatggtatatcagtaatggtaaatctaatcaatacgtccctttaaagataaaggctcttttgccccaggataaaccattcagggaattttgcatttggactgctcccagagaggactggtaaagcttttctctttggaggtcatgggagtgtgggcggcagcaggttggggcaggttcttactgaccaagggattggagggacacagtggatggtgtaggagcttccagtcccagactagctgtttgaccttcttccctatttcctaatctttaaaatatgaaggtgaaatttaatggtttcaaagttcgcttccagtagtaccattctgatgactttatgaaatctactttcctctcaccgctgggtacagagaaaggaaacgtgtaaatggtcatgagaagaattaaagttaaatcaaaggaagaactctccaacctttgggattgtgaatgaaaaggcaggaccctgagaaaagttgtagatctaatttccctaatattttaaataattaaatc

SEQ ID NO: 898532 - DNA, 609 bp, Homo sapiens
ggccaaaaaccaaacagatttttcaatgttgactttctcaggctgcatacagaagggcagcatctgccccacctcccagagcttcgccagcaaaggccaaatcaaacagcggcccagagcagagggctggccagctctacagagccagcaaacaccagagggaaatcaccctggatccatatcttctaacctttgcctctgtgagcatgtttgggaaggagacatctatgagattgcaggagccaattcaggctacatgcttatagctgcaattgaaaaattaggctagaatgcagggcctccctgaagatatttctgaaaatcatgtacttcctttaagggatttacaaatctggagtccttccaaaacaggacaagtaagacatgagcagtgactttctactctccatccagcagccaacaatagacttcgtcattcagatggagctgcagaggtacagacctgagagagctggaagtcatagagccaatcccatgtattactgacraggtaactatggctcagggtgacttgacctgtaagccacaagcttgtgggtgaccactccaggccctgaatggaggatttcactccatccccctgcccca

SEQ ID NO: 898533 - DNA, 572 bp, Homo sapiens
ggagtgcagggccctgccaagagaagcctcgaatgccaagctcatagtaagatgctgtggaactggtgaaggaggaagtgactgacccaccttaggacagggtggccaggagcccttctgccagaggagcctgtcccagacctcccatctgcccagggagaagtacccacttcgggcttaagtcagctgctctcagttattcaacagcacccctatagatgccccatctgtggcaggctctttccctcctcaccctccaattaggttaccacctccctcttctaggtctcatctttccccggtttaggattcagcactgtagttcctgggtccagatcaacctgtctccctcgttttgaactttggcaggccaccccgtggggttcttgtgctcagtggcagcacacacccctccatccacctacaccttccttcgtacagagttcgtatcaagtttatccctcttgataaacacgctccctgcctcgagcactactgcgtgctgggccgcgcatcaatcarcccactcagttgtccagaagccccactgacaagagatctccgaatctcag

SEQ ID NO: 898534 - DNA, 594 bp, Homo sapiens
ctgattacaccataatgtggtaaatgcactgatgaagraacatgacaggggattttaaaaagtggcatatattctactgtatgtgcacatgtatttccacacatgcatctgggctggttttacagagaaggcagaattttttctgcatattaaagattgcaaaggaatatgtaaggcagagattggtgaggagaggaaatatgtttcagctcatgcaaagacgctgaggtatggataagcttggcatatttagcaactggtgagaaattgatatgtattaccaacagcattttatgttatccattatcctcaaaagaatgtttttcccaatattatttcaccatatgatcctttgctcaaatataataatacttggaaaccctatttttgaacaaattatctcagataatcccagaaacagatgttttgtgtgattagggtctacaaaaaaccctccacctccccagtcccttcaggtgatctctgaagagattcaaagaaacccttaaacatcaccctggaacagtttgaaattcactttcctgggtcatctggcccaatattatttgtatgcaaatttccctctagtttacc

SEQ ID NO: 898535 - DNA, 601 bp, Homo sapiens
tgggaaaaaagatgtctaaccaggcagagcctagagttgcaggagtggacagcataacagcctccagtggtcattgggwataataagtgtttgacaactcctgattctacttcttagtttccagatagtttgtttactgggaacacaatatcatataaaggttgttaattttgggcatataaaatatgctgggggatggagtattccttctttttttaaattttttatttattattattatactttaagttttagggtacatgtacacaatgtgcaggttagttacatatgtatacatgtgccatgctggtgtgctgcacccaccaactcgtcatctagcattaggtatatctcccagtgctatccctcccccctccccccaacccacaacagtccccagagtgtgatgttccccttcctgtgtccatgtgtctgagctgctgcttcagctgtgctttcatcaggctgtgttccaacactttattagacttgcagattctggatcataaaatatgtaatatggccagtagatcttatgctcaagggcctgatatggtttggctctgtgtccccacccaaatctcatctcaaattgtaatcc

SEQ ID NO: 898536 - DNA, 643 bp, Homo sapiens
tttgaaatacattgtttgcactacactagtaatctttagaattttgagttttatataaacagtaaatgttcaaaaagaaaactcagacaccaacttcatttgaaaaattattctatgtaaggaagttaaatacacaggcactcacatgtgcacagacccacacatgtccaatatgctattgtcatttcataaaaagaattaacataaaaatggtatcgttctataattggaatcactttagctgagtggttcttaatgaggaatgattttgcccctcaaggagcatttggcaatatctggagacatttttgtttgtcacgctgagcagaatgtgctactaatatctaatggatagaggtcaaggatagtgataaacttattacaatgcacaagacagcctcctacagtacataattatccagtgtaaaacggtgatagtattgaggttgagaaccctggtgaactttatgaaaaacaatattgttttttttttcaattatttgaggtgaactaaaaaatatatagaagagcatttggcaaaccctggtttacttttattgtctcytcttcctcgtgtctccttcatgccaaatctagctcttactatttcatcgtctatgaaactgctctcataatagccccc

SEQ ID NO: 898537 - DNA, 604 bp, Homo sapiens
tatcaggaatctgattgtaagaggaaaaattaaaatgaattttatacctgtttaagttaactaagcagtggctcctcattcagatgaagaacattgttacaggaaaaatgtgattttaccattacatctcacgaatactgacaatgaatgacaggttagagaatgaaaagaaaattttaaaaatatatgataacttagcaataacttgatatatttataatggatgtatttataaaatcaaaatagttttgagaatatttaaaattagaatatagtgttatataacactatacaaatgttaacaaaacatattgtattagctagagttggaggccacagattctcattctgtttcacttgaccacagaggatatcaaagagctcagaatctttaaaggaaggcacatggacaggcataagaaaacagcaggagtcagggtgcagtggggggctgctggtaagaaacatagacagacaaggactccagacaggargactcttgaaggaaactactccagagccactaccctaacacacctgctgcttagtttctgaaactgcaacacctccaccactcatcattaacacctctcagaccaaatta

SEQ ID NO: 898538 - DNA, 714 bp, Homo sapiens
agactactgctcactaaaggctcaggtgattgttagtgtgttttagcaataaattatttttgattgaggtgtgtacatttttagacctagtgctattgcgcacttaacagactacagtatagtgcaaacataatttttatgtgcacttggaaagcaaaaaattcatgtgactcattttattgtgatagtcactttattgtagtggtctagaactgaacccacaatatctttgaggtatggttataaatgcctcttcctaaatctatcctgccagaaaggaaaaaaagaaatggatacttgggacatcatgcacctatgcaacaataaacatactcactctttcccccaaatggagacccttcagcatcttatcagtgatttcacacaactccaagtccaaacaggaagatgttcattcttcctataaaatcacaatcccatgtttaaattctgctttcatgaacaagtgtttagtagcataccccaaatgcagtactaaaagaagaagaaaatgaattaggagctaagatatataaatgtattcatcactctgtaaaaatagaaagtctagaggatagtaatcaaatttctatagcagcrtgtgaaagtgtaactcatatttatgacttttctcctttcttgtccattctgcatgctctgccttcaaccagcgccccagctgaccggttaggtgttgacatttaacctaatgag

SEQ ID NO: 898539 - DNA, 696 bp, Homo sapiens
ttctgagttatggcaaatatgccaaggataatgaatcaaaacatggcagtctttcccctgtccttttttcacttaaccattttcattacaaacaatgttatgtgaaaatctgtaccaagggtagagcaataaggaagtcccttaatagtactgcttgcagatgcttgatggccaaggacaacaaatccaaattcacgttaagtatctattccagtgtggaaatatttgcaacctctatctcagacggatttcagagttattatcctgctaccagacacctgactggtcatctcaggtgtaatatatatgtggatttttgtatcactcactggatggcaaattggacacccattagtagaagtggcctgaatagtcttggtgaaggggaagtccatgtttataagcccatcttgaacatctcaccttgtttcatgactcttgaagcatttatgtaactaacataagggagagacacttccagaaaaccaccactgattactaagagcctcctctgctgtgggtatgatcttaggtaaacattccaaaataatctcaaactgcaatttttctgaaaagtatatacctcatccctaaaccctcttgttataattttwcaaacttgtaccttcaaccccctggtcacatggacaagccattggccattcctcatggactgctatacatacaatacatcct

SEQ ID NO: 898540 - DNA, 646 bp, Homo sapiens
ttctccttagtgttaggtgacaaatgttcatcaaccttcactttgaggttccagatcaatggatcaccagaaaattcactgaggtggtatgcctgtgcatttttgtggaactgatctccaaatctataccctgcatgtgtcttgccaaggcatttatgatacccattcattctttttctctaggtgctatcaatatgataatattcatgtagcagactggcaagatatcctttggaattaagcgatagtcaagggccctagaaatgaattaggacactgttaaaaccatgaggcaaggcagaaaaggtatattgctgcccctcttcattcagtcaaatttctgctgatatttttatttattgagagagagaagaaaagcattttcaaatccacagatgcattccaggtgccagtgaatgcactgagtttctccagcagagaaaccacatctggaacagcagttacagtgtaagtcaaatctatttcttttgaagataactcactctcattctacaaggtccttcattttcttcacttccgcagctacagagataagtagagttatattaggaatcaccackcctgcttttctcaagtctttgatggtagcactaatctctctctggaggaagattcccctagggat

SEQ ID NO: 898541 - DNA, 636 bp, Homo sapiens
gaaataaaattgctttttatgtttttttcttttatttttcaactttactgaacttaattagttttaggactttatgtgggagattacttgagattttctatgtagacagttgtgtgcaagctgtatacatttcactttgtttcctttctttattgtactaccagaactaccagcaatgtattgaataagagtggtaagagcagacattttccctttctttctgatattagtgggaaagcattcagttctttatcattaagtattatgtagcctatagatttattgtagatcctttttattgagttgatgaaggtcttatgtcttcctatttttctttttttaacttttaagtttagaggtacatgtgcaggtttgttacataggtaaatttgtgtcctggggatttgttgcaaaggctatttcaccacccaggtattaagcctagtacccattagttatttttcctgatcctctccttcctcctaccatccaccctccagaaggccccagtgtgttgttcccatctgtgtgtccawgttcttaacagaactagagaaaattattttaaaactcaaatggaacaacaacgaaaaaaaagctgaaatagccaaggcagtcctaagcaaaaagaacaaa

SEQ ID NO: 898542 - DNA, 675 bp, Homo sapiens
gacagtttgataaactcaagacctgcaatccaagggcatactgcaggatctgaagcttatagtttgggtttgaaagtgctgttttgctgtgttttgcctctttgtctcaacagagaggacacttatttgtctgcctctaccatttatttggctattgtttaactctttttcttcctatttgttgaaggcaaggactcttaacacattttcaaaatatactactaagacttacccttctgcttgatcttaataaagatgcaaatgaacaatgcctttgaaaaataataaaaacctaaaggcaaaaggaatctggcaaataaatatttcagtatactgtggcagtacctctgatatataaaatttgtcagaaaaaagaaacactaagatttcattgagacttaggaggcaaactattttataaatagctaataaaatgggtttgttcagccttaccagttaattttttttttttttttttttttttttttgagatggagtctcgctctgtcacccaggctggagtgcagtggtgcaatctcggctcactgcaagctccgcctcccaggctcacgccattctcctgcctcagcctcccaagtagctgggactacaggcacccgccaccacrcacagctaatttgttgtattttttgtagagacagggtttcaccctgt

SEQ ID NO: 898543 - DNA, 564 bp, Homo sapiens
gtgtgactaccatcaacaaaactgggtgccaaacactgtatataatcttcacaataccatgaagtccctagtatcatctttgtgtcacagttgaggaaaaacaggctcagagatgttaagtagccagcttgaagtcacactgtcagtgaatgtcagtgtcagcattcaaactgagacttattttataccaaagtatatgctatttttatctcatgatggcctgcaaaagaatattgccctacttctctggaatactattagaggattgaccaaaacaccaagtatgtagagctgttctgaatgaaaggaaaatggtaggagttttcagcagataatgaggacctcagtatcaagagacacactttttgctacgatctattcaccatacctctaacttctctgaccatccagacatgggtaaaagaacagggatcatttgacaatgaacacaaagaaacaactttcaaattggatgatgkatcagtataagagggcaggcatttagaagcagctttttattaaaaccaaaccaaaacgaaaagctaaatactttaggaaacttct

SEQ ID NO: 898544 - DNA, 691 bp, Homo sapiens
gagaggtaacttttgactccaccaattagtaacttctactaataacctactattgagcattaccaataacataaacagtcaattaacacaattttgtatgctatatgtattacacactgtattygtaaaatgaagctagagaaagaaaaaaaaattttttttgagaaagagtctcgctctgtcacccaggctggagtgcaatggcgtgatctcagctcactgaaacctctgcctctggagtttaagcgatttttgtgcctcagcctccctagtagctgggactacaggcagacaccaccacgcccagctaattttttgtatttttagtagagacggggttttgccatgttagccaggctggtcttgaactcctgacctcaggtgatctgcctgcctcggcctcccaaagtgctggccgagaaagaaaaatattttaaagaaaatcataaagagaaaatacatttacagtaccatactgtatttatcaataacatatttacataatctgtttataagatgaatcatctgtctgaaatggcaggcaactgcagccacagacctcagtctatggtacgtgacaagcaattcaactttttcttgtaatgtaataacttttcacggcttcctgggagcacttcgaatatcacaagcagtgctttgtatgggcaccatgctgttattcatcgtttac

SEQ ID NO: 898545 - DNA, 557 bp, Homo sapiens
aaacagaaagaagacagagaaagattatgtttcattctcccactgcgtctacataaaacccaattgtcgcccctttctgatcagcaagatgttaccttggcaactactttgtacagctcttattcgtctcccttttggagctcatgattgtgtaaaagttattttgcctcctaatgagtaagaggagacattagcaacctgactgcttccctggtacttccagacaaaggttgtaaaactggcagcccaggggccaaattaaacactcaggcatgttcaacccatacaaaatttttggttttgtttcttggatttggattttttgtaatgtgagttaacatttacaaaccagaagatgtaaaatgaaaatgcaaatctgcagttctttttaataatgtttagacctgaagtcactgggcccatactcttaacaatcagctgttgcttcatactgttcgctgccctccactyggcccactcccctggattagattacctggggggcatctgggttgtgacccctgttctaggtaggatatatgcccttttataaaaag

SEQ ID NO: 898546 - DNA, 550 bp, Homo sapiens
gtgtgagctaatcccacagtcttcctacagagctatgctcctggacacgggccctaggaccaggaatagggaggtggcaaagtttccaggagacagggaagctggaaccaggtctccaacattagcccacaagccccaaagcacatcagtaggaaaagtgcttatttttaaaatgatgttttaaatggccaccacataaccatccagccagataaactaaaactctctattacttttgcaaacctactgactaaagcctgcttgtggatcgtaggtaattccctggtatacccctatacttttgtgtccctcagctactgtgcttaccaagactgtgctttctaaacctgtcactgcctgggtacgtgtaattttaactccataatttaattaaatattaaggtaactgataaaatatgagtatgtaaagagaagmacttattgtttctattgaaacagcttgtattcttcggaaagactcaatgaagtgagttgctaaaaatattgctaagttagctattaagtactaaatggtaaaagacttagtctt

SEQ ID NO: 898547 - DNA, 600 bp, Homo sapiens
ctattcaataaattgagccgggataattggctagccatacgcacaagattaaaactggttccattccttacaccatagacaaaaataaactcaagatagattaaagacttaaatgtaaagcccaaaactacaaaaaccctggaagaaaacccagaaaataccattctagacgtaggccctggcaaaaaaattatgacaaagatgccaaaagcatttgcaaccaaaacaaaaattgacaaatgggacctaattaaacaaaagagcttctgcacaacaaaagaaaccatcagcagagtaagcagaacccacagaatggaagagaatatttgcaaaccatgcatcagacaaaggtctaatatgcagaatctacaaagaacttaaacaaattaacaagcaaaaaacaacttcattaaaaagtcagcaaaggacatgaacagacacttttcaaaagatgacatatacgtggccaasaagcatatgaaaaaatgttcaacatcactaatcattagagaaatgcatatcaaaaccacaatgagatatcatctcacgacagtcaaaatggctattattaaaaagtcaaaaaagtaacagatgctggtg

SEQ ID NO: 898548 - DNA, 599 bp, Homo sapiens
agcaaagacatgaaatcaacctaaatgcctgtcaatagtcgactgaataaagaaaatgtggttcatatacaccacggaatactacacatccattaaaaagaacaagataatgtcctttgcagcaacgtgartggagctggatggaggccattatcctaagtgaactaacacaggtagaggaaaccaaacactgcacgttctcacttaaaagtgagtgctaaacactgagtacacatggacacaaagaacggagcaatagacactgggactgcttgagggtagaagttgggagaaggataggaatcgaaaactacctgttagatactacgtttattacctgggtgatgaaataatatgtacactaaacccccacaacatgcagtttttcgatataactaacctgcacatgtacccctgaaactaaaagttaaaaaaaaaaaaaaaaactaactttctgagagaagtgctaaatatggatggctattgagctgtcatttaaatatagttcttggctgaatttatatgccttggattgtgttcttgcctctgctacatggtaactctgaaagttccctgaatttttctagtgtcagcacctc

SEQ ID NO: 898549 - DNA, 644 bp, Homo sapiens
tgggaatgtctattcaggccatagtgctccctactctttaagaattactagaaccactcataccatgggcctttggagacattaatgaggtcataagaatgagctcctgatcrgataggattcatgtccttttaggagaagacaccagaaagcctgaccaagctctctttctgtctcccactctctgttttctctcccccttgctcagagaaaaggacatgtaaggacatagcaagaaggcagtcatctgcaatccagaaagggagactccccagaaaccaaaccctgctggaaccttgatcttggacttgccagcctccagaactctgagaataaatttctgttgattaaggcccacagtctgtagtgttttgttatggcagccagagcatattaatacatagtacatattcatattcctccaaattatgaaaaaaaattcttttattgctatttgcttttttcaatgtgcgatctcattgaaaatcatgtattgcatttgattgtcatgtctctttagtctttttcaatatagtaccccccacacacttttttttttaatcattcaagctacaccttcattttaactatcactaaggaaaaaaacagtaccaccatttataacaataagatgtcatggatta

SEQ ID NO: 898550 - DNA, 651 bp, Homo sapiens
ctactgcatcccaaaatcattcctagtacataggggacactggatgaataytcatggaataaatggccaagtaaactggtgcagctggtgagcatcctcctagggtactgtacagagaatttctgcattggcaaggaggctgaatttgatttctgaggcccctcccagcactaagattccatggtcctcctctgcatgttgaaattcattaaatatttattgaacacctgctatataccagaggatgtcctaagcacccagaaaacaaaggtaaataaaaacaaacccttttactcaaggaactcatgatatagttaaaatgacagtccatagtttaggaataccctcctcaaagggatcaaagaatctgaagacccctcggttatccatttagtttcttccagagaccttttaagtactaatatacatatttactaataagtacttccctagatgatatatgatatggtttggctgtgccccacccaaatctcatctttaattcccatgtattgttgggagggacccagtgggaagtaattgagtcatgggggcaggtctttcccatgctgttctcgtgatagtgaataagtctcacaagatcagatggttttataacggggagtttccctgcacaagccctcttctctt

SEQ ID NO: 898551 - DNA, 596 bp, Homo sapiens
ctgtctcatccatttccaagtacagtttatcttgaagcattaggttacaacgaaagatccacttgcttgtcaatcagttatttaagaaacatttatyaagtggttatggggtactggctctgggttagaccctagagatataatgaagaaaacccttttttttctgaagtgtgcaatccagtagagcagaaacaccgacttaaaaaacaataataaaataccatgtaataaataaaataatagaagtgtgtctagaatgtagagatagcatgtgggaggtagtgactaacttcatttttgtaagaggatgaaaagacatttttttaattgtcctaagatgcaatatccagtgtggaaggttaaatgggagtttgacagtgttataagtattctctttctaaagaaaaggtatccttgttgatagtaataaacgtgttgcaacaaatttttgtggctttcctgaagacagactgaaagatctgtgtgtgagttagaagataatggccctttctgcctccatctgcgacttcaagtgtagtgttgtgagggcctaaccagtaaatcacagaaaagtacttctttttgtaaagatatga

SEQ ID NO: 898552 - DNA, 619 bp, Homo sapiens
gatgagctgtggtggacacggaaatttgacacccagatcccctcaaagggagtactcatctcagtgcttagctccctccaaatctgccttagctacagagagatgctcctttcctggcacagcccacacccagtgactgatgggggtggatgtaaaggtccaaccatattagctcactcggaacaactctggcaggcacatgcagtccagagctcccaaaggggctggtcgagttattattgggcctgtattgaagtttatttaacttctctgtctgcccagtcctgcttcttcccctctgtccttccaaagttgttgattcctagtaaatatcctgcagaccaatctccatcttggcatctgctttcagacaagccaacatgtgacatgaatgcatcctggctaccactagcaactgagctggccaagtgggtctcaactgctcagcaggatcctccatcttccccagcctggacccacatctctgctggtcaccatggaaaccagcccctcagccctcagtgccctgtgagtactcagcagtcccctgtgacactggaaggacctcccttcctctgcagtacgttccatcagcrgataccaaaggaggactcattgg

SEQ ID NO: 898553 - DNA, 601 bp, Homo sapiens
aaattaatgagcatcttcattttcttttccattgaggtacattccttcaggctgagttggggaaaaatataaatagaaacaaactaagaatccaagattccctccatatagaactgttaaatatacatttayacaagaaggaaagaaaacaaattagctgtggttatatcttgggcagtggggttcaattgtttgacaagtatttattgagtgctttctaggtgccaagtacaatttaagttattgaagatatggcagtgaaacacaacagagcaacatgtctaactttatggaattcagcggggagagacaagcagcaaaatacatagttagtgtatcagattgttccatgtaccacggttgaggcagaagaatagggtctggaggcagggaacctaaggctgattcacactgacttcctagaactaaattgaaaggaaaacaccaacttttcacacctaagtaacaaaaggaccagaggctactccctgtgcaactccctccctccccttttactgcatggcagatggaaaattgaaagtccctctgattggttgctttccacaaccagtcagacaaattgtgtgccaagtcttcattt

SEQ ID NO: 898554 - DNA, 572 bp, Homo sapiens
taaggccaagtctacaacgtgatcaacactgccctctgggcttctccttctcctcaccccatgggtggagatttgctagccttaagggtattaaagaacagatgttcaccttcctccttccagcctgtttccccttcaaatttctgtagaacaagctggagttgttctgtcctattaccccaacagagacgttataaatttcaaccaagttccaggacgcagatgtttttctcagtagtccggtggcattctctgtcatccatactcgaggttcccttttacattcttctttggctactgtaattcacacaggcccaagggcctcactgtctctactttatatggagcagatactttctggacatctgaattaaccttgtaaacaccttacatggctgaacagagccactcaaggggctggatactatatagagattrttgtaaaagccattttatttccaaaaatttagaatttcttagacatacttgccaaaataggaatcttgggtgataaatagtcatttagatattcaaactttgcatgattcatatcctaggagaataactttgct

SEQ ID NO: 898555 - DNA, 633 bp, Homo sapiens
aacccaatggatattgcaacctctgcaccaggatgcactgggcatctggatgaagagtgggtcagaggctcaccccttcctagatgcccatggaaggtgcccgggtgctgttagtgctgggcagggttgactgctgccactccctacccaagacaccacgaggcacatgcacacaaccttgcccttccctgtgcccatgtcaggcccctgtggggacaaggggctgcagtgatctctgggccagggttgggaggaggattccaagaagggcgaaagtcagcagggcttggggagcaggccatcaaaatctctctgagggtgatggggaggtggcagaagctgagactgctctagtgctccaaacctccaatcccccaacacatgctctgctgtcccataagactttacctaaacaacacacgttcaaagataaaatccttaaaaatttcaagatggccactacagaacactaaaggtcaatcatttggctcttctgagcatggggcctaagggaactgcagargttactggtccaccaagccagcctagacccaaggggcggtttacagaaagggtgtcccctacaatgattctgaaatctatgtgaaggtattttgggttgttacaataatt

SEQ ID NO: 898556 - DNA, 559 bp, Homo sapiens
gtgaaaatgatttgttgtatgagattcttaaaagttaatttctttattgagaagcttctagaaagaggaagtaaagattcctagatstttgctggtaaagaagcataagtgaacagcagacacaactttttttctacctttatccagggaaattatacaagtggctttcttgatggaaagaagagaaccagactaaaaagggctatgcttttggtgatgaagatgataatttttcatgctatgtttttactggtaaataattcacataccaaaatattcagttatctttcactcctatcctttctttcaaagccattagcaattctgttggtaccaccataaaaaaatttattagactgctttatctcctgaaagtcccatccatcaacatttccatttgacttaatgaccggaagattggaaaatgctgctctagtctgagtagtttatagaacttcctctttttaaactttatcacatggcctgttgtcatgtttttattatgtccctaattaccattaggtcttctggtcatttctcatcttcaaatgtctgccat

SEQ ID NO: 898557 - DNA, 559 bp, Homo sapiens
gtgaaaatgatttgttgtatgagattcttaaaagttaatttctttattgagaagcttctagaaagaggaagtaaagattcctagatgtttgctggtaaagaagcataagtgaacagcagacacaactttttytctacctttatccagggaaattatacaagtggctttcttgatggaaagaagagaaccagactaaaaagggctatgcttttggtgatgaagatgataatttttcatgctatgtttttactggtaaataattcacataccaaaatattcagttatctttcactcctatcctttctttcaaagccattagcaattctgttggtaccaccataaaaaaatttattagactgctttatctcctgaaagtcccatccatcaacatttccatttgacttaatgaccggaagattggaaaatgctgctctagtctgagtagtttatagaacttcctctttttaaactttatcacatggcctgttgtcatgtttttattatgtccctaattaccattaggtcttctggtcatttctcatcttcaaatgtctgccat

SEQ ID NO: 898558 - DNA, 630 bp, Homo sapiens
atacttcacgttaatggattgtttgaaggaaaatactactcctaaaatataggctcttttaagaaagtaagaacccaggaatttgcaaagactaagcaggaggatttgggtttttgtaaggcttggaataggttgatcagggtggaaaggtgatctgtgtatataagtgtctacatatgtacacgtgcacatatgtatatgattgcttttttgggcaaaatactgaatttaaaaatcagtacttggctgaaggagatgataagtttagtgtagcttcaaaaggtaaatttctgatataagaataaatctgaattttaagatctattattcttgattttattagtttagtagtcatatttttaaagctgggcatcctggtacaggaataataattgctaagcatcatcagcagctggattgccccgaactcagtgcattgcatctttagagtatcagaaaggacagattttcattgagattagtggggacaagataattggggtaccactattttctctagcagctccttctctttttttgcattatttatattatttatgttatctatatgcttygactaactgatggaacgcaccatgtcgggggctcaaggaaaagtcacagctgata

SEQ ID NO: 898559 - DNA, 630 bp, Homo sapiens
atacttcacgttaatggattgtttgaaggaaaatactactcctaaaatataggctcttttaagaaagtaagaacccaggaatttgcaaagactaagcaggaggatttgggtttttgtaaggcttggaataggttgatcagggtggaaaggtgatctgtgtatataagtgtctacatatgtacacgtgcacatatgtatatgattgcttttttgggcaaaatactgaatttaaaaatcagtacttggctgaaggagatgataagtttagtgtagcttcaaaaggtaaatttctgatataagaataaatctgaattttaagatctattattcttgattttattagtttagtagtcatatttttaaagctgggcatcctggtacaggaataataattgctaagcatcatcagcagctggattgccccgaactcagtgcattgcatctttagagtatcagaaaggacagattttcattgagattagtggggacaagataattggggtaccactattttctctagcagctccttctctttttttgcattatttatattatttatgttatctatatgctttractaactgatggaacgcaccatgtcgggggctcaaggaaaagtcacagctgata

SEQ ID NO: 898560 - DNA, 770 bp, Homo sapiens
cctggccttctaggcaccagctttaacagaggctgataaatttgacatctagtcttaaggtcagaaagcgtttgatcaggtagcagctaagtcatgttaggttagtttcacatgctgaaagaaaacataattggcctagacaagggattggcaaaattgctctgcaaagggctaggtagcaaatattttcacctttgctggccataaggcctctgttgcaactactcagctctgtcactgtagcacaaaagcagctactgataacatgtaaaccagtgaacatgactgtgggccaataaaactttattcacggctgcagaaatgtgaatttcatgtaattttgttgtcacagaatattatctttttaaatattgtttttaaccattaaaaatttaaaaatcattctttgctcacagactatgcaaaaataggtaggctgctggatttggtccatggaccgtagtttgctgacagttggcctagctaacaaagggttagggtctattatttaacaaatgattcttctagaattcatctagagatgaattgccacttttcagtctccctaattttgtgtttctggaacctaagtactttctgtttttgctttgtttttcgtaggccagcagtcttgaccgaacacagagcaagttctgtgtgtgatcttttcactctaataccccatttcctgatctaccaagcaytctagtggatgagacaaagatggttctttactgcatcgtataaaccagcagccagatatgtttgcc

SEQ ID NO: 898561 - DNA, 589 bp, Homo sapiens
ggttcctctgtaactgtgtgatgaatgaacaggtagggctgccactggcttttgtccgttcctcttaccagcttcataacctccccaagcctcattttcctgcccactaacctagggagagaaatcttctcagacttcacagagccttcatgaggagtccaggagttaaagcatacagaggctctagctcaatgcctaacctggggtaggctctcaattggtgtttgttgctgggggtggttttccttctcatacaacttctgcagacagagggccattctcaatagagacaccttttagcaccaaattggcctactagcagtccagcagaagcaaggtatgaattctatgaaaagcacctgtttttcttagccacactgaaggcattgccgaacggagaacaagctgggctgctttagggtttttggagatcacttctccacctgagtgagttgggcaggcatggaaggcaatcccctaacgatcattatgtcagggctcccgttgatgaaagcttgagtgaaggayaggatgtagttctgtgggggaagggacccgctaatgcctgcacagcagaattaaatggact

SEQ ID NO: 898562 - DNA, 589 bp, Homo sapiens
ggttcctctgtaactgtgtgatgaatgaacaggtagggctgccactggcttttgtccgttcctcttaccagcttcataacctccccaagcctcattttcctgcccactaacctagggagagaaatcttctcagacttcacagagccttcatgaggagtccaggagttaaagcatacagaggctctagctcaatgcctaacctggggtaggctctcaattggtgtttgttgctgggggtggttttccttctcatacaacttctgcagacagagggccattctcaatagagacaccttttagcaccaaattggcctactagcagtccagcagaagcaaggtatgaattctatgaaaagcacctgtttttcttagccacactgaaggcattgccgaacggagaacaagctgggctgctttagggtttttggagatcacttctccacctgagtgagttgggcaggcatggaaggcaatcccctaacgatcattatgtcagggctcccgttgatgaaagcttgagtgaaggacasgatgtagttctgtgggggaagggacccgctaatgcctgcacagcagaattaaatggact

SEQ ID NO: 898563 - DNA, 627 bp, Homo sapiens
ccaagctcttggagctctggataacagataatctctaccaggagttccatgtacttctgaatctttactgtgaattttgtgtatrcaaacatttctctggagagagggtctatggcaggaatcagaaatgcatgggcccacagatcatgcaaatgaatgacatagtcaggtggagggcaactgggactggtgggaagtggggccaactggacaccatatattccactgtaaggaaaagttggttttcagcatcaactaattgttaccagaagtagtgccgatccaggactgtcagatctttgaaattttctaaagaagccagttttcttcattttaggtaaaatattttaattttaaatgttggcaactctttcaaaggttttaaagatgtagggcagacaaagcacagcattactttggattgagtgcaaatcatggaccacacatttacaaacacagatttataactcataagattctcagaaagaatctttggaaaacagggaaatagcaacttagggaatgacagttacagctccaggacacatttttttttcctcctcctcctttccccattgaattagatgatgatttttatacatcacctacacctggagttatatttag

SEQ ID NO: 898564 - DNA, 615 bp, Homo sapiens
tagttggctacactttggaatgagttcctcaaagaagctttccatctgctttgaaggtttgtaacagaacaatctcagctatcaattatcagggataccaccttctctgatcagccctcatgtttttcttcacttttcttttgccacttagtatttctaccttgtattccagtgtttgggggttattaatgcctctggacagaatccctgtgtgatccagctttgatgcagccagaggatacaggacaatctctggctagaataggagctcaacagatgtttgcttaaaggtaaggggatgcttttattgacctgtcttagtttctcttggctagtgacgatattatctctattttaagtgtcaaagggaaatgaaacttaagcctatggccccaggagtatatgttttctgtgatatcaactactatatccttgcggtatcacagctggaaaactctgcagtgcacagacaggagtgtcctgaacactacagcagggagcctgtgtgtggcaccaaggggccactggtctctgtctttctctactttttggkgaggatctcagttggcccttatctgttttttttccaaacctgtctattttctgttaacttag

SEQ ID NO: 898565 - DNA, 693 bp, Homo sapiens
tagtcactgtcatttctgataggactttggggtccttcctgcaaagcctgaccaatttcctcccttgccctacagccttctttctttcttatgatgttttatgcatttgttttccctgcatgctcttgcctcttgtatccttccttctggtctgttgctgcatccctgctcttgaggcaatggggcatattgcaaggaatgtgggctttgaaatctgacagactctagatggaaacctgaaagtgtcacgtattatctatgtgacctttattagtgctatattagttgtgtgctcttctcaccgcccccccttctctgcccaatatgcagaaatgtttatttccaccaggagagcctattttattagtgggaagattgacttccccacagaccacttttctcctcaaacccctcgaaggctttcaccccaggaaacaaaacagcccctttctgtagttccttcttactgatacactttaaagtctctctgctgaatcttccaggagggatcaaaagaactctgggctcctagagcttcagaacatttcaagtctgctcaggagcctttaacgggttacttcctacaacacaggrattacatagacagggcaggatgggcttgttaagcaggacagagggaaatgtccagaatattagtacaaagagcctttgcttggacatgaggtgaccggg

SEQ ID NO: 898566 - DNA, 622 bp, Homo sapiens
ttctgcttttgtttcctccctacttctctccctaactcacagctctagggatcctgactcagcatcttccagtgcacttatggctgttcgaagcctgtgtttggtgattagcactccctagagtttcctaacttctgttagtccctttgttatctggagaactatttgagacggtttagagaatggaaaacagatatgtctgcattgccaagagcactcttggcatcctcatttttggatgggactgtctccatctttgttctcttttggggaggagctgattgggatgggggaaatgtctccttctagtctgaaagggcaagtgtctctcgattgtttctgaggataagcacattcatcaggagctgggggtttgaatgaatcttctgaggataagcatgttcatgaggaactaggggtttgaacaaatcctcctgagtcatgtttctctcagttatgtgagcacaaagaaagagattcacctttctttgtctcccttttgtcagcagaattctatttttaggccactgtcatataattcagctttccttgcacrcaagtcctggcattccttttaggaatttctagagccaagaatggtgtctaagttgagggcagagtg

SEQ ID NO: 898567 - DNA, 594 bp, Homo sapiens
gataaaaagggcatggtgttcttgatgaggcagacaaaacctcacggcatggctcatcccctcttttaattatccagttcatttagtcagctgtgacccaggactttgggaggtcacctgcagtatgaaaggaaggcatagtggctgctgacccacggcttggctcggggataggaaatggccacccaggccaacgtgtccttttacaaatggaagctggataaaagggctgagtgtgatgtgtgggtctgggaagtcctcgtgatgccctgagcttccttgaacctcatcataaaaaagtaattgtatctgagaaattggccagctagccagcttctctgatggctcattcactggaacagagagagctgaggctctgcaactgaaagttacaggtaatggctactagcatgccgcccttgggaactcataattaacatcagtgatggtgtcagacccctgggtgcaccccacctttttccacacttgctgaccatttratacacatggggtaacctttggggcatcctgccattatgtctgcacagcctctgggacatcatctttaggcagggggaaaaggtcaggaaaact

SEQ ID NO: 898568 - DNA, 456 bp, Homo sapiens
ggcaacaatgactagggctgtgaaacagcaaagatggtggcccacccctcctcctgggaaccatgtctcaaggaggtgtwatgctgctacctttggctggttggagttccacgccagtgggtcttaccctgcaaggtgcggtggaagcgggacctacaggccgtcactgctcagccccctggagtcagcccctttcctaggtgtatgtacaggaatctaacctcccactttgctggagtttcagctggtttttccaggaagcctgagaatctaagtctcccaggactacctgggcagcggctctgctgagactccatgtaggtctgcatgtcagactgaaggccctggtggaatgggttcacgagatgatctcctgaccttagggctgcaaagatccacgggagaagcatgggttcccagggtcactcactcacttgccacttccctgagcagggg

SEQ ID NO: 898569 - DNA, 435 bp, Homo sapiens
gcaatagattcaggagagaagtagaatgatgaagatttagtcagtaagctactctcttagagagtaggcaaattggaggcaggaggtttaatgagtctctcctataaggcctgaattagaaatgtgcaaatgttcaagcaaatgctggacacggggataaaatctattgccatagtcccctggaatggcaagaattaggctacaacataacctttacaagtggggtagactttgatccagcaattttacttctaaaaacccattctaagcaaataatcctggacatgtgcaacgattttgctccaaagatgttcatcayagcatcacctataatagcaaaactctgcagtcgatttacccttttcatctcacattttactgtaagcaaatctccatgtctataggtatatttgtggactctcatcttaaataact

SEQ ID NO: 898570 - DNA, 597 bp, Homo sapiens
tttgctttctgtttctccttgttgcttatcaccatgtgacatgttggcctgtttatgtttattgtctgtaaactcattggtgtcacagatggactctataatacttgctaaatgawttgaataatggttagatttatctttttctgccctatcagcagttacttttcttggtctttttaatccaccttcattggtactgttttcaagcctttttgtattttcaataattaaattttcagcaatgtctcttcccttctttagttttttaattttattttttagttctgtactgaaagcatgttattctaccatttttcttccatagggcggcaatgtccctctgcatcgtgttctattgctttagtagctcatctttgagcatttgtttttattgaattcacactctcacccagttgctcaataactagaaacacatggggaattgcctttggttccttgggttatgttttcttctagactgaattctctatgttttggatgaaattttctttttctttactttttcttgtggtttatttctatagttgtcacactctttttttaaattcttttctttttttcatcttgctcttactg

SEQ ID NO: 898571 - DNA, 646 bp, Homo sapiens
gaacatcactgtgttcatggctgttrtaagcatttctgtctaatcacctgtatagtatctctttccagagtaaaggattagtcttgctcaactaatccttttatcatctttaaaaaatcctggagtaaagaacctatcaagatattgctgtattaagatatcaagcctgggagggcactatttgatttttgctaggtcaaaactctagcacccagaaggtacaaaccacgaaagcaccttttaaatacacacacacacacacacacacacacacacacacacacacacacacggatttctgctgggcatgctggctgcatgtcacaaaatgtctcctgaacagcaggaattttaattaaatcaggggagatctaatttggcctaaattggcttgctacaaaaggtgctaaggagaacaaaaattgttctgcaatatggatgtttgtgaaagggttgggctgtatccattgacaatggtaatgcaaagtgatgtggaaaatatgaagcccactgaagatgctagaaagcctgagaatgctaatctgtgataagctgattacagaagaaaatatattacatgcatgaactcctggaactaaattcatctgaaggtacaaccaacattgaaggctgatctctggtagcc

SEQ ID NO: 898572 - DNA, 611 bp, Homo sapiens
aaaaaaaaagaatagtcttatttcttttttcctagcctacatgaattttatgtctttttgcttgctttattgctctggctaagattttgaatctgatgttgaataaaagggtttagtgtgaacaattatgcctgttccccattttagagagaaagcattcagtctttcaccactaataataatgttacctgtaggtttcctgtagatgtttatgattaggttgaagaagttctatctgtattagtctgttctcacactgttaataaagacatacctgggactgggtaacttacaaaggaaagagatttaatggactcacagttacaaatgcttggggaggcttcacaatcatggcaaaaggcaaaggaggagcaaagtcacatcttatatggcagcaggcaaaagagagcatgtgcaggggaactcccctttataaaaaccattagctcttgtgagacttatttactatcatgagaatagcatgggacaaacctgcyccccatgattcagttacttcccaccaggcccctccctcaacatgtgggaattatgggagctacaattcaaggtgagatttgggtggtaacacagcaaaaccatatcaatcttca

SEQ ID NO: 898573 - DNA, 592 bp, Homo sapiens
aatattccaaaatgctacacattactatataattatgtagtggcacattccaatatgactatataataaattatacaacataataggaatagacatcataaattatatatcataatttgtatgctccaacaggatttacaaagcatttgtccataaattgtcttacgtttacattgtggatcttctcaacaactcttcagtgggtatcatcacccacctctttttttgtcaatgtgaaaggagagtctcagagagcaggtgcggctgctcagtggtggccagaagaccaggtctactgaccctgactccagaggccatgtgaccataatgtcattcattggtctgtagcctcagcaccaagaccttggttaacctcttacattctttttatgtcttcctaatacaagtaaacaagaataattgtcagtgtacaaatacaaattttgagcatcacagataaagtaaagcaaacttcccttgaccatcactttttatttcaagttctttccccaaatatatcactgaccttagtttggtaactatgcttccagaattgyatgtatgtatgtatgtatgtatgtatgtatgtatg

SEQ ID NO: 898574 - DNA, 530 bp, Homo sapiens
tcccatgttcaaatgattttcctgccttagcctcccgagtagctgggattacaggcatgtgccaccaggcccagctaatttttgtatttttagtaaagacagggtttcaccatgttggccaggctgrtctggaactcctgacctcaggtgatccacacaccttagcctcccaaagtgctaggattacaggagtgacccactgcatccggccttttcacagtgaatttggaggagctagccactgacaggaaggaggaaggcgctccatacagcaaatgaaattcagaactctggccagcccatcgagaagagggtaacaggtaacccccatatctcccatttgggaggcaccactcactagaattcagcaggctggaggcctggaaatgactcagcaatgagtccattttcttatccctggtaggcctgctgggacaagttgagagaagacgaatgaagtgaggacgctgcacaccataatctgaaatagtcctagcggtggaaaagaagcagcctgcagacgaggcggg

SEQ ID NO: 898575 - DNA, 627 bp, Homo sapiens
aatcccagaaaagtggtgtttatggctgttattataaaccaaccagatgcaagttgatgcaaacttttgaaatcctaaagaaacagaacagttcgttaaatgctatgttaagagcttttgcaagatccacttccatccattatttattcctctttggtttaatcacactttgattagcaaaaccagaagcatgatgtagttgtctttatgaaaatcaacgactagaattcctgagaattaaattaaccaagggaatggagataccacaaattcgctatttccttttttaaataatgtatttatttagcaaaacagctagcttaccaggctaggtaaagctatcatcaaatctctaattcatgtgtactggatcctcacaacctccttcaagatataagaagttcaataacccaataccactggggaaagtcaaggtactcacatacaatgtgtcgtattctgattttagaactaaatagtgagattatgtacttgactatatccttaagataaaatctagaaccaaaacaaacaggtatgctatgaaaaatattaagaattctaatggtcattaccataggaaagtgttastaaaattgtgctagtagtcataatgaaaataataat

SEQ ID NO: 898576 - DNA, 613 bp, Homo sapiens
attaatctcacggaaataattcctctgagtttagaacaaagagagcatgagagaaggtttgttgataatgcccttaaatgggctgcattgrtattaccagctgaactctgaagataaagtagctgtgagaaatggggctgggtgtggttttgaatgtacatgtttatgctttgattaagaggtggaaatggtattacatcagatgaagaattagaaaatctgaagacacggattctggtgccctgctctgcaacctatacacttcatgactcaaatcctgtttcttacatttttgtcttctgtagaatgggtatagtgactctagcatgtcagcatgtaaaaagtggtcttgtcgaaacagggcaacctagataagcagagttatgagagcattctaagcagaatgagcaaagacacagaggggaacagtctctatgtatctgatgcaagaggctcagtgtaatggcatctgatagagcagtgggatctaagatgagaccagatcatggaagagtggggacattgtgccaggaattgtgcacaatgagccaagaagccgtggcttggttgcttttccttatagttcttggttggcttgtatgtttatttttta

SEQ ID NO: 898577 - DNA, 667 bp, Homo sapiens
ttcttacatggcagcaggtgagagagagtgagtgtgtgaaggaggagcaatcagacatttataaaaacatcatatctcatgagaactcacttagtattacaagaacagcatgggggacactgccttcatcatctcatcacctcccacctgtctctcaacaagtggggaagatgagatttggttggaaacacaaagcctaacaatatcaaccagtgacttctgtgtctttccccatcttccatttgccaaataaaaaaatttattgagactatttcaatcatatttgactgttctttattgaatgtggcccaagaggtcaaaaaatgattttcttatagatcactggacatcaaggacccacttgtgaacatggtggaatgcacagcacatgactcacagatcctgcacttcgggtcggatacagtaactccatgggactttggtctttcttgcttggggttcaggttagtgtgacttctgtgagaagaaggatgcacaacacagattgggccacagctgtggacttgggcaacagcagttgtctgtkaaattctattcttcttttcttcctttaacagaactatcccttgagttgtagttgggcaagtggctggattttccagcctaacttatatcaatttcctttattcctataaatgtcaagttt

SEQ ID NO: 898578 - DNA, 667 bp, Homo sapiens
ttcttacatggcagcaggtgagagagagtgagtgtgtgaaggaggagcaatcagacatttataaaaacatcatatctcatgagaactcacttagtattacaagaacagcatgggggacactgccttcatcatctcatcacctcccacctgtctctcaacaagtggggaagatgagatttggttggaaacacaaagcctaacaatatcaaccagtgacttctgtgtctttccccatcttccatttgccaaataaaaaaatttattgagactatttcaatcatatttgactgttctttattgaatgtggcccaagaggtcaaaaaatgattttcttatagatcactggacatcaaggacccacttgtgaacatggtggaatgcacagcacatgactcacagatcctgcacttcgggtcggatacagtaactccatgggactttggtctttcttgcttggggttcaggttagtgtgacttctgtgagaagaaggatgcacaacacagattgggccacagctgtggacttgggcaacagcagttgtctgttaaattctattcttcttttcttcctttaacagaactatcccttgagttgtagttgggcwagtggctggattttccagcctaacttatatcaatttcctttattcctataaatgtcaagttt

SEQ ID NO: 898579 - DNA, 591 bp, Homo sapiens
gcacaatgctgaaagagctaaccagtgttatatattcagtcttagttgaaattatgcatttattttttaaacactggtgtgcattgttttaaaaatgtataaaatawcagttaagaatttaagaatcataagaatgaggctaaataggaaaaaaaatttgcaatgccataacttttatgatgaaacaaatatatttttatcatattttatgcataatatgtactaatactttttgaattcaatgaaatgtggaagagttttgtgattctgatcttactaaagcaattgtttcataaacaaaacaattcaggattgcaaagatggtaaactattaaaaaggtctgtcatttaaagtttcattttattaaatatcacattatatttatttctttcaagaaattctagatagggtatgagggacatttctaatactgattgggtattaaataattcaacacccaagagttgtgatcaaacagatctgtaggcatatgtaagtaccactgaggtgaaagtgccaaccaaagcaattagattgaaaattaatgtctggaggtaatcagtggaagaagtggctgtggaccttcccat

SEQ ID NO: 898580 - DNA, 648 bp, Homo sapiens
gtgggcagcaggttaaagcagggatcaaaatggcttacgcctcaggagtcattggtgatggctaatagatcatagcatcccctgtactgaaaggaactgctgcctattagctacttggttttcataatttaaaacatcataggtctcattattagagttttggcacaacaaagaattatggcctcttactaatctccagattcagagccctggaatgaaaagtatgctagattcctttgaggaagtgccttgggtctttgccaaaataataaattctaaataaccctagagattctgcaaaggaacctgcggtcattgaccagggtgactgtgcattttataaaatgaggtgatttcctcactttttgaatgtacacagtgggcaaaaatacactctgctgatgccagaatacccatattagttcttaaacccataagatattaggaagggatgcttcttagccctttgaactgcctttttccttcaaatagtgaactgaattgggaatgacacaaattagtgccaccaaaaaaagactagaggtgtgcagatgtaagattcttctcatrtccacatttaactaattatttaaccaggctgagaatagatggccttaaagaaagatggtggattattacaaacataat

SEQ ID NO: 898581 - DNA, 585 bp, Homo sapiens
tggtctccagctccacccatgttcctgcaaaaacacttgatctcatcatttactayagctgcatagtatttcatggtgtagatatacaccacatttgctttatccagtctgccactgatggacatttaggttgattccatgcctctgctattgtgaatagtgctgcaatgaaaatacacatgcacgtatctttataatagaacaatttatattcctttgggtatatacccagtgaagggatttctgggtcaaatagtagttctttttttaggtctttgaggaatcaccacactgctttccacaatggttgatctagtttacactcccaccaacagtgtataagtgttctcttttctccaaaatctcaccatcatctcttattttttgactttttagtaatagccattctgactggtatgagatggtatctcattgtggttttaatatgcatttctcttatgatcagtaatattgagccttttaaaatatgcttatcagctgcatgtatgtcttcttttgagaactgtctgttaaggccccttgcccactttttaatagggttgttcatgttttacttgtaagttt

SEQ ID NO: 898582 - DNA, 614 bp, Homo sapiens
atgcatagtagagagtctgcgccaggtatgaggcagctagatgcatctttgggaccaagcttgagccaaggggaggtgagtggaagtgtcctttccaggtgattgtcacatgaaaggaaagccatttttctggaattcctctttccttaccccataagctcaaacacaggtgctagatgtgcctgtgacttggctttgaccatacagccgaggactgtggagcagtaaggtggagggaactgaggttctgggatgaccacgtgaagcaaagctgctcacccactcaggactgttacatcagagagaaaatataagctttttaaagccaaagcttcttgggagtctttttattaccgtggcttaacctttcctctaactaattcaaaagccaattccaaaacaaaccaaccaatcagcagaaaatcagaatgttgaaagtgacatattccaactgatgacaaaagcctgcaggatcagaaacttttggtgagtatgaaatggcaggaacccaagggaaaagggrcatccagtagctggaagcacccacagaaggccatgattttaggtgggaatggtggagacagatttatactggcaaaagtgagtaggaagac

SEQ ID NO: 898583 - DNA, 572 bp, Homo sapiens
catggtcatttcattaccaactttgcaaaataggtatcattgrtcccattttatagacgaataagttgagtctgatggataacttgctatgtgagggacccaagcctgctaattctacacttttgcacactctcactttattgcctacagaagagctcagaaggagagggagggagagggggacgggaagtagaactgtccctggggtagaaataaattggagtgctggacatgtgcattaggagcctactaggctgtattgcagatgactcagtatgcaatgggcaggaaggaggggtgaagagaggagtaggcagttttctccaaagctgctttacaacaacatccctgagtgtgaacataagtgagtctacatgtctatctctgcctcttctacacatacctttgcaggttgctgtgtggagttttttggtgccttcttttctaatttaacttgatttccttgaggatggcagagctggacatgttcaggaaacctcagaaaaagagctgtatgtcactaagtcaggaagagggcccagaggtcagggtttctcatctggggccatcaa

SEQ ID NO: 898584 - DNA, 616 bp, Homo sapiens
gttctttgtagattctggatattagccctttgtcagatggatagattgcaaaaattttctcccattctgtaggttgcctgttcactctgatggtagtttctttctctgtgcagaagctctttcatttaattagatcccattggtctattttggcttttgttgccattgcttttggtgttttagtcatgaattccttgcccatgcctatgtgctgaatggtattgcctgggttttcttctagggtttttatggttttaggtctaacatttaagtctttaatctatcttgaattaagttttgtgtaaggtgtaaggaagggatccagtttcagctttctacatatgactagccggttttcccagcaccatttattaaatagggaatccttttccaatttattgtttttgtcaggtttgtcaaagaccagatggttgtagaagtgtggtgttatttctgagggctctgttctgttccattggtctttatctctattttggtaccagtaccatgctgtttttgttactgtagccttgtagtatagtttgaagtcacgtagagkgatgcttccagctttgttcttttggcttaggattggctttgcaatatgggctctttt

SEQ ID NO: 898585 - DNA, 597 bp, Homo sapiens
ttttatcagagactaggattgcaaaccctgctttttttttttttgctttctatttgcttggtagatcttcctccatctctttattttgagcctatgtgtgtctctgcacgtgagatgggtctcctgaatacagcacagtgatgggtcttgactctttatccaatttgccagtctgtgtcttctaattggggcatttagcccacttacatgtaaggttaatattgttatgcgtgaatttgatcctgtcattatgatgttagctggttattttgccagttggttgatgccgtttcttcctagcatcgatggtctttacaatttggcatgtttttgcagtggctggtaccagttgttcctttccatgtttagtgcttccttcaagagctcttgtaagtcatgcctgatggtaacaaaatctctcagcatttgcttgccaagaaggattttatttctccttcacttatgaagcttagttggtgggttgaaaattcttttttttaagaatgttgaatattgtcccccactctcttctggcttrtagtgtttctgccaagagatctgctgttattctgatgggcttccctttgtgggtaacct

SEQ ID NO: 898586 - DNA, 629 bp, Homo sapiens
aaattcatgaactactcattataaatggtttttctcaaatctgatatcaatacatagagaaaaaaattattttaaaatgagaaagcataaaagaaggtcccacattcaatacaatatttaacaaacaaagaatactatgatataacctgtgataagatatcaactatagagcaacgcagaggagagagtgttttggaagttaagcaatgtggattttcttcctagataactaactatgcgtaactgctatgtggctttaagttgatttctcaatgtctctgaaatttaattttttcccctgcctatggaattaggaagtttattcatataattcttatttcctgccaatttatcattctatgaaccagtaaacactgtgcagcagtaaacaatgaatctaggcacatacacagagatggtttattctctcctgcaagaaaaaatggagaatcaggggatacccagttaccctaagggatgtttggggaagaacaagaaactccagttatttgagaatctaaacaaaatgtttatgaaggaaatgtagtcagcttctagacgaatgggctgggtawaatcaaaggaaggattggtgttgaactatatcccctttctagcccaccagaagt

SEQ ID NO: 898587 - DNA, 590 bp, Homo sapiens
ttcaagttcatccatgttgttgcaaatggcaggatttccttccttttaaagattgaaataagattttgttgtatatatttaccacctgttctttatccatgtaaccatacagggacattagttgtttccattatgtcgtgttcttatcacaaacacacacacacacacacacacacacacacacacacacacacacacaaaaacaacaataaactccaaaaataagtttctaggaggaagcttttggaggtgatgaataaatttatggcattgatagggatgatgatctgatagtttcacaggtgtataaatatatccaaacacagcaagtggtacacataaaatatctacaggttcttaatgccaatcataccttaataatgtgattttttaaactttttttttaagagaaagaatttaattgtcacaagaattattttagcaggaataagctgggcattctagtcccaagaacawcatcatccctggcacagaaagtagggggcaggaaaaataaagatctttcttctccactctacattaaagctacaaagatgctttctgataggaggacatgctgttattttgtt

SEQ ID NO: 898588 - DNA, 611 bp, Homo sapiens
ccaaaatatcacagttaagtaggatttgatgataaagatatgatccttatttttgctaatgaaataaaaatataaaatgatataaagtccataataaagacacaaattttaagcaagtatttatacaggactagtctatgccagccattcttccagtcaccttaaatgtttaaactagtttaatcaacataagtatctacagggcaggtacttacattattacatacattttacaaataagaacactgaggcccagaatgattaactaagttgcataaccagtatgagatagagtcaaatttggaccaaagaattctggctatagagtctgtattcataatcgctgtaccttctgcttaactggaacattcccacaggtagtaaaactagcaaaatgggaagttaattcagtaaaggtagtgaagctctgacctaatacacactttttctagacaacttcttaaaatttcttccagaccatgattttgtgatgctctacactgatgaaaaaagatgctaaaatgctaggatgggtggcsaatatgagcaaaaatcatgtccattaagtccttgagggcttttccatccagttccaggtgttcacagagctg

SEQ ID NO: 898589 - DNA, 593 bp, Homo sapiens
aagactgacaatacagactctttgtggcaataagataccaaattataaataggacctaatgtcacaccagacaagggctaagttatgcacccctataagtcatgctgacygagtgtaatggttaacaacttttttatcttaaacattcctttctgccaactccaaatttttagacaaagctttactctttaactgattgcaaatttaaaaatctctgaacccacctatgacctgtaagtccctgcttcaagatatcccaccttttgggccaaaccaatgtataacctccatgtatcaatttatgaatttgcttattaactcctgtctccctaaaatgtaaaaactcaaactataatctgactgccctgcgtgcactttcttaggacctcttgagactgtgcttccctgggccatgctcactcatattggctctgaataaagctctttaaaatgtattacagagtttggtattccattaacaatgcattcctttgaactgcctccccctgccaatcctactctcaccctcaaaaactatgttgatgcctcaaaaaacctacaaactttaaaggaatattccattttcattacat

SEQ ID NO: 898590 - DNA, 593 bp, Homo sapiens
aagactgacaatacagactctttgtggcaataagataccaaattataaataggacctaatgtcacaccagacaagggctaagttatgcacccctataagtcatgctgaccgagtgtaatggttaacaacttytttatcttaaacattcctttctgccaactccaaatttttagacaaagctttactctttaactgattgcaaatttaaaaatctctgaacccacctatgacctgtaagtccctgcttcaagatatcccaccttttgggccaaaccaatgtataacctccatgtatcaatttatgaatttgcttattaactcctgtctccctaaaatgtaaaaactcaaactataatctgactgccctgcgtgcactttcttaggacctcttgagactgtgcttccctgggccatgctcactcatattggctctgaataaagctctttaaaatgtattacagagtttggtattccattaacaatgcattcctttgaactgcctccccctgccaatcctactctcaccctcaaaaactatgttgatgcctcaaaaaacctacaaactttaaaggaatattccattttcattacat

SEQ ID NO: 898591 - DNA, 607 bp, Homo sapiens
aatataatttaaatacacgctgcataataaaaactagatagacacagaacatattttaagtgagaaaaacttgaaaagtcaaagctattcctaagtataatatttcacagttatctatttaaccaagataaaatatatgtgtatacatgtttatttattcatttattcattcatttggtattcctctatcctacacttaagggaacactagcaaggtttttcttgagttactttagttgaacagtatttatttgcatatatataaaagctctaaagtgacagttattagttcatttaataatatattttagttgtctcaaattatgcaaattacattaagactaatataacttatttgcaatgactttgctgatcaaaaaatatttctagcttcaggtggaataactgatgtcaaaaatgcacattctaatttcttccatttaaattatccaactcaatgtctttttaatgtattcttcttatataaataygatcctccttaaattacagaccagtattgtgtttttaaggcattgctttgatttaatggtaatctccttaatataagagtttcccaaatttgataaagtctttttatgaagctgtt

SEQ ID NO: 898592 - DNA, 473 bp, Homo sapiens
gtcagcatcatccttataccaaaatctggcggagayacaacaaaaaaaaggaaaacatcaggccaatatccttgatgaacactgatgcaaaaatcctcaacaaaatacttgtaaaccgaatccagcagcacatcaaaaagcttatccaccacgatcaacttggcttcatatccaggatgcaaggttggttcaacatacacaaatcaataaatgtgattcatcacataaacagaactaaagataaaaaccacatgattatctcaatagatgcagaaaaagccttcaataaaattcaacatcccttcatgttaaaaactctcaataaactgggtattgaaggaacatacctcaaaataataagagccatatatgacaaacccacagccaatatcatactgaatgggcaaaagctggaaacattccccctgaaaacccgcacaagacaagcttgccctttctcaccacccctattc

SEQ ID NO: 898593 - DNA, 641 bp, Homo sapiens
cctttccctaaattcaagtatttgtattactgataccacagttatttctaacttggtaagcaattaactacttaccaagtaaatgtcagggaagcacacatcagttcaactgccacacaacagaatactttagctacaacagactttacttctccaaatagtcttctgccttggaaatatacaagatataattttgaaaaaaaaaaaaaaacaaacctcaagaacttaaataaaaattagagtttaatgcaatatttcttctcattgaaatctacccccacccaaagaagaataaaagctatctagtcttgctcagattagaagttatagataaaattctgggctgggtgcagtcactcatgcctgaaatcccagcactttgggaggctgaggtgggcagatcacctgaggtcaggagtttgagcccagcctggccaacatggtgaaaccccatctttactaaaaatacaaaaattagccgggcatggtggcccacgctgtaatcccagctactcaggaggctgaggcakgaaaatagcttgaacctaggaggcaggcaaaggttgcagtgagctgagatcgcaccactgcactccagcgcaggtggcagggtgagactccatctcaaaaaaaaaaaaaaa

SEQ ID NO: 898594 - DNA, 613 bp, Homo sapiens
ctaacttggtaagcaattaactacttaccaagtaaatgtcagggaagcacacatcagttcaactgccacacaacagaatactttagctacaacagactttacttctccaaatagtcttctgccttggaaatatacaagatataattttgaaaaaaaaaaaaaaacaaacctcaagaacttaaataaaaattagagtttaatgcaatatttcttctcattgaaatctacccccacccaaagaagaataaaagctatctagtcttgctcagattagaagttatagataaaattctgggctgggtgcagtcactcatgcctgaaatcccagcactttgggaggctgaggtgggcagatcacctgaggtcaggagtttgagcccagcctggccaacatggtgaaaccccatctttactaaaaatacaaaaattagccgggcatggtggcccacgctgtaatcccagctactcaggaggctgaggcaggaaaatagcttgaacctaggaggcaggcaaaggttgcagtgagctgagatcgcaccactgcactccagcgcrggtggcagggtgagactccatctcaaaaaaaaaaaaaaaaaaagctatagatagaatt

SEQ ID NO: 898595 - DNA, 530 bp, Homo sapiens
gctacaacagactttacttctccaaatagtcttctgccttggaaatatacaagatataattttgaaaaaaaaaaaaaaacaaacctcaagaacttaaataaaaattagagtttaatgcaatatttcttctcattgaaatctacccccacccaaagaagaataaaagctatctagtcttgctcagattagaagttatagataaaattctgggctgggtgcagtcactcatgcctgaaatcccagcactttgggaggctgaggtgggcagatcacctgaggtcaggagtttgagcccagcctggccaacatggtgaaaccccatctttactaaaaatacaaaaattagccgggcatggtggcccacgctgtaatcccagctactcaggaggctgaggcaggaaaatagcttgaacctaggaggcaggcaaaggttgcagtgagctgagatcgcaccactgcactccagcgcaggtggcagggtgagactccatctcaaaaaaaaaaaaaaaaaaagytatagatagaattct

SEQ ID NO: 898596 - DNA, 664 bp, Homo sapiens
gcaaccatttagaaatggcatacaaaaattaagaagcctgtataatgtggtgtctatagtaacttatgattgtttcattcatttatttatacctctttctacttaagaaggtgtttttaaatcccccatagcacctacacagtactctgaacatattggtattcaccatctgagctaaattgaatttagcaagcaaaaaggactgtccacaatctatactatgaagtacactcattaaacttggtctgctttaaattttggcaaactctaaggggctaagagcaccacataaaaacatcaacctcattatctcataccttataccttattacattactttccactgtcctaaacataataaagctgtctttggaagaatttaaaggattctcagactcctggcaaatctcttcttcaaaatgaaaaagccacaaacttctcagctaacttttaagcagattcaccaatcaaatttctgaaaggtgaaaagcatttatcaacaattttcccatttctgtcccttctaagtaatctgggctcctcagagttgtcttctccactcaactaattattggaatttcattttccatattatttaattgttaatagyatctttcattacattttatatagtctttccaaatcatagtacagttgttttgag

SEQ ID NO: 898597 - DNA, 597 bp, Homo sapiens
ggactgcctgaattcaggaggtgcaggttgcaggttgcagtgagctgagatggtaccactgcactccagcctggaggacagagctaggctccatatcaaaaaaaaaaaaaaaaatgccacctgaaaaaaaaaaaaaaaagattctagctagctatggagtctcacacctgtaatcccagcactttgggagatcaaggtaggaggattgcttgagaccaggaatttgagggcaacatagtgaaaccccatcttcacacacgcacacaaaatagctgggtgtggtggtgtatgcctgtggtcccagctcatcaggaggctgaggggggaggattgcttgagcctggaagatcaaaactgcagtgagctgtgattgcactactgcactacatcctgggcaaaagagtgagtccctatctcaagaaaaaagcaagtgaggccaggcacggtgtcttacacttgtaatcccagcatttgtgggaggccgaggtgggcagatcacttgaggtcaraagttcgagaccaggctggccaacatggtgaaactacctgtctctactgaaaatacaaaaattagccaggtgtggtggcgtgtgcctg

SEQ ID NO: 898598 - DNA, 640 bp, Homo sapiens
gtccacaaaagacaaagagaggcataaatctacctgatcacatttgacactgcaagatagctgtccaaattcatgtgaaaataaagtgtaaagagtggtagaataattgaatctgtctcacagcagtagagaagattacattaatttttatgcttttaagttttcttgatttaaaaaccacatgtcatcttattaatgaaaaaacaaaacacagtggaaagaaaatatcatatgaaatgtattcttgaatcttgtcaaataagattggcacaaagaattaatcattttatcagagcaaaggaaacctagtcatggaattaaataaataaaacacttgtattaaattatttgataaatgctcagggttttgtacttataatttgggttagtggacctttaacagacactcctatctctcattcaacccctatccctccctaactaattttatgaaactcattcacaaatctctcccttctttatctgtgtcagtttttcctatgttgccctagtcctgaaagtaraaggaggactggagccttcagcgtctatccaacttgaaaacaagtgaacttaaaatgtactgaactactcagctatcccatgaaacacagattcaaaatcaaaatatctgtactaa

SEQ ID NO: 898599 - DNA, 634 bp, Homo sapiens
aagccccataaccaaaaagttgaaatcaaagcaatcaatctccatctaactaaatatttttctgcttccctatttctcttaawtgtcactccccactcagggacagagtcataatgctatccttgattctttcctatcctttatcttcagcctcaccttcacacattatagttaagaattccttacgttatatgtatatctttttcttttctatttccacttatctatgtataaaagcctcacttctgaattagtgcaataatcttgtatttgtgctcatttacttcatctctttactctataggtggctatacaactacctgtttaatcttcctaaaatgtcatgcagctaacctactcaaaatttcggataatagttgctatggtttgaatagttttgtcttctttaaaattaatgtgttggaaacttaattaccaatgctacagtattgtaaggtggggccttttgggaggtgtgtagaccatcagggcttcagcctcatgaatagattaaatgtcactataagaagagcttgcaggagtgccttcactgtcttttgctatctgccatgggaagaagcagagttgctcttttgctctttcacatgtgaggacacagtaaaaggctgtcatc

SEQ ID NO: 898600 - DNA, 670 bp, Homo sapiens
ctgaaacatctgtagtgaagtccctcttttmatccttcatattgtttgctttaattaagtgaatactacaatttataagccaaactaatatacttttgagaatgaaaggggatgctgtttcttacaccatggtgtaaccttgcagtgtcatggcaagctgtgacatatggccttcatgtgaatatctagtttgctttatatccttgtgattcatcagtgacatttttaaaaatgtagccattcttgcagttgtgtcacataaaatatgttttaatgaaaagaaaattaaatatatcttttaaaattaagcaatcaatacaattaataaaaagtcacattttatagacctccagggctcatactaaatacttaatgagattacatgaaactatatgagatcttgaagtgaaatctatttgtactacaaatgaatatctcgtattcattgaggatttaatatgtgtagatctcgtgaaatccttatgaaagtctatgtgcccaataacagccccacttggtagataggaaatttgtgatttactttattcaaaaatcacaaatagctgagaagtggtgaaaccatgaaagaagtaaggtctgaatttgcccatctcttagttaccatttagcatactgagaatttcccataagtaaataattattctctact

SEQ ID NO: 898601 - DNA, 600 bp, Homo sapiens
ggatggggagagaagggttgactaaaatggacagaaggagggatttttgggcggtggtggaacttatgaagtaaagcactaatcttctccaaagagaggtttggcccttgctctcaactcctgggagatgacctctaagcctctgaaatttcctgcttgggaagagtatctttgtttacctggttgccttgggccatgccagatatgctaacaatatgttttatgatgggggcccttaggccatgcggtatgaactccacctgtgcagactatggtcacccatgtggatagtcaatcacgtctatgtgattgaacccaagtaaaatatctggacaccaaggtttgggcaaacttcccttattggcattattctgcatattgtcgcaaattgtttctgaaagaaataggtgctgcctgcatgatttctctgaaagaagacaactgggagctctgtgcttggtgtccactggaccctaccctatgcagttcatccctctactgactttsttctgtagcctcctgctgtaatatactgtacctgtgggtataatgccttttctgagtcttgtgagtaaattattaaacctgagggtagtgttt

SEQ ID NO: 898602 - DNA, 558 bp, Homo sapiens
ttttgcatttgctgaggagtgttttacttccaattacgtggtcaattttagaataagtgcaatgtggtgctgagaagaatgtgtattctgttgatttggggtggagagttctgtagatgtctattaggtccacttggtccagagctgagttcaagtcctgaatatccttgttaataatctgtctcattgatctaatattgacagtggggtgttaaactctcccactattattgtgtgggagtctaagtctctttgtaggtctctaaggacttgctttgtgaatctggatgctcttgtattaagtgcatatatatttaggatagttagctcttcttgttgcattgatccctttactattatataatgcccttcttttttttttttttatgtttgttggttaatgtctgttttatcagcaactgggattgcaacccctgctttttttgctttctgtttgcttgstaaatattcctccatccctttattttgagcctgtgtgtgtctttgcatgcgagatgtgtctcctgaacacagcacactgatgggtcttgacttttt

SEQ ID NO: 898603 - DNA, 611 bp, Homo sapiens
ttcagatggggtttttgtgtgaacattctttttgtttatgctgatgctattcctttctgtttgctagttttccttctagtagtcaggcccctctgctgcaggtctgctgcagtttgctagggtccactccagaccctgtttgccagggtatcaccagtggaggctgcagaacagcaaagatttctgcctgttccttcctctggaagctttgtcccagaggggcacctgccagatgccagctggagctctcctgtatgaggtgtctgtcgaccccttttgggaaatgtttcccagtcaggaggcacagggttcagagacccacttgaggaggcagtctgtcccttagcagagctcaagcactgtgctgggagacctgctgctctcttcaaagccagcaggcaggaaaatttgagtctgctgaagctgcacccacagctgccacttcccccaggtgctttgtcccagggagatgggaattttrtctataagcccctaactgggcctgctgcctttctttcagagatgccctgaccagatagaaggaatctagagagctacttttcattattattttgttaatgatagcacttctggctatgtccagagcacaa

SEQ ID NO: 898604 - DNA, 636 bp, Homo sapiens
gtcttcatcccagtttctagtttayttaccacgtatggccttaagcaacttactcaatcttgttgtgcttacgttttcttatctgcaaaataagaataatacaaatacttacctcataagattgttgtgattactaactgaattaatctattaaaagctccaggtgtctcacatggagtgagtgctatataagtgcttatttgttgttattacattgttgttgctgctgcttctattttgaaggattctgaggtcaattctgaattcaagagaaacaaacactgtgattggctagctatgtctaacaaagacctggaagaggaaatggcaacatatgtgattgaaacaggaaagtgctaccagtaggtcattgggtaggtcattagctctggaggagaaatggtgtgacatgctatacaaaaatttggcttcattggaggagtttggaatcatttgagagattagaaccaggctcatgagggagaggcagagaaggagaagagagctttctttctttttctttctttctctctctctccttttttttttttttttttttttttttttgcatctctggtcttgaattacaagtggcaagacatggcatgtaaggcagggctgcacagagagaagcct

SEQ ID NO: 898605 - DNA, 584 bp, Homo sapiens
aaactatttaatctttctaagtcttagttccctgatgttaaaatatgagtaattatagtccctatcacatgaaatctaagatataaatacacaaatacagtgcttggttcagtaaaatgtgaactrttgtaattttcctcctccctctactttttactttctaccactctccaacattttcctcatctatttttactgaaacacagtctgtattgatacttactactttccactttcatttctttctgtcacttaattatatgatgtgacatacctaccagactataactaagcctactatgggcatgaccctaatccagtttcagcacctatccctcttcccctatcccttgccttgcatggtgtatactggcatgaatacatgaatgaatgaatgattacctatgactttcttttaaaaattggtacctgctttaatatgtgtttgtatcaaagttggctctttttctgtctgcccacatcagtgatcttggtgttttgaggacagggacagtcaggataattggttttgcaccacagagcatgcaaaaaggcctaattggtgatgacattttagtagccaa

SEQ ID NO: 898606 - DNA, 676 bp, Homo sapiens
tatcaaagttggctctttttctgtctgcccacatcagtgatcttggtgttttgaggacagggacagtcaggataattggttttgcaccacagagcatgyaaaaaggcctaattggtgatgacattttagtagccaacaacagttgaagtcagaaaggatttttttttgcatcatgtttatgcttaatgaaacattcaatcctcctctttaggagttttattttctaatttccccaaactgcatttctagtttctacatgttgcttgtctcatggtgacagtttcaggcattttcccaaatgctaatgatacaaaggatgaatgatatcatgggcaaattgctgtggaactatgcttttgcaaagataaaaagaacaagaaatgggacttctctagcttctgttcaatttcaatgacacatttcttattagcagcctttgtttttactctgtgggtatttaaattttaggaaactgagtagtttctcccagagaactaccaactgagcatttttcaactatggcaaacaggatttttctcatatgaagtagattatgttattacaaagaataattgaaaacacccttgaattgttgagttggttcccaaagtggattttacttgcagagaacatggaaaaatgagactgattgaagtgagccccattcttagtgcta

SEQ ID NO: 898607 - DNA, 616 bp, Homo sapiens
aggacagtttcagaggagatttagctaaggagatctctgtcttccaaacctctctgtcttgcacaggtttatgtaataacaatgattaataaaaatagtagattctgaattttgttttggaataaaattaataaggctgcgtgcttctgagagagaaatttgtaaagtggcagacagggacatcaagaactctaattaccacatgccctagaacccatctgaggagaaaagatacagtctcagacaagatagttcctcctcgagatgcctgattaatgtcccctgactaatcttccccagtgcccaagtgagaaagggttagaagttaaccagtcttccctattatagtcacacatgtgcctcatattattattaaacatgtgagatatgttattttagatatgtgggattaagggaactatatttatatctatacattattaatattggcttaagtgtatgtattttaaagtagaatgttagcacatgcccattagctgtagtaggctacagtatgcttgctttgggcagcaagagccaattgcacacctctctactcaacttccagttaggtgaagycaaactggtaacttgaaattggccatgaagggagtat

SEQ ID NO: 898608 - DNA, 609 bp, Homo sapiens
gctcagtgtatgttaactattgattttgttgctgtgatgtgatgatgatgattattttattttaacttaatctttggatgataatattttaacagttcaaacattttcacaaatggcaaagattgtrtgtgtgtgtgtacatgtgcacatattaaaatttgtaagatcacaggagataatatgctttcaatgtatttcaactgatgtttgacagtcttgacactccaagacattagcttctctctgtggaaatattgtaatttaatgaatagcttacgatttttaaccaggtctgctctgtcattggacccaggagaagttttataggagagaatgttactaagagttgtaataaaatctaacaagtgtcacctaataattaaacagattaatcactttgaccaccaaagtagttgaccaccatgactgcagagcattaagacttagcaattcatgattaaaatcaggagggctgtaaaaatcagtgtctgtgaatgttctaaagaagactcactcagctctgtaatataggcctcccaatgggttctggaccatagtcatccatcatgggctcctcatgcactgcaggaagcagccaccagaaaggag

SEQ ID NO: 898609 - DNA, 644 bp, Homo sapiens
ttattcaaagaacagaattgctgatgtctcctaaagaatacaagaccaaacaagaatttactttgcataagarcccaaaatgaaaagataatcctctaaatgccctgatgagcctttggaaaggacagagtttttctgaaggactcgaaggacttttgcacggattaccatgtttttcccctcatgaatttgcttcttatttcataaaggaagacataaatattctaaatcatgagcaaaaaaagaaactatatccaattctaattctgcattcttttattctctaacttatagctctggctctcaaacattaaatcctgtatcagtagacagagctgcaggtgttaacaaccattcctgtaatcttaagtgaacttaatgtgactcttaaatgccctctagtccagatggtatgtttcctttatttggtattttaatgtggtagtatatttaaaacaaagaactatttttagacttgttggtctaaaccacttgttggcaagtggtttttacatccaggtatttagaagaatgttagaaatgttaatgtgaaaaggatcattatcaatcatcagtttttttgttgttgttattgagtgtgtgccaaacaggaggtgctggtattcatgactttattagttaca

SEQ ID NO: 898610 - DNA, 644 bp, Homo sapiens
ttattcaaagaacagaattgctgatgtctcctaaagaatacaagaccaaacaagaatttactttgcataagaacccaawatgaaaagataatcctctaaatgccctgatgagcctttggaaaggacagagtttttctgaaggactcgaaggacttttgcacggattaccatgtttttcccctcatgaatttgcttcttatttcataaaggaagacataaatattctaaatcatgagcaaaaaaagaaactatatccaattctaattctgcattcttttattctctaacttatagctctggctctcaaacattaaatcctgtatcagtagacagagctgcaggtgttaacaaccattcctgtaatcttaagtgaacttaatgtgactcttaaatgccctctagtccagatggtatgtttcctttatttggtattttaatgtggtagtatatttaaaacaaagaactatttttagacttgttggtctaaaccacttgttggcaagtggtttttacatccaggtatttagaagaatgttagaaatgttaatgtgaaaaggatcattatcaatcatcagtttttttgttgttgttattgagtgtgtgccaaacaggaggtgctggtattcatgactttattagttaca

SEQ ID NO: 898611 - DNA, 564 bp, Homo sapiens
cagaaacacctatttttgattttgaaacaagacgatgacatttggaatgtgaaagcaggaagacagctgaaggaaagaaaagaggcattaatattcttatcatacaggtgggagtcaagagatacattcatatttgatgagtaagaaaatgaagttgcaaatatattcataaagtgacaaaaccaatagacaagctgaaaattgagtagatggggtgagagaagtgaagagggggttaaacgaaccagaccaacatcaatcacagcagaatatatctaaaattttaaaattacgaaagagcaatacaaaaaacacccaactaactacctttgttcttctgaggggtgggcctagaagcagaaaggagtaaggtagggagttgctgcattttatttctattttacttcttttgtcttcattttaagccaaatgcatgaaaaattaaacaaattcagcaagtggagataattcaggttccatggggtcacgggtatatctgggttgraggcaaggtggaggctgtgagagctgcccagtgctactggctgaagatgagggaaggga

SEQ ID NO: 898612 - DNA, 573 bp, Homo sapiens
ctgtttatttttccctttgattttcttttttctctgtgttttattttggatagtttctattggtatgtctttgtgttcactaatcttttcttctgcaacgttaaatctgcaattggtccaattcatttatatatttttttaatttttcacatagctttatttatctctagaagttaggcttaaattttaattagtatcttttgtgtcttgagtttactttttgaataagcagaggaggacactaaattagttctataatatattattttaataatgtaaataatatgttatattataataacctatttagtgtcctctgtttcaatatctgtgctacttctgagtcagtttaaattgatttgtctttttttcctctttatggatcatattttcttttttgcatgcctagtaatttttaactggatgccaaacattgtgaattttatsttgttaagtgattaatagttttgtcatcctgtaaatactcttgagccttcttctgaaatgcagtttaaccatccgaggccagggaaagtgccatccaagagaattagagggtacatacctggtact

SEQ ID NO: 898613 - DNA, 445 bp, Homo sapiens
tacattaaaatgaaaataataacaacattatttattcatgtcaaggctatgaaataaaatcaagggtttgtcatgwggagttgaaaactaaaaaataagaaatgtatctgaatctgttgtctcctagagtataggtatcaacaaggccactgttcaggagtatggattttaggtactcttatggactgaattttgtccctcgaaaatgcatatgttgaagtcctaacttccaatgtgatagcatttgaaaatggggcctttaagatataattaaggttagatggggtcatgagggtggtgcctccatgatggagattagtgcccttataagaataagaagtgattagtgttctctcagtatcttgctttaatatgtgtggctacagtgagaagatagcagtctgtagacaaggaagagtcccctccctaaaacctgactacgtgg

SEQ ID NO: 898614 - DNA, 666 bp, Homo sapiens
cagatgccatggcaacatcaggaagttaccctatatggtccaaaagggagaggcatgaatagtctaccccttgtttagcatttcatcaagaaataatcagaatatgggcaaccaacagcactcagggatgttttgtttatggagtagccattcttttatttctttactttcttaacatacttgctttcactttactctgtggacttatccaagaatccactcttggtgtctggatccagaccccttttctgcaacaatttcactcatatgtggaatctaaagatgttgatctcatagaagtagagaaaagaatggtggttactagaagcagaagtggttggtgggtgagggtgataggaaggtgttagtcaaaggatatataattacagaaagataggaggaataagttcaaaagatttgttgtactgcatgatgactatagttaagaatgatatattgtattcttccttaattaaaaaaatgcaaaaagagtggatgttaagagttcttgccacaaaaatgataactatgtaggtaatacatttgttaatcagctctatttagtgattccmcaatgcatatgtactttaaaactttacgttatacatgatgaatacatataattttatctgtcaatttaaacaaatacatatgtaaatagaagag

SEQ ID NO: 898615 - DNA, 656 bp, Homo sapiens
atcctccagccagatggtggtgatgactgagaccttagctgtcattgtgacccccttcctgtgtaccatcttctcctacctgcaaatcatcgtcactgtgctcagaatcccctctgcagccrggaagtggaaggccttctctacctgtggctcccacctcactgtagtggtcctgttctatgggagtgtcatctatgtctattttaggcctctgtccatgtactcagtgatgaagggccgggtagccacagttatgtacacagtagtgacacccatgctgaaccctttcatctacagcctgaggaacaaagatatgaaaaggggtttgaagaaattaagacacagaatttactcatagaaagaacaaaatgttggcatgtcaaaatcaggacatgacctaaaagattattatcagtttatcctcccttcctaacccttttccacatggcattcaaagaggtcatgaaaagtggtgttggatatcagtaagagaattaacctgggagcaaaacactcagtttctttatatatatatatatatatatgtatacacacacacacatatatatatacacacatactttaagttctgggatacatgtgcagaacgtgcaggttcattacataggtatacacgtgccatggtggtttgctgc

SEQ ID NO: 898616 - DNA, 593 bp, Homo sapiens
ataggaaatttaaccttttaaattacgaaatgactataaataaacacaccttttttttttttttttttwtttgagatggagtctcggtctgtcgcccagactggagtgcagtggcgtgatctcggctcactgcaagctccgcctcccaggttcaagccattctcctgcctcagcctcccgagtagctgggactgcaggcgcccaccacaacgcccagctaagtttttgtatttttagtagagacggggtttcaccgtgttagccaggatggtcttgatctcctcacctcatgatccgcccgcctcggcctcccaaagtgctgggattacaggcgtaaaccaccgcacccagccaaacacacctttgtttttaaatacagacaatacaatataaagttaagtatgaaaattcagaaggtaaccacattacacataaacactttttaaggactctttccacaccacaacaaacacattaaaaaaaatacttttctttacaaaaatgagattattctttttttattattatactttaagtcctagaatgtgcaggtttgttatgtaggtatacatgtgccatggtggtttccttac

SEQ ID NO: 898617 - DNA, 419 bp, Homo sapiens
agaactagagaaccaagatgaaaccagcccccaagctagcagaagatgggaaataaccaagatcrgggggaactgaaggagttaaagacacaaaagccccttcaaaaaaatcaacaaacccaggagctgattttttgaaaaaattaataagatagataaaccattagctagactaataaagaagaaaagagaaaagactcaaatagacacaatcagaaatgatatgggagatatcaccactggccccacagaaatacaagcaaccattggagagtactataaacacctctatgtacataaactagaaaatctagaagaaatggaaaaattcctggatgcaaaaacgccagtcagaatgatgattattaagaagtcaataaataacagatgcttggaaaaaggaatgcttttacattgtt

SEQ ID NO: 898618 - DNA, 577 bp, Homo sapiens
ctacatgcctgaaatgtactctgtgttcaataggttgtatccattttttgttgttgttgttgttatttgatgaagaagatggcacagggcacaattctggcaacacgtgtcttcaaaaaatttattaatccaaagataggaaacaaatccttgaagctttgttgatttcagatattatacatagacaaagacaattttctcattattatctgctatggttttaagatgtcccccaaagtccatgtgttgggagcttaatccccactacgacgtattgggagatgggcctttaagaggagattaggtatcttttctcatgaacccttggagggctctttcttatgaataggttaatgctgttattgcaggaattatcatgggagtgggttcctgattaaaaaaaaaaatgagtctgacccaacttcctctctgtatctcacatatgcacttcctcaccatgtgataccttccacaatgggataacccttgccaaattctmgtgtcatgccctcagacttcctagcctccaaaaccatgagccaaataaacttttgttctttataaattgccccatctg

SEQ ID NO: 898619 - DNA, 694 bp, Homo sapiens
gaaaggatagagtgcatttgtccatttaccctgctctccacttgtgtccaccctgctctgtgtttcataaggttgagacatgtttcagaaggctccctttccctccaggcaatgyaaggtactggtaagagatcctgagggagggaggtgggaacaatcagagtatttattccatcaacttcctttttgctggtcacagtgagttacctgtatccatctgatgaaggccacagctcctatcaggcaaccttctccatgtggccaccttgttcacgttctgagatctacacactgtgatttttcccttcaggtctaggggtgtaatgactctctgttgttgccagcccaagagtactacattatcccttgaaaatttccttataccctactcccacttttgaaaataatcccttcatcaatcttctcatttggaatgttccatctctttctagctaggactgaatgacatatggcaaaagacagtagaggcaattagacttattaggagttttaggtaatacaccaaaacaaagacattgagtcctgagctagggcagtggcagtggagacatacaggggagacagacgtgagaaattttaaggaggaagctctgatcagatttagttattaattaagtggggggaagagaagctagcaatgagaagttaagggcagccttgcacagtggctcat

SEQ ID NO: 898620 - DNA, 566 bp, Homo sapiens
gtgctatttagaattttgttacttattcttcaattatttgagggtttaacagccatctttctgtttaattcctagtttaattccactgtggtctgagatgtatgatttatattttatatatttgtaaaatacagtcaaagcattttatgtttcacaatgttgtctctcagtatgagcttaatacaaatgcatgtgctgctgttgttgggcgaagtagtatatagatgtcagttatatccagtttttgatgatatttttgagttcaactttgtccttaccggttttctgccgctggatctgcccatttctgatagaggcatgttgtagtctctaatagtagattgatcttttttcctcaaggttctgtaatattttacatcatatattttgacactccgttcttaggtgcatacatattaaggattattacgtcttctttgagagtggatcactttatcattgtgtaatgtccctgtctatttcacactacttcctttgctctgaagtckgttccatttaaaattaatatagctgctcctgctttcttctgattaatgttaatatgg

SEQ ID NO: 898621 - DNA, 626 bp, Homo sapiens
tctggtatgcagcattctactttctaattctgttagtttgacacttttatgactccatttatacatgagatcatgctgtatttgtctttctgtgccggacttatttcacctaacatgatgatctccagcttcatcgatgtatttgcagatgacataatttacttctttttaagtctgaagattattccactgtgtatatataccacattttctccatctgtttatttgttgatggacacttaggttaattctaaaagttgcctgttttaaatatgctgatgaacatgggggtgcagatatagcttcaacatactgatgtcagtttctttgactatatacccagaagtgtgattgctgtaccatatggtagttctatttttaattttttatgactccatattgtttactgtaaaggctgtagtaatttatattcctattaacagtgtacagggctccccaccgcccttgccacattcttgcaactcttgttttcmtcttaattttattatttctacttcagtttccttaactaagaagagaaataaatttgcttgttgcttattttgggatgatcccacaattattatactaattctgttagtataataattataacacttatggtg

SEQ ID NO: 898622 - DNA, 564 bp, Homo sapiens
aaagacaacaaatggtaacttgagtttgtgytcttgagtttgataggtggcaaggcaattaccatgtctcacactgtcacttcatcctgtgaatgtgacaccgacaaaattcctagaaaaaatatgagcaacacttgggcaagtgaaactgagaagtcatagctcttgacatgctaattgatttccatgcttattattagcaggtcaccagccgacaggaggtcaagctttttttcagttgcttttttttttttttctctcttagcaatctgttgtaatggatggttgccacagcacatgcaaacacctctgatacctaagatcaagctcttagaatgaagccattcctacttgaaatctatccaatcatacccctcatattaattgaagaacttttcatttggcaaaagtgtgttatttcatcaatgagtattttacttaaaatccagttaaaactctacctagaaactacctcttatttaatagccaaatctgcaaactcatttttagttttgcacacttacaaaatagggcttcctacctgttaccaggctgatgcgttcc

SEQ ID NO: 898623 - DNA, 588 bp, Homo sapiens
ccagattaacaatcagtctgattttcctaaggtactgtatttagtgaggggctacttataactatctcattctaaatctctttccatatggctttatytcccatcagccaagaaagttttaaagtgttttctataggtccagtcctatcctatctatcctgccctatcgtatcccaccatattccatcctaccataacctaccctatccttactctaccctatgccaccctaccctatcctatccatctatcccatcctaaaaacacctttcctgggtgctgctgttccctcaagatctggccaccatttcttttcttctctctactgataaaactcttgaagtagccatcctcctctttcagtgacacatttttatttttatttttaactccatgtattatacttgggctttccaggcaccacaccattggggaaactccctccaaagtcactggtggcctctcagcccttatcctggttgatctctctctctctctctctctggcattccttacactgttgatcatctccctgccattacccccaaaccactgtcttccttcctcctgtaggctccaatgacacct

SEQ ID NO: 898624 - DNA, 588 bp, Homo sapiens
ccagattaacaatcagtctgattttcctaaggtactgtatttagtgaggggctacttataactatctcattctaaatctctttccatatggctttatctcccatcagccaagaaagttttaaagtrttttctataggtccagtcctatcctatctatcctgccctatcgtatcccaccatattccatcctaccataacctaccctatccttactctaccctatgccaccctaccctatcctatccatctatcccatcctaaaaacacctttcctgggtgctgctgttccctcaagatctggccaccatttcttttcttctctctactgataaaactcttgaagtagccatcctcctctttcagtgacacatttttatttttatttttaactccatgtattatacttgggctttccaggcaccacaccattggggaaactccctccaaagtcactggtggcctctcagcccttatcctggttgatctctctctctctctctctctggcattccttacactgttgatcatctccctgccattacccccaaaccactgtcttccttcctcctgtaggctccaatgacacct

SEQ ID NO: 898625 - DNA, 682 bp, Homo sapiens
gagttgctagcctcagggtcacacagttactaaaaagctagaaactaggctttctggtttctcctttgaagtcctttctactatgtcctgtgtatcaaaggctcccaaagaatgtttgttaaataaaatgagcatgtgagtaaggtccctcaactggggagtagggaagtttaacaaaactatagttacttaaatgctgtaatgaataccgacaaggttttgaggttatcttcacttaagtaaatcagtttctgcattcttcccagagcctctttcccatctccagaaaaaaggctcttttatatgaaaggcagacacacatagccaaagtaagtggtagaatacttgagccacaaagttccttaaaagcaaattcatgtcaaagagccaagctacctagggaactgagccattttttgcaactgagcccatctctttaagagcggtttagtatataagtcaatatggatgaaatctcactattcatgtgccataagagaagctaatgcatccatatttgcatttcttagaaatctaagcaacattctattattttcaagggycccacagaaaaaacagctctgcagagcttatttctagagaaacagaagagccatacaatgttgtttttgttttgataccattcagaagttatattcatctgaagaagaagaggtgaatg

SEQ ID NO: 898626 - DNA, 583 bp, Homo sapiens
tcacttagatataataactgatgtccaaatagaatttaaatgttgaatcctttttcactttcatctcacttacagcaatattgtggtataggtgtatcaataattttttttaattttaaaagtaaagaagcagttccagaaagatggaacagatgtacttttcctatcatttctgctaagtacagtaaaacaattcctgggtgttatatatataacatgaacattaaaagattcttgaaggtagagagaacaggcagaactgctagggaccttaggatgcaaggaacttcaaagtgatgagctgcctgggtcttctaacacaccaataatttcattaaaggtacagtgactaaatataccaattaaaatacagattggttgaatgaataaaaaagcatgaactatatgctatccataaactcacttcaagtataatgataaatatatgtaaaaagtaaaaatatgaaaaatatatacaatgaaaacagtcaaaagaaaacaggagtacytacatgaataaaataagtagacttcagaacatagaaaattagtagaaacagagagggacattaaaaatgatatg

SEQ ID NO: 898627 - DNA, 684 bp, Homo sapiens
tttttcaaaggaatattgatagactagattcttacttcagcctttctttaggtctagagggaatcctgctcaccaggtctatgcagccagacccaagtaagtgaagacctctactgacttaaagtgtctttgacgctggtaccttaggctgtgcgatccttgttcacgtttttctgtattcaggcttagctcttaaggaattgaattactttattctgagtacatttctatcaattgtgacaacacttcaaattgtgatactcttcttcttttaccctaagaaaggaaatctatgactcttttctctaactgagaattgactatctcaaaaaactattaaaaattccagatttaatcatgcttgttgacaggtcatatcttaagactaaaatggaaaattcttgggcagataaaccttaacagatttcaattcatttctaaattatagccccaacctgagtaaaagttgcccatatggcaaaacctatttcactcacaacagaggacagccaaatgagaagagataaaagagttatagtaaacacagataacaagtatgactttgaagcagtccarggttttgaaatgctatggaaacaagagttttcagcctcagcaagaaacaaattaaaaatggtcaacatattaatgaactgtggaatgttctaatgctttttaagatgg

SEQ ID NO: 898628 - DNA, 521 bp, Homo sapiens
tctcccattataggcatactgggagttgaagcttcaacataggaatgtggagggcacaattctattcataacaagtatggatatgaattgatcaggtctccagggacaacaattcataaatcaacataagctgaaaaatgactgaaagggagcattaagaactgagaccatctgtgtcaacagggctgagttctaggaataataagacttatgtcaacatttttttccagaaagcatgtgtttatgaaagaaaaggataaacaaataagtaactttattatttgcttcagaaattttctgtagataaatttattggacaaaacaatttacccacctgagtaaaccactcacaaatcaaacaacagtctatttcataaactcgtttcaagtctccctcaattcattaccaaaacaccaggggtttggtctctgtcctactgctygccccacagaaaaccagtaactgagacaagtactgccaaggaagtggctttaatttggtgctacagccaaggagatgg

SEQ ID NO: 898629 - DNA, 635 bp, Homo sapiens
ttttagaaattatataaagtaggtaaaatactagtaaatactctcgcaacagtaagcaagcaaacatacaaacaataaaattagaaaatgttcagaaaacctgatgagacatttcaccaaagaggatatacataagtaaacatgaaaatatgttcacaatcatttgctattttgaaaaatcaaaattaaaacaatttgatgaatttaaaacattaaaattgtattagatatcacaacatacctaatcagaatgctaacatataaagtattttgatcaaaataccataattctgtcaaggatgctgagaaactggataacccatatgtttacagccactctgaaagagtgtatggtactttctgacaaagtaaatgagcaacccagaaatttcccacttggacatttatctcagtgaaatgaaaaattatatttatacaaaaacctgtgcataatgttcacaatacctttacgtttaataactaaaagtggcaacaactcacatatcctacaagatatgattacttgttgaacagtggtacattcataccacgaaaacccacttggcaataaaagcaagtaacaaytgatagacaaaaaaacttagatgtatctcaagggaattatgccaagttaa

SEQ ID NO: 898630 - DNA, 611 bp, Homo sapiens
ttttggtgtcagatttagttgattaaacatagyattattttaacaacctgtgacaggttacatagagaggatttatagaatatatcctgggattgcatcctccatccttaaaaatggtgcctggtgtgaggctattagtcaacaacatggtagaagtactagcaacagcacttacaatgtagtaagttaatttacaatagtcttaatgcagcaaaattgttttagaagatagattacgttatcatgttatttttatcaatattgctaatgttctgacgtgtgttgttcatctttggatgccagtattctagaaaatagctgcaagcaagtgagtccagaaaaagagataactatcttgggttataaagatctcaacttcccaatcctaagagtaaccagtgacatgtcctccagaagatggtacaaagctttaaagtgtgacccctgctcttttgcaaatgttctaattaaaatgaagggagatttatgaccttaaggtatttaaaatgactcaagtggcatttttcataaggtaaagcaataatgacaagaaaatcaaacaatggacattgaaatacacagtgagccctgtgcttggaggaaaggctggg

SEQ ID NO: 898631 - DNA, 601 bp, Homo sapiens
accattcaggacataggcatgggcaaagacttcatgactgaaacatcaaaagcaatggcaacaaaagccaaagttgacaaaggggatataattaaactaaagagtttctctaaagaaaaagaaactckcatcagagtgagcaggcaacctacagaatgggagaaaaaaattttccaatctatccatctgacagaatctaatgtatccagaatctacaaagaacttaaacaagtttacaagaaaaagacaaacaaccccatcaaaaaaatgggcaaaggatatgaacagacacttctcagaagacgacatttatgcagccaacaaacatatgaaaaaaagctcataatcactggtaattagagaaatgcaaatcaaaaccacaatgaggtaccatctcacaccagttaaaatggtgatcattagaaagtcaggaaacaacagatgctggagaggatggagagaaatatgaacgtttttacactggtagtaggagtgcaaattagttcaaccattgtggaagacagtgtggtgattcctcaaggatctagaaccagaaataccatttgacctagcaatcccattactgggtatatacccaaaa

SEQ ID NO: 898632 - DNA, 601 bp, Homo sapiens
accattcaggacataggcatgggcaaagacttcatgactgaaacatcaaaagcaatggcaacaaaagccaaagttgacaaaggggatataattaaactaaagagtttctctaaagaaaaagaaactcgcatcagagtgagcaggcaacctacagaatgggagaaaaaaattttccaatctatccatctgacagaatctaatgtatccagaatctacaaagaacttaaacaagtttacaagaaaaagacaaacaaccccatcaaaaaaatgggcaaaggatatgaacagacacttctcagaagacgacatttatgcagccaacaaacatatgaaaaaaagctcataatcactggtaattagagaaatgcaaatcaaaaccacaatgaggtaccatctcacaccagttaaaatggtgatcattagaaagtcaggaaacaacagatgctggagaggatggagagaaatatgaacgtttttacactggtagtaggagtgyaaattagttcaaccattgtggaagacagtgtggtgattcctcaaggatctagaaccagaaataccatttgacctagcaatcccattactgggtatatacccaaaa

SEQ ID NO: 898633 - DNA, 624 bp, Homo sapiens
atgcctaaaatccacactatgatgtattatgttttccaggtttgggacattttatctacataagcagaaatgttacatgaccactttcagaaaaattccttaaaaatagctgatgtgggccaggcgtggtggcttatgcatgtaatcccagcaccttgggaggcagaggtgggcagatcacttgaggtcaggagttcgagaccagcctgaccaacattgtgaaaccccatctctaccaaaaatacaaaacttagccggacatggtggcacacgcctgtactcccagctacttgggaggctgaggcatgagaatcacttgaatccgggaggcggaggctgcagtgagccaagatggcacctctgcactccagcctgggtgacagagagagaccctgtttcaaaaaaaaatagcagatgcgcaatttttattctttccttcctccttcctgcagtctggaatgtgtgtgtaatagttggagcttaagcagcttccttggaccacaygttgggaggactttgctgaaggtaaatggggaaaggagccagttttcctggtatcttagtggtagccctatcagccctgaactgctcctctcacatgggagataattgtatttacaatac

SEQ ID NO: 898634 - DNA, 615 bp, Homo sapiens
aactcagaacgaaggtatatttcaacgctaatgacatctctccattttagatgctgtaaatacctagtgtttaattccatcttatatttaaacatcycaaagttagccattattattgttgttactgttgttttacagttagttcctattttagatttaataatttcttagtccattatcatttcttgtatcctcacatatcttgcaaaccacaccttggttctgggttcaatttccttcttggttcagtttcgttttttgttttttgtttttttaaatattggagtatattgtttactagttatttcagagaaggtgtatctgttaaatataaattcagttagtcttttagtctaaagagtattttggcctaattcatgaatcacaggttaattgtgtatagaattctcagcaggaaattattttctttcagggctttttagattttatttcataatcttcttgtctttgttgttgttgaaagttttgcttagtctaattattgttcttttgggaagggatttttaaactcttattgcctttaagaattttttgcttggctcttctgactttcttctattatgtatactagtacaaatgtatatgtatttatct

SEQ ID NO: 898635 - DNA, 615 bp, Homo sapiens
aactcagaacgaaggtatatttcaacgctaatgacatctctccattttagatgctgtaaatacctagtgtttaattccatcttatatttaaacatctcaaagttagccattattattgttgttactgttgttttacagttagttcctattttagatttaataatttcttagtccattatcatttcttgtatcctcacatatcttgcaaaccacaccttggttctgggttcaatttccttcttggttcagtttcgttttttgttttttgtttttttaaatattggagtatattgtttactagttatttcagagaaggtgtatctgttaaatataaattcagttagtcttttagtctaaagagtattttggcctaattcatgaatcacaggttaattgtgtatagaattctcagcaggaaattattttctttcagggctttttagattttatttcataatcttcttgtctttgttgttgttgaaagttttgcttagtctaattattgttcttttgggaagggatttttaaactcttrttgcctttaagaattttttgcttggctcttctgactttcttctattatgtatactagtacaaatgtatatgtatttatct

SEQ ID NO: 898636 - DNA, 644 bp, Homo sapiens
tagatacagaaaaggcattaaataatattcaacatccattcatttaataaccctctacaaactaggcattgaaggaacatatttcaaaataataaaagctatctatgaaaaacccacagccaacatcataatgaatgggcaaaagctggaagaattctccttgaaaactggaagaagacaaggatgtcctctctcaccactcctatttaacatagtgccgaaaatcctagccagagaaatctggcaagagaaagaaataaaagacattcaaatagaaagagaggaaaccaaactatccctgtttgttgatgatgtgattctatacctcaaaaacctcatagtgtgtgctcaaacgctttttgatcatatacacaatttcagcaaagcttcaggatatacaatcaatgtacaaaaatcagtagcattcctatacaccaacaacatccaagctgagagccaaattgagactgcaattccattcacaatagcaacaaaaagaataaaatacctaggaatacagttaaccaaagtggtgaaatatttstacaatgagaattagaaaacactgctcaaataaatcagagatgacacaaacaaatggaaaaatattccatgctcatggacagtacgaatcaatattgtaa

SEQ ID NO: 898637 - DNA, 644 bp, Homo sapiens
tagatacagaaaaggcattaaataatattcaacatccattcatttaataaccctctacaaactaggcattgaaggaacatatttcaaaataataaaagctatctatgaaaaacccacagccaacatcataatgaatgggcaaaagctggaagaattctccttgaaaactggaagaagacaaggatgtcctctctcaccactcctatttaacatagtgccgaaaatcctagccagagaaatctggcaagagaaagaaataaaagacattcaaatagaaagagaggaaaccaaactatccctgtttgttgatgatgtgattctatacctcaaaaacctcatagtgtgtgctcaaacgctttttgatcatatacacaatttcagcaaagcttcaggatatacaatcaatgtacaaaaatcagtagcattcctatacaccaacaacatccaagctgagagccaaattgagactgcaattccattcacaatagcaacaaaaagaataaaatacctaggaatacagttaaccaaagtggtgaaatatttctacaatgagaattagaaaayactgctcaaataaatcagagatgacacaaacaaatggaaaaatattccatgctcatggacagtacgaatcaatattgtaa

SEQ ID NO: 898638 - DNA, 644 bp, Homo sapiens
tagatacagaaaaggcattaaataatattcaacatccattcatttaataaccctctacaaactaggcattgaaggaacatatttcaaaataataaaagctatctatgaaaaacccacagccaacatcataatgaatgggcaaaagctggaagaattctccttgaaaactggaagaagacaaggatgtcctctctcaccactcctatttaacatagtgccgaaaatcctagccagagaaatctggcaagagaaagaaataaaagacattcaaatagaaagagaggaaaccaaactatccctgtttgttgatgatgtgattctatacctcaaaaacctcatagtgtgtgctcaaacgctttttgatcatatacacaatttcagcaaagcttcaggatatacaatcaatgtacaaaaatcagtagcattcctatacaccaacaacatccaagctgagagccaaattgagactgcaattccattcacaatagcaacaaaaagaataaaatacctaggaatacagttaaccaaagtggtgaaatatttctacaatgagaattagaaaacactgctcaaataaatcagagatgacacaaacaaatgsaaaaatattccatgctcatggacagtacgaatcaatattgtaa

SEQ ID NO: 898639 - DNA, 577 bp, Homo sapiens
tggtatcggctactcaggaggctgaagtaggaggatttcatgagcccaggagkttgaggctgcagtgagctgtgattgtgccactgaattccagcctgggctacagagtgagtctctatctcaggaaaaaaagaaactaaagaaaagaaattaaaagcattacagggtagcccattcagaaagaaggctcaaactaaaagaggtttctttaatggaactggcaaagcagttggccatttgttcattctgaaggcatctaccaggaacccaggctacctgaaatgaggaggccctagatgtgcaagacttggcgctctttcaaaagcttcacacaaagcctttctttaaatcctaacaccctttaaaagcagttggctgagatcacacagccaatttctaatgcctaattatcacttgaaaaggcagaggctggtgtggaaggattggggaagaaccataaaggactcaagcagtgtttccttttaaatgcaattaagtgaattttccctgtgctgtccaggttgttttcttaaaacaaggatagactgagatcccatgtggttgtgaaaataagtta

SEQ ID NO: 898640 - DNA, 668 bp, Homo sapiens
tctctctcttaatttttgaatgagtaagtatattaataaatatgttcaactttccagtactcaaaatttaatcattattctcaatcctacgttttaaggaggtgataaggttatttttgtcttcccycgccccactccatcctccatattatccattctctacattgaaattaaagtgacccttttcaaacaaatctgagcaagtgggagccctcctgaagatcttctccttgcttagaataaaggtagagatctcaagcctgggccctgcttccccccaccctgctttggattccagtgacactggcctctgccatggctggggaccctcctctcccttccctcctacccatctcctactctttgcccctcaccacccagtgaagatctgctcgtcctctagagctcagcaaagtgccactttctcgaggagaaactcttccttgccttcttaattagatcaggagaaacctgatcacaagccatgctaatctttttctccatagttcctacctcttcttgtgatcatccatttgtataactgattagtgtttgtctcctcactgttgtgtaaggtccataaacacagggatatcaactggttttgtaccacttgtcctttgtacctggcatagggtttaccatgctgtagatgatcaaaaaatcta

SEQ ID NO: 898641 - DNA, 611 bp, Homo sapiens
tcagtaaccaggcaagggatgctccatgtttctcaccaagcagagaaaatgctatttcaacccagagtcagcacttacagggaacgcaataatttgagaagttgatgggwgtgagttagctgctagggaaagacaccaaatgtataaacactgacaaaacatgctaacatcaagagagggcaagcactcagattggtgcacacaggaaaacacagggcgaaaatgtggcataatttctcaatttttaacctaagtcttaccaatcaactcacaagaatagctatcagtgaggcaagtcaattgccttccttgaacatctttacaaacttgaaagatgcctcttgattgagttgtttgaagtacggtcctgagaaaagacaagggaatagttcccataacctgcagggacttcttttcaccagagggtttggcaagactaccatgagtttaaaataacagagttaacactgaaaattcactttattatgttttgatttcaaagaaaacgtagacttgtaaataacaatagttctttgtaacaatctgcatgacacttttattagctagtggaagtgggaggtttggttaaacaggaatccatgtgaatattg

SEQ ID NO: 898642 - DNA, 607 bp, Homo sapiens
gagtaatacttgcattcaagtgcatttatccattgactctgaaaataaatcatacttctggaaatttctgaagactcaggaatattaattaggaaaacatttccttacatttctgttctttcttgctttagtcaccatttcctattaatatttaagaaacttgtatatttaaaagctttctggggaaaaccttcaaaaaaaattcctttacagttttacaatgcctatctctaccctcaattttgtggaaaatcttaccaatgtgtagagcgatagtttttcacaagttgaaagataccccaaagtttattatgtcaagcagttcatatgtaggatcattaccacaatcctaatatcacaaggcaagaccaagatacaaagataaggctacattgaagtgttaagctgccatgcattggaaagggcaactacatttcttttttctgtgcatataagttaccctatcttttccaacaacctatcaaataccatttaacagtagcacataattagtgaagtaggctttgcaaagtctttacagaatcaaaactgaactcaaakgcacaatctatttgtttttcctaagctggtcgaatgatcttggtta

SEQ ID NO: 898643 - DNA, 626 bp, Homo sapiens
aataacttttaatgcacacatgtaacatatttataatatataaatagtgtcacataatctaatcagtaatttcttaaaactgmaaacactggataacgtatctttcataaaacctacatatcaagtcagtttaattcagctaagatataatctcactagccaaccatttccaaattcagctacttggtcaaatacataataaccagaataattactaggtcatcaatgttacatagaaggaataggatacttttgtacatgaactgattaccaaagcacagttccaccagcaatatttagacaatgtactatcaaacactgcaggaatactttatgttcttttcctcaattttatagatgtgggagggtcaaatataccttccttgtactgctaattaaccatcttcaaattcttaacttttgcagagtacctttctaattatatactagtataagtagtattaatcatgatgcagaaagagactgataattaaaatgtatcaaggttaaactatggataagagtgccatgatggctgccatatctattgccatagtataaaaaatatgtttaatcttaataccaaaggtgacgaattatgagtgtccagcaattggaaataagtg

SEQ ID NO: 898644 - DNA, 628 bp, Homo sapiens
gtaattacaacaaatcaattccattccttcttgtctttcgtaattaagaagatattaatgaaaaacaacctaagaacaagtgcttaggaagggaaatctatttcttattaccctaataatgttaaggttaaaatctggtaattaaaaggaaaaaaagtactgtatcaactttggtagaaacagaacctgtcatatcttgtgtattcctgatacttcagtactgagtaactgtaatgacatattcattctcagaactatgatgatcaagggcaggaagaatatgggggatgtattctaggaagtgaattccctcccactgtccttctgcctgggacttccacctctttgaggttgactctgcaccagttgagaagtatttctctgattccttaggttgaaatgacttttattggagttttttggtttgtttggtttttttttcacatttctgaagtgcttgtttgtgtaccttgtgttactctgttattccactggtcttactctaaatcagaataattttctgtaytgatttcctaaccactaaaaagactgcaattcccataagcacttaaagtagttctgcaagcttgtactttcactccacctatactttgtccccaagtgaaca

SEQ ID NO: 898645 - DNA, 655 bp, Homo sapiens
atctaggtctttacagaaaaagtttaccaatgcccatgatggaaataaggtcaagaattaaagtcaacgtgtagcactcttgagtggaggaaaataaagacacaatgggatactggggacttgagttctaatctacattctgggacaggtttaccctttcatattggataaatcatttcccctatctggatctcagtttccccatctgtaaggtaagaaagttagatgagaccagcggttttcaaactttgttttgttttgttttgttttgtttttagcccaggactttttccccaaaagtagactatggcaaactctatgcgtaaagcagataaagaaagagctattctgataagggatgggtgggaggtgtattaatctgttcttatgctgctaataaagacatacccaagactgggcaatttataaagcaaaagggtttaatagactcagagtttcatatggctggggagacctcacaatcatggctgaaggcgaattaggagcaaagtcacgtcttacatgacagcaggcaagagagcttgtgcaggggaattcccctttatmaaactatcggatctcatgagacttattcactatcatgagaacggcacaggaaaaacccgtccccatgattcaattacctcctgctggg

SEQ ID NO: 898646 - DNA, 655 bp, Homo sapiens
atctaggtctttacagaaaaagtttaccaatgcccatgatggaaataaggtcaagaattaaagtcaacgtgtagcactcttgagtggaggaaaataaagacacaatgggatactggggacttgagttctaatctacattctgggacaggtttaccctttcatattggataaatcatttcccctatctggatctcagtttccccatctgtaaggtaagaaagttagatgagaccagcggttttcaaactttgttttgttttgttttgttttgtttttagcccaggactttttccccaaaagtagactatggcaaactctatgcgtaaagcagataaagaaagagctattctgataagggatgggtgggaggtgtattaatctgttcttatgctgctaataaagacatacccaagactgggcaatttataaagcaaaagggtttaatagactcagagtttcatatggctggggagacctcacaatcatggctgaaggcgaattaggagcaaagtcacgtcttacatgacagcaggcaagagagcttgtgcaggggaattcccctttatcaaactatcggatctcatgagacttattcactrtcatgagaacggcacaggaaaaacccgtccccatgattcaattacctcctgctggg

SEQ ID NO: 898647 - DNA, 535 bp, Homo sapiens
attgcagcagttttaattaccatatgctaattgggccaccttcaggcttgcaggacagtgccatttccctgagatgaaatgacagaagccctcgcttgctgtgctctacttmctccttcattgctctcagaacattcagtaccaggcattagcctgcacagataccccaggcagagaggaaccacaacaatgcctgatgctggatgatgagttccacattccatcagatccagaatgaagttcctgacctgtgtccctggacctgggactttaagggtccctgaatgcttctctgctccccagagtatgcaaatttccttatgtggacatatagacatttgtctgggatgatagctttccttggcttttcaaataagcatctttctttttttttctttgagacagggtctcactgtgtcacctaggctgcagtgcagtggcatgatcatggctcactgaagcctcaaactcctgggctcaagtgatcctcccacctcagcctcccaagtagctgggactacaggtgcacaccacc

SEQ ID NO: 898648 - DNA, 608 bp, Homo sapiens
tcacccacgctggagtgcaatggcacgattgcaacctctgtctcccaggttcaagcgattctcctgcctcagccttccaagtagctgagattatgggctaatttttgtattttttgtattttcagtagagacagggttttaccatgttagtcaggctgatctccaactcctgaccttaggtgatccacccgcctcggcctcccaaagtgctgtgattacaggtgtgaaccaccatgcctggcccctttttcccttttcaaaacagctgcagttcctaaaaatctcacttctactttgggttaaagcctgggcacaccctgggactggtttttactgtgggcataatctaggcaagttatttaatttctctagatcccaatttccacatgtaaagtgggagttataacagctaccttgattaaattataaaatggcatgaaatagaataaatacagacctggcactcaataatcttcaataaatataatgtcattattcttagtcccctgcctctctctccactttcaaaaattcaattgacatctgggasaggtaaaacccaggcttcatttttttgtttaataaatgtcttattgccagataagtgc

SEQ ID NO: 898649 - DNA, 671 bp, Homo sapiens
tgaggaagcagccgccagcagacaccaaatccaccagtgccttgatcttgaatttccagcctccataactgtgagaggtacattaagygactcattcaatggtattttattacagcagctcaaatggactaagacaccaggctttgtcttcttctctccctctcccttcctctccttctccatctcagtctctctatatctccttctctctctccctctccctctctcctccttccctaccctccttctttctcctttcttcttcccctttctccatgtctcctcactacctcatatggtcccagtaactctctactgtatcattgcagctttgtgccccaacagccctggagcttcatgtcccaggacacattttttcccccagggaatgctttgagtcaacctgatctggatcatgtgctctcaacttggactaatgactgacaagagggacaaaacattaggattgacccaatttgggtcgtatactcaacactccacaaaacaagaagagacagtgtttttaattagcaccctacctccccgccaaaaaatcacatgtatgctcttcaaaaaaaaaaaataagtaaaagaggcactgtcctcgttgaccaaacaaaagcactcactcccatgattaatggtgaagctatttcttttcaatcctgggc

SEQ ID NO: 898650 - DNA, 671 bp, Homo sapiens
tgaggaagcagccgccagcagacaccaaatccaccagtgccttgatcttgaatttccagcctccataactgtgagaggtacattaagtgactcattcaatggtattttattacagcagctcaaatggactaagacaccaggctttgtcttcttctctccctctcccttcctctccttctccatctcagtctctctatatctccttctctctctccctctccctctctcctccttccctaccctccttctttctcctttcttcttcccctttctccatgtctcctcactacctcatatggtcccagtaactctctactgtatcattgcagctttgtgccccaacagccctggagcttcatgtcccaggacacattttttcccccagggaatgctttgagtcaacctgatctggatcatgtgctctcaacttggactaatgactgacaagagggacaaaacattaggattgacccaatttgggtcgtatactcaacactccacaaaacaagaagagacagtgtttttaattagcaccctacctccccgccaaaaaatcacatgtatgctcttcaaaaaaaaaaaataagtaaaagaggcactgtcctsgttgaccaaacaaaagcactcactcccatgattaatggtgaagctatttcttttcaatcctgggc

SEQ ID NO: 898651 - DNA, 567 bp, Homo sapiens
ttcttatttatcatttttggctctttttattgtacctgtggattcaagttaccatcagctgatatttccttattccartgcagctttgctcccacctactggttttgtgctattattgtaaaataaatacatttctatatgtgtagacccaacaatacaattttaaacacatacacacacacacacacacacacacacacacagagcccacaattgcttttaaaattagttaagtaaagaaagaagaagaaatatgcatttacactattgtttttataattacaaaattatctacattggtgctctttaaattttgtttgtgggtttaagttactgtctaggccatttgctttcagcctaaagaatttattttgctattttttgtgaggtggcatgccagcaaggaattctcttagtttttgtttatctaagaatggttttattttactttcatttttaaaaaaacaatattgctggatataagattcttgcttgacagttttttttctttcagcactttaaatatgttatctcagtgcctctggcctccattatttctgatgaaaa

SEQ ID NO: 898652 - DNA, 654 bp, Homo sapiens
cctctcaaatccatcatccagcttcaactactcrtggctactcttattttatccatactacacaaactcttccacaccccttctactggattattttgaggtaatggcaaacataatatcatttaaaaagtaaatacactagcatctatctataaaagataaggaattctttttaagcataatcataataccctatcaaacctaaagaattaacaataatttcttaataccatcaaatatccagtgttctaattttccaattgtcttataaatatttctattctctttacttaaattaggatcctaatgagattcataccttagaattagctgatatgcttcttgagtttcttttcatctatagatataacatatctctatctcttttgatatttcctggctatgaattctattttgttatatattaggatggctacatttttgtaattaaattttttaaagattacaaaaacaatatatgagtaaatgttcataaaacattaaaacacatatggaagtgtgttttttgtttatataaatagaattctacaatgtttattattctgtgacttgcctttatcacttaacagcaaatactgaaacatatcctttttaaaatatcacagctttattgatatacaattcacatactat

SEQ ID NO: 898653 - DNA, 630 bp, Homo sapiens
ttgcagcttcagcagaggtagagctgcctttactataaaggaaatgagtcatggagtggcagttctgaaccatggcccctctcacttttttgctggtcctcccattgagatgtggggtctatgtcttcttcctttccatttgggtgcaatggtgaccactgaccaatagagtatggcagaaatagtcatgggatttctgaagttaggtcataaaaggcatgcggcttccttcttgtgtgtgagaacacccatcttgaagccctgagcctccatgcaagagtctgattacttgagaccactatgctgtgaggaagccccagccccgtggggagaccacacataggtgcttggtctacagttctagttgagcacagaccagtccagatgccagacatgtaagggaaaaagctgccagacaattgctgcctccagtattagcatccaagatgctatcagcttccgagtcctcccagctgaagccccagacatcatggatcagaragaagccatctccagggtgtcctgtcggaatccttgtcccattgagttcatgagcataataaaatagttgttgttttgtgccactgagttgaggtggcttgttatgtagcaatggataactgtaacgtg

SEQ ID NO: 898654 - DNA, 630 bp, Homo sapiens
ttgcagcttcagcagaggtagagctgcctttactataaaggaaatgagtcatggagtggcagttctgaaccatggcccctctcacttttttgctggtcctcccattgagatgtggggtctatgtcttcttcctttccatttgggtgcaatggtgaccactgaccaatagagtatggcagaaatagtcatgggatttctgaagttaggtcataaaaggcatgcggcttccttcttgtgtgtgagaacacccatcttgaagccctgagcctccatgcaagagtctgattacttgagaccactatgctgtgaggaagccccagccccgtggggagaccacacataggtgcttggtctacagttctagttgagcacagaccagtccagatgccagacatgtaagggaaaaagctgccagacaattgctgcctccagtattagcatccaagatgctatcagcttccgagtcctcccagctgaagccccagacatcatggatcagagagaagccatctccagggtgtcctgtcggaatccttgtcccrttgagttcatgagcataataaaatagttgttgttttgtgccactgagttgaggtggcttgttatgtagcaatggataactgtaacgtg

SEQ ID NO: 898655 - DNA, 608 bp, Homo sapiens
gccttgtaagtagcctggggtgattatggtggtgtaattttcatcacaaccacagataacccaggtaactgtgcaggtacaatgacgttcagcttaagtggctttgttccaaacaagggsctctattgtaaaaacaaagcaggtgttaaaacatagagatattgaagataggggtcattttacatactaacatgcactgaaaagtaaatctgagcttccccacattattgccaggaattacggtatacttaagatgaatccattaagtacacaactggacaaatgatgaaatttcatgttagcaaaattcctgacatatttcacacctcttactctattaaattacacttttttaacaaagaaaagctttcctactgctacacattttcaattttttctcctatgtatttcatattaaaatttcaaaataatttgatcagagatctagtgcacaaaggtgcctaagtgaacaataatcaccaaaaacacttgcaatggctgcagtagtgggattcccatcagtgatgtcaacagtgatgccaagaagacaaaagaagagggaaggagctaataacaaaatccatagaaaacaggcttcattaatttct

SEQ ID NO: 898656 - DNA, 626 bp, Homo sapiens
cagcctgagagccgaggacacggctgtgtattactgtgtgaaacacagagtgaggggaagtcagtgagagcccaggcacaaacctccctgaaggggtcccagaracgactagggggcgccaggacactgtgcacggggctgtctccagggcaggtgcaggtgctgcggagggctggctttctgccatggcctggggcagcctcatcgtcaaatttccccaaggaacttctacagatttacaattctatactaacatttgatgtctctaaatggaaaacggttatttttttgttcctttgtttttgtaacaagaggaaacaccctcacctccacagaagccagggtgtcactttgggggcagaaataatcctttcatggtcaggatgagagtcctgaggaatctcagggaaacctggagagtgttttccaattagactcagagcagagacctccatgggaatctctgattagaacaggccttgagctctgatgggagccaagagagaggctcacccagggtcagggtccttaaaacctgatggttttcacagctatcccctctcaacttgtaaaactgtgcccatctgactcagactgattcagctgaccctctttctgctgatcca

SEQ ID NO: 898657 - DNA, 494 bp, Homo sapiens
aaatagtggaatcgagtttgaatctagtaagtacatataaataaatgtcttaaaactcctcttatgttagctaattaagaaatattattgtaatagacattagaaaatattttrataaattgagtgcatttcacacgctaaggaaatgatcttacttgatagttgaattagatacatatatacctataggtagtttaaaatatttctaataaccttatatacttttaaaaagcattgatatatgtttgcactatctggtctatagagtacacataccaaacatgattatagctcttctgctataaacttcaaatgtctaattaatacaaaaatctagaatgagaagagttctttgcaattttttttttttaccaaatagaatataggaaagatagctgcaaatatacctgacacacttatctgtgagtatggtggtagcctttttattttattttattttgagagtgggtctcactttgtcacccaagatggag

SEQ ID NO: 898658 - DNA, 534 bp, Homo sapiens
tgcaacctaacatatttgtatgttagactctgggaattaggacatgaaaatttttgggaggccattctttggcctacagcagacataatctgtttacctgcagattaaagcgttctttatttttctgtctccctgtcttaatttttttaaaataataatatttgtagtaaagagaaagaaagaaaagaaaacaaagaaagaaaaagaaggaaggaaagaaggaaggaactaaagaaagaagaaagaaaaggaggaaatgagggaaggaagggagggagggaggaagggagaaaggcaggaggggagaaaaaagaaagcatgaacacaagaaagaaagaaggaaagaaagaaaaagaaagagagagagaaagaaagaagggaggaaggaaaggaggaagagagaatggtaaaagggargaaggcacagaaacaaagaaaataaagaggcgaaggaaggaaggaaaaagaggaaagggagggaggaaggaagaaaaggagggcgggaggaagggagaaaaaaggaaagaaagcaag

SEQ ID NO: 898659 - DNA, 534 bp, Homo sapiens
tgcaacctaacatatttgtatgttagactctgggaattaggacatgaaaatttttgggaggccattctttggcctacagcagacataatctgtttacctgcagattaaagcgttctttatttttctgtctccctgtcttaatttttttaaaataataatatttgtagtaaagagaaagaaagaaaagaaaacaaagaaagaaaaagaaggaaggaaagaaggaaggaactaaagaaagaagaaagaaaaggaggaaatgagggaaggaagggagggagggaggaagggagaaaggcaggaggggagaaaaaagaaagcatgaacacaagaaagaaagaaggaaagaaagaaaaagaaagagagagagaaagaaagaagggaggaaggaaaggaggaagagagaatggtaaaagggaagaaggcacagaaacaaagaaaataaagaggcgaaggaaggaaggaaaaagaggaaaggragggaggaaggaagaaaaggagggcgggaggaagggagaaaaaaggaaagaaagcaag

SEQ ID NO: 898660 - DNA, 400 bp, Homo sapiens
ctcaccatggccatgtctaatctgatgagttcatttttgagtttttaatttaaaatactatatataaactayttttcaaatttactacatcaattttttagtctcctaaaaatatattcatttttttttaattttttgaaagcaaatgtgctttataatctaacagtgatatttctactaatgaacctttgtggatctgtttgtactctttttctgctttcctttcaaatggtggaatatcatttccttgcgtacttagatgcctttgaatgacaaagatttatttttctctgaaaattattattgtgcacttttgcatattagaagaaaatttgccaaagagaatttgaattttttgtgagtctactaaaggcaccaccattctgggaccacattatat

SEQ ID NO: 898661 - DNA, 617 bp, Homo sapiens
cacctacgatgcaggcctggctcwttgtactttgcaattcatttatcctgaatgacagcttaaaataatcagcacatcagataggataatagagggcccataataatcaaaaattcaatttcctaatgtagagtacattttatattattgggcatattcaaaaccacttcaaaaatttttaaacaaaagcattataagaattatagctgcagctataactcagttgcttatacgtatgcatgtttataccaacgactctaacattcctacactatatttacagagagcaaaaaagcaacatatgcatacatgtacaatatgtgtttcacttaatgtccaactggctaatattaaccagcattcattaacttagaaccttgagggaagagagacatttctcatgcttcttggtactactcttctcctcccatctgtaaggtctctagtataatgtacaaagcaggcgattaataaatatttttatttgagttgacaatggctgggcaaacatttctttgtcaatccaatagctttttatttggtgctaagctttctttcgtgttaactgggttagagttatactgtgactatactaatttatgcccccaatagtagat

SEQ ID NO: 898662 - DNA, 508 bp, Homo sapiens
ttcaaaagaaataactatgactttctcagtttgtaaacatttgattcaattcagtgacttctgttcrtatttaacatctgttcaaatagatttttcaatgacaatggataaaaatgagcaaaaatgtatgtgagcctaacataaacaatttattgttataagaaaaacagatatttcacttcccatttaatttcatagtttattcagtgactatacaatattctatagtcactgtgttataacatggaagtgttgtaagaagcacttccaccaaatttaagtcaaacagattctgcaaagttaacatctccttttccccatttccatctacctatatttatgttagggacactttggaaataatttgtagagtaaggaaacttatggaaaactatggacattttataatcacaagtgaccaaccctgatattagaaaattctcagacacaacaaaatagattgccagattttgctaataaaaatacagagcaactagttaaacttggg

SEQ ID NO: 898663 - DNA, 613 bp, Homo sapiens
taagcctcatggttgtcctggatttctgcctggaggtacttttctgctttggcttggacaggtggaccccaaaaggagtggaaacrgttaaggaggccaagattggagctcctggttactgagggaggttggaattttgaggaaagctacccaaactatattgatggaggacagacaaaagtctgcagaaagatccaacgtgggatattgggattggctgaatatgcacaaaatgagactttgggaaacttagcagagattgtctgctacaggggtgagaactgaataatgataccagagatgaagtagggctaaaatgttgggattctggctcagctagattggaaatacattgctgagaacctcaggcattctgctgagacccccaaaaagtcattctaatgagtaaggaccacaccttacaataatcaaatctaaaatggactcacctaacacaaaataaaactttcccaacttcaccatgcctgcaaataagtggcaaagttgtattctgaaccaaaatatttctgcccccaaggctggtgtccttgagcactctatttccattctagagtgggtccggccttctagcagatcaggaaactccaaaact

SEQ ID NO: 898664 - DNA, 674 bp, Homo sapiens
ttgtaggaaaagaaatagagggcctatgtttrtgtaccttgtttcctctccgaacagcatacagatataccaatgattatcagtttctcatacaaggcatttgatatataacttttctgtatggtcaagaaataacatggggacactgacaccaaaggaagttaagagtttgcagtgtgtcatatgggtagatagaaacgcagcttatacaaggactttgaatataggattactaattcatattcttcctgcggtgtccctagaatggagagatttgagtttctctgtgcagtaacatgttttaaaaagtgttttcaactgtatacaatgaattttcaattctagcctatcatgacactttaggttaggtattctaccattcctgtgccatgctcactttggggttatgtttcttccatttccacaatagcgatggtcagctttaaagaataagcaagccactaaatggcactacttatgccaagatagccttttactatttagtctcctttatcagtgcacagacttaaaaaatcagaattctatttaagatagcagcttgacctaggcctaattcacaaagctctcgtactggtttttgagctgcaagtccctataaagatcacaagtccttcaacttagaccaatgtagagtctgaaggtgtacatgggaa

SEQ ID NO: 898665 - DNA, 662 bp, Homo sapiens
ctgtttgcagagcatcttccatatttccctttattggcagagcccttatggcartggaatcctccccactgttctactttctctgctgcccagagacagaccctaacatgtaggcttctatttctcatgtagatccccatactcctctgggcacttgggtattggctgaggatatatagaagtcctcactgaagcatttcagcacattgatagctggataaaattgcagagcagagctgcccttgcccaagagtaatgtcaccggtgccctcaatgccaaccctcaggccctacccctacttcagtctgtttcctctgctgtggcttcttggactagccttaaatttcctcaagcaaacttggggaatgagaagttctgagttcagaatccttcctctggccacagagtatatctgactcattttcttaatgtttaccaactacttagaccactaaaaccaccagtttttaagtcttattacaacaaataataatatgaaatcaccatattatgcatgatattttcacatgccaatctgtcactgaatcatttcaagtcagtattctagagaaaacaatagtttgaatagttctttaaggtttgcagcaatggaactaatgcataaatagcatttcatcgaatgtccattcaaccatgaact

SEQ ID NO: 898666 - DNA, 632 bp, Homo sapiens
ggatatatagaagtcctcactgaagcatttcagcacattgatagctggataaaattkcagagcagagctgcccttgcccaagagtaatgtcaccggtgccctcaatgccaaccctcaggccctacccctacttcagtctgtttcctctgctgtggcttcttggactagccttaaatttcctcaagcaaacttggggaatgagaagttctgagttcagaatccttcctctggccacagagtatatctgactcattttcttaatgtttaccaactacttagaccactaaaaccaccagtttttaagtcttattacaacaaataataatatgaaatcaccatattatgcatgatattttcacatgccaatctgtcactgaatcatttcaagtcagtattctagagaaaacaatagtttgaatagttctttaaggtttgcagcaatggaactaatgcataaatagcatttcatcgaatgtccattcaaccatgaacttcatcttagtacaggattttacttccaatgtatcacactgggtaccagtgtgtcacctaaaaagatacattgctgtcctgaccccagtacctgtgaatgtgaccttgtttggaaatagggcctttgcagacataagcaa

SEQ ID NO: 898667 - DNA, 544 bp, Homo sapiens
ataaggacaccctcaatataaccagtttttaaaatgttataacaatgtcaactttaacactgtacrtcttgtctttaaatcttaaggacctatttttcaatcaacaaatacttaacactgcaggcattctctagaaagctctatcacaaaatagatccctgcagagctcttgaaataggccctgttaagaccactagtattagaaaagaagtctatagaacattccagcgattcattgctctttgtttttgaagttctagccttaaactaagcccaaccttcaaaaaaccacatgatttgtccccaggaactctaagtctccattgaaacaatttactttcattgtgttgagccctcagctgctgtgaagtttgtctgtaaagaataattgtgtgaaaaatgtgtcaacatcctctctaaaagaaaatagatcatgttgcttatactgttcattatggttttacagtcccagaggcctgaattatcaaccagattcacgtaagagtcttcctcagcctcaaacttaatgattcacaaagaattc

SEQ ID NO: 898668 - DNA, 618 bp, Homo sapiens
aagtattcactaatatatttaatgaaaggaattaatattttttgatagaaaatgtatcatattwatatctttactgagttaaagaacatgaatcaagcacatgatctttgaaattgtcaaatttcaaatttgtgaaggcattatttaaatgataaatgagacaatttttaaaaataaattatttaaacacattttcaatgttctcagttccagccaaattgaaaatgaaagtaaaattttattgccttcttgaaattctaaaacacatcttgtattagttttcaaattatcttcagttgagtgtaggtggatgtatagttacacttagaagtcaatttaaacaagttatatatttgaggtcataatgtttatagaaagaatggagaaaaaatatttctatgtgaaaccatcaaatgaaaaattaagaatcaatttgaagggatggaaaaaaatctcctactaatctgtgactcctttaacctgccagagaatccttatttttaacacctggtataatgcagaaacaaatattgatgactggaaaaccgtaagactgtctgatttttatcttctcaaattctaatcataaaagaggctacataaaattagcacctatag

SEQ ID NO: 898669 - DNA, 656 bp, Homo sapiens
tgcattgctccatagagggagcccacactgaatcctacaagcccccaagtcctaagcagctgtgttgacattccctgcctgcagctgatactaggctgaggcagaagccactggcagcaaccttgctcccaccagcagaggggtggtcatgcattttcacatgccctgaagacaaatttcactaccacctctgcaggctgaagcacaagtgaagtgtatgacccccagccctctgtctgcaggttctcccactgaccgcatacatgtcctccagcagggctgcagcacaggtgctgctgcctcaacccaagcattccactggcaacctagggaccagcccacccctacttaccatagccgggacctacatgcaccatcaaagggcttaaggacaagtccaccaggcctagctctgctccccttgagtacccaagcacgctattcaggggtctgtagattacccaccccagttcactatcattggcaccagaacacttctcccagagtctgaggtcattcccacaaaaactgctgctaccatcacagctggcacccacccacacatgctacctgcagactygaattctgtgctgcctaacccatcacaaccaccatcaacaccaatgcagaccacttgtgtcccagagggttgtacc

SEQ ID NO: 898670 - DNA, 639 bp, Homo sapiens
ctaataaagacattggctagaaaacatgtatttagaaggacagcaaaaaaycgtgtatatgaattgcttttggaataaagtgatacaggtttaagcccctgttttataatatggtaacttttcttctactgggtctaaacaacattatttccttgtaaaataataataatcatttcatatttattgggcatttactatgtcagatattgtgcaaagttttaatacacattatgtcatttaatctttacaacagtcctatgagctatgcattactcatacctcactcattactcaacctcactttgaaataagaaaactgaggcccagagagataatgaaacttgactagatttagggtttcaacccacgtttatctgaatccagcaccaaacctcaccttgcaatgtttttatgaggatcgaataagatggtgtatgtaaggacatagcatgggttataaagtgctgtgtaaatgtaagctactgtcctaaccaagactttaaattaatgaatacaggaagtgtaggcattgtgttgagttggagatgcagaagattagagggcaggaattaaacctacaggcttcttattatggagaataaggattcaggatcccaagaggaacaaaatattgtacaa

SEQ ID NO: 898671 - DNA, 662 bp, Homo sapiens
gccaaacagatgagccacacccctgttgcatgtcctgcaaggggcgtcagggaactctcctgtttcacatatgcatatacacacattaataacttttttcctaatcccttgggagcatgctctttctcctttggaagatggttgttgtcttcaaatgcaagaacagaatagagtggagtaagagacaattaatttgtttacatcctggtagttttcttcgccaatagataaacaatggcaggaatataagagagtctaacatttacatttagtcattaacttctaattcttatgtacaatatattagccaatattcatttgttagaaacatcattgttaattgacaaataaaagcacgtgaagctagtttgtgttagacagtttatgataagttgttcttttcaaaatatagaaattgtaacttgacattagaaaacatattagaaataaagtttacccttttcactttgaatgcggagtttgacttttttccatcaatgatttttatatctgaggaaatgagtaaactcagaattactctgatttcaagcaagatgaatcctgataaaggatagaaagatcaaatattctyggagtttaatttgtatataatagcaacctcagtgaatgtagtcagtttattaaatatgctgatggtgaca

SEQ ID NO: 898672 - DNA, 586 bp, Homo sapiens
attagaacactttcctccttactctatgaaggatattgtcttgcaggttgatctctttaatggatattggaccagactccaaaataccagctgaatgttacaggcttaccaagagtcagggtggtagatgtctcatgatcaatatctctgaactataaggcaaagttacagtgcctcctggttttaacagaggatgttttcagaggctgaaattggaagggatttgtgaattgtggcaagcttcaatttaatcattttgtctgctcagaaaatacccccatttgagagagaaagaacagttagctgccatagcttctaccgtgatcaagtgaatgtcatagtatcaatcaaatctaccaacattctgtaagcatgcttgactgtcactttaagttattacaggacacacagagcccccccattaccaagaaaggaatccaggtactcatgatacataccatttggatttttatcatccattgcaagtgaccacagaaaatactctcactttgagctaagtaattattctcaccaccacactgcttgttagtggcaaagtggagyctgaagccaagatctgctacct

SEQ ID NO: 898673 - DNA, 691 bp, Homo sapiens
cttattttggaagttgcctyttatgatctggacatttttggtttcctactgcctatcctgtgtcctttgcctcctgtagggtccaatctttgacagatatgacttaatggatggtgtgattttgttgtgtccccacccaaatctcaccttgaattgtaataatccctacttgtcaagggtggagccaggtgaagataactgaatcatgtaggtggtttcccccatactcttcttgtggtaatgaataagtgtcacaagatctaatggttttataaatgggagttcccctgcacaagctctcttgcttgccatcatgtaagacgtgactttgctcctcattcaccttccatcatgattgtgaggcctccccatccatgtggaactgtgagtgcattaaacctatttcctttttaaattacccagtcttaggtgtgcctttattggcagtgtgagaacaggctaacacaatggataatgtcttttccatctaataggggaattttgctattccagtgtaactctgccctgatggagtaagatatttcgtctttctgtcctaatagactgtgctttatttagctggctcaacctcttacccgaagcaagagtctcttctagattacttgagagatatcaaagtgttaagaatgcaggatctgcgattagaccacctgagttcatatctcaggtc

SEQ ID NO: 898674 - DNA, 625 bp, Homo sapiens
gaaatcataaatagttttgaaacttcttatttmatttttggtatttatttcacaaatggtacgaagtcttctggaaactatatttttagatgttattattcattataattgctagaaacagcatctttcccagaaaacaaagttcagcttttatctgtatgcagaaattattactacacaatacttttcctcttattaatttcctctttcaaatggctagtgctaacttacacaggtactttgaaaagaaaaaacaaatgattctgttcttatgaatatatagctaaaaagcttctctgaattcctttcctggcacatttaacaatactataatgtacagagagtagttagcggggtgtacacacatgactgtaaaaccctgaaatacatgtgataaatttctaaacatgagccataactcttacttagagtcagtaatgtctcatggccatattcaactattcactgctttatgcaggtgataggtgttctctattgtaaacttacagaaacctgttgtctctaaatttgaaaatactgatgccaaataaggaaacaggaacttagctttattaaatgcgatgcaagtccatacaatgaaataaagtaggacatagccatgagt

SEQ ID NO: 898675 - DNA, 604 bp, Homo sapiens
cattaaaacattataatagtacttagaaatcaatactaatggaacagaatttacagttccttaacatataccagaatatcagaactcaaaataagataaggtacagatcaccagagaagaattcagtgtgtcatattttccagaaagaaccattaataaattgttagatcaattttgtgaaccacaggcagtttttttttatttgaaacggaatgggatggaaaggaaaggaatataatataatagaaaatattagaattcatcacataatactgaggataaaaattattttagacactttcatttcagttataggtatgtatataagtgttcacgtgtgtcagcgtgttctagattgtgatgtaaaatttattttttctcttactgtgggttgtgctccaaaaagtttgaatacctctccaataaataatttggggtaattaattaattgaaaaagaatcatctatttatatccttgtyttctgctaaataatgaaacaaaatatagatgagtattttttaagattactataataaatttaaatggatatatgtatataagatcgctaggaaaatactttagaagcataaaagggaagaaacc

SEQ ID NO: 898676 - DNA, 520 bp, Homo sapiens
caacaggtatatgaagaacacacaacatcattaatcatcggggaaatgcaaatcaaaactgagatatcatcttgccccatttagaatagctattattaaaaagacaaaaaataacagatgttgttgagagtattagtctgttttcatgctgctgtaaagacatactcaagactaggcaatttacaaaagaaagagatttattggacttaaagttctacatggctggggaggcctcacaatcatggccgaaggcaaggaggaacaggtcacatcttatgtggatggcagcaggcaaaaagagagcctgcgcaaagaaactcccttttctaaaatcatcagctcccatgagacttattcaccatcatgagaacacaacagaaaagacctgcccccatgattcaaccacttcccactggttccatcccacaacatgtgggaattcaagagatttgggcagggacagagccaaaccacataattctgccccagygcctcccaaatctcatgtcctcacatttca

SEQ ID NO: 898677 - DNA, 598 bp, Homo sapiens
atcaattaagaaagaaacttgaggactggtggatatcaaaggaagacgatttattcttcttcaaagattgttttacatgttgaattgtctcacaaattagaagcagtagattcaattaagtagaagtctttagatagaagttgaaatgatgtattctcctggcagtgagtgtaatttcaagtggtcacagagtttcagttctaaatgtttctacttgctttattttccctataaaaatacataaatatatagattcactgtgcataaatttaattgacataaatttactcagggagaaatcagcgaagtaatttctctgtctggttcacataataatttgcatagttaaccagtagtgacctcttccttttaacaaataagttgtagttcataacctgaatttattatttgtagggaatgtgagtttataattattttccaggacacgtttcaaagcaacagcatttcaaagcaacggtaygaatcaagtgtttttaaacaatatacgtgcagagcagaaataacaaatacatggttgtgtgccatcaaccatgctcttgagaaaggggaatgaataccatttgcctgaacaatctgg

SEQ ID NO: 898678 - DNA, 488 bp, Homo sapiens
attcaatgccacttttgccttaccagctaatcagtcagtagactaagggtggtgcatttttgatcttcccccttaaagaaggtcagtggctgaawatgagatccagagtgattacattagaaggattttcatgtgtactccatcagggagattaaatgtccaggtgcctcccacgtttccttttaggacttgttcttagtcttcatacttcaagggctcaagagcagcactgacacgcaacatattcattgtccatccccaattacgttctcaaaaggtaactgttacatattgtattagagttctccagctaaacagaaccagtaggatggagagaaagggggctcgagaggaggagggagatgggggagagagagaaggaagggaagggggaaagggaagctggtaaatctaaaatttgtagggcagcctggcaggctggagacccagagaagagttgatgttgcagctgaagtgggaaggaagat

SEQ ID NO: 898679 - DNA, 638 bp, Homo sapiens
attttgtgttgggctttttatttatctgataggactaacattttgttttgcttactttctttttttagattaattacttttatctttttcctttctttttccatctactagatttgaagctatgtmctctgtttctattcttgtattgcttttcctagaaattccacatgcatatttcacatatcaaagtctaaagttaaccaacatcttcatcttcagaccagaacattagaatatcttacctccttttactcactttggatttatacattaccattgttttgcattttaattctttttaaaacatcatattatgattattaatattatttgggcaatgttcatttatttttacatacatatttatcaatttgtttgtcccttaatttttcaggttttccactgggaatcattttccttctgcctaaagaatccttttttttatataacttatttagagttttctagagttgacctcactctttttcatcagtaaatgcctatttcaccctcataccaggaaatacaattctaggtgggcaattactttcttccaaaacatgaaagatactccttcactgtcctttagtttccactgattttattaagaagccagttgtacatctaaccgctccttc

SEQ ID NO: 898680 - DNA, 542 bp, Homo sapiens
tagataccattgcctctgttttcaccttaagtgatgttacttagcacaattcgtttctttagaatgccccctagtttggtggaaggaattttcttgctttattaatataggatattttctcatgaagcaaactggcatactctttcagtgaagtgaatagacaaattaggtctctaaaattttaaaggagtcactgccccaattatcttaggaacaataataatcacttatataaaattaaaataagaaaattaagccaggtatggtggctcatatctgcaatcccagcactttaggaggctgaggagggaggatcaattgaggttaggagttggataccagcctggcaatatagtgaaacccctgtctctacaaatttttaagtattagctaattttttaaagttggccaggcatgataatgcatgactgtaatctcagctacttgggagactgaggcaggctgcagtgaactatgattgcgccactgccctccagcctgrgtgacagagtgagactcccaactcaaaaaaaaaaaaaaga

SEQ ID NO: 898681 - DNA, 673 bp, Homo sapiens
gattacatatacaaaagtggtcccatgagwttataatagatatttttacatacttttctacgtttaattatgtttagatacataacctcttaccactgtgttcttattgcctgcagtattcagtacagtaatgtagtacacagatttgtagcctgggagaaagaggctataccatataacctaaacgtggtaggctgtacaatctaggtgtttgtaatactctctgtgatgtttgcaaaatggtaaaattgcctacgaatacatctgttaaaacgtatccctatcattcagtgatgtgtgactgtactaaaatgctcaatgtaagtttcaatgccctccataaaattgttgtactgtgaaatacaaatctctcacccatggcctgaatatgtttgcaaactaagcagatcatgggaaggagaatgtgctggcaccgctgggatgattttctcactctacatgaataatatctacagacttcgtgaatatgagccacttgcatagagttaaagtaggcatctctttgctgggaaaattatcaaatgggagtatgaagtgtttttacaagatactcgtttgtttgtagctggtaggcctacagtggctcttggtaatggttgaggttgctaagatttggtggaagaaggcaaaatgaaatggccacttatatggt

SEQ ID NO: 898682 - DNA, 594 bp, Homo sapiens
aggggctttctgtggtggccgtctggggtctgcaagggcatgtgacaataaccaggtggagagggacctccagaagtaaactgctgctgtccacctggaaaatggactctcaggcttgagratctcaccccttcaggctctaggcgggactcttacccctcccacggataagcacttagtcccaggcattctgtgggtttgctgccaatgataaccatggcagggctctccactcttgtggttctcatgcctcagcagacattaggatcactgagagagcttattgaatgcagattcccaggaccccactcagaaattctgctttaggagctctggggcagggctttatactatattagaagcaagttcccaggcggccgctgcacatcggccagcgcggcacacactgagctgagatgctccagcctgtcgcatgtggggctgtgcagcctgtgcaggggctgggcgggcagctctctgatggtgcacttctggtacagctgggaccagcctcatcacttagcaagattttggctatcttggctcgtctcttcttttctcctactttttgttgatttgtgtttgtttgatttt

SEQ ID NO: 898683 - DNA, 581 bp, Homo sapiens
ccatcaatgaaacgagggcttggatcccctgttcttgaagccctctccttgtactcaatattctacagccctgtgatggccagaaaaacccagccctttgggagattgtcagaagatacttaatgtacttgtgagatgaaccccagaaatttattgttagctgggctctgtccaggactgtgtctggtttgtaacaaggagtgtgtgttttttgttttttttttcccttgggagagctaccagtgctttgcctgccaaggcggggaggtggtcttggtggggtttctactagaaggaaatggcaggaactctgacctgcttgctgtcaagtaagcagacagagaggctcggaatcccctcccgcgtcacgtttccttgaggtgcctgcttgtttaatctgccgtttgccttgcttcccccaacgcccttttatagctccttttgttcaaggatcttgccacctcctttttctgtccctggcccgcctccaggttaaatatccaagaaggacagcagtagcctgaagatgctgatgacatggggracgttcatggctggccctgaagaaaggctctcatagg

SEQ ID NO: 898684 - DNA, 614 bp, Homo sapiens
aaaactcttgcctgtaaatctctaattttgatcattcatctttgtttattccttagcacaggtttctagaagtgggtcaaataatctgaaaattgttaaggttttgggtcttaactttaatgttcctgctaaagcttatataatagtgttccaaattgtgttctagaaatgtatcaatttatatttttaccagaagagtgctcatcttgtcctacaatactagtattatcattaaagtaaaaacaaaacaaaaattatcatcaaagcaaaaaacaaaaacaaaaaaactcatttgataggtgaaatttgctcatttggtttgtgaaatacagtatttcattgctttaattttaacctgtttattagatattcttatttcctcttttgtggcttttctgtgtcttttggccatttgcctgttgaggtcttaatgctttttatatcaatttgcatgacattttgtatattaagaatattaatttgtcatacatgtggcaaatattttccccagtttgcatcttgacttttaaaaagttcttttaaaactatggtataatttacattcaataaaatgtactcattcaaartatatagttctatgaattttaacaaat

SEQ ID NO: 898685 - DNA, 577 bp, Homo sapiens
cagtcagtctgggcaacagagtgagaccctgtctcaaaaaaaaaaaaaaaagaaaagaaaaaagggtcattttgggtcagccaaggcagaattgtgaaaaggtgagtttgtatttatacttscatttgactttgcattcttcatagttgttttttgacagttccaaagtgcccagtgattctaaaactggggttcccctgcttcctagggagtgcatgatgcccagggcagacatggcactctttttctagcttgtgcattttaagattatttaggaaatcaattaaaccgttaaataatttaacagtatttgtatattaaaacacatagatatattacagagaggaacataaaatgcatctaacttttaaagtgaaaacatgattctttaaagacatttaggttttggtgggccacacccacccttcatttcccctaggagtacaagctcacagttatttcctctttggagtaggttgacgggttgtgagaaagttttagaaatacttaaactctctctgagataccagatatctggagccttctttcttcctcaggccactttctgaagtaacaa

SEQ ID NO: 898686 - DNA, 664 bp, Homo sapiens
ttcatcagtggactcaacacaactaagaatcagtgaactcaaacagattaatagaaattttacaagatgaagtacaaagggacagaaaagtgagataaaaacaatactaggcattcaagagttttgagataacatcaagcagtctattgtatatctacttggaaccccagaagaagagagggagaaaatgtcagaataaattttaaagaaaataagggttgagaatttccccaaagcaatgacaaataacaaacaatggaaaaatgaaactcaaagatcactaagcagaagaaaaactaaaacacacatgagcatgcacatgggcaaacacgtatacacaccctaatatgtcatgctcaacttgctgaacacaacaaagagaaaactctaaaggtagagaagaaaataaatattatgggaaaagggaaaaggataagaattgctatatagttcttatcagatactagcatacatcattttattgtgctttgccttactaaactttgcagaaactgctttttttcacgaattaagggtttgtgacaaccctgggttgaacaagtctacaggtagttttttttttttttaacagcatgtgctcacttygtgtctttgtgtcatgttttggtaactctcataatatttaacatttttatattattat

SEQ ID NO: 898687 - DNA, 733 bp, Homo sapiens
ggtggatcatttgtggtcaggagtttgagatcagcctggccaacatggtgaaacckcatctctactaaaaatacaaaaattagctgggcgtggtggtgcactcctgcaatcccagctacttcggaaggctgaagcaggagaattgctggaacccgggaggtggaggtggcagtgagccaagatcacgccattgcactccagcctgggcaacagagcaagactcagtctcaaaaaaaaaaaaaaaaaaaaaaaagaatatattttaaggatcctcccttcctggggccaaattgctttccaaataacactttacacttctatcaggaaatgtgactctgaccatctcatagaacgcttgttagcactgagcatcatcacttaaaaataggcttaaaatagaatccgattattatttttgtttcatttatttgattattagtagggttaaactttttcattaaattttaatcagctatttaaatttttttgaagccatttaattgcagttgctcaggttttccattacctgggtgatgcctggatgctaaccagtccctctgttagtggatgtgttcttacttcagatatgcctgtactttgagtttccttcctgagtcactttctcgatagttctttcacatgtctgttgattgtcttttcaagctcttggtggacaatcttataacccagttctgtacttattctccaagacacctcaaagttgtccccatgt

SEQ ID NO: 898688 - DNA, 700 bp, Homo sapiens
gctgcagagagcctctgcatccccaaattcatgagtcatttcactctgaccctytctctccttatcccctgcagagccatctatgtccaaatacatgtctattcaaccatatcgcctttaaagcatgactataaactagttttaaatataaaattacatgtttttctacattttgtggtgatatttgtgttttctgtaatgtcattcattggaagaatgttagctttcatttattaacacatatctctaatccccattttatagatgggaaaactaagagattgccaaggctaggcatcctgctcattgattagatgggtggtcggtatgagaaaagagctcacatttattagtgccatgtattccagatattccagatagaagcactgctttgggttgcttccaggtagggattttccaattgcttgtactattgcgcttgtctttgtatttataaataacattctttcgggtgctttcccatgcattatttgcagttaaatggtttccttgctaatacctcttactttccagcttcaggctacatgtagctggattgattagtaaatacataaggatatattaacttcttaacatggaatctgttttaaaagttgcatggagacatctgttgcaaacctgtgtgtttggtagtatccagggaaactttctctcaggctactttgtgattgactgttaa

SEQ ID NO: 898689 - DNA, 616 bp, Homo sapiens
tctatgtaaaattctatgatgatcgttcctttacacattttgtagacttyatgtcattacagtctggcttttgttgccgctgttgagaaatctgctgctggtttaactatccttattttatagataatctgccttttcctctaggtgctttcaatattgtctttatgtctggtgttttgcagcttcgttgatgggtgtaggtgtgaatttcttattatttatactcctcaggacttgtgctttctgaacttgaaaagtattatctttcatctattctcaaaaattctatgccatttttactggcatttctctaaaaccatcttcttaaactccaagtggacatttatcaatttgtgattctattctccatttctcttaagtattctttgcagttaccattactttgtttcccttgcttctgttttggttaatttcttgagtgttatcttccagtttcccaattctttctttagttttgactaatgtattgttaccctgtgcttttaaatttaatttttagtttttaaaatatctctctgttcctgcattagtttgctgaggacaatggcctccagctccacccatgtccctgcaaaggagatgatcttgtttcttt

SEQ ID NO: 898690 - DNA, 616 bp, Homo sapiens
tctatgtaaaattctatgatgatcgttcctttacacattttgtagacttcatgtcattacagtctggcttttgttgccrctgttgagaaatctgctgctggtttaactatccttattttatagataatctgccttttcctctaggtgctttcaatattgtctttatgtctggtgttttgcagcttcgttgatgggtgtaggtgtgaatttcttattatttatactcctcaggacttgtgctttctgaacttgaaaagtattatctttcatctattctcaaaaattctatgccatttttactggcatttctctaaaaccatcttcttaaactccaagtggacatttatcaatttgtgattctattctccatttctcttaagtattctttgcagttaccattactttgtttcccttgcttctgttttggttaatttcttgagtgttatcttccagtttcccaattctttctttagttttgactaatgtattgttaccctgtgcttttaaatttaatttttagtttttaaaatatctctctgttcctgcattagtttgctgaggacaatggcctccagctccacccatgtccctgcaaaggagatgatcttgtttcttt

SEQ ID NO: 898691 - DNA, 283 bp, Homo sapiens
ctagctgagaaatttctttttaagaagggagaatgatatcaaatatttagaaatacagaagaaagtactgataatatagaggcttatggattgtaattttgaatggtgtctagttaaagtcattgccaagaagtgtattcttaagagaagaaaaaaaaagaagcttttctcttctttaatgtttggaaaacaagaataaagagcgaagcggactcaggatattttgagaygaacggctacttcagcaagcacatttatttttagtgagagtgtacttgcactg

SEQ ID NO: 898692 - DNA, 640 bp, Homo sapiens
atactgagctgccttttcccagaagcatccaactcttttataaccagtttagtttacacaccaagatatatatacatatatacacacacatgcatagaagtatttatatatacacatttgtatctacatgtacacacctacgtataattaacctcaggcagtcaaaatttctataaacgttaattataacagaggaaaaatatgaaaaaatgtccaaataataagtcatttgtctgtagaacttttcctaaatgacagctcctgattctttaggttatctttctgcgaatctcaacagaagcacaatccctggggcaagacaagagactctaaaatcttagccaaccatacaaaaggcccgcagctgtatctgtacaatcccccattagagcgtgtggtcattagttccgcttctctctcacatatcacaatgcaaaatgagggccatgactgatgaaaaccatggagatggctctggctgtcaaaatgtatagcctctccagcagagctctagtgctctgcccatcctaaatcaagggctcaggactgctgcagcarcaaaccccttgttctgtggtgaaacagacgctacacatctggagagtgttttcgattatactgaattgagtcatgggtcctt

SEQ ID NO: 898693 - DNA, 641 bp, Homo sapiens
gcttttccttttgtcccaccaagccacaatttaaaggagaaaactaaaagataagcagaggaaaaaatactgtcaggaaaaagataaaaagtggagttgccttgggtatgtgcccatttgattaatctatatgtggataattggaaattgattctgattataactatgacttttcccattcataaaagccccagacatttgtatcttttaagttctctgtatctataatatgtttttggtttgatacactaaatacagcatgtgttaaattgaagataacattatactcatatttaagcaaacaaacttacaaagatatctaccaattttgctgtgtaaagcaggataaagcctgagaatatggccataaaggctggatttgaacattcttcggcatacagcctgacttcaataaaataactcatttctagtgctttaaaagtttccaaagcacgtccacatagggcattatactcaattctaatcttgtaaatcaaagttcccatttcacataggagcaagttaaggctgagaggatgaattgcctgtccwagtggacacggctgactgttaagagctggaattcaaatccacagaaacctcacattcaattaacccttcattaaccagaaaaggcaagt

SEQ ID NO: 898694 - DNA, 668 bp, Homo sapiens
tctaattccgtgaagaaagtcaatggtagcttgatgggaatagcattgaatctataaattactttgggcagtatgacmatttccacgatattgattcttcctatccacaagcatgaaggagcatgtgcatggaatgttattccatttgtttgtgtcctctcttatgtccttgagcagtggtttgtagttctccttgaaggggaccttcacatcccttgtaagttgtattcctacgtattttgttatctttgtagcaattctgaatgggagtttgctcatgatttggctctctgtcttttattggtgtataggaatgtttgtgatttttgcacattgatgtggtatactgaggctttgctgaaattgcctaacagcttaaggggctttttggctgacacaatagggttttctaaatatacaatcatgtcatctgcaaacagagataatgtgacttcttctcttcctatttgaatacccttgtgtctttctcttacctgattgccctggtcagaacttccagcactatgttgcataggagtagtgagacagagcatcctcaccttgtgcgggtttttaaagggaatgcttccagctttgccccttcagtatgatattagctgtgggtttgtcataaacagttcttattattttgagatatgttccatcaa

SEQ ID NO: 898695 - DNA, 668 bp, Homo sapiens
tctaattccgtgaagaaagtcaatggtagcttgatgggaatagcattgaatctataaattactttgggcagtatgacaatttccacgatattgattcttcctatccacaagcatgaakgagcatgtgcatggaatgttattccatttgtttgtgtcctctcttatgtccttgagcagtggtttgtagttctccttgaaggggaccttcacatcccttgtaagttgtattcctacgtattttgttatctttgtagcaattctgaatgggagtttgctcatgatttggctctctgtcttttattggtgtataggaatgtttgtgatttttgcacattgatgtggtatactgaggctttgctgaaattgcctaacagcttaaggggctttttggctgacacaatagggttttctaaatatacaatcatgtcatctgcaaacagagataatgtgacttcttctcttcctatttgaatacccttgtgtctttctcttacctgattgccctggtcagaacttccagcactatgttgcataggagtagtgagacagagcatcctcaccttgtgcgggtttttaaagggaatgcttccagctttgccccttcagtatgatattagctgtgggtttgtcataaacagttcttattattttgagatatgttccatcaa

SEQ ID NO: 898696 - DNA, 642 bp, Homo sapiens
tctaaactagaactatacacgaggaggtactctggctttcctggtcatgccactggctatttcagggatagagaggtgacaaggtcagacacaaagccaaaggatacaagtcttcttgctattggccacctcctgtattatttattatcattatttttattcattgcctacatggccaccacttcatacaaagtggaaattttctcttggcatatgcatggggatactttaattgttccttatgccaataagtggcaggaaaagtcttttctttctaactggtaatggtgttgacagctctgtttcgcctccaggttaacctaaaacgattgagctggcaatagtgatttgacttagctggtgggtttacaggcatatgaattgcgactgtctcatcccatcctgccaagataaatggtttcttttctatgcttcaaatataattatgttcctgattaataacaaatgtgatgacacagactctgaagcaatgcgaaagcagccaactttcaaccactayagtatttgttgtatgaccattaaaaaagggttcaccagactcacagccaagatggcaagacttttcaagaacaaagggcgagtggagtctgtgaagcaagctctaacttaacatcacatgtg

SEQ ID NO: 898697 - DNA, 638 bp, Homo sapiens
catttcaatgaaactattagaaaaactacaaaggaaattatgactccctaatgatctagttcattttctcccagaagataaaaactgggcttcttacctagaacaatggtgaaacttacattaaaaaatatatatatgcaaagcatcattgccttcttgcttccgttgcacaggcaaaaatttaatacatgtagaccagattccctggtcttctgtcaactacttcaatagaatatagataattcaccctctatgcccacccataaggatgcagatccaaggtcccttgactccccagatggtttggttcactaaaatcccttgtgctcagataaaatccatcccaggcctgctttggtgatggagatgtatcaagttgaaacaaagtcagggcccctctgcaaacaatgatcagaaacagaaggttccaagtagaaaaccctttcctgctcttacctacacctggacaagccagatgctcagggaaatctgacatcacagcataaggtctggcgactagtcagccctttgtctcttaaawaacccactgaactatccacacttctcagcaaataaaactactgtgttcctactgaatacatcttcaagtagtctgttacccaagagacagtgtgtgt

SEQ ID NO: 898698 - DNA, 565 bp, Homo sapiens
aaatatcattttattatgaactaaattgtaactggacacataaaacaaagacattcttccagtgaacagatacagtacataagaagcatttcccagatacttggtttcaatataggttaatgggattctgcascacaaatctagtccctttccctaaaaggaaaatgtttattggcaccaaaaatttactatgttctacgtaaggagaagtaccaaggcagatgaaattgaagcacatgtttctagttgatataatgtaaacttatttttaaaagcattgcaaaaaggaaaaaaaaaggtgggggaatactagaaatattcaaggtgggttaagcataccctcaaaatcaaagagaaaccctcaaattaaggagttaaaaaattaaatactttgtagcagatacatgtaagtatatgtaatttttccaaaaccaactcagagtagcataacttcagtttatcagttcaaattgtgaatttatacacagaacctgtgttatgaacttggtcagacggaaagctcacatatgtgctttataccatcccctctgaccttaatatttgg

SEQ ID NO: 898699 - DNA, 414 bp, Homo sapiens
atgggactggagtctattcccagagaggctcaggacggtgtattgagaacaatggttttgagccctgattgcgcccaatgccctctcctatcacaaatgttttataatattcgttttttaaaagtggaataaaatttcaagataatagaccctacttatgcacgtaatttatacacactgccctcattactgtgatgatgaattgaagaagcgtgagataaatgcttggtcatgattatgttagaagacacaatgaattagacagaggtacacctataaagagatgcactacaaatataaaagtgaatgtgaattgatccamgtgtgtacctgtgatgattttaatggctaaaacagcattgcactcagcaacatgattttctgacatggttggcatagtaaagaattcctggt

SEQ ID NO: 898700 - DNA, 634 bp, Homo sapiens
aacaatcagtttaaatgaaaggggagcagaaagtaagaaagtgaaggaggcattgcagcttgcccagttccatatagattcggtaaatgtgaaaagctagtttaaacacttaataatattgatcttcctccargggtttctttggagctgacttaattagtgtttattaaccattctccaccaaatacttgtctaataccttaaaagtctatttcagcagctataatctctgctagtgcaagaaaatgcctccctatcatgcttgctccagtggaataacaacttacatctacctacctaatgttcaaacaattggttaaaaagttaaaaattcaccaattgactgattattttgtttacacaaaattaaacaaattaattttttttagtaagctgaataaaaaacaacaaacttgtaaagatacagcagtaagtaccttttgatgcaaggagaacacaaaatattttaaccagtttgtgatgggttttaaggattttactatgagccaagcaaaaaaataattctggaaaataactcatataaaattaaaggttagagatgactgagtaccctcagataaaattagagcatatattcactgattaatatttataaagttgaacttttactttt

SEQ ID NO: 898701 - DNA, 600 bp, Homo sapiens
gtaaatgatgaacttttagtgataaggatgtgtcartctagattctttgattgtagcaaatgcattcatatggtgcagaatgtcaatagtgggaaactgtatgtgtgtaggaacaagaagtatatggaaactgtctgtactttttgttaaattttccttcgaacctaaaacccctataaaaataaagtttattaattatttttaatagcaagcaacttgtctaagtaacaccattaggaattaaaaataggtctatcttactccaaatatttctgctatgccattatgactatgaatcttaacaatcctttccagagtgcttaataaatgtttaatgttttaataattacgtatttttcaaaattgtgtcatcaaaaatttattttgacttactcatgcagtgagatgtttaatacttttgaaatatctacaaaacaatttttacaataaaaagaggtgagaccccatctctttttatttaaaaaattgtttggtagatgtttcaaaagtattgaatagaacttcctttcttactctaatatatctttctcatcagatattacattattttcttcatatctatttcactccactggtata

SEQ ID NO: 898702 - DNA, 600 bp, Homo sapiens
gtaaatgatgaacttttagtgataaggatgtgtcaatctagattctttgattgtagcaaatgcattcatatggtgcagaatgtcaatagtgggaaactgtatgtgtgtaggaacaagaagtatatggaaactgtctgtactttttgttaaattttccttcgaacctaaaacccctataaaaataaagtttattaattatttttaatagcaagcaacttgtctaagtaacaccattaggaattaaaaataggtctatcttactccaaatatttctgctatgccattatgactatgaatcttaacaatcctttccagagtgcttaataaatgtttaatgttttaataattacgtatttttcaaaattgtgtcatcaaaaatttattttgacttactcatgcagtgagatgtttaatacttttgaaatatctacaaaacaatttttacaataaaaagaggtgagaccccatctctttttatttaaaaaattgtttggtagatgtttcaaaagtattgaatagaasttcctttcttactctaatatatctttctcatcagatattacattattttcttcatatctatttcactccactggtata

SEQ ID NO: 898703 - DNA, 672 bp, Homo sapiens
cctctctatgtctgccattagtgtttaataatatttcatgaattgatcagagcattaattacggctaatgtacgcattttacattgaatctccctgtgaatagtctactttcttctgtatccacattgaggggcaggctcagggtttagtttccagcatccgcaaaagaagacctagaagtaatgacacactgcacaatcattgcattaaatccccattgtaggcatttggttcctatttcaacaattattttccactcttcattctctttcatcctctatattattctctcccaaagcctctctaatccctcatattgtgttaagtaatctggctctgcttttgttcatacctatctcaggcggcagagcaaagacttcagaagatgaatcttttaaaagcagttattaaaatagtcttgttagagtatgtagctaggttgatatgatcagagcaggagagggcttcactccaagaatatcaggcaaccatcaggtgatggtcaggcagttgttaaactgtctctctaagataataattagttgcagccagtaccaggaaaagtcagtctcccagyagatagaaaacacctgaagctggtaacgagcagtttcccaataagatctcaggagttgggcgggtgagtttaagcatgcgcactaagagaggcaa

SEQ ID NO: 898704 - DNA, 648 bp, Homo sapiens
tgtctgccaaaattggctgcattattttcttttgccattttctcccttacttcatcagtagaaatgcgtcaacaatctctttrttttcttagacatgggttaaatgtattactcaaccagagttgctcattcccaaaccacccatgcatccctagatttcttggctggcacaagtccatttgcttaccctcattgtaaatgggccttaggaaggataaaagacagtgtatattctcagagcactctttgatgattatctttgttcctattttatgcactcctctagagaagttacatttttctatttattccctccacagctattcttaaaattaacaaaaaatacatgttcttacctcccatcaaaaatgtatctaattccattttataataaacttcactattataaagtcattgcttatttatatacaatgcagtaattttcactctctttttaaaagttatcattagctctgtcatcacttcttccgaaattcctttccttccttctggtttttgttattttcataatagaaaattgtttataattctgtccaccacagtctgcaagtagtgaactttctgatttattattttgtctaaaaatgttctttttatcttaattttgaatgatattttagcagcata

SEQ ID NO: 898705 - DNA, 636 bp, Homo sapiens
tagcctatttaaactttataaatctgtttattatgtaaagaaaaatgtggttgtagatcctrggtcagcaaacatttttctttgaatggtcagatagcaaatattttaggctttgtgaatcacatggtctctgtttcaactattgaactcagccattatagcatgtaaacagacacaaacaatacacaaacaactgagtatgactgtgttctaataaaatttcatccattagaggaggtaggttaaatctgggccatgggccatgggccattgtgctgaactctgttgaatcacagattcttattcgtttttttttggtttttttttttttttttgattcatattagtgtcggtgtcatttggttgtccttctattttttaatttttttatttcaataactttaggggtacaactggtttttgattacatggatgaattgtgtgatggtatgaagtctgggcttttattgtacccatcagttagtgttcattgtgtagatcactgattcttattctgatttcacattcagaattcaggaatgtccattaacctcactgaaaatgtccacaacataactatgcgagagcttttgtaaatgtgtgagtctgcatatatgttaatatgtgtgagtctga

SEQ ID NO: 898706 - DNA, 605 bp, Homo sapiens
ggatttacaaaaactggagaaagtattactaccagattgacactacaagaaatattacaggaggcctttcattaagaatgaaaataatacaaatttgaaatatgggttrccaaaaagtaatgaagagccataaaattggtaactacaagggtaaatgtattttttaaattttgttaaaagataattgtcatagctccatctctgataaagaaattgaatgaataataaataactcttcaaaaacaaaagcactaggccaagatgtattcaccaatgatttccacccatatatttgacagcactacaaattccacctatattaaaattaaattaaaggaatattttgagcaactacaaatgaacctgacagtttagatgaaataaaaaattccatgaaaacacaatcaaatatcactcaagagaaaatcagaatatccctatacctattaaatgaacccaatttatagtttaaaatctcccccaacacctacccacaccctacacacacaaaaacttgatagcttcaatgataaatgcttccaaatatttaagacaaaataataacaccaattctaataatgttttccaaaaattgaaaaggacag

SEQ ID NO: 898707 - DNA, 641 bp, Homo sapiens
ttcactatggcaggctggccatgaaggggttgtaaagaatgaaattaatatacacacccacacccaacctctagtaaccaccattctatgttctgcttctaaaagtttgatttttttttagatcctgaatatgagaacatgtggtatttgtctttctgtgtctggcttatttcacttagcataatgtcctctagggagtgaacagggaaaggagagatgttaatcaaagggtacaaagttccagttacacagaaggaataagttctggtaatctgttgcacagcatggtgactatagtgaagaataatatattatgtatttcaaaattgctaaaagggtagattttaaatgttctcaccataaaaaatgagaagtatgtgaggtaattgttatgttaattagattgatttaatcactccacaatctatataggtattgaaacatcacattgtaccccataaatatatacaattattgtcagcttataataaaagtaaattttaaaaataaataagagtcgattccataaaaaaatgaaaggaatgaaatctasagctagctatggactaagggagtgagggagtgagggtagacaagttggggtgtgaaaacacaggtcacggagacggtgttttgttgta

SEQ ID NO: 898708 - DNA, 346 bp, Homo sapiens
gagcgcatgcgttcgaagccattcgcgcgggcagtccctgcgtgtccccctgcgtgtccccccacgtgctccccagcgcgcgcagcaccccgcctctgcgcttccccgagcgtgcagcttccggtgagggcagccccacgcacagcccccaacaccctccccagcgcctgcagcttcggtgcgcgcagtccccaagcccacatgcgcagttctcaccttgcgcgcagccycacgtacagcccccaacacgctcccagccccactggcgcagaacccatcaccgcttgcccttcacgcgcttcattgggagtgcagctcccaccccgagcgcgcagctccacgcagc

SEQ ID NO: 898709 - DNA, 624 bp, Homo sapiens
aaagatgttgggattacaaaaatagtgttctcattgtcagaatatgcttamagagtgtttagaagtgtcaggaggcatgcaacttagtttcaaaaggggagggaagaaactgggaaggaagaggggaagtacgtttgcatatagagagaggaagagggaggaaagagaaaatttgggggaaagcaaatttggcattgctgaatctgggtggaaggcatgtgaggttcattttactatttgtttcgttttttgtatatctgaaatttgttctaaataaaaaatcaagtagaaaaacaagaattaaattagaaaatgtcattaaagatgtggttccagttggatacagcgagtactagcagatattctgacctcctgttaaggatgatcatcatcgtgttacacttgctgatgtgtggtgtgagcagcacatttgtttaaaaaaaaaatgagcataaagagctgatgctctctaaaatcaatgtctcagagtctatcagggccaagagctgagagagggtgaagttctgcttctttgggaacagcaggcactcacagcttaggggttaagggcactccctcttgaatcttaaccacctgaattcaaatctgcaatgggaggagcaa

SEQ ID NO: 898710 - DNA, 612 bp, Homo sapiens
tatacaatattaaaacaacaacaacaaacaaacagaactgragctcaactaatcagaaacaaacaacaaactaatatagctagggactttccaatgggataaaccaaagaaggcaattgcataactgtaaccaaatattttctgtgctttacttctgtgcttattctataaaaccttcccccttgtgttcctttaatggagctcccaaaccacttcttgtttggagctatggattcatgaacatttgctcaaataaactctttaaaattttattgtgcctcagtttacttaactgttgttatattctcttgcctctatgttatattctaagtctaaaatgtttaaaatatttgttttttctttatcatttttacacgttagaattgcttattttattggtctttgcaaagaaacaattgttggattaatgtattcaactctaccattgttttgtttaatcgtctacttttgtctttgctatcctcaacctcctactttccatacttaatttgtttgttcttgttttcatagttcaataaaagcattcaggacactgagcacagttctttggctacgccatcttcttaattctcctaagacttggtcccaata

SEQ ID NO: 898711 - DNA, 612 bp, Homo sapiens
tatacaatattaaaacaacaacaacaaacaaacagaactggagctcaactaatcagaaacaaacaacaaactaatatagctagggactttccaatgggataaaccaaagaaggcaattgcataactgtaaccaaatattttctgtgctttacttctgtgcttattctataaaaccttcccccttgtgttcctttaatggagctcccaaaccacttcttgtttggagctatggattcatgaacatttgctcaaataaactctttaaaattttattgtgcctcagtttacttaactgttgttatattctcttgcctctatgttatattctaagtctaaaatgtttaaaatatttgttttttctttatcatttttacacgttagaattgcttattttattggtctttgcaaagaaacaattgttggattaatgtattcaactctaccattgttttgtttaatcgtctacttttgtctttgctatcctcarcctcctactttccatacttaatttgtttgttcttgttttcatagttcaataaaagcattcaggacactgagcacagttctttggctacgccatcttcttaattctcctaagacttggtcccaata

SEQ ID NO: 898712 - DNA, 646 bp, Homo sapiens
cacacagtttttatattagcatagagaatttctataggaaggccagttgcagaattttgttggtctcccatatgatttaatttttaaatgtaaaggagcrtaagtatcagagtcatgagccacaaagcagccagtgctgtcttgaattttgtatattgcaccatattctaaacttgcaaagtctccaaaagctgcattgtattaaaggcatcacaaacatgaaaatcaaaatccaaggaatagatgacatgatatgccagtagaaaattaccatggatgtacttcattgaaagggtagattttatattttatcttggcatttgcagaaaaatgagaagcaatttatcgataaaaacatttgaggctgtgctattcctgcctttgaacacgaaagaaaaacctttggtgctgacggggtggaggaacagaattagtgttcaggttttctgactattaatctattgtttggatgctttagtcttttgttttttttcaaaaaaaaggtgggggtaataaaaagttgttatgtcaagatttagcaagaattaagtgtgtttgtacaataatctttcaaaagaaattttgttatgcattttctactatagttccagatatgcaaatgcctgtgctgttaatatgcattcat

SEQ ID NO: 898713 - DNA, 604 bp, Homo sapiens
tattatgaagactaattttttgaatacattgttctagcttttctgcatatattatgtagtttttacaacagctatatgaggattatatgcataggcagactggtatagtggttaaggatggcaaatggcaccagactccctgattctgctactttctagctggatgaccctgggcaaggtctctatgcttcagcttctccgtctcccagttgggactgattctattcttatctcataggttgttggatataaagggcttagaatgatacctactacataggaagcatcgtattatttgacagattaatttaaaataaaaattgaggaagggtgggagagttgagtataaggcatttatgtgaaatgatttctcaactctttgtgaagaaaaggcaatgtctgtggcaatgtcctgtggttggtcattcaagcgttcagggtgtaggtggagaacatgtattatattgtcaatgaaatcaattattctgaaggtattatctagacctctgcttgcaatttcagcaccttggactaggaaatatggcaatgttttaaggacaaataacttyttagtgaagcttgagccagactacaaatctttcag

SEQ ID NO: 898714 - DNA, 657 bp, Homo sapiens
tgttaggacatgtcactgaagtctcacctctatttgattattcttattctattcttaaatagtgagagtccagtatttaacygtgtttatatcccagctcaaatatttactggtcatgtgacttgggtaagttactccccctccttttgcatcagattgctcatctgtaataagggtataatttttaagtgtgttttaaatatataacatattaattcatttaaagggatttaaagcaatgcttggcaaaaagaactactgaataaatactatgagtggttctttcactctgtaatgtaatttgttctacaaagattttaagacaaaaaactttacaagttctggactgtgtctccttacccttaaattctcacttaagttggtcaatttcccttaaacttctaagaatgtgcacattcctttaaacttctaaaaagacatgaataacaaggtagtcatctccaaagattatatcttactcaatactgcattgctgaggtattcataaagtgttttatctaaactcgtattttccaaaaagaattatatgtacctacaaggaaattccaagagaatgtataaagtcacagaataactgcaacaaatctatgtaaaactttaattatagaaaaatatttggaatatattttctaaaaa

SEQ ID NO: 898715 - DNA, 608 bp, Homo sapiens
tttttgctattgtgaattagtgctgtaatggacatgtgagtacatgtgtctttttagctgaatgatttgttttccttttggatatatacctagaaatgggattgttgcattgaatggtagttccattttaagttgcttgagaaatctacaaactgctttccacagcagctgaactaatttaccaacagtgtatgagtgttcccctttctccacagcctaaccagcatctgttattatttgactttttactaatagccactctgacatttggaggttgatatctcattgtggttttgatctgaatttctctaatgattagggatattgggcattttttcatatttgttgtctacatgtatgtcttcttctgagaagtgtctgttcatgacttttgccagcttttcatgaggttattcgtcttttgcttgttaagttgcttaagttacctataaattctgaataatagacccttgatgaatgcayagtttgcaaatattttctcccattctgtacatgtcagcttattctattgacagtcttttttgatgtgcagaagctcttcaatttaattaagtcccacttgtcaatttttgtttttgttgcaattg

SEQ ID NO: 898716 - DNA, 590 bp, Homo sapiens
gaccagctttgtccagctccaataatcttcctttcctacaccatctgccagaacagctacacacaggggatgaagggtgaccagttatttaaaatatcagaaattaataaatayactacctttgctttataagtaaaacttttttcctggtaggaaaaaaagataactcgggaatattaagcacgcaaaaaacttttcttcatcagtttggttcttttcaaattaaagagatttagtgaacttgctgttggagatgacagtaaacaactcaaaatacaaacacaccaatcaaacctataagtatagtcatagtcgttgatattcagaatcgctgttccttgtctggttaattaatacaattttaaatatttcatatgaaagaattttttggaaaaaaaatgaaatgaacttaagattgactggaatttacaagctcatttaaagaaaagtctcagctatttttttcttaaaaatgtaatacctccccagatggcagtctttgtagtttgtggcactgattcaaaaggcatattaactgccactctactagctgcatcaagcatttacaggcctccctacagaatgggttc

SEQ ID NO: 898717 - DNA, 636 bp, Homo sapiens
aaagtattgtggctgagtgtggtggttcatgcctgtaatcccagcactttgggaagccaaggcgggtggatcacttgaggtcaggagytcgagacaagcctggacaacatggtgaaaccccgtctctactaaaaatactaaaattagccaggcatgctggtgggtgcctgttattccagctaccttggaggctgaggcaggagaatcacttgaacccaggaggtggaggttgcagtgagccaagattgcaccactgcacgctccagcctgggtgacagagcaagatcctgtctcaaaaaaaaaaaaaaaaaaaaaaaaaggaaagaaagtattgtaaggacaagtgaaacaatatgtgcaaagggtttcacaaatagtaagagctctgcaaagtgctcccttttttccaatagatactagatggataacgaaaattaattcatgagaatactcttagttccttgcaatacattcatttcactagcacaaagaggcctataaacactgcatttgaaaggattacctcatctgccagggacctcctgttgcccctcactcttgcaatgtcattatgatagaggttctaaacaaattcaatatctagattagatacagctcttgaaacttatgctataa

SEQ ID NO: 898718 - DNA, 670 bp, Homo sapiens
tgtttccttgaaagtctgaggtaattatgccgcttcctggtggtaaagaacwgatgatgtgattttattttgaataatctttgagggaaaaaccatactttttcagcattttctcatcttatctatagaaaatggcaacagatttaggtaaaaagctctttaggaactggtcttataaagttagctctaataaactaaatgtcaatgtgataaaaacaatccttactaaggaaaaaaatcgactttatgtcagttctgaaaaatatgctttgttgcaacttggagacatttttttggtacactcttgaggtccattcacttagcttttgcataacacaatctcccagggagagtttgggtgaaataactacagtatttctctcagtagaggctggcgatgaagcacaagataaacttgtgattgtttgatttcatgatgagcacttttcttcaaaatatgcagcttgcagaaatctgaggaaaaagggcacttttcatcacattcataggtgacaaggatccaggatctaagttcgacaatgggaggatgacgggctcattccagccacatgacatattacagaaaatactgtaacaaccattatttaaatgtcaaaaatggactctacaggcacagggtaggtaagatggatcctaaacacagcaaaca

SEQ ID NO: 898719 - DNA, 453 bp, Homo sapiens
attaaactacagatttagagtttgtaacccttgacctaggcacacttgtctttctcgccaatattttcctcatcctataaaacaaaagtccaaaatcctagagcccctaatcctagagccagggagttagggaggttagattagaatcctcagggtgacagagaactgggaacaccaatatttatagcttttgtcctgtctcaaaaaaaaaaaaaagcagggggaaaaagacctttaagaagcacatttatttcatagcagcaactgttaatgtccatgataaacatatttaagtttctgcacaccccttatacttattsctaaatcaagggaaaaaaaactgcagtggagtttgtttccttgtcgtgccacctatgataaagatctcattgtcaagtgagaaatgacaaaaactattgtcttactctgtaggactgaacatataggatactt

SEQ ID NO: 898720 - DNA, 453 bp, Homo sapiens
attaaactacagatttagagtttgtaacccttgacctaggcacacttgtctttctcgccaatattttcctcatcctataaaacaaaagtccaaaatcctagagcccctaatcctagagccagggagttagggaggttagattagaatcctcagggtgacagagaactgggaacaccaatatttatagcttttgtcctgtctcaaaaaaaaaaaaaagcagggggaaaaagacctttaagaagcacatttatttcatagcagcaactgttaatgtccatgataaacatatttaagtttctgcacaccccttatacttattgctaaatcaagggaaaaaaaactgcagtggagtttgtttccttgtcgtgccacctatgataaagatctyattgtcaagtgagaaatgacaaaaactattgtcttactctgtaggactgaacatataggatactt

SEQ ID NO: 898721 - DNA, 661 bp, Homo sapiens
actcagaactcaaatggcaacacttcagaaagtacttccctggctactctcgagcaactagcatgctatcctacatttttttccttgttagcacttacaagtacctggaattatttatgcatttgtctgcatgtttgttgcccttcaccctcactgaacagaggtccttgagtgaagggagtctgcctgtcctggtgacagctgtatctctagtgtctcaaatagtgtctgtcatatatgagactctcaataaatatttaatgactgacacactgagtagacttgtcattattggaagctgatccaagtgctaaaaacagcatttttagaaatgaagcctttaaaatggagaggacaggaaacaagtcttctttaaaagtagcccaaaaaagatgtttatatgttgacaaatatcacctggaaaaatgtgggaatataggagtgcccagggtggatgtaattttatttttaagacatagctgtgagtctaagttttggaaacagataagcctgtatttgaatccagtgcctgctgtgctctactgtaagacattgagcaaataatttataarcctccattttctcaagtataaattggacctaagaataaatttatagggcattgtgaagattaaacaagttatagtattcaacttgatac

SEQ ID NO: 898722 - DNA, 544 bp, Homo sapiens
gcctgtctcatagagttttggggaggattaaatgagatagaagacacaccattcttagaacagtgcctgatatgaaggaagtgctatatgggtcagatgttataatttttataagaaatttcacttttttcactttctgatttttaactttcacgtattttcttgaattttaattttagcattatcttgcatctttttctttctcttctcaggttgctaagtctattattttaaatcattatattcgatttggtctactttcctgttagagttttccaatggtttattttaattactagttttaggactttcttctccttaggttttgttgacaccctctactttcctctttttctttttggttggttggattggtggtggtgttggtgggggcacatgtggattgttattawggtggtgtgatttttaataatttgttttaattgtgatcaaaaagcagtctagagaagtgattagtaaacttcaatgtgtctcagaataatctaaatagtttgttaaagtagactgatggcaccatgctcag

SEQ ID NO: 898723 - DNA, 453 bp, Homo sapiens
ttactgggagaattaaacaataaatccatatgatacacattaaacaatacatgtgagacacacagaacactggtaactagtatgtactcattaggtgttacatgtaactactagttaaatttttagtatatktatgggactgatttgaatctgaaaaatggcaaattatatttacttgtgtataatagtatagaatgttatggtttagtggtctggctcaggagctagccttttgtggttcatctcctggctctgccacttactacccatgtgatcataagacacaccattctgtgcctcagtttcttctttgaaatggggctaattatagtactaaatcaaagggtagagatgagttgagaaaatgtgtacagtgtgtttagcacactgcctagtgctggcatatagcatatagtgatactattacattgctgtagttggtatgtatggttc

SEQ ID NO: 898724 - DNA, 623 bp, Homo sapiens
atatcttggagaaaaagtcccagacaggggaaaaggyaaacaggcttccctctctccctcaccccatcacatctcaaaacttccatttgaaagcgcagctcaaggccacaagagcaggctgaccacaaggactacagcgaagtcgagagatgactcaattcttgattttcgtttcctggttccccctctccatccacagctctccttccttagctcaaggtgtcacatgtgggcggcctctgcctttcctccacggaactccagaacattccccagacattagctcattgatccttttccctggcagcaaacataatccctccctaccagatggagggccaggccattgggcagcagtgactgtccctggggagcagcgggaggagcagcccagcgcttgctcggtctgggagctggctgccaactgcacattcaggtgaatctcagcatccccatctggagaagatgcagcaaaattcacctaaaccttcatttagcggaagagaggtccaaagaaatgtctgtaagggcaacaatgaaaacgtaaaaaaagacaagggaaaaaaatctccaacctccctaagcttccctttttaaatcaatatttccttagtctctggtgg

SEQ ID NO: 898725 - DNA, 520 bp, Homo sapiens
gctgtctttctgatatgaataattttttaaaatattggcattctttgattcctttctttttatctttgtatatctattacaggtttttgctctgtggttaccatgaagctgatataaaacatcttaaggttatgactgtttattctaagctgataacaacttaacttttaccatatacaaaaactctacactcttaactttccctccccccacactttatattatgaatgtcacagtttacatttttatgttgtatatttattaacaatattatagctatagttgtttttaatattttgtctctgaacttttatactagaattagatgagatttacacacagccaatatagtattatagtattctgcatttgactgtattcttaccttttcagtgagttttatcatttcayatgtttccatattgttagcattcttttactttaacctggagaactccctttaccatttcttataaagtgggcctagtggtgatgaactctttcagcttttatttgtttg

SEQ ID NO: 898726 - DNA, 608 bp, Homo sapiens
ccagtcttcagaactatgaaaaataaatgtgatttttcagccaccactctatggtatttcattatggcagcctgagtagaygatgacatgtgtactgtatatctccagttatcaagaaagcaaactgttatccagttctgagctctgcaagtaacccaacctgcaggttgctttgataagagacattgaacaatatattagaatttgatagcagtttctcaaaacacataaagatgaccttataacagttcctgataaaaagcgggtgcctaaaagttaagtcatagttctttgaaaagatttagagaactgagtagtgtcacacaggctccaagctttttggtgatgggacttgataaaagatgtgtagcaatcagcagtgaggtagacttcctgttagttactgggaattggcattattcttagcccatattttctgtcctataacccataatatgggacaggcatgagagtacgaggatggcatatgtgtgaatttcacaagtgccaaatgacagaaaggggataaacgtggctttggagaaatgtctgatcagggtctctgtattagtccattctcacattgctataaagaaatacctgagggg

SEQ ID NO: 898727 - DNA, 609 bp, Homo sapiens
cacctggccatttggggcttctaactaaagcaaaaggtcaggatggatcaggcatcgagagaactgtggtctctgctgaggatacttacatttcccatacctaggcrtgagagaaacctgtcatccatccatccatccatccatctatccatccttccatccattcatccatccctccatccttccatctgtctgtccatccttccatccatccctccatccctccatccatccctccctctgtctatctattcacttatttattcattcagtgaatatttaaggagcacctacctgtggtagggcatattctatatgctggggatttagcagtaaacaaaatagacgttcttagctctgatacattccaatataaatagaagaccataaacaagtaaacttaaattaaaagaagggatagggctatgaagaaaaataaaccaagagtgtttatttcaaacacagtaatcagaaaaatgctctcccatgaagtgagggcaaaccccaatacatttaatgggaaaaccaaagtgatacttgggggaagagccttacaggtggtgccaagagcaagtgccgaggccctaaggcaggaggtacttggaatgt

SEQ ID NO: 898728 - DNA, 577 bp, Homo sapiens
tcttctcaaatgctttttatcttttcctttctctgtcttgtcttctgtgaattctataacgtgcatattggtatgcttgatagtgtcccawaagtccctttgtgtcttcatttttctttcttttttctttcttctcctcaggctggataattttattttagctatctttaagtgccccaattcttcagaagttacatctcggtttaaccattctagtgattttttcattttgtttgttgtactttttagctccaaaatttatagttggtttctttttataatttctatctcttcatttggtatttcctacttgttcatacattattcttctgatttcctttttttttttgtccatggttcccttcagttctttgagcatatttaagatactaaagtatttgtctcgtaagtccaatgtaagaacatccttgaaaataacttttctcattttatttttctaagtaagtaggctagaactttctccttttatttttgttgattttgttgttgttgtttagaaatggaccctttgactattttaatgtattgacagtaactctagaaatcagatttttct

SEQ ID NO: 898729 - DNA, 681 bp, Homo sapiens
atgatggagaaaggcattatatggcacaatcctagagccagaaagacattataacatgttacagaaacgtaagaaagggggagagggaggaaaagaggaagaaggaacagagggaggaaggtaaggaaggtcaggagggaggaaggaaagaaaaaaggaaggaggaaggatacaagcaagcaagctggctgctgctactaatattatatatacagtataatataaaaatatatattagagaacccatatattatgattcagataattaaaagttagaacaatagactgataatcataaagatttccaagctgtatgtattccataaatttagaaaatacagggaaaatgagagaggtgtgctctagggaattataggaaagtaaaggtagataatctgtactgtaatgaggtacgacagcaagtttctatgatgttccccttcctgtgtccatgcacatgtaccctaaaacttaaagtataataataataaaaaaaagaaagtttctatggaggcagtgttctagtcattctagtcactttgacgttgataagcagtatatttgtaatactgtgtagaggctggtgcgtcatataaaccaaatataaatggacacatttcaaagtgctacatggattatttstaacacaactgttcaactgtagttttgtttctcattata

SEQ ID NO: 898730 - DNA, 548 bp, Homo sapiens
ctctggcaaccactaacctgttctctatttctgtaatttttttcatttcaatgaaatataaatggmctcatatgttatataacccttatagcctaattctgtggatcattattcagtttgctgcatttatcattatcttgctcatttttttgctgagtggtatttcatggtatagatgtatcacaatttaagtgttcactcattaacagacaactgggttgtgtccaatttttgtatattatggataagactagtataaacatgtacagattttgtgtgaacagaaatcttcatttctctgagataaatgtctaggattgcaatttctggttttatgttagctgcatgcttagttctttatgaatgtaccaaacacattttccacagtggttgtaccactttcattctcaccagcaatatatttagtgatccagtttctcttattctctctagaatgtggtattgccactatttctattttagccatcttaataggtatacaataatatatcaatttggtttaatttacatttccttaatgacttgtg

SEQ ID NO: 898731 - DNA, 646 bp, Homo sapiens
gtacctcagttggaaatgcagaaatcattcatcttctkcatctctcatgctgggagctgtagactggatctgttcctaatcggccatcttggctaaactccaagaatttatttaagctcctactatgtgccaggtgctgttctgagcactgaatatacaacagtgaacaatagagatagaaactctgccctggtgatgctgacattaagcagaatattagatcgcaagaggtaccaagcagggaatggggataagcagtgctaacggccacttcaaacagaaacttgaacaaatttataagaaaacaacaaacaactccattaaaaagttggcaaaggacatgaacagacacttctcaaaagaagacatacacatggtcaacaagtatatgaaaaatagcttaacatcactgatcattagggaaatgcaaatccaaaccacaatgagataccacctcatgccagtcagagtggcaattattaaaaagtcaagaaacagcatatgctggtgaggctgcagataaataggaatgcttttacactgttggtgagaatataaattagttcaaccattgtggaagacagtgtgcaattcctcaaagacctagaaccagaaataccatttgacccagcaatcccattactgg

SEQ ID NO: 898732 - DNA, 658 bp, Homo sapiens
ctttatattctagttgtatgatcatgggataattacccaaactctccatcctcagttttctcatcaataagtagggaaaataatggtacctgcctcctaggattgagttccaggtgaaacgagctaatgcaagtatgcttggcaaagatgtgctcaataagtgttagccattatttccttggggatcctgggaagtttataccacttacattctacgatgcaggataaaaatgtgaaatatttattttgaagccatgaataatgttaaataaaaatgcagaaatgccaattgttagtgctgacatacacgcaccttctgtgttaaaccaacttaaactcaatttctccatcaaaaattccatgctgtgagaaaattttttctgtcacccaaatgctttcctattttgaatgtaactggtatgttttattaatgctacattatttcccactgaaccatttttcctccagagcatgtgatgtcatttatagccactggcacacacatttcttccatattttgtcaattaagcatgtcatagaatttaatatttacagtcttgtatggttcactgaactaattgygggaaagagaaataatgacatggggaacaaaataagacattctgctttcatcaaagaactggggatagaatcctac

SEQ ID NO: 898733 - DNA, 586 bp, Homo sapiens
ctacaggatatatagtccagagaaaaaaattacatgaataacaaactatatagagtttattgacttttgttttggggaagaggacagacatacacatagaccaaaaacccataaggatgcyggttacatattggaagatagggagaaaagaggacattgatggaaactagagttctctgcatgtgtctttttaaaaatagtttttactttgggagcataaaaatgttttatgcaattataaaccaaaattaaaaaaaaattcagaaggccatcccttaaataaataaatgtcttgttattttgaaacatgtatataatgacaaagtaaatacataattatattaatgtcactagcaaccaataatttcagcataagtaaaaagaatacaatcttaaaaaggttcctatgaaaacatgatttatttatgtctgtcaatgtgtatgtttctagagaaaagaaatagattttgttaagagcccaatagtaatgagcacctcttaatgcctacattgtgttttctaaataccaccttatactaaaattaatcaagaccccttgggagaaaaatatatagtcgaaaatttg

SEQ ID NO: 898734 - DNA, 623 bp, Homo sapiens
tcccctcccacgggctctgagactgcagaacagagctctgtggactctctccaccctacacacattctgcctgatttgggttactttatttttgagcaygaaaaacaggaacatggttctgaaagtcagaggtgtataaaacaaacggtattctcagagaacacctctcccactgaaccattttacatcatttctattccactgttctttccaccttgtttttgctcacccaccaatcacatcagtttctggtttgttcttccacaactgagcaaacatgtctttattttcttatttttcctccttatcttctggttttagagtcttttttaagtagaatagaagtgccctaatccaattgaattgttactagtcattggttggttagatttttttaaacccacccagttctgttgggaagcataacagaatatttgttattctcatttttgttgatttctaagtgcctgagcacagcccattagccaggcattctgctaagcactttaaatccattatctcctgtaatcctcacaatagtttgtgaggttaatactattattattcccataataataacctacctgtcttggttaaagataccaagactggtaggaggtggt

SEQ ID NO: 898735 - DNA, 654 bp, Homo sapiens
ctaacttcagcatttatctcttcaatctatttaccaatgttgctttattmctctgttcctttgcttgtcttggaagaaataaggctttggtacagtgagaagcaaaatcacagtaattccctctacccagtcatgtcagtgtgtgggatgttttcccagcaaagactgaaaaaaaatctttaaattctcttcttcattaaggtacttaggattgagttctgtgaaactgttatgatgaacaattttttgctgtcttcactgccatcaaagggtttgggataattcctttgagattcttgaaataaaaccatattttgactaaaagaaaatctatgttaagaactcacctgtgatgagaaacactatgagaatagctaagaaagaagtgaacctaggaggttacacattttcagttcaatttcttccacagttgaattgtttgccttatgtttccctttattttatccataagattggtaaatagccaaaatattttaactaaaacagaaagaatagtgataatgtttgaaatagaaattgaattctggacagctgaaactttggtttctgctaaggcaattaggcaaaatttttaaaacagacaaaactgcatatcatttaaggtaacaaactaccatttaattatgggctaga

SEQ ID NO: 898736 - DNA, 623 bp, Homo sapiens
caactgggtatgtcagacaaagggagaaggtaagggaaaggagacgtgactcaagcaaccaagatagggaagagcaaggtagcggtaagttgcaatcaggaactttcctctagccctctaggcagagaggagagcaagtgcttccccttcaccttctgccatgattttaagtttcctgaggtctcccagccatgcttcctgtacagcctgtggacctgtgggtcaactaaacctcttatcctcataaattacccagtgttttccactggctatgacatacccaaatggaaatatcaagtaagcagttggatatacaggtcttgagttcaggagggaatgaaaccaaagctggaggtagtaaatctgggaaccaaccacagatagatgggatcaacaccaagctaatacatacaaggatctgctatttaaataccagttatgaaccatgctaattctatgatcttgagaaaataacgacctcactcctccrttttctcatctgaaaaatgggaatgaaagtaatgcttttttagggtggttgtgaggattaataaaataatccctagtacctgggtaagcactccaagaatgctattgtaactggtttatattattttccacaa

SEQ ID NO: 898737 - DNA, 694 bp, Homo sapiens
acatccacaccaaaaacccttctgtacgtcaccatcatcaaagaccaaaagtagataaaaccacaaagatggggaaaaagcagagcagaaaaactggaaactctaaaaagcagarcgcctctcctcctccaaaggaacgtagctcctcaccagcaacagaacaaagctggacggaaaatgactttgaggagctgagagaagaaggcttcagacaatcaaagtactccgagctacaggaggaaattcaaaccaatggcaaagaagttttaaactttgaaaaaaaattagacgaatggataactaaaataactaacgcagagaagtccttaaaggagctgatggagccaaaagtcaaggctcgagaactacgtgaagaatgcagaagcctcaggagctgatgtgatcaactggaagaaagggtatcagtgatggaagacaaaatgaatgaaatgaagtcagaagggaagtttagagaaaaaaagaataaaaagaaatgaacaaagcctccaagaaatatgggactatgtggaaagaccaaatctacgtctgattggtgtacctgaaaacgatggggagaatggaaacaagctggaaaacactctgcaggatattatccaggagaacttccccaatctagcaaggcaggccaacattcagattcaggaaatacagagaacgccacaaagatactcct

SEQ ID NO: 898738 - DNA, 608 bp, Homo sapiens
tccagagagattgcatatctaaatatgtaaagaacaataaagctcttgaaggaaaacatgagaaaatatcttcatggcttcagggtagrccaggacttcttaaagaggacataaaaggcattcatcataaagggaaagattgataattgggctacattcaaaataaaaagtgtatattcatccaaaacacaattagaacagtgaaaacgcaagacacagagtggggaaagatataactgacaaagaattcctattcagaatatattccatgaatcaataaggaaaagattggcaacctaattttttaaatgggtaaaaatcttgggcaagccatttagaaaaggtaataaacatatgaaaaggtattcaaccttattaatcattaggtaactataagttaaaaccatggtattgaatgactatctttaaaaagactgaaaatgccaaatgttgaagatgtagagtaatgggaactttaagaaccactgctggcagtgtaaattggcacactttaaataactatttgaccaatttaattattgatgcgaatttcctcatttctctgtaatagaattatatattcacacactaacaaagaccgcatggtg

SEQ ID NO: 898739 - DNA, 624 bp, Homo sapiens
gcaaaagggactgagcagttgattaaattaaggatcttgacatgagagattatcctggattatacagatgggttgaatgtaatctcaaggatctttatccatgaaaaggggaarcactctctccagaaggagtgcacccctgcacataccttaattttatcccggtgaaacccattttcagcttctgacctctgaaccataaattttaaacccccatgacatgagtttacctgtgtaacaaaccttcacttgtacccctgaaccagaaataaatgttttaaaataaataaataaataaatctgtattgctttaaaccactacgtttgtggtaatttgttatgacagcaataggaagctaatacagtacccatagaacactttgttgtatgttaaaagaatgtgattggcccattagtagtaacagggaaacatttttcaagacacattgtcattgtttttaagacaatttgcaaaaataaattatgtaagtttttttaaacctccacaaaactaaactaaatacccatggatttatacaggtctataaatgcatgggaaaagatctggtaccatttctatgaaaccaaaacagtggtgacctctggggtagaggaaggctctaa

SEQ ID NO: 898740 - DNA, 608 bp, Homo sapiens
acaactaggatcagaagcacaggtatctttccatagattgccacaatgccagtggagccagctcagccccacacttacctagtgcagactgagcccagcgaagctcaagtctytgaactcttacaggctggaaaccggagaactttaaatgaataatatagcccaggctcctctgggtcacagagcaatcacccctcctaaaatatgactgttttcctcaccattttaatgccatttcaaggataccttacatttccgttcagatctgccgttttatccagctggatttcttttcaattcaacccaattttaaccccaatgctcaagttattttttcccattatgcccacgaatagaagcaaatcataccatcttgcataaatgcagctgttttctctcctcttttctcattttagatgaaaatcttctttcttctttttttattaacaacagcaccccctccttgctccctgctgagggcctcaccattggctgtgtttgttcctcatctcctgtgctctttcctgtttcttcagggagtccctgcagagatgttttcttatgtaatcaaattataggtcaaattcatcaaaagaatagcacacagg

SEQ ID NO: 898741 - DNA, 654 bp, Homo sapiens
tggatacctcccgcttttggctgtcgacctgagtatgacaacggattggaggagattgtctttggctttgaaccctggataattgtggtcaacctggccatgcctttttctattttctatgsaatgcacgcagctgcctccctctttgaggtctattgtaagatatagtctggttccacaagagaccgaggagtgagctaacaagagttcattggagccaactgggaatggccaggttggacaaatattgcctgacaaacatgagaagggccaccttttgtctgcaaagattgtgcttcctgtgggctggaactgcccatcacctctgatgaatgtaaacaagttagatcaaaatccataaggtggctggaatctgtccttggttagttaaatgctaatcaagcccaaattattttattgccttctaaatgatttagaagaatgtgattctggcttgggaaaaaatctatccagtttgtttttcataaaaagcattttctttgtgtcatttatcatgtgactccatacaaccttttcctgaccacctgcatagtaatttacactttaaaaatttatccttctcaaagcctatgaatttagacacaatcactattgtttctgaataggtttaatttcttgaagttatttttatca

SEQ ID NO: 898742 - DNA, 657 bp, Homo sapiens
gctcaactgagggatgcttcctttccaagctcactcatgtgattattagcaggttcaggttttggctgrctcttggtcagacactcccccagcctctggtttcttgctactgggcctcttcatagaacacccacaacatggctgctggcttccatcagaacaagaaagcaagaaagcaagagagcaagagagggtgagcaggatggaagtcattttcttcttgtaacttctcagaggtgctgttcatcagtttcaccatattgtgtttgttaggagcaagacattaggttcagccaagatataagggagtggagaggattatacaagggcatgaataccaggagacatggatcactggaggccatcttaggggctgctgggaagcctgtcctccagcccccagtgattcacatcctccaccccatgcaaaatacacttgtgtcctgccaagatccctaaaaatctcctcccccttcagcatcaactaaagttcagaatctcatcaaatcaggtattggggtggggacttcttgagaatgactagtcacatgcagctcctagagtacagttcctctctctctgagagcctgtgaaactagagagacacagtatctgcttccatacgcctagcattaaatggtataacaggcatgggtt

SEQ ID NO: 898743 - DNA, 474 bp, Homo sapiens
atttctaaggtccctccagatgctcctgtcagtggaacgcctatttagagttagccaagcgtaggcataatgccatctttctgcagcataaaatacagtgacatagaaacatatttgtgtgattttcatgcattccttttttgatgagagatattacccagctaattaggaacaactgttttgtttccttcagatcataacccaaagttgtgattttgaaaagtcatgtcccccttcagatttcttgttttctgctacttctcatgtggaattgctttggctcttcttagttctcttgagtctaaattattccttataagttggtgcaagcatctgattattttsttatcattactgttatgctcaagcattcacagagtggaacacattttaatatcaattgctttctatttctcctttatattacagttcaggacattgtattaattattaaaattctattcgtaggtaggt

SEQ ID NO: 898744 - DNA, 575 bp, Homo sapiens
ccaaaggtaaatgtggctatctgggattctgggaatatcctgaaaagttacatgttctaaaaatagttccattgaaaaaaaacmccataaagcctagacaatgtagcaagtgcttaactgcagagtttagttctaagtgctaaagtaaaaaaaaggggctgggcatggtggctcacacctgtaatccaagcactttgggaggctgaggtgggcagattacttgagttcaggaggtcgaaaccagcctgggcaacatgatgaaaccctgtctgcccctgaaaatacaaaaaaaaaaaaaaaaaatagccaggcgtggtggtgggtgcctgtaatcccagctactcaggaggctgaggcaggagaatcgcttgaacccgggaagtggaggttgcggtgagccgagatagtgcaaatgcactccagcctgggcaatagagtgagactccatctcaaaaaaataaaacaaagaaagaagcacaggcagcagaaagaagggaggatgagacagtccatctggcagggtgaggcttcctacaataggttgataataataggggcatcatttcttgggtttt

SEQ ID NO: 898745 - DNA, 292 bp, Homo sapiens
aaagggatgtcttggcttctaatttttgttaaaagcaatagcatatgttgtataggatagtgcattggggtaaatcttttttttattatttttattttttcatcagcccactgacattgaaaggggatagkttttaggttattgacgagcagttttctctcagataactgccttagtataggggtttgtggtcatgttgatgagagggtaggctggggttaaaagtcgttatggcagtaacaaccttctgaggaccaggaaattcaaatccctctcatgatactttgctaat

SEQ ID NO: 898746 - DNA, 672 bp, Homo sapiens
attttgttacatttatacatctatgaaggaattatggcctgtggtattttgatatggcattttgctaatgtaccttgtgtaattttatatatttcatgtgtagaatayatttatatgagtccagaaagtggagtaacttgtgctttttgtgtctttcagttacgcgttcccatttcacccaagaccttcagccagagcagggcatcaaagattcactccaaaaagtaataccaagaacatatggaaaatgtggacatgagaaattacaatttaaaaaatgctgtaaaagtgtgggtgaatgtgaggtgcccaaagaggttatagtgaagttaaccaatgtttgtcaactacccaaaacaaaatatttcagactcataaatatgtcaaagtctttggtaaattttcaaattccaatagagataaaacaagatatactggaaagaaacatttcaaatgtaacaaatatggcaaatcattttgcatgctttcacacctaaatcaacatcaggtaattcatactagggagaagtcctacaaatgcaaagaatgtggcaaatcctttaactgctcctcaaaccatactacacataaaataattcatactggagagaaaccatatagatgtgaggaatgtggcaaagcctttagctggtccgcaaacctcactagaca

SEQ ID NO: 898747 - DNA, 619 bp, Homo sapiens
accataagaaagtaaaaagacaacccataaaatgggagaaaatatttgcaaattacatttctgataagacayatctgttaaactcttacaagttaataattttatttaaaaaatgacccaagtaaaacagttagcaaagggtctgaatgaacattttgccaaggcagataaacatacggccaataagcacatgaaacgatgctcagcaccatttgccatcagggacatgaaaatcaaaaccacaatgagataccatgccacacctaccagagtggctgaaatttaaaaagacagccagaacaagtgttggcaaagatgtggaaaaatctttggtgatgatggaaaagagatttattttgctggtagaaactgctaatggaaaaggttaagcatagagttacaatttttttttggggcgggggggcacagggcctggctgtgtcacctaggctggagcacagtggcacgatctcagctcacagcaacctctgccacccacactcaaacaatcctcccaccagagccttctacctcaccgttacccttgcaatggaaagaaaaagccttatcagatatgccttatcagatacataatttgcaaatattttctagagtagct

SEQ ID NO: 898748 - DNA, 619 bp, Homo sapiens
accataagaaagtaaaaagacaacccataaaatgggagaaaatatttgcaaattacatttctgataagacatatctgttaaactcttacaagttaataattttatttawaaaatgacccaagtaaaacagttagcaaagggtctgaatgaacattttgccaaggcagataaacatacggccaataagcacatgaaacgatgctcagcaccatttgccatcagggacatgaaaatcaaaaccacaatgagataccatgccacacctaccagagtggctgaaatttaaaaagacagccagaacaagtgttggcaaagatgtggaaaaatctttggtgatgatggaaaagagatttattttgctggtagaaactgctaatggaaaaggttaagcatagagttacaatttttttttggggcgggggggcacagggcctggctgtgtcacctaggctggagcacagtggcacgatctcagctcacagcaacctctgccacccacactcaaacaatcctcccaccagagccttctacctcaccgttacccttgcaatggaaagaaaaagccttatcagatatgccttatcagatacataatttgcaaatattttctagagtagct

SEQ ID NO: 898749 - DNA, 442 bp, Homo sapiens
ggacaggatactcacagggcctgggtggaagatgctcaaggggccttgtggggaagggagggagcarggacccagcctcttggggcctttctcttaagaggctccttcctctcctccaatcccatgccgccccagtctgttctcagagttagatacaagcagtcctcctccaaagattggtccttgatttccgtcccctattcacacactttatggagatgggtctcctctttctctgtgtgtcaaaccctcccaatatatctaaaatgaagagaatggagccaggcagtgtgctgcccagggaatcctctaacccctggcccgtggataaaccccatccccactccctctcatgctgcactaccaccagcgccaccagggtcaggtgttggtatcaggatgatgcaggcctcactaaatgagttagggaggagtccctctt

SEQ ID NO: 898750 - DNA, 568 bp, Homo sapiens
ttaaaaaccattgccggggagatagtgcggtcatttggaggtaaaaagacactctggctttcagagttgccagagttcttgcactggttgtttctcatctgtgtgggccgatgttcctttaatttttgaagtggctgtcttttgtatggggcattttgcttttatattctttgatgcccttgagggtttgagtgtggaataagttgcctttagtttatttgctttgtttctggatactttcaggcagccaaggctcagcccagcactcctgagctacatgctctaaccctgaggagttgtaaccaggactctgtctttgtcctctagcccctcaaggtgaagcacctgctgtgctagaggggttgaggtattcccaggctattggcaactacgctctaatgggggctgctggtaatagtgctccagtgaggggtggggggyccttgtacatatgcacaccagtagagtggcagggagtccatgtgtgcatgcgcaccagcaaggtgatggcgggaggctatgggcaagtgcacactggcagggaaaggctgttggtgagtatgcactg

SEQ ID NO: 898751 - DNA, 610 bp, Homo sapiens
acattttagccattcactaggttcttatatcagactgaaaaccaaaagttcgcacctatctaagattgcagggctaagattactattctgaaagcttttcaaccactttagaagcctctctaaggtcaactcaagcaagacatttacacctatcagtgctttggcatcatcaacctgtcttttagctgtatggcaataaacatttaaaattccaaatcctgcacttttggaagatgttctggaaatgaaagtgtgatttaattttaaatgctgtgtcctcaaggaacacttctaaaccttaataaatatgggatatagacatcatcattcatggcaggacacagtgatcttatctacaggcaatgagctgtctctatagaatagaaatgctagaccttggtgaacacacaagaatcaaagctggtcctagcaatggtgcagaggctaaatatatctcagcaaacatgcaagctcacgggccttaaatgacctgttagccacacagacatttattgcagattctgattgcacasggtgtggccagttaataccagctgcactggcctcagtaaaggtacaggtcattagccagcacaggcagcttcagggt

SEQ ID NO: 898752 - DNA, 684 bp, Homo sapiens
tttttcctgaggcccccaaaattttgtatagatatttctctgwtttttaagtgctttccctatagaaccagttttaaattaattttgctcttgatttaaaaagattttctcttaatttttaaaatgtagaagttaaaaataaatataagggagaaaacatgacgcacacataatcaacatatgctttttctctgagtatcctgctggtaggaaactaacaaatgcactaaaaaatgtaatgtcattaaacataacttttttagacacaaaactggcctattaaaacatgcttcttctcaaaattttctttgatagatgtcaatgagttttaaagagcacaatagacaataggatccattaatttaatttgcattaaccaatccatgtaccacctcttcatttattaaatagcaatcttagatttctctccccaaaagagttatgagaaagttgattaccaaagcagaaaagatggaaaacataggtctccagaagacatattttgttagtgttttagctttctaaattaaaatggatataaatttgttatgagattttaaactgaagttattatgccaaatgaaacagaaagatgacaaattacaatcagtagggaaaaaactttaaaaataactgaaaattaaagaattattgactctgatgtaaaatgagatgtgcttgatc

SEQ ID NO: 898753 - DNA, 684 bp, Homo sapiens
tttttcctgaggcccccaaaattttgtatagatatttctctgatttttaagtgctttccctatagaaccagttttaaattaattttgctcttgatttaaaaagattttctcttaatttttaaaatgtagaagttaaaaataaatataagggagaaaacatgacgcacacataatcaacatatgctttttctctgagtatcctgctggtaggaaactaacaaatgcactaaaaaatgtaatgtcattaaacataacttttttagacacaaaactggcctattaaaacatgcttcttctcaaaattttctttgatagatgtcaatgagttttaaagagcacaatagacaataggatccattaatttaatttgcattaaccaatccatgtaccacctcttcatttattaaatagcaatcttagatttctctccccaaaagagttatgagaaagttgattaccaaagcagaaaagatggaaaacataggtctccagaagacatattttgttagtgttttagctttctaaattaaaatggatataaatttgttatgagattttaaactgaagttattatgccaaatgaaayagaaagatgacaaattacaatcagtagggaaaaaactttaaaaataactgaaaattaaagaattattgactctgatgtaaaatgagatgtgcttgatc

SEQ ID NO: 898754 - DNA, 597 bp, Homo sapiens
tttctctttcacctagtacacctatatattactttgaaatttgaattgatcttccaagtacagagggaaactcatctactctttcaaattcagactcacctatggctatttctcccttgttttcctagaatttgcttaaatatacatttctatttgaatttccattgctcatgtgcatgcaaatacacacgcacacacacacacacacgtaatcttcggaacaaacttatccttcacttttattaacataccttttttaaatctataccattttactcagtttctttagcttacaaaaatctcatctatcaacttgactgatcaaaatatagtcaggtgcccaaattgtatggcccctcccaaacaaacaaacattttataattcttgttctcatgccaattatgcaatgtatctttctttaggaacttcatagaacttttgttattcttttaagacatctaatatggtcttctttttacattaacttatcagcttaaatgaactgctacttaatctaccttcattttaaaatgaaggccaaaattgttattgtattttaagatcrtacaaagtagtaaagctctgtatagttttaa

SEQ ID NO: 898755 - DNA, 595 bp, Homo sapiens
cattaaactcaattactttggatactgggtagaaaattattttgaatgtgtrtgtgtcctggtttctaatcagatgtatcccaaaacataataaggtggatttagaatcctatgttttatcattagttctgacacccagtagctgtgtaaatttcagcaagttatttatctttgcaataaaacataaaacatcctcagggcattgaattaatcttttattgcttaactgaaaggtaaatgcttataaatatctaatgaaatagctcataatatttgctgtatggttgttgatgcttctggacaaaaatgtcaaaattagttgatgctgagaaaattcatggaggtttaaatgagcaaagacatcaccatttattgcaaatataatgggaatttcaaatataatgaaatgggaatttatttcaaatataatgggaatattgagaaccttagttttgtgaaaaaatatgaagtacctaagtttgtgagataacacatagaaatttattaagagaaacagttaaaaatattataacaaaactattcagtttctactattatgctttaacatatatttgaaaatttgaaaaaatattta

SEQ ID NO: 898756 - DNA, 638 bp, Homo sapiens
taaatatcctaaaatataagagtcttttattctgagaactccaaggagataaaatgaaaaaggaagagggttgggtggaagagtgctgggaagtactgaaacaggaaagctctaagctagataacagattcattcacagaggttctgacagggggttttctgtccgcaggggctgccataacaaaatagtacaaattgctggtttcaatacaggtattcatttcctcacagttcagggggctggacatctgggatttggatgccagcatggtcagggtctgaagagggccctcttctgggctcacagaggctgcctcctctctgtgtcccacgtgacctcgccttggtgtgtgcatggagagtgagcaatcaccttttccttttcttataaggacatcgattctatcagattagagcctcttccttatgactttaagccacttacccccaaaaagtccagttctctaaatatagccacactgagagtgaggattttgacataggaattttggcagaggtgggctttgagggagggaatwtcacaattcagcccatatcaagggttttagcgtatgagacagaaaagcccacaatggcacgtggaaggagtaacacctagatgtttcatttttctatca

SEQ ID NO: 898757 - DNA, 638 bp, Homo sapiens
taagggaaaggtaaatgcgtgttttgggataatatgctaatactataaaaggttaagagamtatattcttactccagatataaatatttcatgaagtctccccagatttcttcttaaatcaaagcataatcagtcttgtttgcttacaggagtcaacttatcaaacattctattatagtccatgtcatagggatagttttgttctgtcttgtttttccttgttgtttttgatactgtgtatccagtcttatataacagcctattcagtctgtttattcctgtcttcttttgaaataaagatcctacacaaactggtaatactagaagtcttgctctgctcacttagatgcggagggctggcaggagtgatggtagaaggaaattactggttggtagtatctcatcctccaagatttccatctctgaatcaaggggaggaattatgaggctctgaaaatcatgatggaagatcagcagtagcaccaaacacacaaataaattcatgccaactaaaatttacagggatgctcaggtttttccaaagactttatctttttccaccaatgacaataacacatgtcaaaatatagaaaagaatcatatacctgagaaatagcccagaatcagtgagtatggaa

SEQ ID NO: 898758 - DNA, 623 bp, Homo sapiens
acaccatggcatcagcaataaaggcatttccttaattttggcttccagaaagtaaagactgtctatcttttcttcaccagcctcttgacaaaaccaataaatagcctgttatgttccacaaaaagcttgagtggtatcaataaagcctactaggaacttgtaagagagagcaattaattctgccagtaatgaacaaaggagagagactgtctgttctcacagttaataaagacatatctgagcctgggtgatttataaaggaaagaaatttaacagttccacatagtggaagacaaaggaggaacaaagtcatgtcttacatggtggcaggcaagagagcttgtatagggggaactcccctttataaaaccatcaaatctcatgagacttattcactgtcacaatattcctgcagcatttgaaaaggctggtgttggagttgagcaacgaagggtgtgcccagagtaacagctcacttggaaggagtgccatttttgttgatggaattcatttattcattcattmattcaacagttattgagtatgtatttaaattgccccagacagtgggaaaacaatgctgatcaaaaataggtattttacctgtattcatggaacttgga

SEQ ID NO: 898759 - DNA, 670 bp, Homo sapiens
tatcaacacatttccaatacaaaagattgaaacttagagatgaggatggtaaaataaaactgcaacagtattactgttaatattatataaaatcttattaatcaaggtaatataaaatgcccctaaaataaagaacaggagttaaaaatgaaatctcaaagtatctcttggcaagacaaatatctaaatgaaaataacacaggaaaacagggcaaggtggtgatccttttcctcaaacaattatgagccaattctaagacagatgctgaagttagagcatcctggccactaagcaacaaaatgggagcctgctatagagtgacaattaatgcttgttggatggttggaaatatgaatgaatgagtgattacatcaattcaatttctgaagtcctgagtgcctgggtgtcacaagaaagaagagacaagaggcaaaatgcaaaacccaggggctgtgctcctccatctctagaaattgaatggtggggacctgtttcactgtgtgtcctctgtagtcccttcccatccaatctggtgtgactcagtttagagaaggaagggcagctcatctatgactcaaccttggagcctctttgggaaagtctactgcgaatgtgcsgggagtctgttctaggaattttccaatgcaccagaactgcctctggctccta

SEQ ID NO: 898760 - DNA, 678 bp, Homo sapiens
aaacttcagtgccagaaagaatcccctaagccacaagtttccttgtggggggaaaaggagagtaggaagacagcagcagcatttgctaccaagaactacagcagcctttgctgccaccacaaacccacacaagctttgccaccaaggatgcctgcagtctttgccaaaacaaactccagctgctagagttgctcagagcccatgctgcagcacctccctggagccagagctaccttgcatccaccagattcaatatcaacgtacctccttggacaaggaatttttcacacttatgtcatctggatcaggcaccatcatgcatcctggaaccagcattcctgcacattaccagactcagttccactatacacaccagacagcctttgccctcacacacactcatcaataaaggtcttttcctagaaaagccagactaaagtttggaagaggtgattgcttcttcaaatgtgtagacagtaatacaaggttacaagaaacacaaaataacagaaaaacggtgcaatcaaaaggccaaaataaacttccggtaactgacctcaaataaatagaaatatgtaaattgcctaataaataattcaatagaattatttgtaaaatgctcataagatacaagaaaacacaartagataaatcaatgaaatcaggaaaacaataaat

SEQ ID NO: 898761 - DNA, 680 bp, Homo sapiens
aaccattaaacttaacatggtcatcttttcttcatcttgtgttcacagtagtggcagcaattttccctccttttaccaggccttgacctcgtgcccttgctgtattagtccattcttgcactactataaagaaatacctgagatgagtaatttataaggaaaagagatttaattggctcatgattctttaggctgtacaggaagcatggcactatctgcccagcttctgggaaggccataggaaagctacaatcatggtagaggatgaagggggaagtaggcacatctgcaaggccagaacaggaggaagacagagaaagggtagtgccacacagtttcaaacacccagacctaatgggaactctatcacaagaacatcaccaaagggatggtgcttaaacattcatgaaggattcacccccatgatccaatcaccccatccccaaactaggctctaccttcaatactgagtatgcaatttaacatgagatttgggtatggacacagatccaaactgtatcattctgtccctggcccctctaaaatctcatgtactcacattgcaaaatgcaatcatcccttctcwacagttcccaaactcttaactcattctagcattaactaagaagtccaaagtccaaggtctcatctgagacaaggctagtcccttccacctatga

SEQ ID NO: 898762 - DNA, 631 bp, Homo sapiens
gtttctcctatagtagtaaccaccctccagtttctacactgtaatcctaagataccctgagttcccctattcccctcttctctttttcctatatcaattacaaactccatcccaacagggacttcttgtattttggatataatttaaaacttagcgtaaagttgcaaaacaatacaatgaattctcatatgtgggttactaagattcagcaatcatttaggtcttgtcctgtttgtcttacccctccctctccctctctgaaacatttgagagaaatttggagggggtgtgctccatttccatgatacttcagtgtacatttcataagaacaagaacaaaaacattcttttgtcgtttcctataggttagtgcttctagagcaggtgctcagtaagccacttgcttcagaaacacttgaggggtaaagatgaacttaacattcagattcctcccccaacctctagtcccgttaaatcagaatctccaaaagtacggcccaggaattttaatatatttataatctgggatgyactgctctgagttttattgcataaagagctcaaaataatgattttatagcttaaagcggtatatacaacttagagcagtcacccctggagggaattgtgg

SEQ ID NO: 898763 - DNA, 638 bp, Homo sapiens
ctcactgtatggccttggactggtttccactttggcttgtttggatttttctagtctttcccagctactctggcaaaaaagaaagtctgttcagaaatttggcctagtctcagatgagtakctaactcagacagaatcaatcaggattaaaaaatcaaaacaaaacaaaacaacaacaacaacaacaaacaaccagctgtggcatcttggggagtgtgagccaacaaactgtctctaccacttgtctactttgtgatttttagcaagttgcttatgctttctagttcttggtcctctccactgttcccaccctccatgaaatcagaattacaatttgagtctttctaagctaagggaattttctgaaaaaaacaaggaaatatagcagaggcagctttagaactttgccaaagccctagttaagagtcacacagataaaagttatataggaagaaaaaaaagtatcctatcatagtggcctgttgaatatataaactgattacaaatgtctccccttgtcatatctttttccacttacacacatttttgtataataaccagtaatcacataatttaccattttaattaacctatatagcttataaagtattacatcaaccactacactagtttagttc

SEQ ID NO: 898764 - DNA, 647 bp, Homo sapiens
ctcgtaatcttcaacttttacctttgcttctaagggtaattaattggatctgcctcttgttcttcccacacactcccctctctgttacaaggctcaggttatgctgggtagatggctttctttttattccatggggtgcttattcttaaagctgatggagtaaggccctgccctctccagtgatccccttttccagagaagcctgctggggaaacatcttttccgtgggtacttgtaaggggcctatgactgacaagccaaaggcttttcagatagccagttttaagcaaccattaggctttttcccaagattttagggaaggcattttcatgtaaccgtctcaggagctaagtgggaattcattggtggtctggacactggagacggaggcaaagatgggcagcacctagcccagcaaatggcacatgggcactcatggtcaaatgaatgagattttcagaagggcagtcatgtgcaaacgtgggggttgtgagagcagtacccttgctgggagggmtattttgccattggcattgtttagaattgccaacatagagtagataataaaaaagcaagccaacttttagtctgctttattgtggttttaaatttttcaacaaacatgtaccatcctacccttgtcatg

SEQ ID NO: 898765 - DNA, 565 bp, Homo sapiens
gaaagcccaagaactagagagctgatagtgtaaaagccctatccaaggcagcagatgatgagatgtctccactcaagcagtaaggcaaaagaaaaaggagaaagctgaattcctccttcatctgccttttgttctattgagtgtctcaacatattgggtgacagccgcccacactgcagagggcaagctctttgcccacgttgtcagctgattcacatgctaatctcattctgaagagcctcacagacatcactggaaatcatgtttaagcaggtatctgggcatcctctgacccagcccaggtgacatataaaattagttggtgcaagtcatgtcttgcaacagctaatgcctctttcaaggcgttataagaattatctagacagttaactctcttttaaccacacgacacttacatctgattctgccgaggtattttgatggcaaaaaggctagagcctacactgatgaataccatcgcctctgctctcagatcaatacagtctaaacctgtcccaaaatacaatttttatctatttakgcagcacagatcaagccctggtaa

SEQ ID NO: 898766 - DNA, 597 bp, Homo sapiens
ctacctttcatcatatacgaaaattaactcagggtggattaacgacttaaatgtaagacttcaaagtttaaaaattctaaaagaaatactaggaaatacccttctcgacctyagctttggcaaataacttatggctaagtccacaaaagcaattacagtgaaaacaaaaattgacaagtgggacctaattaatctaaagagattctgcacagcgaaagaaattaccaacagagtcaaccaacagcctacagaatgggagaaaatatttgcaaactatgcatctgacaaagatctaatatacagatatctacaaggaacttaaatcaagcaaaatcaatccaactcaaaaatgggcaaaggacatgatcagacacttctcaaaagatgtacaagtggccaaaaaacatgagcaaatgctcaacatcactaatcatcagagaaatgcaaatcaaagccacaatgagatagataccatctcacagcagtcagaatggctattatcaaaaagtcaaaaaaacaacagatgttggtgaggctgcagagaaaagcaaatgtttgtattctgtgggtggtaatccaaattactttagccactat

SEQ ID NO: 898767 - DNA, 593 bp, Homo sapiens
cagtcatgatttttttcaatcaccttggaatatatttaattctttatatactgctgagattttagcttcattattgagttttctgttctaaaaattattatatcacatagaatttaattgccgacctgattctctactttcctaataaatttatgtgcacatttgatggtgtagcatggacagaagttattaagtcagtgattgtagatggatgtgaagaaccttcaagaataaaagtattaaatacacttaacctctgctcgtgcatgttaggaaggaaagtggagaccagccttttctctctctctttctgcccagcatgcctttgtttttcaaattggcgtcattgcacatgccagtgcactaaggtggcagctctggtgtgaacttggccccctgccttctttaacagaaggatagggggatagtcagatagtcggaggaagtgggtgatttgaacaagttcagagcagggaggaaggctgtgttggggacttccagcttgytctcctcatgcatgaagccactcattccctttctctctcccccaccccttcttcccctcactttcttcctttcctcacttctccttt

SEQ ID NO: 898768 - DNA, 620 bp, Homo sapiens
ttgataaagccataaatgatgatattttttcctttttttcagtcatgatttttttcaatcaccttggaatatatttaattctttatatactgctgagattttagcttcattattgagttttctgttctaaaaattattatatcacatagaatttaattgccgacctgattctctactttcctaataaatttatgtgcacatttgatggtgtagcatggacagaagttattaagtcagtgattgtagatggatgtgaagaaccttcaagaataaaagtattaaatacacttaacctctgctcgtgcatgttaggaaggaaagtggagaccagccttttctctctctctttctgcccagcatgcctttgtttttcaaattggcgtcattgcacatgccagtgcactaaggtggcagctctggtgtgaacttggccccctgccttctttaacagaaggatagggggatagtcagatagtcggaggaagtgggtgatttgaacaagttcagagcagggaggaaggctgtgttggggacttccagcttgttctcctcatkcatgaagccactcattccctttctctctcccccaccccttcttcccctcactttcttcctttcct

SEQ ID NO: 898769 - DNA, 582 bp, Homo sapiens
acctcagtgtcactttgtgaatatacacaccatatactaccttttaaaatgtgcagggatgtatgaaaataaaatcggattaatggcctttgggagagaaaatcaacctttrtgggtatgttttatatcatcagtattctttttatactagtttttgttggcccatagggccctttgttccttcatctttcttgtctcaaattaccatgttgtagatttacatttcataagaagtaacagctcctttagtcctggtgagttccaaccaaaagtgacttctagcactttacgtatgtagaccagagacattcatgttcaaggtcagaatctttggcctcggtttcctagctggtgggaaaaaacccactgagattcaccgccaagaaagtgtaccagtagcagcgtggctgcttgtgaacttactatgcttgtgagtccacatgccatcctttagctttgatgtcatattgtgccactgacatgattgtggcaaaaacataggcagagtggacagagcctgtggaatcttctaatagggatatttgttaagttctgcaaaaatgtttgataaaagcatctact

SEQ ID NO: 898770 - DNA, 556 bp, Homo sapiens
actgaagtcttgaatccctcaaagtcgtctgtgaggattggaatcaacttcttccaaatgcctgttcatgttgacattttaacytcctcccttgaatcacaagtgtgttaatggcatctagaatggtgatcctttccagaaagttttccatttactttgctctaatccatcactatctgtggtagctatagctttacaaactgtatttcttaaataataagactcgaaagtcaaaattccttcttggttaatgagctgcagaatggatcttatgttagcaggcatgaaatcaatgtgaatcttcttgtacatctctatcagaacccttgggttactaagtgcattgtcaatgagcaatactattttgaaaggaatctttattttcttagaagtctcaatattcagtataccatgctggaaacatatgtgctgtcatccaggctttgttgttccatttatggagcactagcaaagtagatttagcatgattcttcaaatccctcatgttttcagaatagtaagtgagcattagcttcaacctaaactcaccagcttc

SEQ ID NO: 898771 - DNA, 508 bp, Homo sapiens
cgtgcatcttatttcagtagaaagggacattactactccttttgtcctcattcagacatctccagagaatttctaaggcccaacttcaacaaatactccatttttatactcacgatgaatggtaggatagcaggaaggcaaacagagtatattcaaacgctgccttcaccacaaccagtgtgacctaaatcaagtgataagacttctctagtctcagtttcattttcaacagtactgagatactagttcaggttatacaagttatctatgcctagtatatagtatataatgtgcacagtgcatgatagtttatattattcttaagtgtttctcaaacatgctttcttcctgatgctgagaccagtaggtgccactgttcctccacagtccatcactcagtctgaattataattgtacatctttgggcactatgagakcagatggtccatatcacattatcagtctttatcgtaccattctttggatagctctgtgtgggtatatatgc

SEQ ID NO: 898772 - DNA, 605 bp, Homo sapiens
ttgccttcattttgccaagtacagagaattcaaagactcacatgaagaatgagtcatcccaattcaaagatgttggctctggtctgagatttaaatctgatctattaaaagttgtactctgttgacaagctcttccaggaagaaggaaggagccaagctgattatgcccaatatatctttatatatttgccctgcaccttaagcctgtttctctctcccataagagaatgaataagggccaggaggagcgggatttatattaattgaactctttttactggagggacacatgaggaatgagtaagaagtgttttccccaatattctcgaatttttgtcttctggagcaatggggagaaaaacagtatgcctgtggtcaggcacggatgtggctgtggccttcaggagaacaaagctgcaggatggtctcatttctgatctcagggtatggaggggatttcctactcccattttcttgctgttcctataataccacwgatctacaaaaagttccagaatggatcaaatcctgcattaagttaactccaaatccattctatacgtgattgtaaacatcttctctctactctatttgccattccaagt

SEQ ID NO: 898773 - DNA, 627 bp, Homo sapiens
aataaaacaaaaagactccgtaagggggaactcctcctgcctgactgctttgagatgggacaccagtttctttctggcttttggacttgaaactgaaacattggctgtttttttagtctccagcctgctaagtttcagattggaaatacatgtcaccttccctgggtctccagcttgccaactgcagatcttgggatttcttggcctccataattgcatgagccaattccttataataaatctcttttaggatctctctagtaggataaattggtatattgttgtttttttttttttttaccttaagaaaaaccaatagcttaatttttcctcgatatatatttagaaaattggtctgagaagagttttcatgaaacagaccagagaactatgtataaaattaagagttctaacccagtaagaaaaagtgcaaaaatgaagcacacattcccaggggccactgcagcctaggaccctcccatcagagggaaggcaaggtctttgatggcttttgagttcagctgagggatcatgctgatcttcaggaatttgttgcttgcatacttattcttgatggcgatgaatttagttaagttttcrtttactttcagcacatttttggccacg

SEQ ID NO: 898774 - DNA, 695 bp, Homo sapiens
ccttatatataatatggtaatgagcatctttgttaaaatgtatgcatttggttcctatgaattactctaatgcttaatggttatttgataagatttgatgtaaataaagcaagcactatgaggagttgataaaaggtcagaaatgattatagatgatcccttgagatactcataataagcatggcaattttcattcattctaacatttgtcaatatgggtaaaccaaacagagttgttgctctttaaatgtaggtacagtaaaaattgaactcacaggaaatagtacacttaaagaatcattaattattacctaattgcttgcaccactgtggcagggacagaaaagtactctgcgatgatgaagttgtcaattacagttgataattaaggggccaggtgcatatttaacttaacaagataaatatctgcccagatgttgtttgtctgctgcttcattaccaggtaggttagaagactttcataaactagaaagactattaaatacacaaccttgctacatcaagaaacctttagtaaatctgttactatagccaatattcatttaagaaggcttttatcagacttcctagagagttgaagtaagcatatctatataataccatctttgcagattytcagtgaaatggatttttcaaatataaaacagatagaacatacaatagtattgggaact

SEQ ID NO: 898775 - DNA, 689 bp, Homo sapiens
ccggcctctatttcccatccgtgcacaccttggggcttcctacaatatgaagtatttgaacgttgccttatttttagaaatcttagtatagtgagcagtcttctgagatggctccaaataatccccacctcctaatattcacactctttctattcctttcctttttagtgtgggagggacctggtaacttgcatctaatgaggagaatatggcaaaaaggataggagaacatggcaaaaaggacaggatgttacaaaagcatataggcgctttctttctctctctctctctcattggctttgatgaaacaagcttccaggtttgagacatccacatggcatagaactgaggatactgtcaaaaaagccaaaggcctttagtccaacaacccacaaagaactgaatcaacaaactgtgacctcagaagtggattatttttgagtttatccttgagatgagaccatagctccagttgacaactggattacaacccatgacagaccctgaagcacagaacccatttactttgtgcctggattcctgacatataagagccatgagataataagtgtgtgttgttttaagtgactaagttttcaactgatgagctatacagaaatagataactaatatactcgctmtagtagacaaaaacccaaggctggaatataaataatttaggtaccaat

SEQ ID NO: 898776 - DNA, 594 bp, Homo sapiens
caatgcaaagatttctaccccatctccctccatatctttaaaagccaaaaaccacctaccaaaactccattactgtttgtgaatgaagaattttcatgacttgaaaaccttcctaatgtcccatcgttaacactaacttttttagaaaggagggctcttgttgtgttctttaacctcttttcacatcataaacttcttcatggttgacatcagtactatcctcttaaaaattcaaatgtgaactaacagcatcatttattgaaggcatattatgttaaaattagtgattttcccaaggacaaaatgttaagtagaaaagtcagtactcagattcaggtgtgactcccaggcccaagcatagcctggaatgaattaagaaggtcaccatattaattttcataaggtgaaagaaaacaagcattatatatttttccacatcagaaaatgttgaagacctaagagactccagtggctggctctgaaccctacagcaagacagtggcagagttggaatggattccrgatgtctttgcgaacgattaagaaagagttactgaataactttccattactcttaaaaagttactcttacca

SEQ ID NO: 898777 - DNA, 589 bp, Homo sapiens
acagacagttggggttgtgcctgaggatcactgatgcatgcacttatacataacaagggagtgcacatcacactgagaacaggaaaaggcattccctcaaaatgtaattccccaatgggttcatcctgcgtactgcccagaaaagcagatttactgagacagtggtattgcaatagagaaagagcaataaatgcagagcaagctaaatggaagacaagagttttattgttactcaaatcagcctccctgaaaattctgaggctaaggattgtaaggatagtttggtgggcaggggactagggaatggggaatgctgattggttgggttggggataaaatcatagggagctgaagcggttgttttgtgcataagttcctaggtggaggccacaagactagatgagtcactttactggtctggatggtgccagttggtctatcagaatgcagggtctgaaaaatacctggaacaccaatcctaggttttacaatagtaatgttacctataggagcaataaaggaggttagggttcttgtggcctctggctacataagtcctgagmcataattttaatcttgtggctaattt

SEQ ID NO: 898778 - DNA, 598 bp, Homo sapiens
aatgtacatacaattaaaacatcttttatcttaaatatacatgtaaatatccacaattatagctcatatatattaattataagtgcaatgcataattataatatatccataatataataagtatgataatataaacaaagaaagtttagggaaatatcctttttcccaagaagaaagaacattcatgttctagtatatgccaatagcaatatagactgcaagacaagctagttataccttatgcaacaggattcatgccaaaagagaacacaagaatataaatttctaaaataaaaaaattaaatttaaatatttaaaacgcaaagttatttgaaaataattttaaaatgaaaacggctgcaaagatttttaaagacgcatttagaaagcctgctgtgtcttcaaacatttttcctatttggtagtggaataaagatttcaagcacaaatttacccatgactgttttgctgagcaaactyaatgccacatccttgttcattactttttcaggctcctacccattgcttctctccctttaatttcccaccatgcacactggcccatttggtgagaagatctattctgtgctcacatgta

SEQ ID NO: 898779 - DNA, 620 bp, Homo sapiens
taaaattactagttaaaacgttttgattttttatcttcctgtgctgcatattcacttgccctctctatctttctttacttctctggagaatgtracttttgttgtaggtcattctgtaaggaaattattggcatatataacttctgagttgcttaattcccttgggaatatttccagtacttctagatcaaagcatataaatgtttggggagagaaatccatgaacaagatcccaagatcaaagatgataaacattggcttctcataaggattatgacttgctcaggatgccctcctcatcttcgcaggtgggaattcaccattcatatccaatgcctgcctattcttcttcctattcttggaataaaaactcttagctaagcctgtcttcctcttctacatttctcctttggagaactcacacggcctgacaatgatcaactttgtacaggcgatttgcaaatctgtgttattacttgcacctttcccaactcggttttatattctcaatggctggcaatttccagatatccctggcctctcaaactttaatatgtctaatgtcaaaggttatctcttctttcaaatcaactttttctcctgccttacctatttatgaa

SEQ ID NO: 898780 - DNA, 602 bp, Homo sapiens
gcttttctcttgccagtatcttatttttctcttccttcttcctaccaaatttctgtgtttttacctcgacttaaaattttttacgtaaagttttaagattttgtattgacaaattatagttgtgtgtatttatggatgcaaaatgacactatgatttttgtaatttgagttttcccttctaacgggcttcttaatctcttcttagtcttaatcaactgttaccactctgatgctttctgctcaaacaaagggcattaatgacattagtcaagcttttgctgtggccccagagcccctattccttgcatgactttctgtacttcaatgcaactcatattttgaaaactggtttatttcttggtttgcagaaccccacaccattctggcttctctcatactctgagcattctgctttctggtgtttttcatactctgaaaattccatttttgtttctttgtttggtcttycttgcttctcctggcctttttaacaataggcgtcatattctgaaattcaatttttggactttctgctattcttgttttgagctcgctcaagcaaattattcattatttcagtgcagaagacccttaaatctata

SEQ ID NO: 898781 - DNA, 602 bp, Homo sapiens
gcttttctcttgccagtatcttatttttctcttccttcttcctaccaaatttctgtgtttttacctcgacttaaaattttttacgtaaagttttaagattttgtattgacaaattatagttgtgtgtatttatggatgcaaaatgacactatgatttttgtaatttgagttttcccttctaacgggcttcttaatctcttcttagtcttaatcaactgttaccactctgatgctttctgctcaaacaaagggcattaatgacattagtcaagcttttgctgtggccccagagcccctattccttgcatgactttctgtacttcaatgcaactcatattttgaaaactggtttatttcttggtttgcagaaccccacaccattctggcttctctcatactctgagcattctgctttctggtgtttttcatactctgaaaattccatttttgtttctttgtttggtctttcttgcttctcctggcctttttaacaataggcgtcatattctgaaattcaatttttggactttctgctattcktgttttgagctcgctcaagcaaattattcattatttcagtgcagaagacccttaaatctata

SEQ ID NO: 898782 - DNA, 585 bp, Homo sapiens
caacagtatattaatactcttttaccaatgccctcacattgaatgttactacagaggcttcacgtttcagtgaaaagacttgaaattttgaagtttgaagacttgagttcaggtctgggttctacctgacaaaattgagtaaacttagacaagctacataatctttctggtctcaggtactttatctgtaaatcagaatgataatactaagatcatggagttattgcagtgatgacatgagatcaatgtctacaaaaaattgtttttcattgcaaaacatgatgctaatatttgccttcagaatgtattcaacctgaaccaaatccaaccacaaggtgaattgactatcttcttaaatatctgctacacaacagatatatcttttatatctctctttccttaggaattgccaaccaagaagagctgactggtatctctagatgaagcatctgactctagcctytctccaaaaggacaaatgaactctcagcttctcgctgggtttatccagtgcgtcatgtgcaaggtcagggcatgaatccattcagcctaaagcaattcatgttagaaatatttgagccacac

SEQ ID NO: 898783 - DNA, 585 bp, Homo sapiens
caacagtatattaatactcttttaccaatgccctcacattgaatgttactacagaggcttcacgtttcagtgaaaagacttgaaattttgaagtttgaagacttgagttcaggtctgggttctacctgacaaaattgagtaaacttagacaagctacataatctttctggtctcaggtactttatctgtaaatcagaatgataatactaagatcatggagttattgcagtgatgacatgagatcaatgtctacaaaaaattgtttttcattgcaaaacatgatgctaatatttgccttcagaatgtattcaacctgaaccaaatccaaccacaaggtgaattgactatcttcttaaatatctgctacacaacagatatatcttttatatctctctttccttaggaattgccaaccaagaagagctgactggtatctctagatgaagcatctgactctagcctctctcyaaaaggacaaatgaactctcagcttctcgctgggtttatccagtgcgtcatgtgcaaggtcagggcatgaatccattcagcctaaagcaattcatgttagaaatatttgagccacac

SEQ ID NO: 898784 - DNA, 585 bp, Homo sapiens
caacagtatattaatactcttttaccaatgccctcacattgaatgttactacagaggcttcacgtttcagtgaaaagacttgaaattttgaagtttgaagacttgagttcaggtctgggttctacctgacaaaattgagtaaacttagacaagctacataatctttctggtctcaggtactttatctgtaaatcagaatgataatactaagatcatggagttattgcagtgatgacatgagatcaatgtctacaaaaaattgtttttcattgcaaaacatgatgctaatatttgccttcagaatgtattcaacctgaaccaaatccaaccacaaggtgaattgactatcttcttaaatatctgctacacaacagatatatcttttatatctctctttccttaggaattgccaaccaagaagagctgactggtatctctagatgaagcatctgactctagcctctctccaaaaggacaaatgaactctcagcttctcgctgggtttatccagtgcgtcatgtgcaagktcagggcatgaatccattcagcctaaagcaattcatgttagaaatatttgagccacac

SEQ ID NO: 898785 - DNA, 600 bp, Homo sapiens
cctgagcgatcaaaatcccaaaaatgtaactctggaaaaaataatttaaaaacgttttaaagacatttatttactcttttaaaaagggatttacttgaaacataaaaacatgaaagaacccttcataggccactttacataataaaaaggcaataataacatacatatttttgtaagtataagcaggtatagtaatgacagttgcacaagtataacagttactagcaggcaaaccctattcataataaataaataaaaaagcaaaatgtatcgatgcttatcactatggttggtaattgtgtgccgtcggcttcttgactgcgatcatctgaaatactgtgacagacaatctaagtcttttgatgagatccatctaaaactataatgggtcaacaccacatattccttcatttattgaggaagttgtaatgtttttacatacatgaacaatgcttacacacaaagtcaacattgtgatagtgtgctttcctggagtgaaatttgcaaaaatgtataamacaagttataactcgaaaagtctttacacaatgtatatctccagtattggaaataaagcaaagatgagatacgtagcaacat

SEQ ID NO: 898786 - DNA, 639 bp, Homo sapiens
attttatgagtaataaaattttattgtaaataaaatcaaaatacctattcagttagaaagttctctaaaattctaatcygctcatagattgatggaactccttactgaaaagtaaaaactcaaatagctttatttttcttaaaaaattaccttttttttttttcagatggagtctcgctctgttgccaggctggagtgcagtggcatgatttctgcccactgcaatctccgcctcctaggttcgagcaattctcctgcctcagtctcccgagtagctgggattacaggtgcaagccaccacgcccagctaatttttgtatttttattagagatggcatgttggccaggatggtctcgatctcttgacctcgtgatccacctgcctcggtctcccaaaatgctggaattacaggtgtgagccaccatgcctggccaaacaattacatttctgattgtaattgttatatgggggattaacttatacatacatgttaatgttatacgttcatgttaatacatgaaataggagacaaaaataaaagttctcattttaaagaagtcagtttctaatggagacaaaatcttttgcctatcaaaatccttttctttaaaacactgggttactcatatctctttcta

SEQ ID NO: 898787 - DNA, 680 bp, Homo sapiens
ctttgtctcagaggtatctttataaaatgcagatctgatcacatcacataccactcagaagacttcagtggtcccaccattctcctaaagcataggaaccaagcactgaagarccagtgacagcagggtgagtagattgggagatctgatcacatcacataccactcagaagacttcagtggccccaccattctcctaaagcataggaaccaagcactgaagagccagtgacagcagggtgagtagattgggaagatttagacttccatgaacttgagcagtgcccatccattttgcacctctatgtaaaatgctacatgaatgccacttcatattcagattgctaccccagtctctttaagataagaattctaaggccactacttgccaactgggaaggttttcttgtcatcccactcttactttctatgtattgcccctccgtgatcacagtttcagaagcagctgtacaggcaaaattcttgactctagaagaggtcaaaacttcaataggacaagttgatcacactccagagagggtgggaacatggtaacacaagtagctattcacttatttatttatttttattaaatactattcatacacatctctaataacagctgcctccttggttagtgtgacaggcagaagcagggcaaatgtcaaactaccaatgata

SEQ ID NO: 898788 - DNA, 578 bp, Homo sapiens
aaaacagagggttccaataatagcaaaaaaaaaaaaaattgtgtctctgcctgtgtctctctttctccacatgttctcttaggacaaatagcctcttttaagtccctcttccaacgcattcactcaaaacacaaacacacacacactctactacataatgatttctggagtccccaggggagtctcagatgatgtagacttcacttgctctgtgttctgctactgtcagaacggctggcaccagagtttccaattcaccaaaacaaggtgaccagatttctttttcctattacacagctcccaaagcacagcagttttaagtccgcaactctctcctgtctgctctgctcaaagccctctcccatgaatcagttttgtggattgggccacaggaggctctgaatgataattgtcatgttatcctcagctccattctcctctacaaaaccagaatcttactagaccaaacttggcttgactctctcattacatmgtatgaggtgccttttttttcctcttacaaatctccacttccagagcctgttgccacaatcccaggcattgccagacatgcccaa

SEQ ID NO: 898789 - DNA, 638 bp, Homo sapiens
tgataccatttgtaaatatttaatgtacaaatgcatctagtttcaacacattactcttgaagccctggtctttgtttttggttagaaaaaaaaaagacactatatttctaggtttatttggattgaagtttctatatgctgtttgagaagaatcaaggcagtgtacagcatatattatgcaaccctgtggctaaggcagagggcctggtaggggttgcttctttacttccacattatgaagagcaaaataatccagtcattgattctattaatcaactgtgaatatgataagttcacatgatgttatgtgttctgggtttgttcctttttatttatttttactgtttattttaggtttggggggcacatgtgaaggtttgttacatagataaacacgtttcatgggggtttgttgtacatattgttacatcacccaggtattaagctcagtacccaatagttatcttttctgctcctctccctccttccacacacccccgtcaagtagatcccagtgtctgttgtttccttctttgtgttcataagttctcatttggctcccacttataagtgagaacatgttgtatttggktttctgttcctccattagtttgctaaggatgatatcctccagctcc

SEQ ID NO: 898790 - DNA, 673 bp, Homo sapiens
gacacggagagtcacctggaccttgtgcagaggaaccaaagttcacatggagctcaacaggccttgagtccctgggcagcctggcagcagctgycatagccctgccaaaaagggaggacaggctcttttgcactcccctaggataaatgccacagcctcagtgctgaggagctcacagactgcagactgcttgatcccaaacccctgctgctctgcaccaggcagagcctgctgatttgagctcccagagcagttgccatgcccttttctacactctgtgggtggtctaggatggaactcccagagttaactctgccatcaccattcttgctgtccctgccccttctttcctaaggccagggagagaataaagaggctgagcatatttgcagccttcacaggggtgccacagccaccccactaagaggtggccagactgtttactgtgcaaccccacccctgctgctcctcgccaggcagggcccagcaccttgggctcccagggtagccaccctgtccccacctgaacactgttcaatggtggctttatgttcttctgggaccaaatcgcccacaggtggctgataagcccttcataactgctgctgctgttgttcccatccctactgccctcaggcaagggaaggaacaaggaaactgggcacttctgtgc

SEQ ID NO: 898791 - DNA, 575 bp, Homo sapiens
agctattttaagagctcttggaaagccaaaacaaatgattggcttcctccaaaacttatttcataaagtcaaggccaaytttctattttaaatttattttgttaatgccctttaatccctaaaggtaggagaagaggaaaaatgtacatatgaactcaggttcattccatagctttagccatatagctatcactgtctagattgccaataaaacccacaaacatttcctaattatcctaattattctctctaatcaaagatcaaagctgtcatcaagactgaaggacttaaactgagtggggtggagcaacagtacaaagaaccacaagcaaacaaatgtctgtcataaaatctccatgttccttgcttaaaaatctgcaagctgattgaactcatgtcaagtcctgaggatatattatatttgacatcactcactacagaaattgtaaactttctaataaataacatagagcaggatgggacatttagtttatttaccttcatttatgcagaacccaaaagtattgcctgtgtttttccaggctccttcagcaaaacttttcttgtgaattctt

SEQ ID NO: 898792 - DNA, 575 bp, Homo sapiens
agctattttaagagctcttggaaagccaaaacaaatgattggcttcctccaaaacttatttcataaagtcaaggccaattttctattttaaatttattttgttaatgccctttaatccctaaaggtaggagaagaggaaaaatgtacatatgaactcaggttcattccatagctttagccatatagctatcactgtctagattgccaataaaacccacaaacatttcctaattatcctaattattctctctaatcaaagatcaaagctgtcatcaagactgaaggacttaaactgagtggggtggagcaacagtacaaagaaccacaagcaaacaaatgtctgtcataaaatctccatgttccttgcttaaaaatctgcaagctgattgaactcatgtcaagtcctgaggatatattatatttgacatcactcactacagaaattgtaaactttctaataaataacatagagcaggatgggacatttagtttatttaccttcatttatgcagaacccaaaagtattgcctgtgtttttccakgctccttcagcaaaacttttcttgtgaattctt

SEQ ID NO: 898793 - DNA, 608 bp, Homo sapiens
cagggtgttctgatgattcaggctcaggaatctgcatttcatatgaaaaggtgtaatgactctcacatgttgtttacataaataatattctgagaaacactgtctccccaaactccatgttgtccaatgaagaaactgacacccaggtgagattaactgatttactaaaggactttccattactttgaggaaggaagaaatagatgtagaacaaaaaggggcatgcgagttgtggagcaagcacaaactgtcttttgcctcccatggacactgtagccatctcttttaaaattgatcacttactaatccatacatataattattttttaataaatttgcatcatcagaattgctgcatcacagaatattcacttttggaggatttcaatatatatttatcaaaattgtcttctacaaggcctatagcaatttacaatcccactagcagggtaagagagaagggtaatccacttcaacctcccaccaaatagtgggtcaggaggcgatagcrtgctatctggagctccggctaaatttgctggggttctgcagagtctccaatggaaggttaatttttaggcacagcattttgtttttgacacagacct

SEQ ID NO: 898794 - DNA, 589 bp, Homo sapiens
aatcttaataaagtacaattttgtttctcactcatcggaccgtacggtgtagtgctatggtgggtttttctctgtatattcgtttagaaattgggcttctttcctcttgtggctccacmatttcctagggcctcagtattctacactgggtcctttcagacagctgaccatttttaaagcattaggccatttcaagcatctatatagctaataagatttagacaatgtgcttctgtatggaagaccatgcaggaggattgtcgaggtctggctggaaagtggcagacatcacttctgcacacattccattgaagacataaattaaacattagatttacttctacatgttatagctcagaaatttcaaacttcattcattaaaagtatcactgaaattatctatataaaaatattcattattgctatttaggaaattcatgcttatgggcatcatattttcatgctattcatagtccaatttttatttaattaaaaacttggaaagtgaaaaaaagtatgcagtgcatttttctaaaatccattaattagccaagttcaagcatagaattgccattcttagattacaaac

SEQ ID NO: 898795 - DNA, 678 bp, Homo sapiens
atgagttgatttcattaaaatacaaaaaaaatttgtcaaatactctttcattgacaaaaaaattagctttaaaaaagaataatagccctattcataaattttcatctatttgaactcctttacataattaatatttagcaggaacaattgtatgtcattacacatattggtaagctaaatgcaattatgagagcacgtcacatttgggataaaaaatgataagactgacataccttctgacctcaatctccatggaaaataattcaagtaagataaattagacttagagaaatataggaacaagattcttgttaaagaacaagtcttgttataaatgccgcttgagtggagtaaagtctgttttaaaatccttgaatataattgactgtatgtctttttggaatgaaggctaaaatatccttaacatcaggaaatggattttaaacaggttaaatgattttatctgtaatttaggaactttacctttttgcacttttagctttaaatctcatcctccacagtctgagaagttctttaaattatgaaagttggtttatagatgtattttcacagaaccacygagtcctggaaattgttaaaggattatgccagattaatttttgattttgctacagacaatcaaatgctcaacatctatggagcatataacatcctggt

SEQ ID NO: 898796 - DNA, 626 bp, Homo sapiens
tgttatttgtatgcattcgtagctattgtgaatttaattgttttcttgayttctttttcaggtaggtcactattagcgtagagaaatgctactgatttttgcatgttaactttgtatgctacaactttactgaatttgtttattagttttaacagtatttttggtgaagtctttagggatttctatatataaggtcatgccatttctacaaacaggaacaatttgacttcctcctttccaatttcgatactttttatttctttctgttgtctaattgccctggctaagacttccaggactttgttcaacagagtagtgaaagaggggatccttgtcttgtttcttgttcactatgatgttagctgtggagttgtcataaatggcctttattgtgttgagatacataccatctgtaagcactttttgagagttatatcataaaggtatattgacttttgtcaagtgctttttctgtatctattgaaatgatcatatggtttttatctttccttttgttaatgtgatatattattacacaatttgttgatctgcatatgctacatcattcttgtatctctgggatgaattccacttgatcgtggtgaatgatctttttagtgtgctgt

SEQ ID NO: 898797 - DNA, 607 bp, Homo sapiens
acattaaacagaaagaaacaattttatctgttgtaaagataggttgcccaaataaatcacacaatcaccaactcaggagatctgaattaggtttcattaataaaataaaaacattagtatttatcaatattcacacagaaccacagataaaactataaacaaggactttgtaccaaaaaaatttatcaaataaaggttttgggcctatcttaggctgtttagggtgatataacaaagtatcagagactgggtatgctataggaacagaaatctattccttatagttctggaggctgggaagtccaagatcaaggtgccagcagatttggttctggtgagagccagcttcacttccaagataacacctgctgttgcatccccacatggcagaagaggcgaatgctgtgtcctcaaaaggtggaaggtggaaagcagaagggcacaaggaccaggcagcattttgaagcctcttttataagggrcactaattccattcacaagggtggggcccccataaacttaattacttccccaaaggtcccacttaatactgttgccttgtaggttaagtttcaacatgaattttggagggtacacaaacattcaa

SEQ ID NO: 898798 - DNA, 652 bp, Homo sapiens
gagagaaggaatggaggaaaagctgccctcaggcaacaggacacttggtatagcctggctccttcaggtttaatagtttcaacagtgtcaatggagcacacatggagcttgaagaacaagcagcaagggttctgtattctaagccttggagttttatggctctagctacatctgccttacaattgttcaaccatttatctatcagcaccaggcatcagacgacagcaaattcagattcttctaaggcaggcagcactgttttcttgccaataagcaaagaacagtggtcagtgtgcaaagcagaaggagctcatgtggctgcctcgtgaaagcactcaaggtgagaggctgcaaccacagtgctgtgttcagacttaatggacacgagggtaaaaaggcatttatattggaatactgatgctgcctgatgggggaagagcttcaggtagatttcctgagtcatgttccccttacaacacacaactttgctcagaagacactcctgaagtttaccttttgtaacatcagaaattcctgctaagtggatttcagcatcatgctcgtggctacaagtttcatgagcactatagcactaaagtacycactaggcacgtgggctggagtaatatcggacaattcatttccaaactgg

SEQ ID NO: 898799 - DNA, 564 bp, Homo sapiens
ggaagagcttcaggtagatttcctgagtcatgttccccttacaacacacaactttgctcagaagacactcctgaagtttaccttttgtaacatcagaaattcctgctaagtggatttcagcatcatgctcgtggctacaagtttcatgagcactatagcactaaagtacccactaggcacgtgggctggagtaatatcggacaattcatttccaaactggctacagtgaggtcccagcactaccttctttgacaatgtatcatacgtgacagtctttcctggatgcctgttagctcccaacagacattctacacctcatgctttcatattcaattccttcagcccctctgaaggtttcctctcccagagagaggggtcaacatctacgcttcatgtccacgtgatcagcatcaccacacctgtggacaggaggatgattgaggatgcaacaccwagtcacagtcaatctgccttcccttcacagccctaccccagtggttccagccacctcagcccagtgagctggtccacaacccaaacccctgtgccagcacacaaggaaag

SEQ ID NO: 898800 - DNA, 587 bp, Homo sapiens
caacatagaactagaacacatgaaaatcttaataactcagtagaaaaatgccccaattcttgctcttggtttttaaaatgtccaatgccagaaagctgtctcatgctactacacctactgcaaaagcctctatagtgagcaagcatgggctcagagaaacagagggggtaagcgagggtttaagtgagggactagtaacagccccagggttgatgtaaagccaccaccaaaaagcttaggtctacttaaagtatgatcagacttaaaagtcgcctggtacatcacaacacagtctacagtacatgatttaaagactcatttttcaagatgtccaactcttaaaggaaaaaagacaccattcggcaactgagtgacagaaaagcagcaccgtgtacagtagtgagaaagtattttaccatgtcacctccagatttcccatggacttggttgtaaaactctgacagctgtacgagttttcctggcttactttcctcctctgtggtaggctcagccctgttgtttttggagatactgccccaggrcacatggacgccaccacttcactagccaggtcacccatgatccaa

SEQ ID NO: 898801 - DNA, 608 bp, Homo sapiens
atagccctggaggccaccctagctacagggttctttgtgggactgggtcaaagcttcagctgtaaaaagcccacaattcaccttcccctgcccaaccatgtttttcctcccttcccagtgtgattcccaagctcactcaactagtaaattttaatgcctgtatcttacagtctgcttctcttcaacccaaactggggctctaggcttcacaaacccctttttttaatcacaaattgtagatgacataggaaatagaagatccttgatcttagaggagtatgagaactagtgtaaacccccttgatttaccaggactaacatatgatgtaattattggcaagtaaacactctttagctgactacaataaacagtgtcagggactataccaccttacccaggcaacaccctgtgtcaccctgtacatgtctttgtacattagatgggttacttcctttaagccgatgcagtaaatctaaagcctgttacgtaagttaacagttctttcatattgtcaagcctakatcatacatacttttgcttaaaggaggactgagaaatttcaatactggcctcaagacgacactttgtaatgctgtcagcacaaacg

SEQ ID NO: 898802 - DNA, 633 bp, Homo sapiens
cttgatcagaaggacatgctgcctgcatcctgaacctcccaagcatcatacagtcctccaggtaacctttgtagacctgatctccatcctatctgccagtgaggagggacatgtgtgaatgcagctgtagtcagtgacttcgatggctgtcaactttagtcaaaagacaaaattaaagttgaagactgacatctgacatgtcttctgcacatttggaagtaggtgacttgatacttttaagatctttttggatgctcagttataaatcaacgtatctgcaagatcatattggggcaatacaagtgtcaggcaatataaagatcacagaagttgagacaacatacagtgggttttgtcaccagaagctgaatatactactaacactaaaacttgggtaccttgagtagagatggctcacagaaccctaggctctggggtacttttaaatcccaggctccacctttccccatcattgtcttcccatcttgtaagtcattgtagctrtagagaacatgcatacaggcagaaggacctacccttctgggaagacaattctcacaactggaggtggtggacagatgtggcatgttcatgcgacaacaagtccagtgggagtccagctgccattactgg

SEQ ID NO: 898803 - DNA, 633 bp, Homo sapiens
cttgatcagaaggacatgctgcctgcatcctgaacctcccaagcatcatacagtcctccaggtaacctttgtagacctgatctccatcctatctgccagtgaggagggacatgtgtgaatgcagctgtagtcagtgacttcgatggctgtcaactttagtcaaaagacaaaattaaagttgaagactgacatctgacatgtcttctgcacatttggaagtaggtgacttgatacttttaagatctttttggatgctcagttataaatcaacgtatctgcaagatcatattggggcaatacaagtgtcaggcaatataaagatcacagaagttgagacaacatacagtgggttttgtcaccagaagctgaatatactactaacactaaaacttgggtaccttgagtagagatggctcacagaaccctaggctctggggtacttttaaatcccaggctccacctttccccatcattgtcttcccatcttgtaagtcattgtagctgtagagaacatgcatacaggcagaaggacctacccttctgggaagacaattctcacaactggaggtggtggacagatgtggcatgttcatgcgrcaacaagtccagtgggagtccagctgccattactgg

SEQ ID NO: 898804 - DNA, 590 bp, Homo sapiens
cgtcaaattttccacatttcctaattgttttaaagatgtgttcagycaaggtaaactgcccactataagccatacagtttttttttttttttaaggttaatatgtagtttaaagtcttagtagataaagttatatccacaggtaaaactgaatgaagtatgtagcaagattcttgaaggtatgttggaacgtagaaagccccctgggatgatagccagccatacatgggtcatggagagggagcaggaactcagtcctccaaggactcacctgcaagcagcatcagagcagcttctcagcctctgcccagacaggctacatgtgacccgatagcagcctacaggaaggcacagaggtcattcagacccacagtgggctgtatcccacacactatgactgtggtgccggtcccggtcccagtcccaggccataataggaaaaggatgtcccaaatcaagaggaaaaaaggcagtatcataagccctaggagctcagtttaggagatgtgttctaggaggcaggcagtctgctccccagggaatgctccttgcctgacccaagctaccctgactctccacactgagaattgg

SEQ ID NO: 898805 - DNA, 593 bp, Homo sapiens
tttctactctgctgcctttggcctgcctctcaaacaccaatatacagaagataaagagaagagggccaaaatatgagagactcagtacattttacytaacaagagccaaacaataacccaaaaggactttaaattattgcataggatataagtatagctgaccggattatagtctttgtcctataactactaccctaagtcactactgagtaaatagagactcattaatagttaaactcatgagagttaaggagaaaatgagttgtatttctttgcatatctgaatcagagtgtgattttgcaactcccctatgtgtaaaatgaagacaatactttttgtgagaggtggttgggaaaataaaaatgaaatcttgttccttctatgaagagcagctaagagtgatatgcttaatatgttagcttaatttcaattacccgtgcccactgcccactggtgagcaggctctatgtaaagcaaggcttcctgtatccttggggtggtgagaaaaggaaggcattcaggagcggatctcatcatgagcagattgttacattttctaccccaaatcctctccactccaatcacccatatt

SEQ ID NO: 898806 - DNA, 589 bp, Homo sapiens
agaaacagaacaaaatagcagaaacagtagttaagaaacagactcacaaatatattgtcagtgatttctgacaagggagtacaacaaaatggaggagaaaagtggtcttttcaatacgtagtactaggacaactggatattcacgtagaaaggaataaaatgggattcctattgcacatcatacacattaagtgtgaaaggcaaaacaatgaaggtcttagaatataggaaaatatcttcatgacctcagaacataaagaagctgactacactaaaattataaactgtgaaaaggcaaatctagaggctgggaaaatatatttgcaactagcaacaaatggctcaaatataaaaatacacacacacacacatacatatataacaacaaatcagtaagaaaaagataacctagagaaaaaaatgggccggaggcatgaacaggcacttcatacaagagaaaatacatatggctaataaacttctgaaaaggttccaaccactttgttctggggaaacgcaaattaaaaccatagtaaggcaacactacacaytcatcagaacggctaaaattttaaacactcacaatacc

SEQ ID NO: 898807 - DNA, 652 bp, Homo sapiens
ttagtgacttataccaccaaaaatcttcactacttagtgctctattacactcttctgcattgggtaagttcactgtttttgttatgggctcttataagcygtgtattttcacatttttggaaaattgtttagatccataatagctgataaaagttgttcaagttgtcatcatacagccacagaagaaaaaatagtattacagtggatgcaaaaataaagtttagtgtctaggatccttcaataaaatctttgggtaagtagtgacttaaaacagaatgaaaacaaagaacagagaaaagaaaagacaagaaaagaaaaaaaggagagagagagagagaaaggaaggaagataaaaagagaaaaaagagagtggaaggaaggaaagaaggaaggaaagaaggaaggaagggaaaaaaaggcaactaggaatttatgggaagcctttgacattataaagaccatcacaaacatcagtgcaggtagaaaggaaggaccaatattgccattacttacattaagggctttgggcattttgaagagaatagaagagagagttcaaagtgcaacaatggtgcaggatcacaagaggactgttagttgaacctcaaattgcactgactcagttaatgcttccacatttctaggattggat

SEQ ID NO: 898808 - DNA, 578 bp, Homo sapiens
actaggcctttgaaagcacagcataaattaagctgagagtgcttctgacttttaccaatgtttggttttattgttaataattacatttggcatttaatcacatgttttgttagatgtgcctgttacaggggatatttatatattcaaataccattttaaacattaaaaatcatgtatgtgacaaaaaagattcaggtataaagtgttcttttcaaaaacttccattttgaaattaaagaataagacatctgtttagcaacattataaggcagatatatttataaatgaggaagagttaaccttttgtaactttagataaaagtctcttcttaacttcatattgattttctatagagtaaaaggaaatagaagtttaaagaaagaagcctattaagtggcttccagtaatattgaaattgaaacaactttaaaatcctttataaagacatttggattaaagtcttgaaatgkttagactgttaacaacaacatcaataaaataacatataaatataaagtcaaagaagaaaatgtctattattaagtatttataaattcaaatatataaattaatctgg

SEQ ID NO: 898809 - DNA, 650 bp, Homo sapiens
ggactaatttagaacataggttcttaatttatgtggaacttcatagacctctgaggatgaaattcagaggtcagcacattatgaataaatgtgtattaagcaatatgctgtaagcatacataaaragaggaatctatcaaatttctggccacaagaatatttctaagtacatttccttacgccagatacctgtccctctaaaataaataaataaaccaccacaaacaaaaacaataactttccatactggcctgatttgatgagaatgtatgtgcctactacaaagagccagcccttcacagttttagtaatattgtgtgcatttgcttatgaaattaaaaaaactctgatgaaaataattacatatatcttgtattagaaaaaaattaatcctactgtgggtaattttaatattcagtaaaattaaagttcaatataaacattatttgttggtatatagaataaagtcccttaaatattggaattccacaacttatttagtgtttggtgcacatataaaactcagattggtcaatatagttattttaaaatttggaacaaatttggcattagattgcaaagaaaaatatagcatagttgtctctttttaaaatatagtactgggatagtttacataatttttatttgga

SEQ ID NO: 898810 - DNA, 655 bp, Homo sapiens
ctagtaacatcatcaaagtatctcaccctgattccatgattatcaagaagtctccagataaaaatgaagctttctctgggaccttgaaaaaatactgatattgtagtctgctttatagtggaatattttattatattttaataaattgaaatatgtgttcatttatacaaatatatgtctttaaattcttcaaatggatattctaaactatatgtgcttttatgcctgctattcatgacctccatgggatgtatcaacacataaacacataataccattaatgtgaatagttctctttgggagacttaaattagcttgttgatccaaatgtgtctattctttcttaattatttatagaaaatgaatatttattgtacatgtacagtggacagagcactatttttagtgctttatttttattatctaaatttgatcataccagcaacccttactatgagtctttctttctgggcctctcatttgcacaagttctttctcagcacaagcggggtccttacacyatgttatgtagtcatacagttggttagttttgcataattagattttaactgccatctgataagaccattcattctttccaaccccaattatcatctgttaaagttagcctatttgtctggaggcaatagagagt

SEQ ID NO: 898811 - DNA, 666 bp, Homo sapiens
tttgtgttgtatagttgtaccagtttagacaaatgcataatgtcatatatctaccattatagtattatatataaaactttgactcccataaaaattttctgggttccacctattcatcttttccactctcccaccaaaccctggcaagtattgatctttctaccctattttttgccttttccagaattccagatggttggaattatatagtatataaccttttatgcaggctttattcacttagctatacggatttaagtttcctccatgtcttttcatggatgcatagttcatttctttttattaacttttaataaactatgtatggattttccacagtttttttatttattggcctatagaagaatatcttggttacttccaatttctggaaattctgaataaaagtactacaaacacttgtatgcaggctatttagaggacataagttttcaacttatttgggtaaatatctaggggtgcaattgttggaccatatggtaaagtgttcttactttgtggaaaactccaaaacagtcttccaaagtggctgtaccattttagattatcaccarcaataaatgaaagttcctgttcaatatccttccaagtatttggaggtgttagtgctttgacctttaactatattaatagatttatagtgat

SEQ ID NO: 898812 - DNA, 608 bp, Homo sapiens
cgtgcactctgagggaggctcaggaaagttgaaaaactagctcttcatgccagtatacaaggcttttcctgacttagaagttaccaagttactcattttaccaaaacaattagtgaaaagtaagtagttcaaattacacatttgtcatgttgactaaacggaattgctatattgaatttttactttttttcatccccaatttttccaaaatggcagtaagtgatggtggacaatgatgcttgcagggatagagggggagtcataagtcaaatctgccttggttagtagctttgttagcttgaaatagtttcccaacagcctctgttttaaaaaggatcacagatcgacaatctacattttatttttgtcttagaaagttttgccatcacctttctactatggtaattgagagtcatagtgattttttgtattctcctgatacattgatatgggagaaagcttagatatcaatgggccaggagagtcagaaccatccagaaactttgcaatactcctgggaagggctytatgtaacaatttgccaagagcctatgagaaaagattcttaaatgaaaacttaaagagaaaaatttctagattgaagtaaa

SEQ ID NO: 898813 - DNA, 552 bp, Homo sapiens
ttgaaacctaagtataattaaatatacacttayatgtataagctaattttcaagtttatttcgctaattataaaaacaacttctgtttattgtgaggctgcagagaagtctagaaaaaagaaaaactcatgtggaagctcttcatctacctttgcataattaatacatctttttgttttctttttctgagacggagtctcgctctttcacccaggccggactgcagtggcgggatctcagctcactgcaagctccgcctcccgggttcatgccattctccagcctcagcctcccgagtagctgggactacaggcgcctgccaccgctcccggctaattttttttttttgttctttttgtatttttagtagagagggcgtttcactgcgttagccaggatggtctctatctcctgacctcgtgatccgcccgtctcggcctcccaaagtgctgggattacaggcatgagccaccacgcccggccaattaatacatcttttaaaaacatctctcattgagatacagtaaaaatatggattcaaaatatgattta

SEQ ID NO: 898814 - DNA, 552 bp, Homo sapiens
ttgaaacctaagtataattaaatatacacttatatgtataagctaattttcaagtttatttcgctaattataaaaacaacttctgtttattgtraggctgcagagaagtctagaaaaaagaaaaactcatgtggaagctcttcatctacctttgcataattaatacatctttttgttttctttttctgagacggagtctcgctctttcacccaggccggactgcagtggcgggatctcagctcactgcaagctccgcctcccgggttcatgccattctccagcctcagcctcccgagtagctgggactacaggcgcctgccaccgctcccggctaattttttttttttgttctttttgtatttttagtagagagggcgtttcactgcgttagccaggatggtctctatctcctgacctcgtgatccgcccgtctcggcctcccaaagtgctgggattacaggcatgagccaccacgcccggccaattaatacatcttttaaaaacatctctcattgagatacagtaaaaatatggattcaaaatatgattta

SEQ ID NO: 898815 - DNA, 552 bp, Homo sapiens
ttgaaacctaagtataattaaatatacacttatatgtataagctaattttcaagtttatttcgctaattataaaaacaacttctgtttattgtgaggctrcagagaagtctagaaaaaagaaaaactcatgtggaagctcttcatctacctttgcataattaatacatctttttgttttctttttctgagacggagtctcgctctttcacccaggccggactgcagtggcgggatctcagctcactgcaagctccgcctcccgggttcatgccattctccagcctcagcctcccgagtagctgggactacaggcgcctgccaccgctcccggctaattttttttttttgttctttttgtatttttagtagagagggcgtttcactgcgttagccaggatggtctctatctcctgacctcgtgatccgcccgtctcggcctcccaaagtgctgggattacaggcatgagccaccacgcccggccaattaatacatcttttaaaaacatctctcattgagatacagtaaaaatatggattcaaaatatgattta

SEQ ID NO: 898816 - DNA, 617 bp, Homo sapiens
aactgttgccccttatattatgaaagttattcaatgtaataaacctactaccagctacctggcgaatcaycctagaaatggtgtcatatcaaggactcagtgttgttatgtgctgctgtcagatttaacactcagaactggctgtagccagactggcctttgggattcaaagttgatgctgcttatcccatgcattgcttctatttctgctactatgttcactttgttcataagcccactgggtgatgaagagggtggcagggaaataagaataactgatacccacagaacaagtcattctgtccatgtcattatcaaaatcctgctctgatgtggtcatcccttggtgggcattcacatggaacatacatatctttatgtaacttacccagtgagaggggtttatccacaaaattctttccaattttttttgtcatgaattgtgtaatcatgttccctacatgtcgctgaccatctagccaattcatgggccacagcagtgttgcaggattggggatcataagatctcaaactcctggtctcaagcaaaccctgcctcagcctcttaagtagctgagactataggcgcacaccacaacgcccagctaattttgttg

SEQ ID NO: 898817 - DNA, 624 bp, Homo sapiens
aaccagctgtccctcttgagaatcctgataaagcagaggccacccaggcctgggattgcaggctgggagcagagtttgggggtagaaggcaacctccaagaygttccttaatctctgtgccaggatcttggaagtcagagggtaaaagcacacctacagctgtacttgagctgatgctgtggatacacactcctaaatctatgtggggacagttttgcctactaggaaaggtcaccccatgaccagactactggctccttttaatgggctgagcagtgttggcaggctgctggctctgcagggctcagtgagaacatctgcaacatggatcttctccatgaaccccaaggccatgtggcaagccctcctcccagggaatggacttaaagtgctacaagaggtcagatacaaagcagagttttcattcaaaaacctaaaacaggaaactgtttgaggggggtagtgaggaccgataaagatcatttcccagtggttttaaaatcaagggatgtaagaccacaatctgctaaagctaccagattataaatccatagttcaggacccaggaggtctattggcttgcacatggatgcctatgcatgtgcatgtttgtgttcgttgatg

SEQ ID NO: 898818 - DNA, 619 bp, Homo sapiens
catgggtggcagatactcagaaaacaatctgaatatgaccaacaggaaagagctggggcctccagtccccctcgccccaacctgcagattaaagtggtttctcagttgtctttcctggggctcatctgaagggggcaggaaaagcggtggcttgtgagagtcctggggaggtcggtggccccctcaagtcaggacgcttcctcctccttggatatcctacagcttccaccaagcgtcaactgtgaccaaagaagtctgtggacaagccttcattaaagacccttgtcttgtctggtaaacgtatctgtgaaaccccatacaccagtcagggtcacaagcccttctctaggtttccttcttgggaagctgttaactacctgttttcctatctgcctatctgcctgccagccctgtggggcaccgatcaacatcgggccttcagcctcctccctagggcctggcacacattagagacgcaatgcccagtgaatgagtgagtgaccctgtgaaccaaataatgaagaataaacactaggacaaggcaatatgagatttccccacaccgcatacttygtactgttggagcagtggcctagcagagagcattaggagagccctg

SEQ ID NO: 898819 - DNA, 602 bp, Homo sapiens
acaaaaagagtatttccaatatggtgaataaaaaaaaaaaaagatttaactctktgagatgaaagaacacattgctaaatattttcacagatagcttctttctagttttcatcatgggatattcagtttttcacgataggcctcaatgagctcagaaatgtcccttcatagattctacaaaaagagttctaatttgttgagtcaaaaaaagggtttaactgtgtgagataaatttacacatggccaactattttcacagatcacttgtttctagtttattttgtgggatattcagtttttcaatataagcctcaataagctcagtaatgtcccttcgtatattcttcaaaaagattgttttcaacctactaaatcaaaacacgagtttcatttggtgagatgaattcacacatcagaaagcaccttcacatgtagcttgtttctagttttgtttgcaggatattagatttttttgctatagacctaaaggagctcagaaatttctacaaaaaagttcttcccatttattcaatcaaagcagaggtttattttcatgagatgaatttgcacatcacaaatcactttcacagataacctgtttt

SEQ ID NO: 898820 - DNA, 619 bp, Homo sapiens
gcatttctgccagcagcgtgccaggcctccacttcttccacacccttgccagcacttgttttttccrtttttatgctagcagccatcttcatgggtgtgcagtggctcttagtatggttctgcctgttctcatatggcctatgatctaagagtggcttttccatttttatatgattgaaaaaaatcaaaagaaaaataatatttcgtgataccgggacattgtatgaaatttaaatctcagggcccataataaagttttattggcatgcaggcactcctatttgtttatatgttgtctgtggctgcattgacactacaaaggcagagttgggtagttgagacagagactgtgtggcccgcaaagcctaaaatagttaccacctggcactttatgggaaacccttgccaatcctgccctatggtaagtgttatatgctttatctgtttaacctcctctctaatccattttgcagacacagaaactgaggctcagcaaagataagtaacttgtacaagtcacatgttacctaaccaggacacatgtacctgtctgtgtgactccaaatcttgcactcctcactaccatattaaatgaacaaaatcatttgaagattgctgt

SEQ ID NO: 898821 - DNA, 556 bp, Homo sapiens
tggattgggttttgccattctcctgaatctcaatgatcttcattcctatccatattccgaattctatttctgtcatttcagccaactcagcctcattaagaacccttgttggagaactagtgaggttgtttggtggacataggacagtctggccattggagttgctggagttcctgcattggttctttcttttctctgtgcgtgggtgctcctttaactgttgggctgcctctgattaaaggggccaggtaagggcgtggtggttgtgctggaatcccaggccagacagcccttcccaatgagcagaaggtacatgcattggcattcatcaagaaaacaactcgacccacagagaacagagaaaacaagacaggatgaccacccacccgggagtgacacctagtaacaacctcagttcaaaagtctgctgagggtgctgcyttcagctgaaatgaacatgagggtgtggggaaagccctccttaggaagaaggctttttaggtcttagtgagtccaaaaaagaggagtggcagaagtcataaaagaggcacacgat

SEQ ID NO: 898822 - DNA, 570 bp, Homo sapiens
aaattatctccccagttttaccttatcttctcagtggctgctgccaccactcttactctctctcccactccccaccccaaatagaaagaggaaaagaaaatgtcrcttctctccagaaaggtggggtgggctatgagtagaattgtcatgattctgctgactcaccagagccacatgtaggaggtatgtacactgcactccatcatcttctgagttattttttcctctgtcatcacttaagttcttatgccactagattatgctcttgtctgactcttactggtatatttttctcatttattattattattttttttactatttttgacatttccataggagttgagggagaaagcttctgcaggcctatttcactttgccaactcaactgcaactcatgtgtgttctatcttccagaattctctggaacattctgcccgatacaggctaccattcttgttttccagcacctttatagttttattccttaaacacaaaccaacaattccacaggcacacacatgtcttctgacttttccatgaaatgttgagggagcctggcgcggtggc

SEQ ID NO: 898823 - DNA, 589 bp, Homo sapiens
tgtgggttgagcctggcagtgggcagatgtatgctgaatttcctcttggcctgaggcctggttatcaaactgatggagtccccggagtcttctcaaatgcccacagagctggcccgacagaaacagtaaagtgttgggattagcaaggggtcaagaagcagaaagccagctccattactctcttctgcagaaatcacctccttcgacagccccagaggcagtgccttgggttagtttcctcagaaatggagcttgagaaaaggattgactgggggactgctcccagataaaacctgtaagggactgaggagttagaatggggcagagaagaagctgggcaaacatatagcttcagctgaagtctaactcagcctgatcccgtggggagctcacatgcagttgtcccaactgcagggaagccctttggcctttaggtccccatgtcagtcatcactggctgtgggctccccttaggggaggaygtaacctctcaggcttttcaggatgaggtggctctggagaaggaagtctctggagaaagaaacagctgtgtcattagcagtcagcatgcactgcagatgggggatgg

SEQ ID NO: 898824 - DNA, 589 bp, Homo sapiens
tgtgggttgagcctggcagtgggcagatgtatgctgaatttcctcttggcctgaggcctggttatcaaactgatggagtccccggagtcttctcaaatgcccacagagctggcccgacagaaacagtaaagtgttgggattagcaaggggtcaagaagcagaaagccagctccattactctcttctgcagaaatcacctccttcgacagccccagaggcagtgccttgggttagtttcctcagaaatggagcttgagaaaaggattgactgggggactgctcccagataaaacctgtaagggactgaggagttagaatggggcagagaagaagctgggcaaacatatagcttcagctgaagtctaactcagcctgatcccgtggggagctcacatgcagttgtcccaactgcagggaagccctttggcctttaggtccccatgtcagtcatcactggctgtgggctccccttaggggaggacgtaacctcycaggcttttcaggatgaggtggctctggagaaggaagtctctggagaaagaaacagctgtgtcattagcagtcagcatgcactgcagatgggggatgg

SEQ ID NO: 898825 - DNA, 659 bp, Homo sapiens
cttgctactgctcactttttatgtccacgttgcttttatgagctgtaactctcaccgcaaaggtctgcagcttcatttttgagcccagcgagactacgaggccaccrgaaggaacgaacgactcctgacgcgctgccttaagagctgcgacactcacggcggaagtctgcagcttcactcctgagccagcaagaccacgaacccaccagaaggaaaacactccgaacgcatctgaacatcagaagggagggactccagacgcaccactttaagggctgtaacactcactgcgagggtgtgcggcttcattcttgaagtcagtgagaccaagaacccaccaattccagacacatggccaccattgtgaaactccatctctattaaaaatacaaaaaaattagctgggtgtgctggtgcatgcctgtagtcccagctacctgggaggctgaggcaggagaatgaacccaggacacagaggttgcagtgagctgagattgtgccactgcactcccgcctgggtgacagagtgactccatcttaaaaaaaaataaaaaataaaccttggaatacggacatagctcattcaattcattgacatataaactaaatgacaaacatactgtttatggagaaacctgtgagccacatcttttggcttt

SEQ ID NO: 898826 - DNA, 659 bp, Homo sapiens
cttgctactgctcactttttatgtccacgttgcttttatgagctgtaactctcaccgcaaaggtctgcagcttcatttttgagcccagcgagactacgaggccaccggraggaacgaacgactcctgacgcgctgccttaagagctgcgacactcacggcggaagtctgcagcttcactcctgagccagcaagaccacgaacccaccagaaggaaaacactccgaacgcatctgaacatcagaagggagggactccagacgcaccactttaagggctgtaacactcactgcgagggtgtgcggcttcattcttgaagtcagtgagaccaagaacccaccaattccagacacatggccaccattgtgaaactccatctctattaaaaatacaaaaaaattagctgggtgtgctggtgcatgcctgtagtcccagctacctgggaggctgaggcaggagaatgaacccaggacacagaggttgcagtgagctgagattgtgccactgcactcccgcctgggtgacagagtgactccatcttaaaaaaaaataaaaaataaaccttggaatacggacatagctcattcaattcattgacatataaactaaatgacaaacatactgtttatggagaaacctgtgagccacatcttttggcttt

SEQ ID NO: 898827 - DNA, 659 bp, Homo sapiens
cttgctactgctcactttttatgtccacgttgcttttatgagctgtaactctcaccgcaaaggtctgcagcttcatttttgagcccagcgagactacgaggccaccggaaggaacgaacgactcctgacgcgctgccttaagagctgcgacactcacggcggaagtctgcagcttcactcctgagccagcaagaccacgaacccaccagaaggaaaacactccgaacgcatctgaacatcagaagggagggactccagacgcaccactttaagggctgtaacactcactgcgagggtgtgcggcttcattcttgaagtcagtgagaccaagaacccaccaattccagacacatggccaccattgtgaaactccatctctattaaaaatacaaaaaaattagctgggtgtgctggtgcatgcctgtagtcccagctacctgggaggctgaggcaggagaatgaacccaggacacagaggttgcagtgagctgagattgtgccactgcactcccgcctgggtgacagagtgactccatcttaaaaaaaaataaaaaataaaccttggaatacrgacatagctcattcaattcattgacatataaactaaatgacaaacatactgtttatggagaaacctgtgagccacatcttttggcttt

SEQ ID NO: 898828 - DNA, 659 bp, Homo sapiens
cttgctactgctcactttttatgtccacgttgcttttatgagctgtaactctcaccgcaaaggtctgcagcttcatttttgagcccagcgagactacgaggccaccggaaggaacgaacgactcctgacgcgctgccttaagagctgcgacactcacggcggaagtctgcagcttcactcctgagccagcaagaccacgaacccaccagaaggaaaacactccgaacgcatctgaacatcagaagggagggactccagacgcaccactttaagggctgtaacactcactgcgagggtgtgcggcttcattcttgaagtcagtgagaccaagaacccaccaattccagacacatggccaccattgtgaaactccatctctattaaaaatacaaaaaaattagctgggtgtgctggtgcatgcctgtagtcccagctacctgggaggctgaggcaggagaatgaacccaggacacagaggttgcagtgagctgagattgtgccactgcactcccgcctgggtgacagagtgactccatcttaaaaaaaaataaaaaataaaccttggaatacggacatagctcattcaattsattgacatataaactaaatgacaaacatactgtttatggagaaacctgtgagccacatcttttggcttt

SEQ ID NO: 898829 - DNA, 578 bp, Homo sapiens
gctgcagaacacattggcatgcaggagttaaacatcagtcgttgtggtagtttcgcttcaggatggcatcactctttctacgcaatargctattttcctacgttatataataattactgtacacatttatcaggtacatagtgatgttttgaaacatacaatgtatagtgattcaataggttaataagaagatctatcatcttaaacgtttatcatttctttgttgggaatattaaaatcctccttcctggtatttaaaactatgtattattgttagctatagtcatcctatagtcctataaaacactagaacgtattcctcctatctagctgtattttgtatacttttacaaacccctatccttcccagcctctggtatactctgctcttctttttacttctatgagatcttctttttttagtttccttatatgagcgagaatatgtggcgcttaactttttgtttctggcttatttcaggtaccataatgtcttcctttccatccatgttgtagcaaatgacatttcattttttaaaaaaaactgttatggctaaacagtattccattgtgtacat

SEQ ID NO: 898830 - DNA, 578 bp, Homo sapiens
gctgcagaacacattggcatgcaggagttaaacatcagtcgttgtggtagtttcgcttcaggatggcatcactctttctacgcaataggctattttcctacgttatataataattactgtacacatttatcaggtacatagtgatgttttgaaacatacaatgtatagtgattcaataggttaataagaagatctatcatcttaaacgtttatcatttctttgttgggaatattaaaatcctccttcctggtatttaaaactatgtattattgttagctatagtcatcctatagtcctataaaacactagaacgtattcctcctatctagctgtattttgtatacttttacaaacccctatccttcccagcctctggtatactctgctcttctttttacttctatgagatcttctttttttagtttccttatatgagcgagaatatgtggcgcttaactttttgtttctggcttatttcargtaccataatgtcttcctttccatccatgttgtagcaaatgacatttcattttttaaaaaaaactgttatggctaaacagtattccattgtgtacat

SEQ ID NO: 898831 - DNA, 578 bp, Homo sapiens
gctgcagaacacattggcatgcaggagttaaacatcagtcgttgtggtagtttcgcttcaggatggcatcactctttctacgcaataggctattttcctacgttatataataattactgtacacatttatcaggtacatagtgatgttttgaaacatacaatgtatagtgattcaataggttaataagaagatctatcatcttaaacgtttatcatttctttgttgggaatattaaaatcctccttcctggtatttaaaactatgtattattgttagctatagtcatcctatagtcctataaaacactagaacgtattcctcctatctagctgtattttgtatacttttacaaacccctatccttcccagcctctggtatactctgctcttctttttacttctatgagatcttctttttttagtttccttatatgagcgagaatatgtggcgcttaactttttgtttctggcttatttcaggtaccataatgtcttcctttccatccatgttgtagcaaatgacatttcattytttaaaaaaaactgttatggctaaacagtattccattgtgtacat

SEQ ID NO: 898832 - DNA, 605 bp, Homo sapiens
ataagctaacaacttagcttgtcacttgttgtacttgcagaaggcaaaagatggtttattattcactgaagtactagcagtagtcagaggaatatcatcgtactatttcttcaagcttcartcccctcacagggataagatgagaaactgatgttacatgtgcaagtagtggtgtctatcaaaagagaaatctcaaaattaggaaactccagtcttaaaaactttgatcactgtgagtaacctgtccatcttgccttctgaagaagaagctttacactggaatgtaagcaaatatctctggagagaagaagaagaagagaagagtctttatctttaaacaaatctgccttctgaccaagagggataccctatttctaaatcccaaggctctttgccatgacctggtcttgggcaaagtgaacgagactcctagggcacaaaacgtaaaaaggcattcaataggttgcagggccctaaaaccaagtggctcctcaaactttgcaccctgcatgccttgctcacctgatcctagttgaggcccttctgtttgctcatcaaacatactgtttgctcacaagataagagctagaccatgcagaagtgca

SEQ ID NO: 898833 - DNA, 508 bp, Homo sapiens
gctcgctgtggccttgacctatgggctcaagcaattatctkgcctcagtccccacaagtagctgggactacaggtggctcctcactgcagcctctcgtctcttaaaaaagggtgtgtgggggaatcaaagtggtgaatctatagcccctaggccataatcatcatcatattttttttataacatatgggtaattatctcaaggtacaagttcttcagagtctagaaagcacattaaatcctccacagcttagagaccaatgctgagaatatgcaacctctttttatctctatttctccccctgttccaaaccaggttccaatgccaagaaaaacagggtagtggaatgggaagcttctgctgccaatggcacagatgaggaaaccaaactgtagctacagaggcaggctgacagagccacttgtagccagaagcagattgctggggggagcagctctctgttctgtccattttcttagggacagatgttattcctgtctgttccatca

SEQ ID NO: 898834 - DNA, 675 bp, Homo sapiens
tagttgaatttatcacagtaattatggaattgcagaccagcttgtaattgggaacgtctgttggttcctattacagcccttgtgtgggtgtgcaggggatgtgacttaactacacagactgagaaatggtccccatgtgatctctcttagtgctccaccaccacccaagagagggaatgactcacaaaaacaaatacggggaaagggatccaacaaattgtccagtttaccagctctacaatttcccagtatagccggtggatgtgagcacagccatgcgagtcagagctgtgtccaggtcctgggttggctcctgtccaccacgcagactcagacaaatctcatccagcacttaaaaataaatttcctttcttcccaccaatgatttgacagtttgggagcttaattgacagcatggccatttctcgctacacatcaggccaaatgatttttccaattttctctgcatgtctttatcacccaactaacagaccagaaaggaagatttctcagctcatttccggttacctggtattcttagaagatcccaccayttgccagaagtgagaaacaaaaaggtttcacacaatcatgttgtctaacaggaattctttttgcaactgatcagccttcctcaaagacgttccctataggaaatgcaattgatctaatctt

SEQ ID NO: 898835 - DNA, 623 bp, Homo sapiens
tctgagagactgttatgatttcagttcttttgcactaggckagcacattttaagcctctgctcacttcctggccactaatatgccaatgttacttgggcaagcccaaagtcaatgagtgggaaggtttctccctcccaccatgaggctatagcaaaagtgggaacaagtccctttttcattcatcataagcagtggtttgagtccacagggaccaaatccccagctacctgaatggacctgaacttgtggctgctctctgcccaaaggagggggctggtctctgaagaattgcagttctgcctctaacaaggcctttttttaaaaaatatatttttgttatgaaaatgtccaagcacacattagagagagagtagtctaaagaactcccacacactcattacttagttttaacattctgtcatattgcttcatctgttagtaattaatataatcataacactatcattaccactgatattgacatttaatcacttgataccatctaatatgttcagtttcccccaattgtctcaagcctttttacagttgtttgtttgaattagaattcaaacaaggtctacacactgcttttggttgacatgtcccttaagactctttcaat

SEQ ID NO: 898836 - DNA, 611 bp, Homo sapiens
tatattatgaattatgtactcaagttatcctcaccaaggaagatcaggtttctgtagttctctaacatcacatccctatataaattccactgtgcagtgtccaggcaatgccactcctccagagagaattctatggccacgtctctaaattgcaatggtccctgaaacacacccacacacccacacacccacacacacatacatttttaccatgtggccatggacagaacttttaatttgacttaaggtgtaatgacaaagtaaagagaactggctctgacttatgggactgactaaaattatccaataaaataattttcaacacagaaatattctctaatgtattctctaactgagaaaaaagagcagcataagatccacaacatcagttcttataatgatatttttctagataataagtataaaattaagggcgtgaacagaacatgtgtatatatatattttttttttggagggggatggggtctcactctgttgctcaggctggagtgcactggctcaatctygactcactgcaacctctacctcccccaggtgcaagagattcttctgcctcagcctccctagtagctaggattacaggcatctgc

SEQ ID NO: 898837 - DNA, 611 bp, Homo sapiens
tatattatgaattatgtactcaagttatcctcaccaaggaagatcaggtttctgtagttctctaacatcacatccctatataaattccactgtgcagtgtccaggcaatgccactcctccagagagaattctatggccacgtctctaaattgcaatggtccctgaaacacacccacacacccacacacccacacacacatacatttttaccatgtggccatggacagaacttttaatttgacttaaggtgtaatgacaaagtaaagagaactggctctgacttatgggactgactaaaattatccaataaaataattttcaacacagaaatattctctaatgtattctctaactgagaaaaaagagcagcataagatccacaacatcagttcttataatgatatttttctagataataagtataaaattaagggcgtgaacagaacatgtgtatatatatattttttttttggagggggatggggtctcactctgttgctcaggctggagtgcactggctcaatctcgrctcactgcaacctctacctcccccaggtgcaagagattcttctgcctcagcctccctagtagctaggattacaggcatctgc

SEQ ID NO: 898838 - DNA, 601 bp, Homo sapiens
tgcaagtcttcttagggcaatgctgcagggtaggtccttgtcctgttttattcaagagcactcctggtatggccccaccatctgtgcagagagcaaggcttcacatgtctccagggtcttmtggtaagttggatatgacaagtgagaacccagcagtctggggacagtgctcagagcagtgtaaagggcagtcacacagccaagtactttccaaggcagggcaggccttgccagtcctcactcagagatgttcacaccagccttgtgtacagcatgcttagctctttgatttctgagccctcagctatcacaagtagtcaattctcaggagaggctgagttgggagatggacctaatgacattgcctagcacacagtaggcactcaaagcatattagatgaacgacagaatgatcaaacagcatcaaaaaggcacagctaacgagaagagggggcccaggaaaacaaataagtaaaattgatgctttcgtgcctgggccctttaggacaaggaaaagaactcaggattgcaaactgctagtctgaactagggacttgacatttattatctgagtcactcatgtagccatcctgggaggtat

SEQ ID NO: 898839 - DNA, 626 bp, Homo sapiens
tgttccactggtctatgtgtctgttcttgtacaagtgcctgctgtttttgttactatagmcctgtagcatagtttgaagtcaggtagtgtaatgcctctagctttgttctttttggttaggattgccttggctattgaggttcttttttggttccacatgagttttaaaatagtctttacttgttctgtgaagaatgtcaatggtagtttaatgaaaatagtgttgaatgtataaattgctttgggcagtatggccattttactgatattgattcttcctatccatgagcatggaaaggttttctttgttcgtgtcatctctgatttctttgaacagaggtttggagttctccatatagagatctttcgcctccccaatcagccatattcctaggtatattaatctttttgtggcaattgtgaatgggggttcattcctgatttggctcttggcttgattgttgtcggtgtataggaatgctagtgatttttgcatattgattttgtatcctgagactttgctgaagttgtttatcagcttcagaagttttggggctgagacaatgaggttttctagatataagatcatgtcatctgcaaacagggatagcttgacctcctcttcc

SEQ ID NO: 898840 - DNA, 703 bp, Homo sapiens
accttcatctcatgtagtaattcatacaaagtagatcacagatttaartcaaaacataaatctataaaattcaggaagaaaaaacaaaagaaaaattctaagcagagtgcttacacttaacaccacacacatgatccatacaaggaaaaattgataaactgaatctcatcaaaattaaactgttgctctgcaagctatggaccggagaaaatatttgcaaaccacataaatgacaaagggctagtatctagaaaatacaaaagattctcaaacacagcaattaaaaaaatcaaacaatccaattggaaaacgggataaaagatatgaagagacactacaccagagagtgtacacagatggcaaataagaatatgaaaaagatgtccaaaatcattagctattagggacacaaattaaaaccataatgaggtgccactacccacctatcagaaaaacaaacatttaaaaatagtgaaacattaaatgctggtaagaatgcagagaatggagatctctcatgctttcctggcaggaatataaaatggtacagtcactctggaaaatagtttggtagtttctttaaaaactaaacatgtaacctagcagttgtactcctgagcatttatcccagagaaacaaagacttatgtttacacaaaaacctgttgataacagctttatttgtattagccaaaaactggaaa

SEQ ID NO: 898841 - DNA, 607 bp, Homo sapiens
tgcaagtcttcttagggcaatgctgcagggtaggtccttgtcctgttttattcaagagcactcctggtatggccccaccatctgtgcagagagcaaggcttcacatgtctccagggtcttmtggtaagttggatatgacaagtgagaacccagcagtctggggacagtgctcagagcagtgtaaagggcagtcacacagccaagtactttccaaggcagggcaggccttgccagtcctcactcagagatgttcacaccagccttgtgtacagcatgcttagctctttgatttctgagccctcagctatcacaagtagtcaattctcaggagaggctgagttgggagatggacctaatgacattgcctagcacacagtaggcactcaaagcatattagatgaacgacagaatgatcaaacagcatcaaaaaggcacagctaacgagaagagggggcccaggaaaacaaataagtaaaattgatgctttcgtgcctgggccctttaggacaaggaaaagaactcagaattgcaaactgctagtctgaactagggacttgacatttattatctgagtcactcatgtagtcatcctgggaggtattaggaa

SEQ ID NO: 898842 - DNA, 583 bp, Homo sapiens
ttcctcttttactctttagcagtgagggaaggtcatcctaacccaggtgccagcctcctgtctcacatctaggacagagagtctccatctcctttccagtaagtacccatgtatatggagaaatcacttggatttggacaaaactgaacacagattcgcatccattatatgtcacatctttaacaggggccaaggcatctcagcctggtgcagtcgtagaggaagtggattgaactacatcagcatcagtgggcttcagcctggggttctggggagtattactgatgcctgactaggagtggtcaaatcactttagtggagactctgcatacaccctcctgctgcctattcaggggcctgaacttgggggaacgtacttgttttgagggaaaaacggaaacttcctacatttatatatatatatgtatatatgtgtgtgtgtgtgtatatatatrtgtgtgtctgtgtatatatgtgtgtgtgtatgtatgtgtgtatatgtataaatctcctgttagttctgtccctctagatgtcactggctaatacaggaagtttattaagtattaactcacacaatcac

SEQ ID NO: 898843 - DNA, 633 bp, Homo sapiens
actttcatgttgcatgaaaaattaaccattactaacgaataagatgtgtatatagttgcaaacatttcctgtccacccaaggatttgacttggttstaccaggcactggcctatttccatctcatttgactggaaaatcaatattaacacagttaactacacatcttttaagtaacattcttaggctgagtgtggtggttcacacctgtaatcccagcactttgggaggccaagagggaaggagtatttgaggccaggagttcaagaccagcctggaaaacatagctttaaaaattaattagctgggcatagtggtgtgtccctgtagtccctgctactcaggaggctgaggtgggaagactgctaaagcccaggcatacaagactgtagtgagtgagctatggtcatattgctttactctagccttggccacagagcaagactgttttaaaaaataaataattttagattcagtttttgtttgtttttttattatactttaagttttagggtacatgtgcacaatgtgcaagttagttacatatgtatacatgtgccatgttggtgtgcggagggatagcatttggagatatacctaatgttagattcagttttaaacctgtatctacaaac

SEQ ID NO: 898844 - DNA, 693 bp, Homo sapiens
gagtgagctatggtcatattgctttactctagccttggccacagagcaagactgttttaaaaaataaataattttagattcagtttttgtttgtttttttattatactttaagttttagggtacatgtgcacaatgtgcaagttagttacatatgtatacatgtgccatgttggtgtgcggagggatagcatttggagatatacctaatgttagattcagttttaaacctgtatctacaaacccttcactatatgtattacatccactcattgaaacaactaagcctttacaagtatccctttaacctgctttgttggttctcaagtggtaaacacctaaaatcagtgaattaacacagtaatgatacaacttttcagtaacatttgtcgaagtcagaataaaagatgaatctctaaatttaatgttttatttttggaagcaacaattgcaattcagggcatacaaacaagccaggtggtctttggtatatctgaagaacaaagagaagtttgggggctttattttaaaaagaaacattatgtattgttttgaaagaaggctcrttggcactacagaagcttttgggagctgcaaagctctgattggtgagtgatggtggcaggtaaaactagtcttggtgtcaaagcaggaagttttgtcagtcactagataaaactagtcttaggctgaca

SEQ ID NO: 898845 - DNA, 573 bp, Homo sapiens
ctagtcttttggttatttttcctggtatttacctgcgtttctatatatcatctttatactcctatttatttataatttatatatgtatttattatattcttactttgagagatgatcatgcatcatttttatacctcttcacatacttattctttcttcttcctttctcttaatagttacctggacaattttcggttgaattactatttagcagttagattactgtgaccatgccaaagaatagtcactgctgagccaagaattatatccctgttacttttgcttttctgaactgggagaatcacctctcttcctgatctctcatggggaaatgccacagggcccaggactttggctgctgctttcctctgtctacactccctccatagccatcctcatggcttaaatagtaatcatgtgcttatgactcctaaattcatactgccagcctgrtcttcacctgaattccagtctctctctttctttcttttctttttctctttctttctttctttctttctttctttctttctttctttctttctttctttctttctttctttctttccttct

SEQ ID NO: 898846 - DNA, 580 bp, Homo sapiens
ggaccctgggacaggtcactatctgaagtccaggccaaccttgaaggagatgacttcctgttcatactcccacagctgggacttgtagaagtcttaactaataggaggatctgggtggcaaatctcygtgtgttacacattaaccactgatcccaaatttattttttatgattttataccttgaaatgatttttaaatatatgacagtctgctgcataaaatatcttctcaactaacccttcttttctagaaaaagaacccacagtatttgcactagtggcctacctttcaatctgccccatggactcaatccaaacattgatttagtattttaagtactccacactctgtaacaataccagacacttaaagtactttctgatatacacacatgtgcagccattattagccttttgatttctacctactactttaaaggtgaaagattaacttataattcttctttgttgagtatgtaagacacagaatggcttttgatcaaaaacaatataattctgatctgacctgatcttgaacacaaaaggaattgttatcaaattgccttgtgaagtgaataatc

SEQ ID NO: 898847 - DNA, 643 bp, Homo sapiens
tacgacagatgttttggtacttcaagccattctctgaagctgattagtgttttaagattgtaaactattttctgagacagaaaatttggggaaataggatcttacactggcttaytgcaaacactttagagtgaattgacttacattcaaattccagctctatgcgatgcttattttattttattttattttattttattttatttatttttttttttttttttgaggtggagttttgctcttgttgcccaggctggagtgcaatggcgtgatctcagctcactgcaacctccacctccctggttcaagcaattctcctacctcagcctcccaagtagctgggattacaggcatgagccaccacgcccagctatttttgtatttttagtagagacggggtttctccatgttgcccaggctggtctcgaactcctgatctcaggtgatctacatgccttggtctccccaagtgctgggattacaggcatgagccactgcgcccggccacaatgcttaattttatgtgactgcttgactggctatggggcccagttatttgttcaaacaggagtctagatgtttctgtgaaggtatttcttagatgctgttagcttttcaatcagttaaactctgagttagacag

SEQ ID NO: 898848 - DNA, 609 bp, Homo sapiens
tacttataaaagagggaatattaaaatgtattatacagcaacagagaacaaatcatgatatttcggagaagaggcaaattccaaaaatacttactttaagaaatgtagtaatgagcatgtttattattctcttcaggacacaagatgcttcaacattaattaaatatgagaagaagactacaaagaaagaacaggttggtatgaaagtgaataagatgtaatttaaaaagagatggatgagaaaaagagtgtttttgtatatcccataagtggaaaaaaaggccaatttagaagaatgaagggtatttcaggtaaaatcaatgagaagaatgtcacattttaaatattctataaataagatggcaatagtattgatagggtttgggtctgtgtccctatccaaatctcaggttgaattgtaatccccactgttggaggtggggcctggcgggaggtgattggatcatgagcgtgtgatttcttcttaatggtttagcaccaccsttccttggtattctatagtgagttctcaggagatttagttgttgaaaagtgtgtagaacctccccactctctctctcttcctcctgctcctgccatgtgaggctc

SEQ ID NO: 898849 - DNA, 661 bp, Homo sapiens
ctgcctacacgctttgttatagatttacttaggccttatcttagtcagtwcagtctgctataacaaatataccacaatctggctggcttaaacagtaaacatttacttcttacagttctgaaggctgggaaatccaagatcaaggtgctgatagatctggtatctggtgagggcctacttcctggtttgcagatgacagccttatattttcacgtggtggagatcagaaagagagaggaaataagctctcttatgtctcttcttataaggatagtaatctcattcatggaagctccatcctcatgacctaattactttccaaaggcctcacctccaaataccatgacactgagtatttggcttcaacatatgaattttgtgggggcacaaacattcagtctatagcagacctacaaaacattcctgccttcatgtttgtctcagctagaaaaaacttcctcagcagatttctcagttgaagccggattgctgtttctggtgttcttaaatctagcagcctagagagaacagataactctgccatgtgctacagttcctcctccttttcacatacacgttcacttaagacacagtgggcatacacatgtctacctgtaataattaaaccaccttgactctctccaataagacttggtatttc

SEQ ID NO: 898850 - DNA, 612 bp, Homo sapiens
tgggttcatctcactggggcttgtcggacagtgggtgcagcccatggagtgtgagctgaagcagggtggggcatcacctcacmtgggaagtgcaaggggccagggaattccttttcctagccaagggaagccatgacagaaagtacctggaaaatcgggacactcccaccctaatactgcacttttccaatgatcttagcaaatggcacaccaggagattatatcctgcgcctggcttggagggtcccatgcccaaggagcctcgctcactgctagcacagcagtctgagatcaaaccgcaaggcggcagtgaggctgggggaggggcatccgctattgctgaggcttgagtaggtaaaaaaagcagcagggaagctccaactgggtggagcccaccacagctgaaggaggcctgcctgcctctgtagactccacctctgggggcagggcatagctgaacaaaaggcagcagaaacttctgcagacttaaacatccctgtctgacagctttgaagagagtagtatttctcccagcacggagtttgagatctgagaacggacagactgcctcttcaagtgggtccctgacccccaagtagcctaactgggaga

SEQ ID NO: 898851 - DNA, 583 bp, Homo sapiens
caagagctgatcactccttacctgttcaactcgccccttccccaggagttgttggaggccaggaacaaatcccagtgtgtggtagctcttagcagggttcccagcttcttcccccttcagcccagcatctgtgtcctccctccatacactctcaatgccttccctccaaagatctgctcggacagcaccagtcttcctgatgcctcagtccctcagtggaagatattcctcttggctgcatctagtcggccatcttgctgcaactccagtcgtacctttttttaatcaagagattttcctctaaattccacttaccacataaaatatgctcattttaatgtttagtcccagtgtcccagacaattccaatttatactttcattattttaagaaaatataatttatatctgaactacactgtattttatgtagccagctaaacttacatcaagtcaaaattcaaatatctatgttgcckggaaacacagtttaaagagtaatatgtgtatttcataagataggaataattctacaacagaatagtcatggtagaagacaatgtttttaatagtttgtagctcag

SEQ ID NO: 898852 - DNA, 588 bp, Homo sapiens
attcaattactgaggaagaagggggaaaagatattctctcccagtggggggaacatattttactatgttcttacttattttgtgaaatctttacaaataygtattcacatattagttttataataaaagtaaataaacatagaaatttgggtgaaggaaatgagaattgaaaggaatcaaacctgacctttattttctcattgataaggtgaggttgataatgaaagaatgtgtgtgagttgaggagtttggtgagtaggagacaagtatggagcagctttatggggactgtgcaggagaagttttgatgcacttgtaggacattagtgttccatgagatgcatcaaagctgcctctgctaaaactgaaaatgggtggtctcttctccatttacagaaaaacatccagttgttatttataacttttgcaactccaagtttctccaataagtgaagccatgggtaccagctgcaacttgcccattggcaagcatgggaagataagaaaacaatagaagaagcaaagcacagactcctccaaaataactaattgttcttagttgatatctttccttttttatggaacatc

SEQ ID NO: 898853 - DNA, 563 bp, Homo sapiens
accaactctttctgaaaactcataaagaaagggaaaaaaaaatcaagcattttcatcatgcagagttaatgaggaaaaagtttatttttgtagaaaaagtataactaatacatgaagaaagagtgacagaattagatatcaccattttgcacctccctaatgaaatcatggctctcacggtgccactcagtggctgctaaaaccattagatgaaaaactgataaccagagatcaggcagacatcacttgaacccactgacgcttagcatcacaaaaagataaccaggtactatgtaccacttgagtgataccacagtaagtatactcttgcaaaaaaaaaaaaaaaagttaaagaaaaattccaaatacaatcaggcttttagatctaactaaaaggatccagttacctatgtaacaaacctgcacatcctgcatatgkaccccagaactgaaaaaaaaaaaaagaaaaagaaagaaaagaaaagaaagagagaaagaaagaacaccacaaggacgcaatcaggaaaatgtagaaagatacaggacagttaacccagtttctt

SEQ ID NO: 898854 - DNA, 656 bp, Homo sapiens
ttcctacctgcttcaaaccattgctatttggtctccacccaaccatttcaataaaattgctctagctaaggtcatagatgagtcctttgtcattaaactcattgaaacttacatccttacgtatttgacattttgctaacagacatcactattaactactccctcattcaaacacacccttccctagccttctaataacatcatacaatcctggttatcctatatgttgctactctttctcagccttgtctgcaagccctttttctctgtttatccctaaactcttggtgttctggtttctgttctaggccttcttttcttcttatgctgctctgaaattcattccaatggcttcagtggccatctccacactaacaacccccaactcagacctctaacaccaggctttagacacaaacatcctcctactcataggacaattccacctggatgtcttaaaggcatcgtaaattcaacatgtcccaaataaattcatcatctttcccctctccattcccaagagttctttcgccaatgtaccccatttcagtgaagaacctcaccayttgtccaagcctaaaatttgagtatcattcttgactcttctttctcctttccccccaagcaataaataccaagtcccattgaatctatct

SEQ ID NO: 898855 - DNA, 577 bp, Homo sapiens
gaggtggtctcagatggagatgaggaacttcttgggaactagagcaaaggtgactcttgctatgctttagcaaagagactgctggctttttgccccggccctagagaattttgaacttgagagagatgatttagggtttctggtggaaaaaatttctaagcagcaaagcattcaagagatgacagagcataaaagtttggaaaacttgcagcctgacattgcagtagaaaagaaaaacccattttctggggacaaattcaagccagctgcagaaatttgcgtaagtaacaagaagccaaatgctaatcaccaagatgatggagaaaatgtctccaggacatgtcagagaccttcacagcagcccctcccatcccaggccctgaggcctagggaggaaaaatgatttcctgggccaggtccagggccctcctgctgtgtacacccttggaacttgrtgccctacatcccaggcactccaatcatggctaaaaggggccaaggtacagctcaagcttggcttcagaggatgcaaactccaagccttggcagcttccgtatggtattgaccctacggggc

SEQ ID NO: 898856 - DNA, 635 bp, Homo sapiens
gtttggctgcctcagcgcatgcgtgtgtgtgtgtgtgtgtgtgtgtgtgtgtgtgtgtacrtgctcccgcacacacgcacttatagataagacagagaatagtcacggcaaaaagtgagcttgttgtccatcctaacaaataggatggagaaacttatgtccaaagaccaccaaacatccccaacgctcttctaaaacaacttccaaataactggtagaataaaactttttaaaggctggtagaataaaactttcaaattgtgccaaacttataaaaaggcggcagaggtagacagagtttgtggatcaccctcagaaaggtatcctgggttctaaaagcaaccaagttttagttcccaaagaaaactgagaatcttcttttcaaattctgttactgtttgcttctcatctcaaattcgtaactctggagatagtgtcacttgatgataattctgttggagggactcctgtagggtggatcctgaggttttgcttcttttcatattggaagatgaagcaactgttgtggtataactcattaaactctaagacatgggataaagaccatctcatcatattggcaacatgtcgtattcatattccgcctctataagatacaaagaccaactattgga

SEQ ID NO: 898857 - DNA, 627 bp, Homo sapiens
ttgtttttttcttggagaattttaaagatgtcagcttcagtgaatattataagtttggagataaatttaatataaatttagtaggagggccagatgtcattctgaagcagtgrgactattctatacttctgaaagtgcccaaagaattaccactggcttctctctctcttttttttttaatatatctatatttattatactttaagttctagggtacatgtgcaccaagtgcaggtttgttacatatgtatacatgtgccatgttggtgtgctgcaccctttaactgtcatttacatttaccactggcttctctaagctcattgtgatcttttttttctggggggtggaggcatcaatgtatctgtcttagaatgttaataacatttttttttttagtagaagtttgacattattgggtgcgtgctactcctaccagctttgtctgtgtcatctcacataatccttacagaaacattaggatatatagtcccttatttccatttatagttgaaggacctgagatgcagatagggtaagcaacttgcccaaagtcattcagttagtaattgctagagccagtgcttccagagtctgtgctcttaaccactatgctgctgagcttctca

SEQ ID NO: 898858 - DNA, 575 bp, Homo sapiens
ataaaatatcacatgcccattaccttacattagtggtaaatagtaatagaaggtggcttatatataccatkttcattctttccttcctctaagatccttgatccttgatcttgatccttaagatttttagcttataactctgattctttccattttctatccctttccgtaatgtgctttgaagatataaaaagttgttaccaaataagtgactgattctcaatattatagctatgtgccatccatccattacttgattacactataaccagattttttaaaaagcactgcttacccctgggggccattcatataataagtgtattgtagaaattgaacattttctaatgatgtacactgtaatgaaattttacttgatattcagtacatgtatttgtcacttaaaggttctttctgtaaactgcttcagattcttttactattcaatttttaattcttaacatctgtaaagaacgttaatattcctctttataatcaatctttcccagttagccttaaaaatgtattccctacttttgcttcaggagatcattatttgcaaatgcaaagatttt

SEQ ID NO: 898859 - DNA, 653 bp, Homo sapiens
gttccagtaaatcccttggaaaattttgaactcagtccycagtctttgcctttatatatctttttacataaaaactgtggccccaaatgtgtccatctttcctctggcaaagagaaggccgagaatttggcttcctaacccagagcctggagatacccctgccacccagttggcgccctgaggatctcggctcaagtgtgggcaggcttggagccagtgtccaggcacttgtccagatctctggttggacagcccttcagaattcctaatgtaaatgatgctgtcacatctggtggagggtagagatatagccatcaagcgtatgcagcccatgttccaaactaagtctttctcaatcagcgtcaggacatctttaaggccaccccaggaacctacatgtaaaaatctgccagcatcaattatctagcgaccactacctctgaatcaggactgaaaagtagtgcttctcacaaagaagcgagcttggtccacatcagacctgaggggtttgatggcttaagggtgggaagctgggtgccctcattctcactcttccctgggtacatttcttccctacctctctgatcttccctcctgcttatcttgtccaaactgcaggtttgttttcacaaccttccattcattgaaatgcc

SEQ ID NO: 898860 - DNA, 653 bp, Homo sapiens
gttccagtaaatcccttggaaaattttgaactcagtccccagtctttgcctttatatatctttttacataaaaactgtggccccaaatgtgtccatctttcctctggcaaagagaaggccgaraatttggcttcctaacccagagcctggagatacccctgccacccagttggcgccctgaggatctcggctcaagtgtgggcaggcttggagccagtgtccaggcacttgtccagatctctggttggacagcccttcagaattcctaatgtaaatgatgctgtcacatctggtggagggtagagatatagccatcaagcgtatgcagcccatgttccaaactaagtctttctcaatcagcgtcaggacatctttaaggccaccccaggaacctacatgtaaaaatctgccagcatcaattatctagcgaccactacctctgaatcaggactgaaaagtagtgcttctcacaaagaagcgagcttggtccacatcagacctgaggggtttgatggcttaagggtgggaagctgggtgccctcattctcactcttccctgggtacatttcttccctacctctctgatcttccctcctgcttatcttgtccaaactgcaggtttgttttcacaaccttccattcattgaaatgcc

SEQ ID NO: 898861 - DNA, 592 bp, Homo sapiens
tttatatatctttttacataaaaactgtggccccaaatgtgtccatctttcctctggcaaagagaaggccgagaatttggcttcctaacccagagcctggagatacccctgccacccagttggcgccctgaggatctcggctcaagtgtgggcaggcttggagccagtgtccaggcacttgtccagatctctggttggacagcccttcagaattcctaatgtaaatgatgctgtcacatctggtggagggtagagatatagccatcaagcgtatgcagcccatgttccaaactaagtctttctcaatcagcgtcaggacatctttaaggccaccccaggaacctacatgtaaaaatctgccagcatcaattatctagcgaccactacctctgaatcaggactgaaaagtagtgcttctcacaaagaagcgagcttggtccacatcagacctgaggggtttgatggcttaagggtgggaagctgggtgccctcattctcactcttccctgggtacatttcttccctacctctctgatcttccctcctgcttatcwtgtccaaactgcaggtttgttttcacaaccttccattc

SEQ ID NO: 898862 - DNA, 645 bp, Homo sapiens
atggccacagcagatgagaatgcacagatcattgagatctttattttacagatgaaaaaactgaatcccagaaggagaacattcctatagcaagtaatgacagagctgggtcttrgaagcacatctcctgtctgtcaggacagagttatcctgtatcccaaccttagggcagatctgagaactgacgacagcaaggcaagggaatgggttacgaggccaaggacaagtgtggctcctcagcgaaaaatgtcaaacgtaaagttgagttcccttcctctttcctataagaaaggctagggtttggaaatacgagggtctggaggaggtgacaattggctccctttcccccaaaagaagccagccaaccagaaagtgcttcttaagagcctgatttaagctgagactgagactaagaagtccagtggctcagaagtggtctctgcccccagagagtttgaggtctaataaattgttatattgtgtggcagagactgtgtgtatcatggaagcacgatgggaagagatgggtatgatgagctgcagctggcagaaaactcttggaagatgctggttttacaaggacaaataggatatgtgtgtatatgtgtgtgtgtctgtggaaacggagcaggaagagtgtagcat

SEQ ID NO: 898863 - DNA, 629 bp, Homo sapiens
cagtggtggtggctgtcttagctcccctttctcatgtctaaaacatgagacatgtttgtcccgtttactacaatgtaatggaatgtcaaatccatgtctgatgaaatatacgtttcctctgctaagtgcattcaggatgaaaaatattaggaatgcaatgttcaattccctaaaaagactcctttgtaaaagggcttgtacttttaaaatcagaatgtgatgatgctctgagccacaccacccttactaggtgacaggtcattccgaatggaggaattttatgtccaaattttcctccttagaattttctttttgtgttggtaaaaatgtaattaaatcggagtgtttgtaaaccagctctttccactctgtcatgaggttttccactcctacgtcacctgactcacgaaaaccttagttgtcactgtgtctgagcccccaagaccaggaggacaaactctaaaatgagttatcactgagaaagagggagtgccagatatcaccttccatctgtttttttgtgtcctttgggaacaygtaaatgatgtttctttccaaagttattcctggtgagattttatacatgaggccctgcattctgaacatggctgtagtcattagactgaccc

SEQ ID NO: 898864 - DNA, 608 bp, Homo sapiens
gcctgggaccccgaatgaccatgtggagcagagatgcttatcaatgaggtacacttgcattctaaattcaactctgtataagctagaaataaactattaagacattaaaaggttggtgcttatttgctacagtagctttttaacatttgtactaatttagtccccaaccaatatccagtatatctaattgtactggatagtacagtgatatctacttccatgtattgctatagaaagaggtttacttacaagaaaaaaaataaatcaatagatattacatcttttttttttaactttaagttctgggatacatgtgctgaacgtgcagctttgttacagaggtatacatgtgccataatggtttgctgcatctttcaacccatcatctatgttttaagctttggacacgttagatatttgtcctaatgctccccttcccctttccccccaccccccgacaggccccagtgtgtgataytccccccatagtgtccatatgttctcattgttcagctcccatttatgagtgagaacatgcagtgtttggttttctcttcctgtgttagtttgcccaggatgatagtttctagcttcatccatgtccctgc

SEQ ID NO: 898865 - DNA, 589 bp, Homo sapiens
gctatcttaatttggcttttgttttcaaatgaatgttaaagggccagtcacatattttatggaagtttattttgctatataactaaataatataattgygttagttaaagttacttttaagcgcatcaaatgcattttttatacagatggagatactgagatataaacccaattggcgctttacccaaagatccatgttagaggagaggctagaacttttttgtttaaatatttctccccaggcatagtggttaaaacacgactagcgctgaaagtaatgggcaatcctttggagcctggtaaaatggttatgattgagaagtacatattatcatcaggtttgttgtgttattattagtctcttgtacagacttaaaaatgaaaacaaaaaatatattttcattaatttcagcctatgaatcaaaaacaggagcataccttatgatattcataaccattttgaacacatattctgttttgcaatacaaaaacataataaaaaagaaaccctacactatcagaactagaaactagaaactagaaaaaaaaactgtcctgagagtaaatcattatgacttctgccaattgt

SEQ ID NO: 898866 - DNA, 627 bp, Homo sapiens
aaaaattatatgctagatttaaaatgcctcatccaggtatatatagaaggtacttgataaatggcctctgttacctttattgagaaatayggctttttcttttcttttgggtctccagacttgagcttagcatttttatgttaaattaaatagaaaatatgtacattatgaataaaccaagcacatattgatgatagcctaatggatgaaagaagtaatcaattcacagcttggactttggggacttgaattctagtctaggttctgctagtgttatgtgagatcattcagaaatcacttaacatttctgggcctgtttcctcccttgtttcatggggcagttgtcccagatgatctctatggccccctctaactatggaattcttacattattgaattcagaaccagtaaaatctgaattcattccctgatgtttgtcacagcttagtgaccctatctgatgccctatctgatcctataaatactcactttcttggtatccatgtgggtttccatgtgtggtgtccgaataccaagactgagagcactgattcctgttatctgccctggtagcaggatgatcaaaaatggaagtctgggcctagtgattaaacacacacacacata

SEQ ID NO: 898867 - DNA, 627 bp, Homo sapiens
aaaaattatatgctagatttaaaatgcctcatccaggtatatatagaaggtacttgataaatggcctctgttacctttattgagaaatacggctttttyttttcttttgggtctccagacttgagcttagcatttttatgttaaattaaatagaaaatatgtacattatgaataaaccaagcacatattgatgatagcctaatggatgaaagaagtaatcaattcacagcttggactttggggacttgaattctagtctaggttctgctagtgttatgtgagatcattcagaaatcacttaacatttctgggcctgtttcctcccttgtttcatggggcagttgtcccagatgatctctatggccccctctaactatggaattcttacattattgaattcagaaccagtaaaatctgaattcattccctgatgtttgtcacagcttagtgaccctatctgatgccctatctgatcctataaatactcactttcttggtatccatgtgggtttccatgtgtggtgtccgaataccaagactgagagcactgattcctgttatctgccctggtagcaggatgatcaaaaatggaagtctgggcctagtgattaaacacacacacacata

SEQ ID NO: 898868 - DNA, 619 bp, Homo sapiens
ttattaggtgcattctaaaacatctctccacccatcacttattcctgaccatcccatcatcttcctcttttcactctggcatggagacctaatctagccaaatgagctaactgagaaataacatttattagagccagacattaaacaaagtgactatgaacaaatggtgttgcagctgccttgccagtacctactgtcacaaaatacttgtgggataaataaaaattaatacaacctggaggtgatatttaggagtcttggccttgacaatcacataagtatacatgaggaagttgcatccttggaggtaacccagtttaattaattggagcttgcactagagaagagatcatgaaaaactcaagctaaatgaaatggtacataaccataacaaaagcttcttctttttaccagcttgaaaggaaagtagctttgaatttgggagtatattctgttggatcacacattagctctttttataggtcgaaaatggttgagtatcaggaatttcatgtggtgtcagcctgatgtgcattttgcctttgmttgaaacagtttgtaagacatttagtagtcatgtttaaatgctacatttgaaattccacattggtgggggaag

SEQ ID NO: 898869 - DNA, 586 bp, Homo sapiens
aggtaatactacttacttgcctcagttttgtcatctgtaaaatgggaattaaatgttttttggctttgggggaaggaggattgcaataacstgtgagaaaaatgcctatctggcacagggccatcacacaagagggcatgtacaccttcccagaaaagtgcttatttaagttaacacagactactgcaattgagtcacatacagttattagaaacaagtgggcggctccataatcaagcaataccatatcattaaataacatttaggagagacttctatttgctgggcattgtgtgaggggctaaggatggaggaacacagtctttgcaaaatgtcaatcactctgggtttttttctttagcttcaaggagcactggctggaattcttacacattgatgattaatatctaggtactgggtagctagaaaacggattttaaaaatatcaccaaattctgcatgatttggctttagaaagaagcattgatttcagtggggaaacttttgtctctcaaggttatgtttgtgagatattaggctacaaagcatgggcacgaggtcacgcattttactcatttaggcgttc

SEQ ID NO: 898870 - DNA, 586 bp, Homo sapiens
aggtaatactacttacttgcctcagttttgtcatctgtaaaatgggaattaaatgttttttggctttgggggaaggaggattgcaataacgtgtgagaaaaatgcctatctggcacagggccatcacacaagagggcatgtacaccttcccagaaaagtgcttatttaagttaacacagactactgcaattgagtcacatacagttattagaaacaagtgggcggctccataatcaagcaataccatatcattaaataacatttaggagagacttctatttgctgggcattgtgtgaggggctaaggatggaggaacacagtctttgcaaaatgtcaatcactctgggtttttttctttagcttcaaggagcactggctggaattcttacacattgatgattaatatctaggtactgggtagctagaaaacggattttaaaaatatcaccaaattctgcatgatttggctttagaaagaagcattgatttcagtggggaaacttttgtctctcaaggttatrtttgtgagatattaggctacaaagcatgggcacgaggtcacgcattttactcatttaggcgttc

SEQ ID NO: 898871 - DNA, 600 bp, Homo sapiens
gctacaggggcagaggtctcatggagaaattctaatagggcaatgtggaggggaaatgtagggttggagcccccacacagagtccccactggggcactgcctagtggagctgagagaagagcgccgctatcttccagactccagagtggtatatccaccaacacctcacactatgcacctggaaaagctgcaggcactcaacaccagcctgacagcccctgaaatcagccacagaacttcaaaatatatagaaattaaacaacatgctcctaaaaaaccagtgggtcaatgaagggtaatgaaaagggaaattaaataaaaaattattgtgactgttaatactaagtgtcaacttggttggattaaaggaggcaaaacattgatcttaggtgtgtctgtgagggtattgccaagggagattaacattgattcagtgggctggggaaggccaacctgcctttaatctgatgggcaccatctaatcagctgccagtgaatgtaaagcaggcagaaacatgtgaaaaggcaagactgtgacatctktctcccatgctggatgcttcctgccctcaaacatcagactccaagttcttcagtttt

SEQ ID NO: 898872 - DNA, 616 bp, Homo sapiens
cctgggaggcagaggttgcagggagccgagattgtgccgcatcactccagcctgggtgaaagatcaaaactctgtctcactaaataaataaataataaataaataaataaataaataaataaaataaatgaaggactggcacaaaccagcccacagtgtgaagactacaataaatactttactcttcaatgctcagacactgaagaacatctactagcatcaacaccatccaggaaaacatgacctcaccaaatgaactaaataaggcaccagggattaatcctggagaaacagagatagatgtttcagacagagacttcaaaagagttctattggaaaaacccaaagaaattcaagttaacacagcgaaggaattcagaattctataagataaatttactaaagagattgaaataaaaagaaccaaccagaaattctaaagttgaaaaatgcaaaagggcaaatctgagagttactggcttttaaaaggagcaaagacatagtggtagaagtttattcaaaaggatattagagaacttcccaaatgcagaggaagatatcaacattcagyataagaatattatagagcataaacagatttaacccaaataagact

SEQ ID NO: 898873 - DNA, 725 bp, Homo sapiens
tattaacaaaattagcataaatataacccttgtgccttagattctcctgatactaagaacccctgattaatttaggattggggcatgggtgcctagcaatatagatcatccttaatttgacttgagcttctgcccaataccctaaagaataagataaaccaacagacttatttgtttaccttggcaaatgcatccataagcacttataaaggaatgcttataacaaaatttaacttcctaactacaggaaggcaatataactaaatattatacttataatggaatattatgacaatcttttaaataattagatgtgtaggaaaacactggagaaggaaaggggaaaggaacaatgaaagaagggaaaaaacagatcaagggggaggtaaggaaggatgactaattttagtttttagtcttcagtatatgattctcacatgccttttctaatttatcccacagccacactttttaaaaaacacgctataagccaattaactgaattcctctcacattttctgtttccatgactttgttcttgttgtaccctttgtagaaatgtcctttcccaaatttctgaatgtgtgtatcttacctgaccttgaagagcaactcaatggccamccatttcacaaagccattcatgatcaatctctatctcaaccaaaccctcactgtacaaattctgagtatacacaatcatactttatctgatccatttaata

SEQ ID NO: 898874 - DNA, 635 bp, Homo sapiens
gctaagcttctgaaaaaaagtctattacttcaaggtgtctggattatatttatgaatttaattccaaaatatattttaggcttttattatattcaatatgtagtaagaataattgaagagtggaaaaaattaatcaaactgtatctttattctcaaaaaaattcaacatcaatcagaacagtcaggcttctgtaaacctatgaaactggtaattaatcatgatgttcctagaagtgaaatacacagaaaggcgtcttagtctgtttttgctcctataaaaataccatagactggctaatgtataaagagcataaatttatttctctgagtcctgaaggtagggaagtccaagattaagaccctaccagtttcagtatgtagtgaagactcatttcttatagagggcaatatataggtgccctcatatggcagaaaagacagaaagggcagaagtgaatgaatgctgtattcgcatatgacagaagagcagcagtgcaaaacatggcctcagctagtacccaccagcccttttataagcactaatacattcatgaggatgaaaccctcayaattttatcacttccctcaaagccacacctcaatatgtcaccaccatgaggattaagtttcaatat

SEQ ID NO: 898875 - DNA, 621 bp, Homo sapiens
tgtgtccaagtgttctcattgttcagttcccacctatgagtgacaacatgcggtgggttggttttctgtccttgcaatagtttactgagaatgatggtttccagcttcatccatgtccctataaaggacatgaacttatcattttttatggctgcatagtattccatagtgtatatgtgccacattttcttaatccagtctatcattgatggacatttgggttggctccaagtctttgctattgtaaatagtgccacaataaacatacttgtgcatgtgtctttatagtggtatgatttataatcttttgggtatatacccagtaatgggattgctgggtcaaatggcatttctagttctagatcctggaggaatcgacacactgtcttccacaacggttgaactaatttacactcccacaaacagtgtaaaggcattcttattcctccatatcctctccagcatctgttgtttcctggttttttaatgattaccattctaactggcatgagatsgtatctcattgtggttttgatttgcatttctctaatgaccagtgatgatgagcttcttttcatatgtttgttggctatataaatgtcttcttttgagaagggtctt

SEQ ID NO: 898876 - DNA, 596 bp, Homo sapiens
gtttgttttgttggatgcaacaagatcaaaaggtagcccactgtgagccaattcgtttaatgttgaggaaaagattcaaaggcctaaggattgctagagtgaatttgtaatttaagacttacctacaacaggaggattgagaagacatacttatgactaataaagtgaaaaataaatttgtgagggagcattagcaacgttgaagaactatgtgatcactctttgctacaggtcagacctcacagtgggtactgcagtcactgaattaaggcacctaaatgcaatggaggtaataaaatctgaaagtggcaggggacatgtggcagccctcaactgacagagataaggtggagtgtgattatcataatagacagcagagtcaaagcagcagtcagaatagtctgactcaagcagacctatagcattggctaaattatcatggtgttcctaaatcaaaaatgatagtaagcctactaaatactttctcgattagtattcacaaaatacttctaggtcaagtgaacaaacgtttaacttgaatcataraaacagagtcatggctcctcaatcaattccctggcttgagccagtttatc

SEQ ID NO: 898877 - DNA, 596 bp, Homo sapiens
gtttgttttgttggatgcaacaagatcaaaaggtagcccactgtgagccaattcgtttaatgttgaggaaaagattcaaaggcctaaggattgctagagtgaatttgtaatttaagacttacctacaacaggaggattgagaagacatacttatgactaataaagtgaaaaataaatttgtgagggagcattagcaacgttgaagaactatgtgatcactctttgctacaggtcagacctcacagtgggtactgcagtcactgaattaaggcacctaaatgcaatggaggtaataaaatctgaaagtggcaggggacatgtggcagccctcaactgacagagataaggtggagtgtgattatcataatagacagcagagtcaaagcagcagtcagaatagtctgactcaagcagacctatagcattggctaaattatcatggtgttcctaaatcaaaaatgatagtaagcctactaaatactttctcgattagtattcacaaaatacttctaggtcaagtgaacaaacgtttaacttgaatcatagaaacagastcatggctcctcaatcaattccctggcttgagccagtttatc

SEQ ID NO: 898878 - DNA, 652 bp, Homo sapiens
accgtgttagccaggacggtctcgatctcctgaccttgtgatccgcccatctcggcctcccaaagtggtgggattacaggcgtgagccacagtgcctggccatcaaggttaaatttaaaaggagcacaaatacatacaggagtaattgattcagattacaatggggaaattgaaattgttatatctactgttccctggaaagcagagccaggagagcatatagcacagctcctgattgtgccgtatgtggaaatggggaaaagtgaattaaatgaacaggaggatttggaagcacaaatcaacaaggcaaagcagcttattgggtgaatcaaattactgataaatgtcctacctgtgaaataactattcagggaaagaaatttaaaggtttgatacatacaggagcagacatttcaatcatttctctacagcaatggccgtccacgtggccaattcaatccactcaatttaacagagttggagttggtaaagcccctgaagtatatcagagtagttatattttgcactgtgaagggcccartggacaaactgggactattcaaccaattgtaacttctgtacctataaatttatgggggagagatttattacaacaatgggaagcacaagttctaattccagaacaattata

SEQ ID NO: 898879 - DNA, 624 bp, Homo sapiens
tcctatccaactaccgaggacatttttcacagaattagaaaaaaactattccaaaattcatatggaacagaaaagagcccaaatagccaaggcaatcccaagcaaaaagtacaaagctagagkcatcactctacccaacttcaaactatactgcaaggctacagtaaccaaaacatcatggtactgacacaaaaacagatacaaagatcaacagaacaggttagggaatccagaaataaagccatatacttatttttacaaatgtgagaaaatatttacaaaatatgcatccaacaaaggcccaatatccagagtctataaggaacttaagcaaatcaacatgttaaaaacaatctcatttaaaaatgctgaaagaacatgaacagacatttctcaaaataagacatacacgtggccagcaaggatatgaaaaaatgctcaacatcactaatcatcaaagaaatacaaattaaaacatcaatgacatactatctcataccagtcagaatggctattattaaaaagtaaaaaaaacaaacaaacaaaaaaaagcacatgttgatgatgttgcagagaaaaaggatggctattgaggatataaattagttcagccattgtggaaag

SEQ ID NO: 898880 - DNA, 592 bp, Homo sapiens
tactaaacccagctcagggacattgtaacaatgaccaaaattgagctggtgcttgaggatgcatgggtagtctaacaagcaaatagctggggcagcatcttaccatgagggttgttctcattgtaatcagcatcctcttagatagaagcgctacatttcttcttaagtgacgaatttctgggattgcttcttttactctaagctaactcttggagatgaaaagtcaaccacagagagatcaccaagggtgagaagaggccctgggatggaagtctgaggcccctgaacattcaaagggtgggcagagaaagaggctgccaagggtgctgagaggcagtggctgttgagatgggagagggcagaggggagcggggaagatcaagaatgggaagtgggggcaaagggcagccccacgcaatgctgcagagaagacaaggaagtggaagccggggaggtcgcactggatttagcaatgttacttccgtccgtggccttagttgcatccagggagcagtgggctgasggatatatgaaggataaggaagaagagacaatggacagaaacataattcaagatatttggctgtgaaaa

SEQ ID NO: 898881 - DNA, 592 bp, Homo sapiens
tactaaacccagctcagggacattgtaacaatgaccaaaattgagctggtgcttgaggatgcatgggtagtctaacaagcaaatagctggggcagcatcttaccatgagggttgttctcattgtaatcagcatcctcttagatagaagcgctacatttcttcttaagtgacgaatttctgggattgcttcttttactctaagctaactcttggagatgaaaagtcaaccacagagagatcaccaagggtgagaagaggccctgggatggaagtctgaggcccctgaacattcaaagggtgggcagagaaagaggctgccaagggtgctgagaggcagtggctgttgagatgggagagggcagaggggagcggggaagatcaagaatgggaagtgggggcaaagggcagccccacgcaatgctgcagagaagacaaggaagtggaagccggggaggtcgcactggatttagcaatgttacttccgtccgtggccttagttgcatccagggagcagtgggctgacgratatatgaaggataaggaagaagagacaatggacagaaacataattcaagatatttggctgtgaaaa

SEQ ID NO: 898882 - DNA, 652 bp, Homo sapiens
ttttggaactcatcaaactcaaaggggaaaatggacatcttctctaaaagcacaacatgcaagccacttgagtggattatttagraaattcaaaggaaattgccccatggcatcataagaggtttaagtaatgaaacaagataaccatgttttctgccaatattttcagtgctgttcatagacatatagtgtgagccacatcatttaaaatttcctagtaatgacaataagaaagcaaaaagaaataggttgcattaattttaataatatattttacttaacttgatatatccaaaatgctaccatttcatcatgcaatcaatatacaatttattaattttatattttatgttatttttggtactaagactttgaaatcaatgtaattttacacttagaacacttattcatttgcactagacacatttcttttttaaattttattttattataaattgataataatgtcatgtatttatgggatacaaagtaatattatgatttgtgaatacaatgtggaataattaaatcaagctaactagacatattcatcacctcaaatatatatcttttttttgtggtgagaacatttggaatttactcttttaccaattttgaaatgtacaatacactgttattaactatcttcatg

SEQ ID NO: 898883 - DNA, 591 bp, Homo sapiens
tttgactgacagagatgtaaattttgcatttgttgcgtcattttcacacgacaattcctaagaagaggaaagtccgatgttatatcttttacaccacaaattataagttgacatatrattttatcatctccagtcagtatctggaatccaaatacaatattagagctggtagggaccttagagattatcagacccagctttttttatgttttaaatgagaaagctgaaacccagggaaaggaagcagcttactcatggccacagagctaattggtggcaggaatgaaacgacaacctccatttactatataaacatattcattcacatacagacatatatatgattgaacctcgactcaagtctttacttctctatcccaagtgaggaagtgtctctctgtaacctagggggtctgttcaattcctcttgggtatatataattgggacttttctacttacatccacctagatgttggcttctgttgggtatataagaaagtgaggctttgtctcagatggacagacacaagttaccttctgcatagccccaatctcttgaggtagcagttaacttgcatctgtcctctgtc

SEQ ID NO: 898884 - DNA, 449 bp, Homo sapiens
cctggaagaacattgatgcaaaaatcctcaacaaaatactggcaaactaaatccagcagcacatcaaaaagtatatccaccatgatgaaataggcttcatccttaggatgcaaagttggttcaacatatgcaaatcaataaatgtgattcatcacataaagagaactaaagaaaaaaagccacatgattatctcaatagatgaaaaaaaggtttctgataaaattcaacatctcttcatgttaacaactctcaataaactaggtactgaaggaacatacctcaaaataataagagccatgtatgacaaactcacagccaacatcatactgaatgggcaaaagctggaagcattccccttgaaaaccggcataaaacaaggatgycctctcccactactcctattcaacatagcactggaagttctggacaaggcaatcaggcaacagaa

SEQ ID NO: 898885 - DNA, 587 bp, Homo sapiens
gtagaagaaaaaaagaaaataaaattgaaggacgaatgtgggagaaccaaaatctgaataacaagagttctagtaagatagaggagaggaaaagaaggcaaagaaatacttaaagaagtaatttaagaaaatgtctcacaattgaagggtataacttctcatgttgaaaggactttccaggtgcccaatataacagacaacagatgccttagtacatcactgtgaaattttagaacattggagtcaaaagaaaacttaaaaccttccagagaggggaaaaaaaggtttcatatagaacctctggaattagaatgacatcagacttagtcctgaaagctggaaaacaatgaaacaataccttcaaaatatgaaaaaaaaaaaggatttcaaccaagaattctatactcatccaaaaccttgaataaatgttaagtagaataaatacacctttagatatacaatttctctgaaaattagttcccaagccccctttcaggatgctgygagggggaaagctccaccatgcaatacagaaagaaggaacccaatattggagagcgataagaagagtcctcaatatggtagta

SEQ ID NO: 898886 - DNA, 563 bp, Homo sapiens
cacagtttaatgaaacttcagcatgtactcaaaagtgacgaaaacagcagttgtagagaaggaatcatggaggtacacaggtttgtaagttttcattttgagtaagtctgagggatgatacagttctatagatcagtgcaggtccatgatgaagggtaaagctttatgtctttaagggtgtcaccccttagtgcacccaccttctaccctgtgggactccagaaaaatctgtagcatctatatttagaaggattgtaacaccagtttcttcaagtataaaactctgagactaaattctccttttatttaggttctccaccttcagtaatagtaattactgcattttaatgacactttccagtttaaaaacatctttatgtactcaggtttctacatataaagccaatacattcctgagcatcattaagattggtgggtgacagggatgtaaacaaaaataagaatttatctttgccctagaattatcayagcccagcatgcagatggataaagatacagataattacaataaaaatgtgatgctccctataacaggcacatga

SEQ ID NO: 898887 - DNA, 582 bp, Homo sapiens
accaactaagttggggcagggaggaagatgggataagggaaggtaacatttggtctgggttttgaagattgagtaggatttcactcaatcttggggcattccagggagagagattgagagctgaaaaatttgggcacaatcatgtgaaaaaatggatgtactgcagaagagaaagaagaggaaggcaagacgtaggggctgagggataggttgatatgcggaaggccttgtacgcaatgctgaaggtttatgagcaagggaatgaggtgatcagttcctggtttagtttgatgaccagtgttggtgtaaggagggtcattggagacatttaaatcttacaagctctgctgttcttactcatatttcaaatcagcgagctgcttctcatactgtttcaaggactttgcccactgctagctagtaggagtaggaattgccacaacttagctatacaacctctgacttcaattcctgytgacccaacgtgtctgtgtggtgcgtggctccagcccacttgctttctgtagagcctttggtctgtaatatttggggtgatctgctcagctcattcactatcaacac

SEQ ID NO: 898888 - DNA, 621 bp, Homo sapiens
tactgagagactgagcagtttggaaaggtgaaaaattcatctacgtttcaaggttctaatggttccacgtcaagcataaagcaaagtgwtgattcagattaactatccacctccctctttcttcctacaaataaaacaagttacaaacgagtcattattttccaaaatgtgcttcttgaaaatattccccctacactgaggggtgagggtaatggagcatgtataagtatattatgaagaaaagtcatgttaaaaatacaagattcattaatttaagagccagatcagaacttctgacaataatgtttctgctcatggatgtatccaaaatccatttagtttatttttctaattgtcttgtaacttgtatgggagccaatgattctgataatgttgactgtgatcgaaagaatatagttcaggcaatataatagatggtcagtaaacacccacaaactttatcatttggtattctcttttatttccacagtgtatttctgtttacaaaccactttctttcttttttttcttttattattatactttaagttttagggtacatgtgcacattgtgcaggttagttacatatgtatacatgtgccacgctggtgcgctgcacc

SEQ ID NO: 898889 - DNA, 611 bp, Homo sapiens
tcagatggaatgttatgtatatatgttagatccatttagtctaaagcatagttcaagtctaatgttttctcattgatttttgtctagatgatctacctattattaaaatttggatattgaagttctctatagttattgtattactatttctcacttcatatctgttaattttctaaattaatttggtgctccaatgctggatgaatatataattgttttatcctcttgttgaattgacccctttattattagataatgacctgatttgtgtcttattatagtttcttaactgaaagactattttgactgatctaagtatagctatccattctcttttttggtttccatttttatgaattacatttttctatttctttacattcaacctatgtggatgcttaaactgagatgtgtctcttctaggcagcatatagatgggtcttgttttttaatctattcagccattatatgagtttttaatttyaacctttactctatgttcataggtacatgtacaggtttgttacataggtaaattgtgtgttacaggggtttggtgtacaaattattgcactacccaggtaataaacatagtaactcataggtagttt

SEQ ID NO: 898890 - DNA, 611 bp, Homo sapiens
tcagatggaatgttatgtatatatgttagatccatttagtctaaagcatagttcaagtctaatgttttctcattgatttttgtctagatgatctacctattattaaaatttggatattgaagttctctatagttattgtattactatttctcacttcatatctgttaattttctaaattaatttggtgctccaatgctggatgaatatataattgttttatcctcttgttgaattgacccctttattattagataatgacctgatttgtgtcttattatagtttcttaactgaaagactattttgactgatctaagtatagctatccattctcttttttggtttccatttttatgaattacatttttctatttctttacattcaacctatgtggatgcttaaactgagatgtgtctcttctaggcagcatatagatgggtcttgttttttaatctattcagccattatatgagtttttaattttaacctttactctatgttcataggtacatgtacaggtttgttayataggtaaattgtgtgttacaggggtttggtgtacaaattattgcactacccaggtaataaacatagtaactcataggtagttt

SEQ ID NO: 898891 - DNA, 665 bp, Homo sapiens
tggttattttgcctgttagttgatgcagtttctccatagcgtcaatggtctttacaatttggtatgtttttgcagtggctggtaccagtttttcctttccatgtttagtgcttccttcaggaactcttgtaaagcaggcctggtggtgacaaaatccctcagcatttgcttgtctgtaaaagatcttatttctctttcacttatgaagcttacttggctggatatgaaattctggattgaaaattcttttctttaagaatgttgaatattggcctccactctctccttgcttgtagggtttctacagagagatccactgttattctgatgggcttccctttgttggtaacttgacctttctatctggctgctcttaacattttttccttcatttcaaccttggtgaatctggtgattatgtgtcttggggttgttcttctcaaagagtatcttagtggtgttctctgtattttctgaatttgaatgttggcctgtcttgctaggctggggaagttggaagttctcctggataatatcctgaagagtgttttccaacttggttccattctccccatcactttcagatacagcattcaaaygtaggtttgatcttttcacatagttccatatttcttggaagtttgtttattcattttcattctttt

SEQ ID NO: 898892 - DNA, 608 bp, Homo sapiens
agagcaatacctgacacagggaagtagctcaatatttaaatgagtgwgtgactgaatgactgtccttgacaactgtttaacccagagtcatacataagcttaagaagccagggaaataaatgtctcctggtcttagagcagcagaagcaagcagacctagaagaaccccatttctgtcttggataaggtagtatcgatgcattgctctcaagtatttggccattgagtcagctgctgtgagggtgaccaggaagggcaggggattctaaaacaggtgactatagaggaccaacttctgacccaaacccttggaatattagaaggcttgatgctataagacaagttgggacatggacctgcaagagaccagagtggctcagggagattgcatccggggctgggtaagccaaggcctacatcctgcccctgaaagtcactggcaatttgcctttcagcaagccgtttaccctccctgaggctgtttccttctttgcaaaatgggcatgatagcagcatgttgtataatatcagatgtataagtaccaaacacaagatctgatataaaaagggtacccaataaatagtagctgttgttactggagagacta

SEQ ID NO: 898893 - DNA, 679 bp, Homo sapiens
atttctacaaccagcttgaatttctcccccagaaaatggggttttcttttttgtggcatcatcaggctgcaaattttccaaasttttatgtctgcttcctcttgagtgctttgccacttagaaatttcttctgccagataccctaaaacatctctctcaagttcaaagttccacagatctctagggcaagggcaaaatggcaccagtctctttgctaaagtataacaagagttgcctttgcctcatttcccaacaagttcctcatctccatctgagaccacttcagcctggacatgtcattgtccataccactatcagcattttggtcaagccgttcaacaagtttctaggaagttccaaaccttcccacatcttcctgtcttcttctgagccttccaaactgttccagcctctgcctgttacccagttccaaagtcccttccacatttttgggtatccttatagcagcacctcactctactggtaccaatttattgtagtagtccattctcatgctgctataaagaactgcctgagactgggtaatttataaaggaaagaggtttaattggctcacagtttcacattactagggaggcctcaggaaacttacaatcatggtggaagacaaaggagaagcaggcaccttcttcacagggcagcaggatggagtgagtac

SEQ ID NO: 898894 - DNA, 619 bp, Homo sapiens
ggaaaggagaagacaaagtagagagactccctrttaacactttctaagcttttagtcacacaagggcatggaaaacaaactctcctgtgttttcttagccaggagaaataggccaggctcctgccagtcatcattgctcttttggtgctgacctggccttgtttggtacatccctgccctgtttgaaatgcagtactcctgctccagacaacttgaagaacggaacgcattttttcaaagtgctagaggggggataaaaaaacaggcaaaaattgagacaagagccatttgtagggcagcagaatgagctttggcttttctgcccctagctcgggctgggaaaacacagagacctgaaggagctgaatgttaggaagaaaggccatctgaggcatgaattttaatccctgcttggcttcttgcaaactgtgtgacctcaagcaagtcactttaccagtccaaatcttggttgcttcatctgtaaaactgagttgtctacctacataggagttctctaaggaaccaatgaaatcatatttgtaagacgcccagaacagagcctggtgtttagtggacacatactaagcctaataaagcattccttccttccttcccaaaa

SEQ ID NO: 898895 - DNA, 633 bp, Homo sapiens
gtaatttataaagaaaaagaggtctaatggactcacagttccacacagctggggaggcatcacaatcatggtggaagatgaaggagaagtaaaggcacgtctcacatggcaggagggaagagagtatgtacaggggaactgccctttataaaaccatcagatctggtaagacttattcactatcatgagaacagcatgggaaaacccaccttcatgatgtaattacctcccactgggtctctcccaagacatgtggagattatgggagctacgattcaaaatgagatttgggtggggacatagccaaaccatatcaaggggaaatggggaatcattgcttaatgggtataaagttttagttatacaaaatgaataaaatctagatatctgttgtacaacatagtacctataattaacaatacagttagccctccccatttgtgggttctgcatccacagactcaatcaactatggatttaaatttttttaattaaaataatacaaaaattaaamataatataataaaaataatacagtataacaattatttacacagtgtttatattgtgtttggtattgtaaggaatctagacatgatttaaagtactgtcagcccctgtatccatgtgttc

SEQ ID NO: 898896 - DNA, 616 bp, Homo sapiens
agtcttgatatggtttggatttgcrtcccctcccaaatctcatgtcaaattataatccccagtgttggagaacaggcctggtgggaggtgcttggctaatgggggcagatttcccccttgctgttctcatgattgtgagtgagttctcacaatatctggttgtttgggagtgtgcagcacctcccacttcattatctcttcatcctgttctagccatgtaggatgtgcctccttcttctttgccttttggcatgattgtaagtttcctgaggactccacaaccatgctgcctgtacagcctgcagaactgtaagtcaattaaacctcttttctttataaattaaccagtctcagctagtttcttatagcaatgtgagaatggtgtggaagcagctttgcaaggggctaatgggcagaggttggaacagtttggagagctcagaagatgacaggaagatgagagaaagttttgaactttctagagacttgttaaattcttgggaacaaaatgctgatagtgatatggataatgaagtccaggttgaggtggtttcagatggagatgcgaaaacttattgggaactggagcaaaggtcacttttgttatgcgttagca

SEQ ID NO: 898897 - DNA, 615 bp, Homo sapiens
tcaggttctcagctccccaacaaatttttttgatcgtaatatatatgttgccttcataggagtccctagaggggrtgcctaatgaatttaaggcctgaaaccaaatagctgctgggtttcagtcagcactcctctcatgatcagctattaataaaaatgtggattggattaattctatttattattatcaacagaaattcatcaattatactcgggacacccgagtttaattaactagccagttacatgccaccagctgaatggcctgggaaaagaggcttgagctagacatgatactagcagataaagggggcatatgtgttatgctgggtgggaaatgttgtattttcattcccaacaatactgccccagattgaactattacaaaagcattacaaggacggaaaactctcaccaacaaactggcagaaaatgctggaattgatgaccgatttactggttggctagaaggttggtttgggaaatggaaaggcatggtagcttcagtccttacatctctcataattgtagcaagggccttaagggcagtgggatgctatattatcccttgtatactggaactagcacaaaggttaattggaacagctattaaca

SEQ ID NO: 898898 - DNA, 611 bp, Homo sapiens
ggaatattattcagccatgaaaaagaatgaaatactaatacatgctgcaacatagatgcaccttgaagccagacacagaagccactaactgtatgattccatttatatgaaatgtccagaataggcacatctctaaagacagaaatagatcaatggttgccaggggctgaggcatgcaaggaatgagaaatgtctgcttatggttatggggtatcttttgggggtgctgaaaatattctggaattagacagtggtgatcaatgtatgacttttctgagttgtacattttaaagggtgaacttcatggaatgtgaataatatctcaataaagctgttatttaagaaaatgaggccaggcacagtggctcatacctgcaatcccagcactttgggaggctgaggcaggcagatcacttgaggtcaggagttcaagaccagcctggccaacatggtgaaaccctgtctctactaaaaatacaaaaattggcggggcatggtggcatgcacctgtaytcccaggtattcaggaggctgaggcaggagaatcgtgtgaacctgggaggcggtggttgcagtgagctgaggtcatgccactgcactccagcctggga

SEQ ID NO: 898899 - DNA, 579 bp, Homo sapiens
taagaagtggcagagatagtatttgaactcagatctctaagatgccagaactaaactatactgytaaataccagcccctgttctcagacagacagacagagaggatggcccaattcagtgctttgggggcatagaggaaggtgatcttacctgaccttgtgtgattaagggggagaagaccaaagaagccttcctggaggaggtgatgtctgggctgactctgaaatgacccaacttcaacactgtttactgagtgttcacaggtgccaagcaatctgccagccctctaacatgccttatgtcattaaaccaggccaccttgggatagaagcatcagcgtccccatgtgatcaatgaggaaagggaagttaaggagagtgaagttcagagcaaaggtcaccaccccaagccttccagcttgtgagtggaaacaggactcgaactcagggcactctgagtctaaagcaggcacggggcctcagcccacaatgggtgtgctcagaagtagggtgggaggatgacaggatgggagtgccctgaggatgtcaggaagggctgagggatgcagaggtcacggat

SEQ ID NO: 898900 - DNA, 579 bp, Homo sapiens
gaaacagctcctagtccaaggacaaagaagctgaaacagatcctagtccaaggacaaagaagctgaaacagatcctagtccaaggacaaagaagctgaaacagatcctagtccaaggacaaagaagctgaaagagatcctagtccaaggacaaagaagcagaaagagatcttagtccaaggacaaagaagctgaaacagatcctagtccaaggacaaagaagctgaaacagatcttagtccaaggacaaagaagctgaaacagatcctagtccaaggacaaagaagctgaaagagatcctagtccaaggacaaagaagcagaaatagatcctagtccaaggacaaagaagctgaaacagatcctagtccaaggacaaagaaactgaaacagatcctagtccaaggacaaagaagcagaaatagatcttagtccaaggacaaagaagctgaaasagatcctagtccaaggacaaagaagctgaaagagatcctagtccaaggacaaagaagcagaaatagatcctagtccaaggacaaagatgctgaaagagatcctagtccaaggacaaagaagcagaa

SEQ ID NO: 898901 - DNA, 582 bp, Homo sapiens
ctgtaaacagtaggcttgagcaaccagtaaccctactgaagaaggttgtattaatggccccaattcttcatctstccctatattacgacccttggacatgtaactttgtgggatctgcctattccaaggagggaaggggtaaggggtaagggcaaattccccatcccatgactctaggcttgggtctatgacttactttaaccaatgagatgttagcaggcatgatgtgactgacctaagtcttacaaagctacctctctcaacgccatgagaaagacatgcccaagctaggccactgtcccccaggaggaaggcaagaaacatatggaacaagcccactctcagccaagcctggcctggatcacctcatcccagccaagtcacaaatccatgagaatgaatcattattgttttaagccactgagttttgagcttgtgtgttataccacaatggtatatggttaactgactcatatcatgggtcccatccttctcttgccttccctactgtctcccaagcgcccagcagcacgccccacccgcagtctctctagggagacactaatcctaaaaatatttctt

SEQ ID NO: 898902 - DNA, 672 bp, Homo sapiens
taagagaggacagaaaacaaatggaaaatcattccatcctcatggataggaagaattaatatcacaaaaatagccatactgcccaaagtaatttatagattcaatgctatccccatcaagctaccattgacactcttcacagacttagaagaaactattttaaatttcatatggaatcaaagaagacccccctatagcctagacaatcctaagcaaaaagaacaaagctggaggcatcacactacctgacttcaaactatgctacaaggctacagtaaccaaaatttactgactcttaaggacaaaatggaatcatgtttctaagtatctcaactcagtgtccattcctaccaaacattaaacaagttgaatctgtagtgctttatggattgtatattgttttgtcactatctggagcactttccttctatttaattctcacagcaaccccatgaggtagttactacgattatccccatcttatggatgagaaaattgaggctcagagaaggtaaatgccttgcccaaatcacatcactctaatttatggaaccaagatttgcatacaggtagtacaastccagagctgtttcttaaacatgacactatattgtagcaccatcctttccctggagcttccccagccctgtggaaggctgtgcttggtgggca

SEQ ID NO: 898903 - DNA, 601 bp, Homo sapiens
gtaatctggcgcatggttgacaaaggccagcttccctttgctgacgggccaaggtgtgttcttagaatttggcttttgggtttattccccttgtaccagctarcattctataaaattggattttgcaatttcatggcctcccccatgcacaccattgagcatgtctttatctctttctccatcttaattaaagcctgttacactcacatgcacaaattaaaatgaattttacatacattctcttcatagttgctggcgatttgcatgtgagcctggaagtgaatgccgtagcggaggacattacagcctgcagctgctacctgctccagacacctacatggagtttgctgacaggcagcccaagtggtctcaaggctggaatcctgacaagcaccgcacctgctaagggaattgatttgatcagagcttgtttagaggcaaagtgacaataatgaagatctcttcccttatcaggttacagattgctctcccataagccaccggaaatctaaagactcatcagaaacttaagggaaattctcacccagctgctttctctcctaaatgacttgtctactgttagactgatggcttagggctt

SEQ ID NO: 898904 - DNA, 533 bp, Homo sapiens
agtgagttaataaaaatatcttacaatatctgatgcaaaaaaaaatgctcaataatataattattataattcaaaacagaggagtagaaagggaacttgtcctagaggcagggaacctgggataatgtcccagttacatcacttattaaacacatgaccatgaaagtcacttaacttctctgggcctcagattcttcttctcaaatatggacatggaaataatgattaacacctgatatggtttggctttgtgtctccactcaaatcttatcttgaattgtaaccccataattcccacaggttgtgggaggggccccatgggagataattgaatcatggaggcagtttctcccgtgctgttctcataatagtgagtgagttctcacaagatctgatggtttcataaggggcttttcctcctttgctcagcaattcttcctgccrccatgtgaagaaggacgtgtttgcttccccttccactatgattgtaagtttcctgaggcctccccagccctgtagaactgtgagtcaac

SEQ ID NO: 898905 - DNA, 681 bp, Homo sapiens
tactctctgccaagcccagtgctaagcatcagtggtacaaagataaaaatatggtatttggttctgtttatattgaacaatgagaacacttagacacaggaaagggaacatcacacaccggggccttttgtggggtgtggggagggggagggatagctttaggagatgtacctaatgtaaatgacgagttaatgggtgcagcacaccaacatggcacatgtatacatatgtaacaaacctgcacattgtgcacatgtactctagaacttaaagtataataaatatatatatatatataaaagataaaaatatggtcttatttggcggggcgcggtggctcacgcctgtaatcccagcactttgggaggccgaggcgggtggatcacgaggtcaggagatcgagaccatcctggctaacacagtgaaaccccgtctctactaaaaatacaaaaaaaaaattagctgggagtggtggcgggcgcctgtagtcccagctgctcgggaggctgaggcagaagaatggtgtgaacccgggagatggagcttgcagtgagcccagatcgcgccactgcactccagcctgggcaagcagygagactccatataaaaaaaaatatatatatatggtcttattcctcagcaagaagagaaacaaataacgaaaggtcactaagcacttac

SEQ ID NO: 898906 - DNA, 671 bp, Homo sapiens
agaacacactagaacttggrgtgtttttacattatcttcagcccactgagattttctctgttactgaacttcaaatgccccagtaactattcttcctcttccagattgtatttttttttttgagacagagtctttctctgtcactcaggctggagtgcagtggcatgatcatagctctctgcagcctggacctcccaggctcaagtgatcctcccacctcagcctcctgactagctgggactacaggcacatgccaccaggcctggctaatttttaaattttttgtagagacagggcttcagtatgttgcccagggtggtcttgaactcccaggatcaagcaatcctccctccttggcctaccaaagtgttggaattacagatgtgagcccaggggttcaaggctgcagtaagctatgattgcaccactgcactctagctggggctacagagcaagacactgtatcttgaaaaaaaaaaaaaaagtaagaaggtaaaggtatgaaactaaaaggagactatataagaggaggaggagaaaatagacctcctcattttttgccagaacatattattccccaccaagaatccccagtaacaaacctagttccattggcaatgctttttattttgcattcaaagactcaaattcttgatctctggctcttctta

SEQ ID NO: 898907 - DNA, 649 bp, Homo sapiens
aaaatgtatttacagaactccaaagttcaagacaccgtgctttgcacaacgaggcaargaagaaaatagagtggttcaaaactcaatgcttgccctccaagattcttggaagataagtctaggcagggtggctcccacctgtaatcctaacactttaggaggccaaggcaggaggatcgctttagcccaggagttcaaggtcagcctaggcaatacagcaagacttcttccttacaaaaaaaaaaaattaaaaattggacaggtgcagtggcacatgcctgtggtctcagcttttcgggaggctgaggtgggagtccaggaattcaaagctgcagtgggctatgatcgtgccacagtactccagcctgggcaacaaagccagaccctgtctcttaaaaaacaaacaaataaagattcctggaagataagacagagaaatataaccaacaattccagttgaattttcctttaataacatactaagagccaagtgttcattcagaagctaagtacctctgtagctggtagaggtggacatcactctgatctaggtggtcccttccaacagaaaggcttatcctcacagaaagaaaagtcaagtcaaacaagtaactgccaatgagtttataaattctgcttaatttgaata

SEQ ID NO: 898908 - DNA, 518 bp, Homo sapiens
tggaaagccttcccaagaagggtgggtgtaaacaaacaagcctagacagtgaagactgcaataaatgcctaactcttaaatgccctggcaccaactaacatctacaagcatcgagaccatgcaggaaaaaaaaaaaaatgacctatgaaattaaccaaacaaagccccaaggattaatcctgaataaagagagatatgcaacttttcagacagaaaattcaaaatagctgtgctggggaaactcaaagaaattcaaaataacacagaggatgaattcagaattctatcagataaatttagcaaagagattaaagttatttttaaaaattgagcagaaattctggagttggaaaatgtaactgacatactgaggaatgcatcagagtcccttactagcagaattgatcaagcagaagaaagaattaatgagcttgaagacaggttattcgaaaatacacagaaaagacaaaagaaaaaagaaaatacacatagaagacaraaaaaaaaccaatgaagca

SEQ ID NO: 898909 - DNA, 623 bp, Homo sapiens
cttgtttgcttatttgtttgtttatgcaattagtgttgtcatcagtttcaaataatgggttgtaagatcgtttttcaagcttcatggtaacctcaaattgaaaaacacacaatgggcacacaaaaaataaaaagcaagaaattaaatcataccaccaacaaaaatcaactccactaaaaggaagacaggaaggaagaaaaaaacaaaacaaccaccaaacaaccagaaaacacatagcaaaatggcaaaagcaagtccttacttattaataataatattgaatgtaaatggactaaaatttccaatcaaaagacatagagtggttgaataaacataatagcaagacccatgactgttgcctataagaaacacacctcatctataaagacacacatagactgaaaataaaaggatgaaaaaagatagtgcgtgacaatggaagcaaaaaaaaagaaaggagtagctacactatgtcagacaaaataggcttcaagacaaaaaatgtaataagagacacagaaggttattatataayaataaatgagtcaattcagaaacagaatataacagttgtaaatatatatgcacccaacactggagcacccaggcatataaagcaaata

SEQ ID NO: 898910 - DNA, 662 bp, Homo sapiens
gcctttcctttaagatctggaacacaacagcaatgccactttcaccactgytatccaacatagtactggaagtgctagctagagcaatcagacaagagaaggacataaagggcatccaaattggaaaggaagaagtcaaattatcctagtttgcagatgatatgagctgatatcatctgcaaagactccaaagaaagtatagaactgataaacaaattcagaaaagttgcagagttggaaaaaaaaaaagacattagaactgataccacagaaattaacatgcaaaaatcagtagcatttctatattccaaaagtgaacattctggaaaagaaatcaaaaaagtaactccatttacaataaccacaaataaaattaaatacctaggaatcaaaaagaagtgaaagatttctacaatgaaactataaaatactgatgaaagaaattgaagaggacacaaaaaagtgtaaaagtatttcacgttcatggattggaagaatcaacattgttaaaatgtctatactactcaaagcaatctacaaattcaatgccatccctataaaaataccagacattcttcacagaaatagagcaatcttaaaatttacatagaaccacaaaacatccagaatagccaaagcaaaaagaggaaaactggaggaat

SEQ ID NO: 898911 - DNA, 535 bp, Homo sapiens
tatcctgtttgtgaatagagacacattcatttatttatttttgatctgtatgtcatttatttatttctcttgttataatktacttggtataacctccagtgcaatgttggaaagaagtagtgagagtaaacacccttaccttatgcctgaccttgggaggaaggtattcattctgtcttttactattaaatctaatattagctgtggactttttgtagatatcctacatcagattgagggagtttcctactattcctagtttgctgagagttttatagttgaaaactattttcaatagttgcataattcattgttaactagaatatggtctatgttggtgagtgtttcatgtgtacataagaattatgtgtttcctgcaactgttaggtggagtgctttctaaatgttaagtagattcatattatcaagtaggttagtgttattagaatctgttatccaggtcctctatattcttactaaaattttgtctactgattccatcagtcaattagatagcaaagttaaaatatccaac

SEQ ID NO: 898912 - DNA, 423 bp, Homo sapiens
aatcacagaatgaagaatgtaattaatagcctggaatgacagtattgttgagtgctaagaaagctatggtcttcagactggcgaaagtggcaaaaccgcatctctacaaaaaatataaaaattagtcgggcgtggtggcacacaactgtggtcccagctacacaggaagctgaggcaggataatcgcttgaacctgggaagcagaggttgcagtgagtcactgcactccagcctaggcgacgaagcaagactgtgtctcaaaacaaaacaaaatgacaaaacaaacaaacaaaaacacctatgatcttgttttggttctaaaagtttcaaactttacctttcccaggakgccttagttttctcattggtaaatgaggtaactgggtgttctgttcgttatgtaactcacagttttaaattatt

SEQ ID NO: 898913 - DNA, 582 bp, Homo sapiens
agagcagacatccagtcagttaccacgatgatagaggatggtgattgccaccaaaagtcataacgaatgttttgcatgtcacttataatttcatatatatgtgtggtattccccagccaatattcagcttatcttggttaatctctttttgtgtcttttttaaagctcctaattgaaaatgtttttgtcaagatttgttaaagaaaaaagtattctatgaaacattatgtttattaaagaaaaatacatccagccaacattgttattttcatcctagcctgagtgaaaaatcacataagcatatcacttagaggatgatttttaaacagagtctattattatttgaatgacttcactccaatccaaagcacactgggaactgtaaaatgttacagacgctatttcatcataaaggcagtgtgttatgggggaaatcattcttagctgtatgggagaagwcatgactcccgacccagccactcattgaccaactatgtcgcaatgggaaaatcacttataatctgatacttttcttatctgtaaaaaaagagaagagaattattctatatgctgggactaaag

SEQ ID NO: 898914 - DNA, 669 bp, Homo sapiens
gtttgctgtgtttaggatccatcttacctaccctgtgcctgtagagtccatttttgacatttaaataatggttgttacagtattttctgtaatatgtcatgtggctggaatgagcccatcatcctcccattgtcgaacttagatcctggatccttgtcacctatgaatgtgatgaaaagtgccctttttcctcagatttctgcaagctgcatattttgaagaaaagtgctcatcatgaaatcaaacaatcacaagtttatcttgtgcttcatcgccagcctctactgagagaaatactgtagttatttcacccaaactctccctgggagattgtgttatgcaaaagctaagtgaatggacctcaagagtgtaccaaaaaaatgtctccaagttgcaacaaagcatatttttcagaactgacataaagtcgatttttttccttagtaaggattgtttttatcacattgacatttagtttattagagctaactttataagaccagttcctaaagagctttttacctaaatctgttgccattttctatagataagatgagaaaatgctgaaaaagtatggtttttccctcaaagattattcaaaataaaatcacatcatcwgttctttaccaccaggaagcggcataattacctcagactttcaaggaaaca

SEQ ID NO: 898915 - DNA, 580 bp, Homo sapiens
cagtgtcaagtgtaaaacacacatataattggaattgcagaagaagaatagagattggatgaggcagaaaaaaaaatgacatacatgaaatttcaccaaggtagaatgtgtgccrggccataaaataagtttaaatacatttcccagaaaggacacataaagaaggaaatacaaaaaaaaattaataagttgaattcatcaatgtaaaaaacctttgtccatcaaaaacaccattaagagaaagaagaataaagagcagactgggagaacacattgcatatatctgacaaaggacttgtatccagaatacataaataatttctacaaatcaatagccaaaagataaatcaaccaataaggaaatggtaaagaacttgaacagacacttctgggaataattaatttgaaaagccagtagtacaggagaaaaagaagctgcttgacattataagttatcagagaaaataattaaaactcattagaatggctaaaattaaaatggacaacaccaaatgttgacgaagatgtggggcacctgacactctcctacattgctgtgctagtggggaaaagtacaaat

SEQ ID NO: 898916 - DNA, 625 bp, Homo sapiens
gacagtattagcatagaaagaaattaatttaccattatattcctaaatatattttaatctttcctaggaggagatgggatgtacttacttttttttttttttagatggagtcacccaggctggagttcagtggtgcaatctcagctcactgcaacctctgcctcctgggttcaagccattctcctgcctcagcctccagagtagctgggactacaggcgcccactgccacacccggctaagttttgtgtttttagtagaaaccgggttttgccatgttgtccacactggtcttgaattcctgacttaaggtgatccacccatctcggcctcccaaaatgctgagattacaggcatgagccaccgcacctggcccatactcacactattaaccaagaagttgggagtttaaagtacaaggcaaaaagtacaacagatattttaagacaatgtgaggcatggaaatccttatgctggagggttagctgtgtcttaaaggctgcagagatgaaagcagaatgcattgtccttggtcccactggtaggaaatgcgtgagccaaggtttttcagtcctatratagagttacttaggaccatgttgtacagcaagacatgagtgcatgcca

SEQ ID NO: 898917 - DNA, 607 bp, Homo sapiens
catccttcaatgtgactgcatttagagatggggcmtttaaagtgataattaaggtaaaacaaggtcataagggtaagcccctattccaataggactggtgtctttaaaatattcagtaaaaaagaggaaaagttactggggatgcatgcacacagaaaaaaggtcatgtgaggacacagtgagaaggcagccatctgcaagccaaggaaagaggcttctggataaaccaaatcagccaacaccttgaccttggacttttagcctccaaaaatgtgaggaaaaaaattttttaagtcacccagtctgtggtacaggcatatctcagagatattgtgggtttagttccagaccacggcaagaaaatgaatattacaataaagctagttacatgaattttttggtttccaagtgcatataaaagttaagttttctatgcagaagctcgttagtttaattagatcccatttgtccattttggcttttgttgccattgcttttggtgtttttgtcatcaagtctttgcccatgcctatgtcctgaatgatactgcctacgttttcttctagtgtttttatgattttaggtcttacacttaagtctttaatcc

SEQ ID NO: 898918 - DNA, 577 bp, Homo sapiens
aagcccacagctagtgtcatattggataaggaaaaactgaaagcctttcctcttagatccagaacagaaggatgccccctttcactgctgttattcaacatactgctggaagtcctagccagggaaaccagacaagagaaagaaataaagggtatccaaattggaaaggaagaaatcaaattattcttatttgcaaacaatatgaccttctattaggaaaaacctagactcaaccaaaaaactactaaaactgatgaatgataggtaaacatatggtggcatgttcagacagtataatactcttccatagctaaaatgaagtggttcttaaaatatgatcttagaaatttgttaccagtgcaaattcctgggcttcaatccagacctacagaatcagaaactctgggggtatgttttaacaagccctccaggggattctgatgcatgctggagtttgaaaactatttaactaracctacatatataggttggataaatttcaaaaacaatgatattgcagaacgacaggttcagtatgataccattatatgaagttttacaacttgcaaatagtact

SEQ ID NO: 898919 - DNA, 577 bp, Homo sapiens
aagcccacagctagtgtcatattggataaggaaaaactgaaagcctttcctcttagatccagaacagaaggatgccccctttcactgctgttattcaacatactgctggaagtcctagccagggaaaccagacaagagaaagaaataaagggtatccaaattggaaaggaagaaatcaaattattcttatttgcaaacaatatgaccttctattaggaaaaacctagactcaaccaaaaaactactaaaactgatgaatgataggtaaacatatggtggcatgttcagacagtataatactcttccatagctaaaatgaagtggttcttaaaatatgatcttagaaatttgttaccagtgcaaattcctgggcttcaatccagacctacagaatcagaaactctgggggtatgttttaacaagccctccaggggattctgatgcatgctggagtttgaaaactatttaactaaacctacatatatrggttggataaatttcaaaaacaatgatattgcagaacgacaggttcagtatgataccattatatgaagttttacaacttgcaaatagtact

SEQ ID NO: 898920 - DNA, 508 bp, Homo sapiens
ttttgcagacaaacagactaaaaccatgaaaatgaaattttaaagaggagaatatgtgattattccaggtgtaagagaatttaatccaataattattacactgttagcytctgaccctgtaagtgtgcttaaagtatcatgtggtacccatgaggtatctagtggaacgtggtttttattctagcctagcaattgtaaagagaccttatcttgcttttgaggagatagtgcgctgaaccttcaaatggctgagcaggaccaggaatagaattcagggattcggccacagcctcaaggaaaatagtattcttcacttcatgagggaaaaaaaatgtctctatgaaatgaggaagcaaggagaattagggaaattcttggggaaaataattaatgtaaacattgtattttttactttctaattattccaaatgtcttttcgttgtcaaatatattcaatgtctttgtatgaaggggtaaaaaaagatttccagaattatatgcagtacag

SEQ ID NO: 898921 - DNA, 599 bp, Homo sapiens
atatataataacaaaattaataaaatgtacatataaaattargcaccaaactggttattccacttagctactataatttaggcttagttttgtctgtgagcctccaagcacctagaacaatgagagaaataatagaagttttactctcaggaagaaggaaccattatgattcatccccctaacttcccacatgctcaaatgagaaatttaaaacaattttttcaaagggagtattgagtaaacaacagtaagttatgcaatgggtcaaaagccagagcaacatttgtattggaaataaagtagatgtcatatcttggttcatatagcaacattctaatatgagttgagagtataacattacagcatgatatagcaaagacatttccataaggggctagagttaatactacaataaatagtatttattggaatttgtattgaaattaaacttgatacagtgtgttctggagagtagtatttaaatgatgctgcttcacagcttttcaactcctaataaggacactcttatttacccacatgtgttcttgggaaatactattaaaagatatagttaatagagcaagagatacagatcacta

SEQ ID NO: 898922 - DNA, 496 bp, Homo sapiens
tctggagaattcatttattcagactttttaaaaactgaagtccatactttgttcagattttcttagttttcatctaatgttctttttctgtttcaaaaatcccatctagtataccatattacatttagtcatcgtgtttcattcagctcactcctcttggctgtgacagtttctcagactttccattttttatgaccttgacagttttgagaggaactggtcagctattttgatgtccctcagtgggaatttgcctgacgtttttctcatgattagactagagttatggtttgaaggagtgtgaacacagagataaagcatcatccttatcatgtcatgtcaagagtttgtactacccacatgacttagctctgttcacgttaacctgattatctgactgaggtaatgtttgctaggtttttccactacaaakttattcttttattccctctttccatattgaactacttggaaaggtgtcaccatgtgccattca

SEQ ID NO: 898923 - DNA, 654 bp, Homo sapiens
gtttttgtaaactctagctggagagtttttcatcatatgaaaaaagtaatgttttggggagaagcaaataaaataattattttcrttaatacaatattaaaatatccagaaattctttagaaaaggcaatctgaagaaatttttacttttgaccagaacctacagattttaaagtgtttttctttgttgctatttacatttcagaatgcttgatccagaacattaagtttcttcagctttgtacttaacagaataaaatcatagaaatgaaaggctgtttatggtcagaaatagattaccagtgttttaaaaagttccccaagcaattcttacataagtttatattttacatttgcttctgtaaaactaagaagtattttctatcttcttttgcttcaaacattttttttattctcgagaacatctaagttctaggcatttgtagttctttctacattctgtttagtgcattaattttgtatttatctctgtgaataacaagatagtttcacagaatgcacagctttttaaatggaattatttctaccatcatgttatctttctctagatgaagataattttcttacacgtgtagctttaaagaaatgtctgcagcattattttctgatctaagttttataaagcgtagctttt

SEQ ID NO: 898924 - DNA, 562 bp, Homo sapiens
ggctttgtgttgtggctggaaaagcctcaaactcagattcagagtctctggcatctgtgaaaatgtttggtcgaccgcatgatgcttaggtattgatattgttgttgtaattgccccaatgctctttcctttctgctatattgcctctgtatagacttactattttaaggctgaattgctgaattaacttgttgttttggcatcaggggacagagacttgctattatattaacatttttcaaaagaacaaggtctttccttgtcctctgcttgttatttcataattgtggattgtcaattctctattttcttcattacggacgtcctttaactactgctgacactgtggtaagactcagagggcaataagaaacctcatagagtcagctggagagcatttactttaacaccagcaaaagcaatcagggcttggagatagaaagaaaataacttcttccttctgttaagtgctaygtgagtgtctgagaaagacaggacagggataggggaagagtctaaggaagaggaaagcagagggaaggagaagagactaaagagggac

SEQ ID NO: 898925 - DNA, 594 bp, Homo sapiens
tacttgagccagctgtaatagagaggagcatcctgtgattacagaagaaaatgtgacatggggattctggatacagtgggtttgcttgagtgacaccgatatattgggaagcatctgtcttcccctttcacctagacacttgtttgtttactttggctttctacaggctactcagttccctctaactcctgtgtccaaaggctcaatgtgtatttggtttcaaacactccttataaatgtattattgctaacatttataacaatgggggagaatcgtgtcccaactttctcttaaattgttgcatttaaatggttttctcatcaataaagcacagtgtgttttaacaaaggaaaatatctaatcaatcttgttctcccaaagtagcacatacagaaggtatgattagctacagttctattctttttcattatgttcatcacacatatagaaagctactatgttaacatgtgccaggcagagcacaaactcacaagcagtttttccagactcattgttctttgtgatatattattattaacawataatacctcatagcgcctcctacatagcaggcatggtcctgagcactttac

SEQ ID NO: 898926 - DNA, 619 bp, Homo sapiens
aatagttgaatatagttatccaggaaaacaaaggattcattataacgatttagtaccaaggaaagccatgaggctccctacggaaagtgggctttctgttactttaaacgtgtactttagcttactagtaaattgtagccagttgtagaactcatacattggaatgactagacatgtgaatagtaaaattagggataggggccttactggtaatgtaacggtaaccttaagcaaaaagcaagcaaggaaataaaatatctagaaaaataaagaacaaaataatgcattataaagcatgataatccatagtcttttcccgtggatcctcagtagaagctggctatatcttatctaatcttttgtcatctttagtccaaagattttaatggaagttatctcttctgaaaattgactgtttctggagggatctcaagaattctcagctggagatctgtggtaagggccatcttccagtgatccaggcaaggtttttgagagtcatacatacagggactaacttcatggagttatacgactctcctagtagtgaacagtatccaattgggttatttctaaaagtttttaggtcatwcaaggattgcttggaagaatgttgaga

SEQ ID NO: 898927 - DNA, 646 bp, Homo sapiens
gccaagttccatataaattacagcacaggctaacagtaatattcagtaatagtagtcacctaaacattgttaagaatttctaatcctaggaaacaacatgtcattgctatgccaggttttcttatgtaaacatgttcatcctctgcatgaaattgctcttccttctgcctgaaatgccttcccctcattctgcccatgaaaagcttctatttttcctcccatttcatctcatgactttcctctaaaatgtgctcctcaggcctttcctttttctattttccaactgaacattctaacaaactccattaaagtacttttactgctgtattccaatatttgatggcatgtttgttctagactgtgaacaacttgaaggtagagatcatgtttttgattttcatcattctagtacccactggagtggcacataaggagagctcaattctatttgttgaatttacttttgttaattaatttttatttttatttgaagttccagggtacatgggcaggatgtgcaagtttgttacayaggtaaacgtgtgtcatggtggtttttggtacctatcaacacatcacctaggtattgagccagcatacattgactatttttcccaatgctctccctcccctgactccactccct

SEQ ID NO: 898928 - DNA, 421 bp, Homo sapiens
tggcagaatgaagaatgtaattaatagcctggaatgacagtattgctgagtgctaagaaagctatggtcttcagactggcgaaagtggcaaaaccgaatctctacaaaaaatataaaaattagtcgagtgtggtggcacacaactgtggtcccagctacacaggaagctgaggcaggataatcgcttgaacctgggaagcagaggttgcagtgagccactgcactccagcctaggcgacgaagcaagattgtgtctcaaaacaaaacaacatgacaaaacaaacaaacaaaaacacctatgatcttgttttggttctaaaagtttcaaactttacctttcccaggakgccttagttttctcattggtaaatgaggtaactgggtgttctgttcgttatgtaactcacagttttaaattatt

SEQ ID NO: 898929 - DNA, 630 bp, Homo sapiens
caaaatatatgacattaataatttattattaatattctattacatagctaaatataacaaagctaaaatattgtcttctctcaagcatgtcttgatttgtacattcattctggaacagatactcagactcaaagctcactggagagcagaatgagtattccaaaaatggccatcatatgtctgaacccatattctcttctagaacattgcccctactccgtcaagaagttgagtgtatgtacttctctctgaacgtggctaggtccttatgactttttgactttttcaactgatatggtatggcagaagcaaagctgtgtgacatctaaggctaggcattaaaaggggatagtgcatccacctggtgctagtgctctctcactctctctcttttctccctctctctgtctctttctctccttctcttaaaatgatcacccctggaaatgagccaagtaacccaggctacttggaccagcagcccatgttgaaagaaactgaagttcccactctgyagtcatggctatgctttacagctgacagagcaccaccttgcctgctgtgtgagtgagccatcttagaagcagatcctccagtgttcagatgactcacatcatctggtgttgtata

SEQ ID NO: 898930 - DNA, 584 bp, Homo sapiens
aagggtatgaacagacacttctcaaaagaagacatttatgcagccaacaggcacatgaaaaaatgctcatcatcactggccatcagagaaatgcaaatcaaaaccacaatgagataccatctcacaccagttggaatggtgatcattaaaaagtcaggaaagaacacgtgctggagaggatatggagaaacaggatgcttttgcactgctggtgggactgtaaactagttcaaatattgtggaagacagtgtggcaactcctcaaggatctagaactagaaataacatttgacccagccatcccattactaggcatatacccaaaggattataaatcatgctgctataaagacacaagcacacgtacgtttattgcagcactattcacaatagcacagacttggaatcaacccaaatgtccatcagtgatagactggattaagaaaatgtggcacatatacacaacagaatactatgcagccataaaaaagggtaagttcacgtcctttgtagggacrtggatgaagctagaaaccatcatcctgagcaaactattgcaaggatagaaaaccaaacaccacata

SEQ ID NO: 898931 - DNA, 624 bp, Homo sapiens
attttcagatgaataaattactaaaaatacatattgatgaaagattcacatgctctgttataatatcattataattaatctaaaaaggcattctctatttaatgyaatgaagtggaacatcttatagggtatttatgctcatttaaaaagatattttatatttatagtgagagtttaaatttacgtgtatattttgcatcataaaaatgtgatcattgctactattcttctattactaaagttctaaatattttatatttctcctttagctatcaccactggtaatagtaaatatgaagtttctaatcttaattttgctttaaaaacagaaaagaaaaatttagaaaaattatctaaaatatttatacattcagttcaacaagatttgttaaatattagctatgtggcaaacactatgctaataagtagtatagtattatatgtatattagtttggagcataaaataattcaactgtgatttgacttatctcaataacacatgatgtgtttgtaaagtgtttaagcactgttgggtgtttgtcattcactacatagtttattcctcacaaaaatctcatggagaagacactattattacacccattttagaaatgaggcacatt

SEQ ID NO: 898932 - DNA, 618 bp, Homo sapiens
tggagatggtaaatggttactaacaaatagaaagaatgaataagaacaaatatttctagcacaacagggtgactatagtaaaaaataattgaattgtacrttataacaacagcaaaagggtataattgaattgtttgtaacacaaaatataaattctcgaggtgatgaataccccatttaccctggtgtgattattatgcattccatgcctatatcaaaatatctcaagtaatccataaatatatatgcctatgatgtacccacaaaaattaaaaatgaaattaaaaaaataaaaataatattttctctccaagtctacataagatttgtctacaatatcattattcatctccccagaaagatgagaatttaggtatacttaaacttttcaccaagcctttccattttccttatcatttgttttaaaatattagttctaactttccttagcataacataatcagatgttaattaaatattccaacaaataatatatttatctttttttgcatttcattcttggcttctaggacctcttttcttctgacttaagtttttccttttatatctctttgagcaaacctctataattcctgaactcttcttaacatttgagca

SEQ ID NO: 898933 - DNA, 685 bp, Homo sapiens
gaaacgattctgtgatttgaaagaaacaataaaacaacttttggagatgacatgtttacatggtagatgatccctttgtaaaaaaaaaaaaaagatagtattgagaatgcataagtttgtatattgatggttcagcagcaatgataggaaggtgtaaaagctttacacaataagttcaatttgaaaactctaaaattgaagtaatacatttttctattcacagacactcttttatatgtaaaggtttgcctggagttctggaatccataataaaaatgttgtcaaaatgatacatctattaaaattcaagcctctacactccaattctatttttagttttatttaaagcaatgggagcagaacacaacattccactgttttatactgaagtatgctgattgtaaaaagaaatttatcaagagtttgtaaattaaaagtattatgtaaggaagtcactatatgcagtccatgcttaagaattagggggttatggttgacctccataaaggcagagtatatacataaattatttaaatttatctacatggactattctctttaattattcaatcattttcttattagtatggattcaggttacttmctttacactttgagtaagtatccataatactttatgggtagctcaaatgggtccatcttggctatggagagctcttttact

SEQ ID NO: 898934 - DNA, 608 bp, Homo sapiens
tgctgattacaattgggtttcctgcaactgtggctgcagaagaactgaagcctccattacaaaggcagaaaactgggggaatgcacatgaattcaaggtagaagggaaaagcaagtggagtgtgtagacttggatgaaaaggattcacaattttccatatagttaaacacaactttgcatatcagtcagtaaagggagtcaaatatatggtttggaaaactctggattattgcgaagcaagctttattatccagaatcagctcaagaaggtagtacctactgtagaagacaaggtttccttctgataaaatgatattttctgtaccaacccttgtctcttgcagagttgacaaatagcaaataagagtagagtaatacaaattataataagaaatttacatatcattgtttttctaggtaaaaaggcaaaaagctcacaccttaaacggcagccatatttttgactgaaaatgytgtcttagcgatgtcatatacatcgcaatgataatcatcagcatccaactttgaaacatccacttggcatcctattagtggcagtatgaatgatcagggcacggttccctatggcagtattaatgatgcagtgg

SEQ ID NO: 898935 - DNA, 474 bp, Homo sapiens
acattttacatgtgcttgaaaaaatatttattttctaatagtactatgtgtgcattgactcacagttattaattatgctatttaatcctatctgggttgcccagtaggtaaccaatagccacacgcagctatttaaaatttagtttttcagtctcactagctatatgtgctaatggctaccatattgtacagaaaatattttgatcacctcagaaagttcttttggatactgctgctctgtacacttaatgatttttaaaggcttctgacctataattactgagacatcaatattaaaagcttcttctataatactatatctttcaatcttcccaagtttagcattaggtattttcagtaatttggaaatttttatgctattgtaatgctctgaattgtaatttttttttctctttcatttgcrttcgtatcaataggctcacaatagctttttggaatttgtaatctcctggc

SEQ ID NO: 898936 - DNA, 587 bp, Homo sapiens
aaaaaaaaattgttgagcatggtggtgcacatccgtggtcctagctactcargaagctgaggcgagaggatcacttagcctcagcactatttgctgcctcaggaaatctttctccctcaagtgcaattcaagaagctagttttctgagtccttagtatgagactggcaatgggcctgcttttctataaacttctgcaataaatcaaatgataagtaaatggaacttcactggcaatatctgctctctacataccactttacgaattgctgatgacatgacaaaaccacctacaaccccatcaaggccacaggggcacctggcctaagaggaccagaggcagatctcctgtgacttcaattactctcaagcaggacctataatgtagtagatgcacttcacctactgctagaaagaagctgaggggaagagagggacagagaaggagttcccagaatgcttgattgtgaaaattgtaaggttagaatcgagtgtcatgacctgctggtgaaaaacaaccatggcaaattccttcaaacatttcctgaatgaaactaggaaagcggggtccaagctcagtggtatttca

SEQ ID NO: 898937 - DNA, 587 bp, Homo sapiens
aaaaaaaaattgttgagcatggtggtgcacatccgtggtcctagctactcaggaagctgaggcgagaggatcacttagcctcagcactatttgctgcctcargaaatctttctccctcaagtgcaattcaagaagctagttttctgagtccttagtatgagactggcaatgggcctgcttttctataaacttctgcaataaatcaaatgataagtaaatggaacttcactggcaatatctgctctctacataccactttacgaattgctgatgacatgacaaaaccacctacaaccccatcaaggccacaggggcacctggcctaagaggaccagaggcagatctcctgtgacttcaattactctcaagcaggacctataatgtagtagatgcacttcacctactgctagaaagaagctgaggggaagagagggacagagaaggagttcccagaatgcttgattgtgaaaattgtaaggttagaatcgagtgtcatgacctgctggtgaaaaacaaccatggcaaattccttcaaacatttcctgaatgaaactaggaaagcggggtccaagctcagtggtatttca

SEQ ID NO: 898938 - DNA, 618 bp, Homo sapiens
ctatctggttgacgggctagggctttttgggaaagaatatgttctaagattagaaaaatctatgtgtgccctgattggccctgaagaggctaaggaagtctaacataaggtggggactattacttaaayatgtcatcggccatgtcccatgagctcacatcttgtctttgactgagagagagaaagcgagctacaatgcgagtaaactcaagatgcctgtttcactaaactctgaataatattgtggccagagcaacgagctttgctgtcctctcccagatactaacatgaaggggagcatgatattcaatcgcacttttccctggaccctctggcttcacatgttgagggttttaggacattggtggcagtgccccctgggacgcactgcctgcaggtgccatactcaggaatagagagcgaagcccagtggaaaatggcagtggtaactagtggctgtgctgagtcctgtgtcagattgtggatctggcccaaacagaggatgtattaatagcagtgatggtttcagttgcaagtaacaggactataaacaaaataatttatagccttagtatatagaactgtccagcaatgagtgagcttaaggcagtttgatct

SEQ ID NO: 898939 - DNA, 638 bp, Homo sapiens
ccttgtagttatttttctgttcagcttcttgtttatcccggctgttttcccacctcaagcagttgcaatgttaaacagttaccactaattgtttccaacaaataccwtggagaaaaagctgtttttagagtatgaactctcagtataaaaataataataataataataataataataaggaaaagccatgcaagttggggtttccagggaacttccaaataagtcagataatgacaattctgtggctataggacttttgaggaagtccaaacccaaaatttgtctgcccctcccaatggctatgaagctgctggttttgatgcctacattgattgtgaggacttttgttttcaaaggttctatagatctagagagagaaaacaatagaaaaatggacagttgaagtgccgcagtttcctgttattaccacaatcttaccacaatacttttattgaataaatacttcttgagtttggttaattttcagagtactgaaaatatttatttcacttttttttggtcagtgttttcattgcttgtataaaggattaaattattggacatcattactctgttattcctgctgatcttaccctttgaaatcaatctgaatccgaaaacaaagggaaaattaagat

SEQ ID NO: 898940 - DNA, 638 bp, Homo sapiens
ccttgtagttatttttctgttcagcttcttgtttatcccggctgttttcccacctcaagcagttgcaatgttaaacagttaccactaattgtttccaacaaataccatggagaaaaagctgtttttagagtatgaactctcagtataaaaataataataataataataataataataaggaaaagccatgcaagttggggtttccagggaacttccaaataagtcagataatgacaattctgtggctataggacttttgaggaagtccaaacccaaaatttgtctgcccctcccaatggctatgaagctgctggttttgatgcctacattgattgtgaggacttttgttttcaaaggttctatagatctagagagagaaaacaatagaaaaatggacagttgaagtgccgcagtttcctgttattaccacaatcttaccacaatacttttattgaataaatacttcttgagtttggttaattttcagagtactgaaaatatttatttcrcttttttttggtcagtgttttcattgcttgtataaaggattaaattattggacatcattactctgttattcctgctgatcttaccctttgaaatcaatctgaatccgaaaacaaagggaaaattaagat

SEQ ID NO: 898941 - DNA, 562 bp, Homo sapiens
accctgggttctgacactccctggatggatggccttgagcaagtcacttgatgtttctggaactcaatttccttatcctyaaaatgacagagttgtactttggtgacctctaaggacctttccacctctgaaattttccttatgtcactctggaaacttcagtaaccttcctcaccacattttctataacttgcctttagaaccttgtctggttagcacatcacatgttagttcatcagaggagttgaggaatcagccctatggtttggatgcctagcatgtgctgtggggcattctgtgctccaaaacaaaaaattgatactgagctgaattgaggaaattgccctgcaagcctctgtctttcttctttccatacaatgagccttgaatgttgattacattcagatcacagtaaaatttttcatccatttacagaaatgtatgcttgtatgccctccattctagaactctgtattttttttccactagaactcatttaccttttcccaacagatactatatttagtcagtttgtgaaaactaatttttggtgtcactgcac

SEQ ID NO: 898942 - DNA, 684 bp, Homo sapiens
ttcactttttttctcataaaacaggatgtctgtattaagtggctgctgatattcattaaactgttcaatgatgtaagggttagtatctgtgcagtttgctttttttcttttttcatttttgtttttyctcatagttataagagagctgctgaagttctcagcgttgtattaggattcagagcagggagtaatggaggaagggaaatagtaatgccaggtcctctgtactttttataaacatataaatccctttcagaagttatacctcccaccaacagacttccattcatgttttaccagtcaaattgtgtcatgtagccagagatctccataagcaaaggaatttgagtgagtatttaagttttcttagcctctatagaagtgataaagaagtcatctgaaaacaggagttaggttggtgaattggcagggtcttacatgggagatatttagacatctaataaacaagagaagattagcttagactcaggagaatttcatacatgcaagagtgccctatggggaataaggaaactccagttctggctgcattattccctggtttgtgatcttgagtaagttacttgatcgtgctggcttctgtgatcttacttgtctacagtcacaagattaagtttacagactttaaggcccctcctcaacataacattttatgattctaag

SEQ ID NO: 898943 - DNA, 628 bp, Homo sapiens
agtgagtatttaagttttcttagcctctatagaagtgataaagaagtcatctgaaaacaggagttaggttggtgaattggcagggtcttacatgggagatatttagacatctaataaacaagagaagattagcttagactcaggagaatttcatacatgcaagagtgccctatggggaataaggaaactccagttctggctgcattattccctggtttgtgatcttgagtaagttacttgatcgtgctggcttctgtgatcttacttgtctacagtcacaagattaagtttacagactttaaggcccctcctcaacataacattttatgattctaagacctaattatacacatttatatagaagtgtggtccatgtgagaacaaaatgcagtgctctttccactggacctctgcatttcttcatggacgtagctgaagggttctatgaactgtttggggaagtaaggggaaggtggacaggaagcacagagatattagaagaataatagaagagagcagtagggttgaaaactggtaaattcttcctctgagacacagaaaacagaaaaaaaaaaagactatcataagtggatgaggttttraagacgggtatcaaatacattctgct

SEQ ID NO: 898944 - DNA, 644 bp, Homo sapiens
gagttggcggagagtcagcaatgcatttctggaaattgatctgaataaagcaggtgaacattgtcatttgaaccccagagcatagacactttcctagctgtagctgcctgagtgttgagttttgcaatcaawttgtactcaaaagaaaaatgctgtcataatatgaagtgaaatgatatgtctttgcactgctcaaaatacttaggtaaaattatgggtgtctttatttttttatgctgaagagtgggtatgtatattggataaactactcagcaagagttgggtaccagaagacaacccagtaaaaagcatccaagtcaacagtcagctccataaggagtgattctcttctccttcagtaattaagcattcaaacccagtaaacagcttggtgggaatgattttatgacaaatgaccgagagcacatcaaccataaaactcagctcggcaaaaatccctcaagcccaggaaactcaatcaatgtagagcaggcaacagcctcagctgtggcagcattctctcactacgaatcacataaatccaaggaggccagagctgctgctccgctaactctgacacaagacacaagacaggaggagggcacgaggcttctcacggggagacagaaaaggaaggcaggcga

SEQ ID NO: 898945 - DNA, 592 bp, Homo sapiens
aagtgtttggagattttcattttatatttctgtcatttatttctagtttgattccactgygattggagaaataacttcaattctcttaaatttattgattaaaaaaaatagttcagcccagaatagctcttttcttgaaaacatttccttatgtacttgaaaacaatatgtatcctgctattttaggatagagggttctacagtcattaattaaggcaaattaattaatactactattcaaatctatatatttaataattttctagctatttattctgtcagttattgagagactagcactgaaatatttggctatttctccttccagttccaacagttttgtttcatgtattttaaagttgaggtgcataaatatttaatgtcttcttgattaagtcaccttttccattgtgaaattaccttctttatccctgatgtatttttctctagaatctatttgtgtgatatcagtatagttacttcagtattctttagattagtgatcacattctgtatctttattactttttaaaggaaagaaatacactttatttaaacatgcgaacacaccacttgctttatatattgaaaa

SEQ ID NO: 898946 - DNA, 473 bp, Homo sapiens
gggaaagagaccagaaactatgcagaagaatcagatgcaaagggaagactgaaagagaaatgaaggaaaggttaaaagagggatagatctcaagccatagcttaagtcattccaatacagttcccagaatttacctagatcctttaaaaaaaatcttcccttttgattcaaatttggttttagtaggctcagctaatttcatacattactcctagatgtcagattttaactggctgtgcaagaaaacataggaagacccagatactttgtttgtttggattcccctagaggcagacaatgagccaaggattttagaaaacgttgttcattttggaaggtaggaaacagcagtggggaagggagaaatggagaaattagcacagggaagaaaaaagcatcctktaataaaggatggactaagaagccagatatacaatgagcctagtcatgtgggaaaactttcaaaacgtgtg

SEQ ID NO: 898947 - DNA, 613 bp, Homo sapiens
agatggatggaaggatagaatgaatgaatggttggatggaaggaagaaatggcatggaagaagaaatctaggtagamccatttcatggagaactataaagaaatcctttctgatctagtttcaatacctaaacatagactaactcttacccccataatcctccactctacccaagcatatgtctgactaaatagggagaaggacaatgactcatcccttctttccactcttaatgtgtggaacctaagcatgtgagcaaattcttcatacaaacaggaagagtaactatacattattacagctagtccatgattatctatcacccaattcagcatctcaaacaaacattactatagaaaatccaaactttcaggccgtgaaggcctttttgtggacagcattgtaaaattgcatcccagaatgtatgatttggtctcaaggaattttcaagagggtgagacctcaaacaatctagtccaacactttcgtttcaaggattgggaaactaaagccagagagatcaagccctttcttaaaattcacctaactaatccatggctgaactggggttttatcccaggtctgtttgctgctttgcccagtaagtttggat

SEQ ID NO: 898948 - DNA, 593 bp, Homo sapiens
ggatgaatgaatgaatgaatgaatgaatgaatgaagaaatgtctatataaatgaatgaattatttggacaattgttggagatcttttctatttgtttttcttctcttgtgaataaagaggtaacgggatgggagagggtaaaggggagcagctgggggacacagaaccaccttgtaccaaaagaagcctgagttttaagaccaacactttttgcacaactaccatgacttaggcaaagcagaacaaaacatctctctcctacacactcctcaagttgaattttaatgatttttttctactatttgccccttatattcatttcagtttggtttcagctgcataagttgttgagggctgtatctgtctcctttccctggtcctgtatccccaaggacaaccctgagccccactcttacctaaaccctacaccaacaacatcacaagcaagcctgcagtcattagaattgtgaggggacwatattaatccacctccactgataggatttgagaagggcttccatttaatcccactcctcacccctgagggtgccaagccaattgagaaatgcacacagaagccacatatgtaccaa

SEQ ID NO: 898949 - DNA, 615 bp, Homo sapiens
ttattttattctatggactatatatttaatgtttgaattgtcctagatttggccagagcgagttccctcaagctagtctctacatataagagaaattcwaatctcaaaatattattcctctgtcaccaatcagacttccgggattcactttcctggtgtcaaatattcttttttcagaaaatgcatcatgagtttatattaataattttaaacataattagtaaagtaaatcttctgaaaaaaatctaaattattttggagcaatattctattttgagatcaactttattaatatgggtatcaagagataaatttagattaaaaatattaccatttaatgtacatgattaatagatatggttatccaaagtaactttgataatcaatccagattttatagaagacaaagttttcatccgtctcattcaagttcacttttatacctaaagttgcaaagagtattcaagttgaaaaaaggatatgatatcaagaaatctgactgatatacactcatccagaaataaagaggttatggaaggctctttctacagctatttctcaacttacatacaaataaccactgtcaattgttcacttaaaattccaaactccaac

SEQ ID NO: 898950 - DNA, 551 bp, Homo sapiens
ctacctctctggctgctcttctcaatctcctttgctggattctactctttttctaccatctaggctctttaggactctgtccttggacctctcctctttccacactcatattatttgatgattctttctaatcttatagcttttaattccatctgtgcactcttgattcacaaacttatacctccaggccagatctccctttggaactccagtcatatttccaactgcctaattgacacccttctgggaaatctaagagattgctcagagtttgcacgcctcaaatgagactctgggacttctgcaaagtctattctatcgtatttaatggcaactctgtccttccagttgctaggacccaaatatcttagtcatccttgactattcttttttttttttcgtatggcatgcatcagatccaccaagaaatcctgtaggttctcccatccaaatatattttgaatcaaaccacttctctttcatcattattaatctgtstcataccatcatcatttctcatctgaattattccagtagtgtgtcctcttaat

SEQ ID NO: 898951 - DNA, 630 bp, Homo sapiens
aggtgggtggcaaagtgttgtgcaatgtgctttgctaggttgagaatcgtgtccctgacttcttgccgatgtagagctgacagaaagctttctggggattcagtgrtttgatcttggttaccagttgagtgactgtaagcaagcctctcttatgtcttatttctcttatttgtaaagtaaaaggtttggacatcattttctctaaggtccattttgaagccagaacccactctgagaaattaaggctgctcagtcagggcagttgcatcttagcaagtgtgttggcctcttaagactgccttaacagtgtaccaaaacccaaatggcttaaaacaacagataattcattttcttatagttctagaggctggaagtctgaaatcgaggtgcaaagagggccaaggtctctctgatagctctagggagaatccttcctggcttcttctgcctcttggtgtttgccagcaatcctggcatcccctggcctgcaaatgcctcactccagtcctattatcatcttctccctgtgtgtcttcacacggtcttccctctgtgcatgtctgtctctgtgtcaaaatttccactttctataaaaacacagtcacattggataggacctgccataatgac

SEQ ID NO: 898952 - DNA, 610 bp, Homo sapiens
ggacactgtgtccttttcatttctattcccaggacatgggctaatgcttgaaacacaggagaccctcaagaagtatctgcaaaatgaacactagtgagaaaggacggcttttgttagmcttcatcctataaatcttgaagactttaacctagaagcattggaggtcaggtggtttactccaggagttttattgctggcttgatctgtgatgtctcatatttatgtgctgttgggcaagggagatatagagagggataagctcttggctattcttgtttgccctggtaaatcacaggtctgcccattcaactgcataaatatttctgaaatgcattcactatttttagttcagactacaacatcgcatgtctggattcctaagcaacctccccataactgacttccttggcttaagtctattcttttccaattcatttcccatacataatgtaaccacagtaatcttttccagatgctaaagttccttatttggttccaaaacttttagacaaaagttcaaactctttaatgcagcgtataatgatacagtttataatctgagtcttgcttgcttttccagccttgtggctcactatgctgtcctggacta

SEQ ID NO: 898953 - DNA, 608 bp, Homo sapiens
tggccatcccaaagagcagtgcaattatgaaggtgtaaatacgaccaaagaccactctcagatacatcactgattgttggctttgtttgaccgaacgtgttatttttggaggtggcccgctgtcgacactcccaccagcacctcttcttaggcacagtggaggatcccagcctatatggcaatggcagttccttctgttgttgcacacccctctatgactgcacttctcagggcgacagtcgtagcccagtgaagtgatagtcgcattgcacctggtgttattacagaagtttccatgaacacaaggagtgccatctatcacacacccaacatcagttgtgtctgttgcacggtggtcatccagtccaaaacactgaaatcctcctgtcactgagtgatggaatgaaacatgttcctgcagccggggaagatgggtcacactggtacactgcagtcttccacaaaacttatctattcctgcacaagcctggttgttgagagctgtttgtcgtcragtacaatgtccaaatcggtaactttcaagatttatgtcatagcagacctcaggagcctcctcagcactgacaccaaagattaccttgcagagc

SEQ ID NO: 898954 - DNA, 640 bp, Homo sapiens
gtgttctttttaggtttgggtattcaggtcatgctggcttcataaaacgaattgtgggaaattttcatcttatgctatggtctgaaatagtttgaataacaaaggatctatctggtttttgaagactagctagtacccggttataagaccatgaggacttttaaaaaagggaatctctttaataaaatttctaatgtattttatgattattggtctattcaggtgttccacctctttggggacattttattttgccaggaacttctccatttcctctagattttcaaatgtattgccatagattttcacatacaacgctttgataaactcttttgcgcctttcccaaatggtgattaaatcttctttctcactctaataaacttttcaaacttcctccattgtaacaatattagctaatgcttattgatcactgatcatgtgcagagcacacggtcctaactgctttacttgtactaaactcagttcatcctcatgacaattccacgaagtagatactcttataatcctcatgctacagttgggtatgtagagaagttaaacaatttgccattaggtcacatagtagcatgcagctctagcatgctgcctactaacgtscccgtgtgtgtgtgtgtgtgt

SEQ ID NO: 898955 - DNA, 580 bp, Homo sapiens
tggcacaaggatttgaactcatgttcccctggttctaaagcccatctgcatggtaccactagcttctcaagcagcgttgcacccraggggaactgggtagtatgcctttttagacacttaatagcctggagcatgttttgcatgctggaacaggatattttcctttcaaaagcctattaaagaagaccaaagacaaatttagttgaaaaacagtgtgttttttacagggggttgggagggacaagtttaaaagagcagaatgacagtctgttttgttttcttcattttaattgaattttgttttgtcagaagttcgtctcctcctgtatgcatacaccacttagacctgtgggcttgctacctctttccattttcatccaggcatagagaggagattgcttccagaaagagtgcacaggcccttgaagttttactcttcaaataattaaaggcttaattccagccccaggtcagccatacacaatgccagctttcccatacacctgggagaaaaagcttgccatcaaagtaaacaattccctctcatctcagttccaagagtcatttggagaacatacat

SEQ ID NO: 898956 - DNA, 600 bp, Homo sapiens
tcacttaattgctactcctttaactgtgtagttaccttgcacttggcatgtttactgggtgggacaaaaatcaagggtctgcttgaggacttttggagaggagacaaatccaaataccttctgacttgggagccacttacaagcttaggtccaatctgtatgattggagaaagtagcccaggactatcttttcatatagatgcagaggcgcagaacaaataaagccccattctttgataatttacctggggttcagaaagtttattctgagcttaattccataagatcttctccaaatatatgttgcagtcactggctccttcttggcatttgagctaacatggaacattttcctctctagccctcctagttctgtgatttagattgaccatgagggcaaggtaatagaggaggaaggtgaggaaaggaccagaaatatgatgtgtctgcagacagcaggagtatctagtcttgtaagctgttgcctccctgatgcagscctagattccctagaaaggacctgctcctgcccccaccagttgccatggcagcaggttccaagtaactccagcccaaagttttacacttaagaggcatgca

SEQ ID NO: 898957 - DNA, 606 bp, Homo sapiens
acttctgctgtaagtcaccttgagcttctaggaagtggctggggacaggatgtctggaaaagccaagaggggttattcaaagaattactttyctaatctgtgacccaagttctgattttttttgctggattatagagctgcctgggaaatggccaagttcagttcttagaagaaaaaaatctaagtgcatgtactgttttggaatgagttaagcaaaacacagaatgacagccatcatttggatcctctcatccaaagcaagaattagctccccttcaatatcagagactttaagaaaaaatggacagaaaagagttattgtgtaatgaatggcaagaaaagaaagtgctaggggtttgttccctcctggcctactctttctcacgtacatcccttccagcattaagcagaacaaaagaactgcgtgtgtacaaattacaggtgaaattgttggtagcctggggatgggctctccctctcggatgtagacctgaggcctgaaggctcccacttattagcactgatggacccacagcctccattccacccctgtggtttgcaaagtgagtttctcaccatgcggggcctgttgttgccctgctctag

SEQ ID NO: 898958 - DNA, 417 bp, Homo sapiens
tgcctgagggcctggcatctgcggtgcttacacatgagtgattttagtatccagagaatyacatcaggaactaattcaagccaatcctaaattatttatctgggacagatttcttattcactctcttgttcaagataaatagattgttgctctgatattttcataaaacatcttaataaatctcaaatgtttgcttctgtgcctttctgatatcctagccattattcatttttggtttggatttgaccttggtctaatagagctacaagacttccccaggtccttgctaccactaggtgtagtcacctgaaaaatagttttgtatcgttggtgaaaccatctggtggtggtatgaatatatatttagagataacagaaataaggactttgaatctttacctcagaatatcccaaagt

SEQ ID NO: 898959 - DNA, 589 bp, Homo sapiens
ttagatttcacttgtcaatttttgcttttgctgtgattgcttttggtgtctttatcatgaaatctttgcccatttcaatgtccaggatgttattgccaagtcatcttccagggtttttatagttttaggtttgacatttaagtcttgaatctatcttggttgatttttgtgtgtgatataaggaaggggtccagctccaatcttctgtatatggttagccagttatcctagcaccatttattgaatagggagtcttttccccattgcttatttttgtcagctttgtcaaaggtcagatggttgtagatgcgtggccttatttctgggctctctgttctgtttcattggtgtctgtgcctgtttttgtaccagtatcatgctgttttggttactgttgtcttctagtatagtttgaagtcaggtaatgtgatgcctccaacttcgttctttttggttaggawtgccttggctatttgggctcttttttgattgcatatgaattttaaaatagttttttctattaatagttctgtaaagaatgttgttggtggtttgataggaacatcactgaatctgtaaattgttttgg

SEQ ID NO: 898960 - DNA, 645 bp, Homo sapiens
gttttagtcagagaaaccgacagagaatttaaagcctgctccaccacttactatatatatgactatacaagtcgccycaacagtgagcacataatttcctcatctgtaaagtggaggtataactaccttacagacttttgcaaagaatcttcaagattagccacgtaaagttgtgccacttagatatgatttcactttcacttccttacttaggttgttggttcgataattgatattactgaataccagacaggctaagaaccacatcactgatttacactctcctccacatttaaccgaaaagtgaccaatcaaaaagtatcacaactcaggttgatgtgcattcagtctatcccatggtatctttgtctcttttcaaatcacaatactgatgttccaataaatgatgtttattatcaggccatgagccatcaagaaaatactaaactctgcttagaacactgtttaagaaggttggaaaatatatatcaactatagacagttttcttagaaggaaaatcaacatgttagcacataacaaattaacatacaatctgggtaactgaataatatataacggcatgcttccataatagatgaagaattatggaatctctgtttgcaatccaatgtgggtaagaagaa

SEQ ID NO: 898961 - DNA, 578 bp, Homo sapiens
tgtgccatgttggtgtgctgcagccattaactcgtcatttccattaggtatatctccaaatgctatccctccccgctccccccaccccatgacaggccctggtgtgtgatgttccctgccctgtgtccaagtgttctcattgttcaattcccacctatgagtgagaacatgtggtgtttggttttttgtccttgcaatagtttgctgagaatgatggtttccagcttcatccatgtccctacaaaggacatgaatgcatccttttttatggctgcatagtattccatggtgtatatgtgccacattttcttaatccagtctatggacatttggcttggttccaagtctttgctattgcgaatagtgctgcaataaacatacatgtgcatgtgtctttatagcagcatgatttataatccttttggtatatacccagtaatgggatggctggrtcaggcctttttcacctgtctcttggggctctaccccagaaccactatcaatcagtaatgattggcctggggtagtgcagctgccctgtggacccaagctggtggatcctgtcgtaatgagcaagt

SEQ ID NO: 898962 - DNA, 595 bp, Homo sapiens
ggcctcctaggagaacccaacatctaaagtaataattaayagaataatggaaactgtggataagtaataacatattagtttatatattaacttaaacaggagcagcagaatgaagcaccgtagaacatgccagctcttaatgttttacacgtaatcacatttttcctcttcttgacatcatttttttctctagaacatataccctatgtatcttcctccaaagtagaaataatcagaccacagtttctcactatgtgcacatgaatcatcagattccaggcaatgcctgagagtcctcatttctgagaaggtacctagaaatctggtctgtggatcacactttcagtagtaaagaccagacttcatatggaatgacactgctggttatttcagctgcatattttttttctaacttttctaatttgaggctctacttaacctggacagttgggacttgaataagtaccagtgactttaagtaaaatccataatatatcttggattcattctaaattctcagctctccacagattatgattaaaacaataaagatactcctaatagttttattgaatttttatccagaaatatgccg

SEQ ID NO: 898963 - DNA, 566 bp, Homo sapiens
cccggctgggcgcggtggctcatgcctgtaatcccagcactttggaaggccraggcaggcggatcacctgaggtcaggagttcgagaccagcctgactaacatggtgaaaacccgtctctacataaaatacaaaaaaaaaaaaaaaattagccaggtgtagtggtgggcgcctgtaatcccagctacttgggaggctgaggcaggagaatcgcttgaacccaggaggcggaggttgcagtgagccgagatcacgccattgcactccaacctgggcaacaaagcgagactctgtctcaaaaaaaaaaaaaaatgaggtgcccaaagaggaggtcaagtggaatcgtgtaaaatacttaaatacaagaaaagccataaaagggggatggggaggaagagatgtaaataacaaacacaagggatactaccaaaaaacctgacatacttaagtacaaatatgacaaaatatgtacagaatttacactttaaaacactgatgaaaaaaattaaaaatgttctaaataaatggaaaggtattctatattcattgattggaagattcaatatt

SEQ ID NO: 898964 - DNA, 640 bp, Homo sapiens
agaactctaaaagatatatcaaattgcaatctaactctctttaatatttaaaatttctcagtttttaaaatattgcttttttagtttctatttctggaattgttagaatattttgatatatactccatgactcatatttattcatttattttttgcatttttttctatcagtgatgtgttatagatgaaatcattagtaatacatttctgcttacttttcctagtttatgtccagtctagagtttttcctgcctctcaaattttttattttaataagtatattgttttatttccaagatccattttgttctctctcatacccacctttatttccaagattcattttgttctctctcatacccaccttttcttaacacatttttgccaatttccagatatatctatatatagatatagatatagatatatagatatatatatttgttgttgttattgttattgctgctgctgctgctactgagatggagtctcactctgtcacccagactctagagtacagtggtgctatctcagctcactgcaacatacacctcccgtrctcaagcaattctcctgcctcagcctcctgagtagctgagacctcagacacatgccaccatacccggctaatttttgtatt

SEQ ID NO: 898965 - DNA, 590 bp, Homo sapiens
caactataattttaattaagtctgaaactaaaatgttagaaattattcagccagaatttgaggtaacctaatatcagatttttactratattttaggaacataaattcaacctttgactcacccttaaatttatggagcatatttatataatatagagaaaggtaaaatgtatctctagtaactacaaagttctttccatagaaatctaaaaatcctgtatctactggttccgatcaaacaacaaattcctctggtactgtgacttcaggctccgaaagaaaacatcgttcaaggtcatggaggactaaaaggaaattcaacaaggaatatctctgaaagtagaaaaaggaaaaataaagaagccaaagtgggcttataaggacacaaatctcaaaaataaacctatggaaaatgcgtagagatgtaaatatccaggaataggtaaaaaaaagggtgagagcccctaaatatcttccaggaaagctcatctaaatcagtctcagtgttggaatcaagccgacctttgggtgactccagggttttcatttcctctaaggcttcggacccagaacttccagagtgacaaaga

SEQ ID NO: 898966 - DNA, 638 bp, Homo sapiens
taaaaaccaagtgttccccagtaatatgttgtattggtatagttattgtgtgagacaattggagttttaattgctaatatttgctgttggatttttttgtttgattgtcccccacccccacccccaccaacatacccactttaggagttacttatttcctcatgtatatatctaggttcactggttgaggacccagttcccatctttggatatagaggtcgatggtggagtaggtcctgacactgtccataaatgtgcagaggtgagattgctcttcaactatgactagaccaatttcccgtcaaatatgtctccaggacattgtctcatgggccagcgattccctctgtggttcctaagttgactttctttcttggaaaagtattttttgttcacatgtacaactaggaaaataaacagccataagtggatatgctttttttttttttttttttttttctttttctgagacagtctctctttgtggcccagattggagtgcagtggcgtgatctctgctcactgcaatctctgcctgccgggttcaagcgattctcctgcctyagcctcctgagtagctgggattacaggtacctgccaccatgcttggctaatttttttatttttagtagagacag

SEQ ID NO: 898967 - DNA, 652 bp, Homo sapiens
gaacagaccaataacaggctctgaaactgaggcaataattaatagcccaccaccccaaaatagtccaggaccagatggattcacagccgaattctaacagtggtacaaagaggagctggtaccattccttctgaaattattccaatcaatagagaaagagggaatcctccctaactcattttatgaggccaacatcatcctgataccaaagcctggcagagacacaacaaaaaaagagaattttagaccaatatccctgatgaacatcaatgcgaaaatcctcaagaaaatactggcaaaccgaatccagcagcacatcaaaaagcttatccaccatgatcaagtcagcttcgtccctgggatgcaaggctggttcaacatatgcaaatcaataaatgtagcaaggctggttcaacgtatgcaaattaatgaacataatccgtcacataaacagaaccaatgacaaaaaccacttgattatctcaatagatgcagaaaggcctttgacaaaattcaacagygcttcatgctaaaaactctcaataaactagatgttgatggaacatatctcaaaataataagagctatttatgacaaactcacagccaatatcatactgaatgggcaaaaactggaagcattccctttgaaa

SEQ ID NO: 898968 - DNA, 607 bp, Homo sapiens
attatataaaatacaaccacataaacaaatatgtaattttttaatacagacaaaaaaatgatggaacatctatataatgttaccaagacagctgctaggaatgagatagagctacttccattaacatgtaagaaaactatgacctatttttttaaggcaatttgcagagtggcagggaatataaatcattgttgcaaaaaacatctaaatagttcacatatgcaacgtagtaactataagccatgctacttctgcacagaggattaaggaaggacttgtagacacttgtctgattattttatgagtttgtgttcacttataatctttaaattaatcttatgtgaatatattcttattaaaaaatcaaataatatatgtattgcttttatgatttaaaatacatattactgtggtttagagaagaaattgtttcttaaaggacaattcctatttctttcttcagcctcaagagtcagaargcaagacaattagtatttttaaataaggaaatgtaaactagttttcagtaaaacataatttacaacaataatgattatgtaatcatgcctctattaatacagcaaccgtttaaaataatgcaaatgca

SEQ ID NO: 898969 - DNA, 610 bp, Homo sapiens
ggcttgcctcccgcaagtccacagcttcttctatgggagttaggaagtattttttggcatctaacccaattccctmtgcaagctgagctcatttgccatgtgtgggtctctgcagctgccacatctgcaggcatttccctccttcccttgccttttcactccctcccctcccatgctgagcacccagtgagcctggggagtccaggaaccttgtgatgagagcagaggccccgtctggtttttctcactgacgtctgcaccccctacacaccacatacacacacacacacacacactgctcaatcagtgtggggtgaatggagggaaatgcagtcctggtgagggcagaggagggcacttttcggccacagccgggggccaggagcttttggaaaatgcttggagtgagagaggagggagtgggtgaggtgggggttgaagccagaggggaagcagcctcagggatgagaggcctctgtgtggtgggggcggactctgaggaggcctctgccctctgcctggccctcccccagcctcctgcaggtgtccgagcagcaggggccctgcgggcaggggcatgacccttacagcaatggtggctggccctgtc

SEQ ID NO: 898970 - DNA, 397 bp, Homo sapiens
atgttatccaataccacttcatattagttccctacttcacaaactctaaaagaaggtcaggcaactcagtgtttcttatcaatctgctcttctatcctaactccartgtttgagggaatatacagtgtcttttccttcaaatgtatggcttgctttccccatttccaaagaaacctatcagcacccaggcatgctgcatcaaaaaaaaaaataaaataaactcccactcaggcatttacatgagtatacctatacttcagactttttaaattgttatggaaaacccctaaaccaaccaaataaacataatcccaagacttaaaaggatttaaaatgtaaattgttttaaattatttatataatttatcatcccaaatgggatactttagtgaaaaaa

SEQ ID NO: 898971 - DNA, 625 bp, Homo sapiens
cagatgtcatgctaggtgcagaaaaggtgacttttgaacatttcaagtggtctttgccctgggtatttcttcctyctttctgtcttttttgcattcacatcaattttctaagtgttccctgatttctttttgaatattaccacatctctattgcatgtagtccagggtgataataatcccaattttttttgtcccccagcctagggtgagcacatgcatatgacatcttggggacataaccccttccacaaatttaaattttgtttagaggagtggaagccttggagagtattgatcctctataccatgattgtttttattatttactatttttatttttagagatgaggtctcactacgttacccaggctggactcaaacttctgagcacaagcaattctcctgcctcccaaaatgctgggactacaggtgtgagccaccacatccagtctctccaagacattctagcagctgaatcttgcctgactagactcttccacatggaggctttcattgtagtttctgctttcttactcttgagtgaccatccccaagcccaattttgaagcctcctactaatcctcagacagtcagaagtccttccaaaaatgcactcttgcttttc

SEQ ID NO: 898972 - DNA, 707 bp, Homo sapiens
aactctgcaccttgcctctcacagctgaagcctcccatattcagccatttcctgctgagatagcttacagctgatgtgaagtgaaaaggcataccgctccctcctttctgtgtyatgcacaccttcttgccccaacaagttacagagacttgtgagcctgcttgttcagtgtaatcaaaccgaagcttggccagagccaactcatactgagtgaactgggacagtgtccagggaaagtttgctcttcctggaaccaccctcgggccttgtggctgatcccagtttctcgtctcttccttcttgatcctttcccacagtttgctagacatgctctcatatttctgaatcatatgtgactgagtgccttccttggaaaggttttgcatctcccaagtcaattcgaggtgcaactggatgtttacaggtggggcaggcaggggcaaggaaatgtacctaagtccatggccagtcatatctcaactcaggaggccccagcttcacctccaactacatatactacgggaatgtttttctcttgtaatttaaaagaggaagaaagaaaataaacatttgtttaaaagtaaatgaatgatctatgtcagggtgtgtggaagaaatttattaactcaagtttgcacctttgcatttgagggaccttggccaaatgtccaagggttacatggctgagtacagaactgtgtgattct

SEQ ID NO: 898973 - DNA, 490 bp, Homo sapiens
cccagcaggatctacgcaccccgcatcctccgtagttccgccctatccttgtcctccttggctggggcgcccaccggcggtctgataggctacatcgcggcatgagatgaagctgtgacaggtaagggggctttcaagcttctccatgggaaaccacagggcgggatgttcctgcaccgtggaggtcaggggtcaggggtcaaaggtcacaaacccgctctagccgggggcggtgctagctgtcagatcgctgcggctgcaagcctgcaggtcgggcccaaaagtaggcgccgttaccaagagcgtgggggccagccgggggtctttgtggctcccttgcctggtgagtgatatttgctacttgtgacagttgctttggtcttgaggtgggactgcctggytcccaggtgcaatctaaacgggatcaggtgattggtgatgatcgttggtggttattgacagcaattttgggcgatgtgcttgcttttgg

SEQ ID NO: 898974 - DNA, 644 bp, Homo sapiens
aaagtgttgcattaggaccctggagatctgtgtttgcttttgagctctgagatcagtttgatgtgtgatcttgagaragttgctaacagacctaaatatccacccaaataaaaaatcccctggatggtaaccagctatactctccattctggattgggaaaccaggctatttttttttttttttgtcaattacaaaagcgtttcttttttaaatgcttaaatataaaaaataaaagcaaaacagcaggagacagagcgttatttcataaacttttgaaatgacttggtttggcaaaagctcattgcttttttaccattcagaacagttttgttgaggtctctggtatcattttatgaaaatactttctgagttacaattttttagagaccagattcctctttagcgtcattgcactctctttccttcctctgcctcactatgcttccctcctacctctttccttaccacccagtttggaaagcaatagtcttcttgcctgtggccttacgtatttcgccaaaccccatgacttattgttcttcctctgtaatgtctcctatttttctttcagtactctaactttagctaagcttcttctcacttagcacccaggctttttgcagtagcatcatatttggtttat

SEQ ID NO: 898975 - DNA, 654 bp, Homo sapiens
accccttgctgcctgccaaggtttacctctgagaagtatcaagctgttcagcattggctagaacaagctcttctgaccctgtcgacccaacagtgaaaaagtgtcagtgtagggragcggaagatgttaagcatgtgcatgaggaaggaaatagtttctttccagcaggtgagaagcccagagagttttggtggcctgggcaagctcctatgcctcaggtgaaaaagagaagttcagtaaagctgccttgcctggttttaagttatattgtcttctaattccttcttccctcaccttcctcttgtcctaataccttcaactccaagtctcttgtcatttcctgacagactggcaggtatacctgacagactggtataattgttggaatcaggaatgtctgaccaatggggaaactgtggcagtaaggagtggagaaaacttagtgaagggcttgcagtccatgactaagaacacagacttcacgtgatcctgtaagaagacccgtcagggaagagatctaagggttggagtctgtattattcttctattgctgctgtcacaaattacctcaaacttagtggcttaaaacaagatacgtttattagctcacggttctgtaggtcagaagcaaaagcaggctttgatgagtccccc

SEQ ID NO: 898976 - DNA, 641 bp, Homo sapiens
catggttggcacggggttgtttgtaggataagtggggcttgatcatgtttgtagggagagggaacacagagccagtggggtagaaggatctgaagatagttaaaaaaaatgacttttggatcaaaaccccagaggagggaagaatagtttgtatcttgaaaaaaaccagggtacctctttctttgggctaggaggaaaaggtagagaaaagcttagatctaggggcaagaatttgtaattggaattcttgcaagtgtaaatctaggttgtctgtttaaaacaagggcattggtgaagaacaaggataaacgtggtaatgtctacagcacattgagcatctgcacctgtgtgccaggcattgtttagcgctctttgggaattgtcttttttattcctgaaaggcaaatgtaattggcatacccattttacagcccacaaagagaagttaattgcctgtggtcacgcagctagtaagtggttgagctgagatcagatcccaggaagtctgagttcagagcttgctstagctgctatacagtgtaataaagcagcaataatgatgacttgcattctcatagtactttttttcttaaaactttatccctattttacaggtgtggaaaccaaggcagaatttttac

SEQ ID NO: 898977 - DNA, 601 bp, Homo sapiens
ttttgggaatgaattagcaactcttaaatttctctccatttcctatttctagtaattagctcagtgtcacagctaaggttttcttactgacttcagcatggagacttagcagttayggaaaggagaggctagagctttccaccaactgcatgtcactggtgactccaagagagaatccaacaaatcaactactaataatccttactatttaaaccgtgttcactattatccaataacttggctctcagttatatcttcttaagaattctaataaggcatttagtttatacaaaggaggagtctgatctatgcagtggacatgagagacaaccaaagttttgttcctctttccaatggcatagagaaaaaaataaaatttaggcagaattagaattcagaatgcctgggagttcctccagccttgggaaattccaggtgagaggggaggactctggagctttttaaaaagaccctagagttcattttacccaacaattttatttcataaatgagaaaactgaggcctagagaagtatggcttaccaaggttacaaactaaattatggcagttttagctcatggcttatgttagctagactgc

SEQ ID NO: 898978 - DNA, 601 bp, Homo sapiens
ttttgggaatgaattagcaactcttaaatttctctccatttcctatttctagtaattagctcagtgtcacagctaaggttttcttactgacttcagcatggagacttagcagttacggaaaggagaggctagagctttccaccaactgcatgtcactggtgactccaagagagaatccaacaaatcaactactaataatccttactatttaaaccgtgttcactattatccaataacttggctctcagttatatcttcttaagaattctaataaggcatttagtttatacaaaggaggagtctgatctatgcagtggacatgagagacaaccaaagttttgttcctctttccaatggcatagagaaaaaaataaaatttaggcagaattagaattcagaatgcctgggagttcctccagccttgggaaattccaggtgagaggggaggactctggagctttttaaaaagaccctagagttcattttacccaacaattttatttcataaatgagaaaaytgaggcctagagaagtatggcttaccaaggttacaaactaaattatggcagttttagctcatggcttatgttagctagactgc

SEQ ID NO: 898979 - DNA, 588 bp, Homo sapiens
gagatcttctatgcagcccccccagggtctgttctactgcagaccctggatctcctataacagaactataacagaacactggatctccacagaaagccacaaaggcccagagatgtgttcgcacagatgtcatcatccctcttctagtccctgcaggagcctcatgggagatcacgtgaccagtatttcacagctctttcccccagcacagaaatatctgccgtgttgagaggcctgtccatctcctagtccctgctagagcctcatggacaatcacgtgaacagtatttcccagctccttctcccagcacaggaacaccctgccatgttgagaggctcactcaagagcctcatgatctgcctgctacctagcaatagctttgttacataggttgattctgccttgtgcctagaaaataaatcatgtttaggattaataatagtttatataattaatatatgtgccatgcttgagccaacacattccatcacttatcttcaggctggctgcctcctgggrgccactaggtctcgagctgcaggctgagcatgctgggtaacaatgctataagtctgcttactggaccc

SEQ ID NO: 898980 - DNA, 575 bp, Homo sapiens
atatcagaagctcgtgatttcctcaccattgaaagggagataarattgcccaacctccctggctcaaaaggttggataataagaagtgagagaagggaaatacaaagaagagtggagtcgttgcagaagggtttgtggagggggcgagagggtactaggatgctatgtggtttccatgtattacctcatttagctcataagtatatggagtaggtattcccattttgtagatgaggaaactgatgttctgagagattaactgaatcactctaggaaaaacgtgtcggaagtcagttgagcccaggtgtgcatggcatcaaagctcatgtttttcaccacaccaggtcctctgtgttttctcagatacagaactattcattaccatcacctgggaacagcttggaaatgctaattcttggctcagcctacacctatgcattcagaggctacggttaacaagattcccaggggattcctatacacattctaagttgagaagcataaaacttggggacaaaagcctcccctatttgaatctgacccctccatttgttggccagttgacactgaataag

SEQ ID NO: 898981 - DNA, 591 bp, Homo sapiens
attaaccaagagcaactttctgtaaattaaaaattgttagtgatcagttttgaagcgttgagagcctatcagggaccacatgcctggaatgagcatttaccatgtggtgcctttrgaagctaatattgattctcattattttaaatgattacaaacattgcaggtgttttgtaataatctccattgtctaattagaacatgcgtgaaatgagctcattgtgcctgctaacgaatattggttcgaacagcagagctctggtgcaggggcaagactggggctgtctggccaagttgccggccaatgttacccctttttctccctaaattatgaatcctggggatacaggacattttgacaggcagttattcatggggaggcctaacctgatttgggcctgctccagccttcagtgcctattcccatcaggatattagctgggaaatgtggaatgagtgtcagcaatttgggagccctttcttcctttccgagtccccatttatcttcttccacaatttctcccacatgttcattttaaagtagctctctatctaaatgctttaggataaatctggattgtgtgtcactcattt

SEQ ID NO: 898982 - DNA, 591 bp, Homo sapiens
attaaccaagagcaactttctgtaaattaaaaattgttagtgatcagttttgaagcgttgagagcctatcagggaccacatgcctggaatgagcatttaccatgtggtgcctttagaagctaatattgattctcattattttaaatgattacaaacattgcaggtgttttgtaataatctccattgtctaattagaacatgcgtgaaatgagctcattgtgcctgctaacgaatattggttcgaacagcagagctctggtgcaggggcaagactggggctgtctggccaagttgccggccaatgttacccctttttctccctaaattatgaatcctggggatacaggacattttgacaggcagttattcatggggaggcctaacctgatttgggcctgctccagccttcagtgcctattcccatcaggatattagctgggaaatgtggaatgagtgtcagcaatttkggagccctttcttcctttccgagtccccatttatcttcttccacaatttctcccacatgttcattttaaagtagctctctatctaaatgctttaggataaatctggattgtgtgtcactcattt

SEQ ID NO: 898983 - DNA, 591 bp, Homo sapiens
attaaccaagagcaactttctgtaaattaaaaattgttagtgatcagttttgaagcgttgagagcctatcagggaccacatgcctggaatgagcatttaccatgtggtgcctttagaagctaatattgattctcattattttaaatgattacaaacattgcaggtgttttgtaataatctccattgtctaattagaacatgcgtgaaatgagctcattgtgcctgctaacgaatattggttcgaacagcagagctctggtgcaggggcaagactggggctgtctggccaagttgccggccaatgttacccctttttctccctaaattatgaatcctggggatacaggacattttgacaggcagttattcatggggaggcctaacctgatttgggcctgctccagccttcagtgcctattcccatcaggatattagctgggaaatgtggaatgagtgtcagcaatttgggagcccttycttcctttccgagtccccatttatcttcttccacaatttctcccacatgttcattttaaagtagctctctatctaaatgctttaggataaatctggattgtgtgtcactcattt

SEQ ID NO: 898984 - DNA, 617 bp, Homo sapiens
atctgctttgctgcctcctgatctagaagatttagactaggaattcaagtagacagaaaacyggtgttacaaggtttagaccttacttcttggcacaccccactcattccaagtgggattttagctgttcgctccaactttttgcatctcgcctttaccttattagtaaggagaaagtcaagatagagcaaagactctctaatctgccattggccttcccattatttatattgccgtattgacaacaagtgtttcttccgagtctaacttctctctacgatcctaagcatttttgtagggggtaccaatatataatgttaaatacttccatgtacatctattgcttgaaagaaaatcatttcattgctggttaaatgagtattttagataatctttttaaaaatgttattatttttaagttccacgatacatgtgcaggatgtgcaggtttgttacataggtaaacatgtgccatggtggtttgctgcacctatcaacccatcactaggtattaagcccagcatgcattagctcttttccctaatgctctccccacctccatcccccgacaggccccagtgagtgttgttaccctccctgtgtccatgtgttctcat

SEQ ID NO: 898985 - DNA, 584 bp, Homo sapiens
gaaaaaatcagcccatgctcacagcctgctaggagcgcttatacctcccctcctccaaccttccactgcccggtacattattttggaaatttgagcagagttgtctttggaatgacggcgcctcatcaatacrgaatttgtgataatctggtccttgggtgggcttgagtttatccacataatggaggtggagtggggagacagaagtatgttaattaagactaaaggcccacaaactcttttcaagtaaagtagccttagctacagctgattcttttctcttagtaaaaacattgataagtttaccaagaccccttgcatgttccctgtctccacatgtgctagaaagtattacgttggtgcaaaagtaattgtaccaataatgcatctgcatttattaagtgtcctttaatgcccacttcactgtagcagtccagttagggactattagcaagggtttatagtattattatgaaagaatctggatactagcagtgagaggaagactttccgcttaaggaaatattgttcccgtaggggcacaaatatatgaacaagcgtctgcaaaaactccaggctagggt

SEQ ID NO: 898986 - DNA, 675 bp, Homo sapiens
gatgaacactatgcacagcagagagtttaaggaccttagtcatgtttcctaccaatcagcggttggcttcctattaaacctttctcgatgttctggacctctagagagccattctgtgctgctatgcaatctataatgactcttcaactaggtttctattcatttccaagtcttccctaccactgagatacttcaaggagatatgagtggatcatgaataaatatcctaaaactaaagacagttaagtcaattgcactctcaatattatcagactattttaactaatatgctatagacaaataattcttcagaatggtgtttgctttgtgtgtgtcataagagattcttgtctttagagaattagggaataatattaaaatgaataaatagtaaaggtgggaatatttttaatattattaaaataaataaatgattaaagtagggagcatgtttgaaggtccattttaaaaaatatatgtagacagaggaaacctaagagttaaaatactgagtgagttttgctctgcatcagtggaggctataaaatgcagtatttatctgtatatgagttctataccaatgtgatctatctctctaattagatartcaactatttttaaagagctgcaaataagccttacaagaatgtcataaatgcattccatttagaaaca

SEQ ID NO: 898987 - DNA, 623 bp, Homo sapiens
tacattttacttccattgaaggasagctaagtggaaactagtgtgagacaatcatgaatagaaaagtgcagaaggaatttgatgaggatgttcccagggctatttctagccagaaaacgaagctggaggctttgaagtaaatcaaaatatttgaagaagtaagaggataaatagcaaaactcacttccaacatcatactaaaagcaccatgcaaccatatagaaaacatgcataatttattttgactcaaataactatagggagattcttgttttttttaattaggagatttgaggtaactgtctagactacctatttttatgttgcattcagcaatatgtctgctaataattagagggaaataaattacataaaacaatgccagtcatgtcattgataaaaaggaaattaaagtgtgattgtgtttctctttctctctctccctcattttcagtgagctacatcctcttgttgtcctcctcacctgattaggcatttttgtaagggagtttgcctccgtcctctgttgtaaacattttccttacctcagcatcctttttaaattcaaaagacactttcctttgcaatgcactatgaaaggcgattgtgttagagaatatcag

SEQ ID NO: 898988 - DNA, 598 bp, Homo sapiens
agttctttgctgtgtccagtaattccatacctaggatgtctatttaaaaaaaggatgttttctggaactcctaagtagaaaggctgtcatatatattcatttattagggttgtcataacaaaatatcccagaccaggtggcttagacaatagaaatttatttcctcgaaattctggaggctagaagcctgaaatcaaggtgtcagcagaattagtgtcttctgagaactctccccttggcttgcagatgactatctgccagcgtctttatatggccttcctcccactgggtatgtctgcgtcctactgtcctctttttagagggacacaagtcatattggattagggctcatcctaatgcttcattttaacttcattacctctttaaggctttgtatcaaatacagtcacattctgaggggctggggagtaggacttcaacatatgaattttgaggggacataattctgtccataatgtaagaccaggtataaagaagcctattgcaagccacaaacacagaatytgactaagatgtatttattcaaattcccactatgtgttttactagctgtatgtctttcagcagctcacttaac

SEQ ID NO: 898989 - DNA, 605 bp, Homo sapiens
aaataaaaatagtaaaatccagttatatgttgtctcctggaaacmcatacttgacataaagacacaattactacggaagagatggaataaagctgtgcactactaaccctagtgataagactgctggaatggctatattaatatcagacaaagtagagcaaaaaaaatggaaaatatcaactgatgctcaagttgttctggttagcagtacaaactctggaaccagactttctgagttacaatactgtcacttctatttttttcttttaactataaaataaatgtccacattgctaacaagcatattaactagcttattatgcttgcttcctttgcttttggttgtggtgggtatttatttgtttattttttaagacatgatctgcccttgtcacccaggttggagtgcagtggcgtgacctagactcactgaagcctcaacctccaggactcaaatgatcctcctgccttagcctcccaagtagctgggaccacaggtgcatgccaccatgtacactaatttttgtgttttttgaggagatggggtttgaccatcttcctggtctcaaactcatgagctaaagtgatccacctgcctcagcctt

SEQ ID NO: 898990 - DNA, 605 bp, Homo sapiens
aaataaaaatagtaaaatccagttatatgttgtctcctggaaacccatayttgacataaagacacaattactacggaagagatggaataaagctgtgcactactaaccctagtgataagactgctggaatggctatattaatatcagacaaagtagagcaaaaaaaatggaaaatatcaactgatgctcaagttgttctggttagcagtacaaactctggaaccagactttctgagttacaatactgtcacttctatttttttcttttaactataaaataaatgtccacattgctaacaagcatattaactagcttattatgcttgcttcctttgcttttggttgtggtgggtatttatttgtttattttttaagacatgatctgcccttgtcacccaggttggagtgcagtggcgtgacctagactcactgaagcctcaacctccaggactcaaatgatcctcctgccttagcctcccaagtagctgggaccacaggtgcatgccaccatgtacactaatttttgtgttttttgaggagatggggtttgaccatcttcctggtctcaaactcatgagctaaagtgatccacctgcctcagcctt

SEQ ID NO: 898991 - DNA, 549 bp, Homo sapiens
acaggttaccataccacagatcctgtccaggccactgcttcccaaggaagtgcgactaagcccatcagtgtatcaggtaatccatttagataatacctagcctgatatgttctaagcactatgcctttttttttttttttttaattgagacagagtctcactctgttgcccagactggaatgcagtggtgtgatcttggctcactgcaacctccatcctgggttcaagcgattctcctgcctcagcctcccaagtagctgggattatagacatgcaccaccatgcctggctaatttttgtatttttagtagagagtattttgtattttagtttcgccatgttggccaggctggtctggaactcctggcctcatgtgatccacccgcctcagcctcgcaaagtgctgggattacatatgtgagccactgtgcctgtcmtaagcactgtgctttttaatccccaacttgtgaaatggaaaacatttccctccatttaacaaccatgggaaactcagaattaggtgtttaaccagcatcatatggctagtgg

SEQ ID NO: 898992 - DNA, 362 bp, Homo sapiens
tttttgattctagggatgtattttcaaacttattggcttttgatgttttttgttgttgtgatgtgatgtttttatttcttcttttatttcttaaaaccatttaaacattattttttataatacataggattatttaaatatctaaagtccttggtgaccaaattcattctttgtatttcctattgatatgttggcttgtttcctgaaatatttgatgatttttaaaaatttggttgacctcaataaygggattcataaggaaaaattaaagattgtttcttccagagattaactgcattttcatctgtaagagggcagggtgtagctaatgatttggatgtcttgaagccctttttaaggtt

SEQ ID NO: 898993 - DNA, 623 bp, Homo sapiens
ttactatagatataaaaattgtcaataaaatattagcaaattgaatcaaacaatacacaaaaagtattacacaatgaycaaatagaatgtatctcagaaatgcaaaattggttgaacatccaaaaatatattaatttaatataccatatcaataaaataaaacatcaaaacaatatgatcttcccaactgacatataaaaacactcttctatgctgaaaacagtcaacaaatgattaaggtaagggaactttttcaatctgatacagaacatctacaaaaaaacacatttggtgttatacttggtataacagacttgaggctttccctataagatcaggaacaagacaaggatatctactctcagagaagtatttgaacaaatgattcttgaacaactggatattcatatacaaaacataaagttaaacctcttgctacaccatatacaatttaaatcaaaaaaatcaacaacctaaagtaacagaaaaacaataaaacttttaagtgaaaaatgaccataaatcttcataatctgttttagaaatagtttctttagatattacactaatcgcacaaataatcaaagaaaaaacagataaattgaacttcctcaaaattaaaa

SEQ ID NO: 898994 - DNA, 575 bp, Homo sapiens
tatctttctacatggatgacataattctatacctagaaaaccctaaagatcctgccaaaaggctcctggaactgataaatgactttagtaaagttttagggtacaaaaataaatgtacaaaaccagtagcatttctagacaacaataatatttaagctgagaactaaatcaataatgcaattctgtttacaattgtcactaaacatgaaatacctaggaatacatttaaccaaacaggtgaaagatctctatgaggaaaactacaaaacactgctaaaagaaatcacaggtgacaaaaacaaatggacaaatattccatgctcatggatttggaagaatcaatactgttaaaatggccatactgcccaaagcgatctacagattcaaggctattcctatcaaactaccaatgttattttttacagaactagaaaaaactattctaaaattcwtatgaaagaaaaagcccaaatagtcaaagcaatcctaaacaaaaagaacaaagccgaggtcatcatgctacccgacttcaagatatactataagggtacagtaaccaaaatagcatggtactg

SEQ ID NO: 898995 - DNA, 696 bp, Homo sapiens
cacagtggctcacccctgtaatcccagcactttgggaggctgaggcaggaggattgcttgaggccaggaagttgaggctgcagtgagctatgattgtgctgctgcactccagtctgggcaacagagcaaaaccctatctcacaaaaacaaaaaaaaaaacaaaaaaaaaaaagcaagaaagaaagagagagaaggaaaggaaggaagaaaggaagaagaaaaaaagaaaggaagaaaaaagaaaaagaaagagaaaggaaggaaggaaggaagaaaggaaggagaaaaagagaaaaattactgctaaaagtctcttgggtccagccagaaagacctgaagtttttctgtgacttttactgagtttctctcagtttttgtcaactaatcaagcccaaatgtctttcttttccacagcaattgtcccaagctttcttggatttcttcagttattttcacatcgtatttatatctgttgtggaagtgtaagccctcggagaggaggttataagcctcaggaatatttgtagcttcaacccttactcagggtttgccattttcaaggaactcaatagatatagattgaaaatgctcaatagatgtttattgaattagctagtgaagtaggaaagaataaatttcaataagaagcagttwtgaactcctgttaagcagtgaatttctagggagaaatcact

SEQ ID NO: 898996 - DNA, 481 bp, Homo sapiens
ttttctcagtcagtttcctcccccatcccgccccatagtggaagtgcgggaaatgaaagttcatgaaatgctactattgaatttgctacagatgatagaggccagctggtggctgatatggtttggctgtgtctccacctaaatctcatcttgaattacagctcccataattcccacatattgtaggagggacccagtgggagataattgaatcatggaggtggtttcccccatactattctcaagtagtgaataagtctcatgagatctgatgattttgtaagcggtttctcctttcgcttagctctcattttctctctgcctgctgccgtgcaagacatgcctttcaccttccgtcrtgattatgagtcctccctagccacatggaactgtgagtccattacacctcttttgctggataaattacccagtcttgggtatgtctttatcagcagcgtgaaaatgggctaatacagtggcc

SEQ ID NO: 898997 - DNA, 691 bp, Homo sapiens
gctgtagtttgctgatccctgctctagagccacactgttcaatagacataaaatgcaaaccacacatataattttaaattttctactaaccacattaaaaaagtctaataaaacatgtgaaattaattttaataagattttatttaatgaaatatatctaatgttttatcattttggctcataatcaatataaaaatgttttactttttttttttggtactgagtttctgaaatccagtgtgtattatacacttacagtgcacttcaatttgggcgggccacattttaagtgcttgggagccacatgttccaattgtggccagtggtgaccatattaggcagcacagtcctagagagttgctcttcttttgcatggttaaaactggcttattagagtcaagactccaaattcatgtacatcacttttcctgacttaatactggtgagaatccagtcacacaggcacaaccttctgcaaaggacattgggaaatgtattctctggctgggtagccctgtgctctgctaaaatttggtgggcacagttctgtcactaaggaataagggcaggaaaggtgttggtagacagaaagttttgccataccatctaaattttattaattttcaacagtcttctctctgattctaaagtcayagtctggcctgaggctgatcctgaaaggcagtctgtt

SEQ ID NO: 898998 - DNA, 629 bp, Homo sapiens
cagaaaaagcatttgataaaattaaacacacaaaaaaacctaagactaataagtgagtttagtaagatcacaggataaaaggttaacatacacaaatcaattgtatttccatatattagcaatcaacaattggagactgaaaaaaaaattaaatgccatttaaatagttcaaatgaaagagaaatacttatgtataaaactaacaaaacatgtgcaggacctgtatattgaaaactgccaaatccttctgaaatatcgaggaagacctatataaatggagacacctaccatattcatgaattggaacactcaacacagtcaaggtgcccattctctccaaattgatctgtaagtttagctccattgcaatcaaaatctctgggggatttttgtagatatagatgggctgactctaaaattaatatagaaaggcaaatgaactagaaaaaccaaagcaattttgaaaaagaagaacaaagttggaggactcacacagaaaaatagacccatataaacatggtcaatttatttatttttrttttttgaaatggggtcttgctctgtcacccaggctggagtgcagtggcacaatctcgactcactggaacctccgcctcctgggttcaagc

SEQ ID NO: 898999 - DNA, 607 bp, Homo sapiens
actatattccgatttcaaagggcgtcaggacctagctatctgccaaaagatctgggtctctgaaatcctaattttgtacataatttctccatttaattgacagttttgacccaagttgctttttcagtatcttggattctgagtaattccccatctgacataaatccagcaaatggacagcaagcccattggagtaggctggatgtttttccgttagttctaatgggaaaagaaaaacatactggtcaagcatatctattcctattttcaattcacatataattgaatctcttctccagcattttcatgtttgaagatttaaagactctccaattagaatttagagaaagcctttagagtaaaattagttagctcattcagaaaacatgcactctgctaatgtgctgggaaactgaccttgagccactttttaataacgagattccaaggatcatcttttcctatgtactatgctaccttttgttggctgtttctgggcacacctcccaatggatgtcatgagcgayagaatttcctgatagccttgattcatttgattattcagaaaacatgctactaatcatccttcaccaatttgttatattat

SEQ ID NO: 899000 - DNA, 612 bp, Homo sapiens
tacaaattgtggtgcttctattgtatgagcaattcaatgggcatttcatttccagtcaaaatccaaactagttaaagtcagcctgtacaagctgycttgctgagaaacagcagcttgcattaaaattacaattatattgttttgccatgtcagaagcaaaggttaaaatcataacttggccggatattgtttctgtaatattggccctctgcaaagctgccgtgtggatgagcccagaaatgatgtgaaatatttctaatacaaattttatttttatgtgaaactattcaaatgctgctgtacaacatgaactacctgaaccaaatcaaatcctcaggtcaattccttcttccgagtgctccttagataacaaagtcttgttctgcgaatctgttcaatatattaaagttgattcactcggacagtgtgtaagatataatacattaatctgggccatttcaatttctgaggctgggactataaaactggtgtgctgcatatctaattttttttgaatacctgatttatgcattcctctgatgccgagtgtcgatggtatggtggatgcggctgctacattaacaacgggctgcatcagcactcaaatcttat

SEQ ID NO: 899001 - DNA, 619 bp, Homo sapiens
gttttcataaacgatgggctacgtaaaatttttagatgctaattaggacctctmtgtctgtaggtgtatcgactctccaaaaaaagcattttattgacaactttcaataaaatatgtaaactctcaggtcctagaaattagtggggaaagcaaccataatataattttatttcttcaccattaagctcctacaaattccaggcactcttctaggccctggggaaaaggctaccaagataaaagagcaaaatccttgccctcatgtggcatatattcttgtggaaaagagagagtaaacaaaacatgaacaaaacaacaattatgtagcatatgagaacgtgagagatgctaaagagagaaaaaaataaaacaggaaagggagaaggtgttctgtgggcaagactggattttatactgagtggtcagggtagaccacactgagagggtattaatccgtttgagcaaagacttgtaagagacaagaagatacttacattaatgtataatctaaatatacattacatgcaattttaatgtttagcttcatacatataaatataataaaaaactataataaactattaaaactatgataaaaaaaaactagttggatttcctt

SEQ ID NO: 899002 - DNA, 644 bp, Homo sapiens
gtcctactctgacacccaggctggagtgcagcagtgcaatcatagctcacggcagcctctaagtcctgggctcaagccatcctcccttctcagcctcctgaggagcygggactacaggcacaccaccacgcccagctgtaagttccttctggtaccacaaagcgttgtgtgttcaacctgtataaggtactgcgatagtttctgtataggttcaagggagtggagtgttactttaaaaacagacaacacagtcacagtcttccagttattttcaatcgtgcaacattccataaagaatcaggtccccgcttaagtgctagaaataaagagacgaacatgcctgagccataggttttatcatttcttttcatgattttctttctctgaattacctctgtttcctacttcctaaagagtctcgttgtctccttttcatacacacacattcttaggcagatgtatgtgacaggataaagcatctgcattgaccaaaaaataattcggcaactaactatagaaaagccaatgtctccacatcctgaaagaaatcatacagctggacactggatatggactgataggtcagagctctcagtatcccatttcatcatgctttcctcttgcaggaactgaaccatggacta

SEQ ID NO: 899003 - DNA, 638 bp, Homo sapiens
catttactgattgaccaagtctcagaaagtttgagtgacctgtgcaagataacatagtaagtcacaaagtattgaattgaaatccagttctatctctatatgactccacacttaacttctttcctacgaccttatagacgtgttcattgggaagacataaatcttaagctgcaaactgaagaaagaataagtgttaaaaaggtagaaaagaagaaagtcaatatttctggggagaaaccctcccttctcaccaaatgttgatggcgggtataacatcaaaggtaacaagctcaccaggacttaaatataggagaaataaggaaaatagtgttagaatttttgttgttgttgagacaggatcttgctctgtcactcaggctggggtgcagtggctcaatcacagctcactacagtctcaacctcctgggctcaagtgattctcccacctcaacctctcaagtagctgtgaccacaggtgtgtaccaccacacctggataatttaktcatagaatttgttaagaccatgtgatatctctgagaagcatatcaaaaacaggcacccatggaacagcctcagaattttaaagagtttgtgaagagggtaaaggatacactgagagtaactagagacccagag

SEQ ID NO: 899004 - DNA, 619 bp, Homo sapiens
atgatgttagaacactataactctaataatattttccctttaagcactattgctttatgtatttttattttatmttacttttttctttcataaacttaaaagtggcaattattgttttatatagtcaatgtttgttttgattacaaacatatttattactttctttgatcatcattcttccttgcatctcagacttctttgatgaaaatatctttatttcccccttattcttaaaaaatatttgtggaatattgaattctagattcaacaattattttctttctatactctgaaaattttactctattctctttgtcttctgttgccactaataagtcaactgttattttaatcatcatccttagataatttgtcttttctgtctgattttaaaatcatctctttatctttggtgatatccattttcattattgtatatttaaatgtggatggttacatttatcctacttggtttttttttaatctgaggatggatgttgttaattaatatttttaaattgtcagccattttattttcacatgctgcttacctcttctcttacgaaaactccaagtacatacatgccttagattttttcactctatcctccatatctgt

SEQ ID NO: 899005 - DNA, 630 bp, Homo sapiens
ataaaagcaaataaaaaatttagaataaacacccaacatcattctattgtgcaaactgttttttcgtaatagaaatttttgcttaataatattatgttttrtgtcaatccacgatgaatggacatgtcgggtttctatggctttgtctcctttctcttccaaacatgtagtatagaccagggattcccaacccctggcactggcaccggtctgtggttaggaaccgggccacacaacgggaggtgagtggtggcaagtgagcattactgcctgagctccacctcctgtcagatcagcagtggcattagattctcacaggggcacaaactctattgtgaactgcacatgtgagggatctaggttgtgcactccttataagaatctaattaatgtctgatgacctgatgaacagtttcatcctgaaactatccctcctccacccccatctgtgggaaaattgtccatgaaaccagtccctggtgccagaaaggttggggaccactggtatagattatctgttgaaatatttcaaatctagaaactcgaatgaaattgaggtgggttctctgatccactggtcccacccagtacctggggtgtgggctttaaccatcacactatcatgtccta

SEQ ID NO: 899006 - DNA, 647 bp, Homo sapiens
tttacctgaacctggtgtctagactgtgaatgtaattggaaggaaacgtctaaagctgagaagaacagagaaagcttcctccagaaatccactaagaaccttagtttcacaataataacaccctgatgtcaactgcttccttctattgactatgtttccgccaacgccaatcttgacctgaaacactaactcccttccccctctttcataagaaatgcaagcatatttaatatactatttttgatatgagattgcaggttggggaaggtaggtaggtaacagcccacagcctacaatatttcactttaaaaaagtctctttgccaagccacaaggtcatatgacttcctactgccagccacaaggtcacaatgctctaaccattcttcccacacactgttcagaagggtcccttcttcctttcaccaacactgggtaccagtcctagcaattctcctgcctcagcctcccaagtagctgggattacaggcacacgccaccacacccagctaatttttttgtattttaatagagatgrggattcactgtgtttcccaggctggtctcaaactcctgagctcaggcagtccatccgccttggcctcccaaagtgctaggattacaggagtgatcctagggtaacttttc

SEQ ID NO: 899007 - DNA, 609 bp, Homo sapiens
acacttcctgatccagcagcactaaggagtgttagtgagcaacatcaagtgartaaaattcccctcattcactttatgtaccaaaatacacattgctgcacattggatgctatgatatccccaccaagtcagggaggagaatggagttcagaaattatttcaatgccaatgcttacagacgaacttaagccatcattcttacataaagtgcagtaataggaatactcagattcttcaacaggattaacttagcgtgaaaacagttaagtgtttggtacgatattagaaaagagacattcattgacattaatctttctgtgacagtctcggaagataatcttttcctggttttagcttttaaaaaaatatacaaaagctttacatgtattacattcttaaaggatctgattgcttctctttataacaaaagcatcttgtggtgccaggaaataaggatgtactcagaaaaggataggcttatgtcaaaagggcacaggagccaagctaaaatcttccccaatggccaaaactggaattatctgggcaaaagtaactgcaatattactggattataactattatataacataaatacctcacataaataaa

SEQ ID NO: 899008 - DNA, 609 bp, Homo sapiens
acacttcctgatccagcagcactaaggagtgttagtgagcaacatcaagtgagtaaaattcccctcattcaytttatgtaccaaaatacacattgctgcacattggatgctatgatatccccaccaagtcagggaggagaatggagttcagaaattatttcaatgccaatgcttacagacgaacttaagccatcattcttacataaagtgcagtaataggaatactcagattcttcaacaggattaacttagcgtgaaaacagttaagtgtttggtacgatattagaaaagagacattcattgacattaatctttctgtgacagtctcggaagataatcttttcctggttttagcttttaaaaaaatatacaaaagctttacatgtattacattcttaaaggatctgattgcttctctttataacaaaagcatcttgtggtgccaggaaataaggatgtactcagaaaaggataggcttatgtcaaaagggcacaggagccaagctaaaatcttccccaatggccaaaactggaattatctgggcaaaagtaactgcaatattactggattataactattatataacataaatacctcacataaataaa

SEQ ID NO: 899009 - DNA, 640 bp, Homo sapiens
tagtcttttaagtttacatgaaaggctatctcttaaaaaacaaaggacctacttaaagacttaaagattaacctccagataatcatttaactattttagccatccctcaaatttattgaacactaagaacacaattctgaacctccattaattagaaaagagagagagagaataaaacaaaccaaacttggtattatttacatcagtcattcacctgaattgattcaacctttaaaaagtggtccactggtaactatagtcaccatgttgcacattagccctccagaagttattcatcttgcataaatgaaacttcgtatcctttgaccagcatcttcccattttccctagctcacagaccttggtagctaccattctgctctgtgctgcattgtatacatgaggtttactagaaggacagaccttaaatatttttaccaaaaaccttgaaagtggtgatcatttcacagcctatatataggtatatataaatatcaagttattatatatgtaatatatatcatttaaatgatatatatcatttaaatatatatttatatttatatatatcatttaaatatataatayatgattaaatgatatataccatttaaatgatgtataatacctcttaaatata

SEQ ID NO: 899010 - DNA, 658 bp, Homo sapiens
ataaaaccttgtctaatcaaattcatgttaagaaygattgggttttgtacattaattgctgtcatgaaaatagtatttctaacacagttaagaaattttggaatcaaattcccattgtaattgtctttacctgatgagttgatttacaaactctttataaatcattctatgctaaacttaaggcaagcccttgttgaaagtatcacagactatcaatttataagattttactgtgttcctaagtcctatttcccatctctaagtattttcccttatgaaaccgaacagtttgatggcctctttgatattaacctgtgacattttcagaaaaaaaaaattcctcattccatttttactgccttaaggagatacaatccaattttactttttgccttcctaacaatacacagagaaatcttaaaagttctatcaagaaaatgtttactgcatatttccaattcaaatggaaatagctttcacttttgatcttgtaggaaaagctagctaagtgatgaagtacaatactttctttgtgttacactaggctgcatgactgttacagaatatgtttgagcatttgagctaagagaccagaagaggctttccagccacatgtttaaaagaacaggcagcagaaaacggcttaagtcaattataa

SEQ ID NO: 899011 - DNA, 652 bp, Homo sapiens
tgcaaagagagagttcaaagaggaaacactgttgcatagcrtgtacttgagaatcccgtagttgtgtcatggctgggcatttatttgcaaaggcagattgagaacaataccaacaatgaaagcaatagacaaagatatgaattgatgtatgtcttaacctgactgactgtacagagtaattgactgctctgcagttcattaaaaaataaaattatttcaataattaattctgaaaggcagaacaaataattgaattgtacaaaatgaagatgatgaaaaggaaaacagaatctatggcagcaaggtagaaaaatttccttcagtcaaatcaaattaaggggttcagcaagagacaaagatgattattgaattttttaattatgttcttatatattgttataaactttagaaggttcattccacattccaactactaaaaactgtaacatcagccaaaatattcagaaatctcattcataaagagaaaagacaagataatttggctagttcatttcctttcaaaaattcaaaatattacttgtgagtgaaataaaataatgagataagaattatgtaactaacagcggggtaatgtttttcctcattgctaggccttgatctgagctatgtggacacaaggcagaataattat

SEQ ID NO: 899012 - DNA, 585 bp, Homo sapiens
aaaggcaagaaagggaaaaaaataaatttgaacattgaggactttggcgggtcacagtttgaagaaccactgtagctcgtttttcttkttttctttttttttttttttttgtacatagactaggtaagaaaaaaatttagtcttctactgacatgacttttctccatttgctcaaccactttggtggttaggaaactctaagtcttatttgaagatttcaggcaactgaccagcacatagttgaccttgagttatttagaataactaaactaatgtgtcatggaagaagtgaaagaaatgtattagaaattctgctagtggagaaccattctgaaggttgaaacagcccaggatgcagtgcgtatttctcacctcattaacttacacaaaaacatgccattgtctactacttttcaaattaagcagcctggacaactcttaaaaatggttaatttgacccactccatgaaacagtcaggttcacctctgcagttgtaaatataaatcttgcttgatttgataatctgcagtgattgaaaacatttttgtgaaaatgtagaacacataggtaaaaaagaaatgaaa

SEQ ID NO: 899013 - DNA, 585 bp, Homo sapiens
aaaggcaagaaagggaaaaaaataaatttgaacattgaggactttggcgggtcacagtttgaagaaccactgtagctcgtttttcttgttttctttttttttttttttttgtacatagactaggtaagaaaaaaatttagtcttctactgacatgacttttctccatttgctcaaccactttggtggttaggaaactctaagtcttatttgaagatttcaggcaactgaccagcacatagttgaccttgagttatttagaataactaaactaatgtgtcatggaagaagtgaaagaaatgtattagaaattctgctagtggagaaccattctgaaggttgaaacagcccaggatgcagtgcgtatttctcacctcattaacttacacaaaaacatgccattgtctactacttttcaaattaagcagcctggacaactcttaaaaatggttaatttgacccactccatgaaacagtcaggttcacctctgcagttgtawatataaatcttgcttgatttgataatctgcagtgattgaaaacatttttgtgaaaatgtagaacacataggtaaaaaagaaatgaaa

SEQ ID NO: 899014 - DNA, 653 bp, Homo sapiens
ggagtaactgagcattgtggaagctcagagaaagggcgcatcctatcaggctgatgtagtgagggggaaaggtgggactaacacatgtgatttataatgtyacttgtaataatcttatacactttcatgtggaagtggttgaatcatgaagctagaattagtcttgggtaagagaggaatagtaaggccatctgaacctgtgcaatgttatgcaagaacctgtgagagagaaaagggaatcaggccttcatatcttatttatttttagagtagctcatctctaactttaacctgagccaacctatcaatggaaacacacaagtatactttcataaaggcatttttaaaaaccttactttacatttctgcctttgtgcttacattcctccaaacctttaactggttggcctgttggatcatcttcaagactctctcaccttgcaggccctttaggaatcccttacacagcagtgtctacagctttaaaaaggcaactctgcacaagcctggaggagcaggcttctggcttggctacagagatgtgagaacctgagtgtgatgtcaatctagcacatggacaattttaagttagccctaatgtgtattcagctgcctagctctaaatagaagtcttgtgagcaacatagaacctc

SEQ ID NO: 899015 - DNA, 620 bp, Homo sapiens
cacccagaactattacatgaaataaagaaaaacaaactagcacttacagagaaaggctgatactctttattcttaagtaccaaaatttactactaaatgcttctggtatttcttaaayccttaataactgaaatatcttcacctactttttaaattaaatataaggtctctgtaatttttttaaaaaacaaaaagtcattgcataagactttgatcaatacaaaattaatattgcaggtacaatgaaactctggagttggttcacaataaaaaaagattcaatatacttgtaagtactgccaaaataagcaggaacttactcttcatcagagcagtcagatttttcttctgtctgtaaacagagcaaaattcaagacatttcaatactggagaatctctaatgagtggttagtaaaatacccacctttctgactgccactggatatcaaaaaattactcacttctgactcagtaattacccaccaaaaatttagatcaagtggtcctcacgtcacccaaattagtacctgacaaggaatgcttttggcaaggttggcagctgagaaacaggaagtgagttgcaaaacattattaaaacttgaaaataacagctttaaagg

SEQ ID NO: 899016 - DNA, 510 bp, Homo sapiens
atactgttctcatttattgggtatatttctccctcttgccttcccaaatatcttctcttctataaatagtccctggtttttcctgacagaattcgttgtacagtccatatatatatatatatatatayacacacacacacatacacacacacatatatatatgctaatatataaaatacaaatttattatataagtataaatatatatttatattattaattatatattataaatgtataagtataaagatacatgtaagtgccagcctatatttaagtgctattttctaggcactgtgcaaggcactgatcccagactcaaggattaacgcagggaagcagatatgtaaacaaatgactataatttaacgtgataatacagatcatgtagaacacacagaaagatgagtgttcatacaaaagaggaagtacttctttctgcaaaggtggagcatgaataaagatattccaatacaagatgtaacacaggatttgagtagtgctttagaa

SEQ ID NO: 899017 - DNA, 609 bp, Homo sapiens
ttgagtagtgctttagaaaagtaaggtggaatgtcatttggggcagagggaacaacaggggcaagcagggagatgtgaaatagtatcgtgtcctggtggagtgttttgcacctgctctcctagcctttaccacactgcttttatcgtcgtaatgtgactgcctctacccacttgactgtgaactttatgaaatcatatcctagttcttattatcttgtcacctccaccgagctggtactcagcatagccttttgaatgaatgatttcataaaattatctttgctttcacaatacataatttaaaagataaataagaacttttacatttttatgctcctcagtatcaatcaggtctgcagcataagaagacacacctaaagtgagattcaaagaggccagatacttttccattagcaggtgtatcatatgcgataatggtctgtatttgggcatatatatggcaatagcaatggtggtgatgggatgggtgggtttggggtggttggtggtatgtttcaattggaaattagccttyagcttttaaaatttgaaatctacactctgtccctgaaattcagcactcaggaactcggtagagtgggtggatat

SEQ ID NO: 899018 - DNA, 612 bp, Homo sapiens
atagcattttatttaggagtttttaatctatattcttgaggaatagggatctatagtttgttttgggtttgtttgtttgtttgtttgtttgataacatctttgtcttgggagtcatgataatgatggtttcagagctgtgttacaatatgccctgtcctctaatatttgaaaggtttcatataaaattggtgtgatttttcttaaatgattgacagaattcaccagtgaagctatctggctctggaattcttattttagaaacattttttaaattaccaattgcattttttaaacacatatattgctatttatattttctatttattctagtgtcagtttttggtaatttctgtctttcaagcaacttctctatttcatctaagttgtcaaatttactgacttaacgtttcttataatgttgtctttatatgcatttatgaatttaaggtctatggtgacatcacttttcttttgtgatgttgaaayttttcccttcaatctggctgttacaaatatgaatgtcttccagccctgtgtggattctaggaattgctcagcttgctgtgatccagtgttttttctttgccgaggcttttatagcttccctcttt

SEQ ID NO: 899019 - DNA, 644 bp, Homo sapiens
gctgtaaagccttgcacctattatcataacctaaaaataaactaaaagagatgtacttctggtgcaagtttataaagagccctcacagcagtcagtttcactaaatgtcactgaatgtagccttatcaycagtattgccttggggaacaaaggatgtggataacggtgccaccaactggtaggacagtttgttggtgatgaaacttttttttgtttggcttatactgtgaagcctgagttccctaatccacattaggaagaatttctagtttttatacctgagtcatctgcatgacagaaataacaaagacttaagatatatccactcctttcctctgcactggtaggcatctctctcttctttcattgacaggttcagaaaacatgttagaggacttcactattaatctatcttaagggactgtacaaggtctagtcagggtcaccttccatacaatgggtaacttccacacagccagccaatgggatgacagcttaaacaatcctcatgattctgaagtgctaacttctccaaagtgttgccagtgcaacttgaaactcacacatacatttattcgtacattcttgggaaagttctagtcctatcttcattttggtcctgagccaatgtaagccttcccaaa

SEQ ID NO: 899020 - DNA, 546 bp, Homo sapiens
gggcagagggagagatctttgggaaaggggcttggaagtagttctttcttctctccccccggccacctatctgcctcagagagaaagaaaagtaaaacsgaaagcttttgtcagagatcagcaaactctgactcctattagatgcactttcgctttgaggattggtagtaattaacagagtgcttggtggaggtgtggggtagggagctagttaactccttctggccactagggttcttttagtaaattattataatacataaagcggtgccctagtgaccagaaagaatctaggacttggtctctagtaataatttgtagactggaaaaatctgaccaaataagaaaggtcacttgcttttttttaaaaatgctaaaaatagcaatgattaatatgagtgaaaaaagggagaaattatatggacactgtttggccagacttacaactttacatttttccttttttttttttttttaagcaaaacaaaactttcataagaagaagagagaatactagagactaacaagctaagttttcagcctgga

SEQ ID NO: 899021 - DNA, 518 bp, Homo sapiens
gtgactcttcccatgtgaagatccctcccagactgccaaagcaaagactattactctaactttttgtttttgttttttctttttttgcgggggatggagtctctctctgccaccctaaattcatgctaaagatttctagtgtcttaccatatgctaggaaatgtggatagagtagtaaacaagagcaagtcctgcccttggggagtttatattctagagagttagaaagattacaaaaagtaaataatttcagatttgataagaaagcaaaataagagtcttcagatatgatcagaaaggaagataagagtgccagaaagatgatattttaagtcatcaccagatttctttctatgaaggtgatgtttaagtagtttactaaatggtgtcaaggcatgaactggataaagatatggggaaagagcttccctaacagaacaaacagcaagtgtaaaggtcttgtgatgtacatttatattgggggtcatagaaagcctstctatggaagtaacatttat

SEQ ID NO: 899022 - DNA, 567 bp, Homo sapiens
ttgtattgttttttgtttatttcaatttcatttagttctgttgcgatccttgttacttcttttcatctcctatgttttgggtttggtttgttcttgtttctctagttcmttaaggtgtgaccttagattgtctatttgagctctttcagattttttgatttaggcatttaatgctgtgaaatttcctcttagcaccacttttgctgtatccaggggttgtgatagattgtttcattattattcagttcagacaatttttaaatttccatctttatttcatcgttgacccaaagatcattcaggagctgattacttaatttccatatatttgcatggttttgagggttccttttggagttgatttacaattttattccactgtggtctgagagagtagtcaatataattttgattttcttaaattaattgagacttgttttgtggtctatcatatggtctatcttgaataatgttctgtgtgctgatgaatagaatgtatattctgttgttgttgggcagaatattctgtaaatatctgttaagttcctttgttctagggtatagttt

SEQ ID NO: 899023 - DNA, 636 bp, Homo sapiens
aaaattttattatgactctagataattgtgattttaaacactttgtttttttttttttttttaattggatttcaaagaaaagaatggaaatgagaggtaaggattaaagccaamgttaggatgggaattaaaaaaataaacattacataaaatctttttggttgcatgtccgtctctgtggttacccttaccttaaatgacaacccttttatatacgtgggtatgggcttttgccaggcccctcaaggattagagtggggagatggttcccgtgtgataatgggcttttcactttctgtaggttatatgtatgattgctatagttgagttgttaagcagatagaggaatagaagacttccctaaagctagaaataagatggtagcccttatatgaaaagaagttggtagggaaggaggagaagccaggctctgccaatttagaaataggttacagaggacaaaacatcccctaagctggtaaacaggaagagtgagacctgtctctctgttgactcccttctcttgtcatggagtagattcctagtcagtctatctgggtgctccagggccttcctgctgggaggctctcccctgttcattgactttgtcaccatgcttaagaggatggtcaggag

SEQ ID NO: 899024 - DNA, 800 bp, Homo sapiens
taagaggatccaatgaattaatgaggtctgtcttcacatgattgataaaatgtagcttccacagaaaggagcttggtgggggtaattccactgaaggacttggctaagaatattccaaatagaaactatgagatctttgtgtaatttttaactcttgcattttaaacagtagtttaccatataggactgatgaggggaaatgtactttctggtaatgaccaatagatactcttatcttagctgatacaggttacaaaaattctgctagccctcaaatatactattataattccctttctagtacttagtaatcatttttccttgactaacattttacactattgtataatgcagttagtgttttaagtagcatttacagactcttgatcacatctacaatgcctgttgaaataggaaagtagacagtcttaatggaaccctgtatctgtgtaccggctaactgtcaacaacagggtaatgtttgataaaggagaccacatttatatgttggggaaagtgaaggtccaggcctgtttcccaaccccgttgcttatttattgaacaaataacgctggctggtccttattaggtggtgtggcctcatcaaatttacaacacgttttttctttttcccagcatggatttttgggcatcaatgtataaacagaagcacccaaatgaagtgcttgataattcatattttttttaacatggaaacrtgataccatcagttatctttcacataagaagtgagacctaaagtaaggagactgatttgtgtgtgaggcttaagaaatcag

SEQ ID NO: 899025 - DNA, 676 bp, Homo sapiens
aatgagttgctattccatttcaagctttccaactatgttgatgggaatgtatatccaagttggagaaatagtrcgtttttttgttcttattatctcctcttgttaagattgcatagttaatttctggaggtatacaaccccttgagtactcaagacaggaaatagagagattgctgttcaaagcttttaagatcattgaatacccagaatatactttctacagggtaccagctctataactataaaagcaaaaagggatctagagcactagagagggaatacacaacacacaaagttgcaattaccaagcaacagaatttactaagcatggaaaattctgtcactaaatagatgaacggtcctcttgagtccttcccaggatgccagacaagtgttctcagcaggggctttctcatctttggggattttactttggaaaaaaaagttggacagataaaggcacactgacaagtgagcttttggacggagaaatgaggctaggaagcttcttctccagaagagagtgttggccaattagggggtttcactagaggtactgaccttgacatcctcttgtaattttgtttttaggtcttgtttattgtgcacttttatttcaaatgcacttaagtataacaataaagaatataatcaccactacctccattgtccatca

SEQ ID NO: 899026 - DNA, 582 bp, Homo sapiens
ccatcaacccatactctacgctacgtttttctcctaatgctatccctccccttgccccccaccacccgatgggccccagtgtgtgatgttcccctccctgtgccaatatgttcccattgttcaactcccacttatgagtgagaacatgtgctgtttagttttctgttcctgtgttagtttgcggagaatgatggtttccagcttcatccatgtccctgcaaaggacatgaactaatcctttttttatggctgcatagtattccatggtgtatatgtgccatattttctttatccagtctgtcattgatgggcatttgggttggttctttttttttttatttaagttctagggtacatgtgcacaacgtgcagatttgttacatatgtatacatgcaccatgttggtgtgctgcagccattaactcatcatttacattaggtatttctcctaatgctatccctcccccctccccccaccacacaacaggccccggtgtgtgatrttccccttcctgtgtccaagtgttctcattgttcaattcccacctatgagtgagaacatgtggtgtttggttttttgtc

SEQ ID NO: 899027 - DNA, 566 bp, Homo sapiens
ttttaaaaatatgtagtctttagatttcctctcttacctgagaatgtatcaatattgcagtaggcattttttgaagatataatttacatacartaaaattcacccttttcagctatgcagttctctgaatttttataaacttatgtgatgtgtaacctacaccacaattaagatgtgaatatttccatcatccccaaaagttgtctcatttccctttattgtcagtttccctgccttcacccctagcccctggaagccactggtctgattactaaccctgtaattttgcctttttgaacaagtcatataaatggaatcacacagtatggaatcgacagtatgtgtccttttgagtctggctcctttcacccagcaaaatgatactgactctcctatgtattgttttgtataacacaggtcattcttttttttgcccaggtgtatggcattgtatgaatgtattgtgatttgtatatccatttgccaccacttaaaggacatttgggtggtttctgacttttggcaattataaatggaggtgttttaaatatttgtgtacaagtttg

SEQ ID NO: 899028 - DNA, 607 bp, Homo sapiens
ttaggctaacattgacttccatagaatttgtataatctcatttaatactcacaatactcatatgaaatasgcactatgtattattcccacatctctgatgagaaacctaaggttcacagaggttaaataacttgcctgatatcacatggcttggaaatgggcctagaattcaaagtcaggtccgtataaccctaattcacactctttctattgtatcacactgcctttccaccttcttctcttaatcttctccctctatccaaatagtaaaaggcttaactggacagttgcttggttagatatcaagtctgtaccgaaactacattaccatatgtgactggaatgaaacagttaattcacaagggcccaaatatgttatattcactgagatattgtaacagactcctgagcagacagatttgacctcagctagtgctatccggagacatttgtggtgatagacagaaaacagagaggaaagaggacatctgaatagcaaacaatcttgcagccatcagtcaacctgaaaggtattctttatactcaactgaaatcacaaccacttcagaaggcatgaagaagatatgagaaggcattctaggccatc

SEQ ID NO: 899029 - DNA, 668 bp, Homo sapiens
ttaattagtgacatctggtattatctcgaaagctcacaaaggtgtttaccttgatcacacactatcatctcttcatggactaatatacttctctttgtcaaaacmaatatgggatccaattatcatgaaccaggtaagtgcattacaatttttaagtggcttctaaccctcatagatgattctgatccagggaaccttaaaattaataaactgtgaaaggtgtatctttggtccttgttggatgaaaatgaacattaataccctgctgatgagtcattaacacatctcaacagtaagaaataaaacaatactgttgctttcactaggagagacacagttaattaagttggtagtgagggtcagaatgctggaacctgggcttatgaggaaccacaaacctgagaagtctattaaacaataatatttccatcagctataataaaacttttaaaaaatgataaccaaaatagcaaagtgggagtttacagggtaaacaggggaaatagcagctcagaatgtcagcccagacatgtctgccttcccagtacacactgtgaaaacataattcccaactcattagggagcaaagggatgagtggagagaaatgctaattatacattagctcagttagctaaattcagatagggtaatatcacatggactgatg

SEQ ID NO: 899030 - DNA, 626 bp, Homo sapiens
attcaatagatttaacagcacacttaatcatgcagaaaatagaattggcaaacttgaaagcagattatttgaagttagcygattgtaggaacaaaactaaaaaggaattttaaaaaactgaataaagcataaagggaaccatcaagcacatgaatagattaattatagaagtcccagaataagagcaacaatgaagaaaaagtttatttaaagaaatactggctgaaaaccccaatcttgaaggaatatggacacccagatttataagttcaaaagattcaaagcagaacccatgaaaaaagaatactctgacacaatgagatcaaactgtcaatgccaaagaaagaggactttgaaaggaacaagagaaaagaaacttccctcatatcttaggaaatatctgtaaggtagctatcaccagaagactgttaacagaaacctcacaagccaagagagaggagaatgttgtattcataatgctcaaagaaaatacatagtcaaattcagaatgttatcatactataatggtgatggtaaatcattttaactccagtataaaagtaaaagacaaacatattaaaaaataaccatagctacaataatttgttaatgcatacacaatctaa

SEQ ID NO: 899031 - DNA, 677 bp, Homo sapiens
agtcttgaacattaccaccagatttatattattgatacaattttgatattatrtcactattttggatagtgtttttcaataatgcattcattagtttaatcatttgttcagtctgccatttgtgatacagaactaagtcttagtgtttgatactaagaatgagaagtgatttccttcaaggaatgtacaagttagtagcttgatgcttttctgagaacacatccaaattgcttcacttatgtttatgcaagcccccattacttaaattttagcaccaacatgcttacttaaactgatcatctgcatttcagaaagtctgccctacactctgcctcctaattctttctggcatttctttttccttgaattcccccactctatgtactaaaatatttacctttaaaaaaatagctcaggcaccacttttgcatttaaacttaccctgatcatattattttgaattatttcaaaataaaataatgccaataataatacatagttcataattagaagtgtttagcatgtatacagcactgtgctaaaagctttacttgggttatctttttaatacttgaaacaactgatttattaattcaacaaatatgtattggacacttataatgttctataaactgacctgaagctgggatgcaacatagacattgtaatgaaccagt

SEQ ID NO: 899032 - DNA, 654 bp, Homo sapiens
tacatttacctgctccatctagtgtaagtattttggtcacaattctcacaaaataaacattctttaaaaatgaaaaagaaaaactagtatgtttgtgaaagatgttccaaaccaaccaaataaatacacccacaagtaacaacaaaaacaaaattaatagaagtaaaaattaaaagaagaggcctaaaagagtaatgttttttaagccaaattttagattaaaaaaaaaaatcagaagagagtcaattttcatgggtgctaagatagtagaaggaaataagaccttcatgtatactctatgacatttaaaaaacagtgattaattgttttcagaaaagcctcagctgggtcaaaattttctcatcaaattagaaaatgttagtgaaatttggaaagtcttaaggtgtaatatgatcagtttatataccactagacagaaataagatttgaaagaaaatttggagctcaagtaaatataaaaagacctccaaatatgtcttcataaatataaatatatgtcatataaacataccaagaagctatgacacgctaagactgagaaataagaagagtgtggccagacaatgaagggtaytaaaagccaggaagattgtgggaggaatttggaattctgtaatagtttaaaagtttgta

SEQ ID NO: 899033 - DNA, 698 bp, Homo sapiens
aattgggagttttctggttgccaagttttaatgccatggctggccctccatggtgctttatgcaaaatcccactgatttgggttggggaactaagaacttaattacactaagactattgatagagagatctgttaaactggctgtggcaaaacaaaacaaaaggcaagaaacgcggaagactgaaggttggtgtccaattccaatatgctatgcctctagaatcctaaatgtctagaagttgtctttcaaaaatgttcatacatccatgtatgtctacatagatgtatacattaaatggccacatcgtctatgggtagttgaactaaattttcttccaggagtcttaaagctatatacaagaaagcaacaatcaattttattttcaatcttttgaatagtattcaaaactgctaattattcttgttttttactacaactgtatggtagcttaggtatagtttggactagcctgggagcttaactaccaataactgtgctgtttatatgacaaatgtcattcagaatttctaacgagcaacttaaaactgaaagcattgcttttttttttttttkggggggttctctataagcagtattacacattttagtattacattcaaaattgttgctaaggtattgccactagcattctttctgtctttgtcagaggatattggaataaatcttaaaaaaggca

SEQ ID NO: 899034 - DNA, 698 bp, Homo sapiens
aattgggagttttctggttgccaagttttaatgccatggctggccctccatggtgctttatgcaaaatcccactgatttgggttggggaactaagaacttaattacactaagactattgatagagagatctgttaaactggctgtggcaaaacaaaacaaaaggcaagaaacgcggaagactgaaggttggtgtccaattccaatatgctatgcctctagaatcctaaatgtctagaagttgtctttcaaaaatgttcatacatccatgtatgtctacatagatgtatacattaaatggccacatcgtctatgggtagttgaactaaattttcttccaggagtcttaaagctatatacaagaaagcaacaatcaattttattttcaatcttttgaatagtattcaaaactgctaattattcttgttttttactacaactgtatggtagcttaggtatagtttggactagcctgggagcttaactaccaataactgtgctgtttatatgacaaatgtcattcagaatttctaacgagcaacttaaaactgaaagcattgcttttttttttttttgggkgggttctctataagcagtattacacattttagtattacattcaaaattgttgctaaggtattgccactagcattctttctgtctttgtcagaggatattggaataaatcttaaaaaaggca

SEQ ID NO: 899035 - DNA, 377 bp, Homo sapiens
gcttacaatcatggcaaaatgcagagggggagccagtgtattatatggtgagaacaggagcaagagagagatggaggaaggggccacactagaggcaatcagaacttgcgtgaatgaccagaatcatccctggtgctaggtcattgacgagggatctgcaatcatgatccaaacacctcccaccaggcctcacctccaacaccaggaattacatttcaacacgatatttggaggggacaaacatccaaacyatttcacagagaaaccattgttttctgtaagaatactgtctaaagttaagtttttgtgtttgtttggttgtttgtttgtttggttggtttttgagttaatatttggatgtgacagttgttcaccta

SEQ ID NO: 899036 - DNA, 530 bp, Homo sapiens
cctaggtgggtagaaggctataccatctgagtttggagaagtacactctaggatgtttgcacaatgacaaaatcatctaacaacacatttctcagaatrtatccctgtggttaagtgacacatgactataataaaactttctctgtcttgtctctctcttcctttctctttttctctctctctctcaatagatagatagatagtattggctatttttctctggggaaatctgactgatacaccatgtgacccagaacctcgattcatagaaatattgttgatgcttgtatcctatttggacacattgctctggctctgtgttggcacttcaattcaaaggaatcttgtaaacactttaagaagttgaaacaaatagggagggggtaaaattaggctgtgtttcaaaaggcagagtgtcatgttcagaaactcggaggcagtcatagaactcaagaacacagtaacaggataaaacctttgccaaaataggttgttgggaatataagacctcatgcccaaaataggaacag

SEQ ID NO: 899037 - DNA, 438 bp, Homo sapiens
tccaccaatttaccttaagtatatgtgagtccttatgtgttaggtgaatctcctgaagacagcagaaacttggttggtgaattcttatccattttgccattctgtatcttttaagtgaaatatttaggccatttacattcaatgttagtattgagatgtgaggtattagtctattcatcatgttatttgttgcctaaataccttgttttttaaaaaaaaaattaattgttttcttgctatataggtccactgagatttatgctttaaggaagttctattttggtgtatctttagaatttgtttcaagaattagaactctttttaatagctctcacagtgctggcttggtagtggcagattctcttagcatttgtttgtctggaaaagactgtatctttccttcmtttatgaagctcagttctgctggatacaaaatta

SEQ ID NO: 899038 - DNA, 668 bp, Homo sapiens
ttggaactttgcaaaactctcttctttgatagctggttcctgttattcttccagtaggagttcttccaatagaaggaagctgtctgaggaaaaaggacatgctacatctatctgattcctattcctgtcacaatcaccacaacaccacttcaccctggaagcagtagagctgattggaggagcagcagctgattccagtttgcagtctttccacatacatggaagtcatattctggcatctcgcaggtagcactagaaagcatcgctccttagagagctgagtctcagatttcacaggattcctcctccaaacttgtcaatttgaataattccaacctggtctttttgtactccagtcttacaggtggcagctgcttctttctgtgatagcctagtgcctcctttttgtctttctagttctctaagacccagtttacaatttttaaatcaaaactctgttcaataatctgatgaagtttctgtattttgactagagcgactgataaagaactgtttttaactgtgataaccattaaakaaacattaaaataattacagatttgttgttgatgcttgttagaaaactgtccaatgttctacaggaacttaatctttgtcaagcacttctctaagtgatgggagtgaaaaaggcaggtggatcattgacc

SEQ ID NO: 899039 - DNA, 543 bp, Homo sapiens
catgctccagaaatgtctggggtttaagcctctcagtctatgatattttgttgtagcagtgtaagacatgyagaattagaggagtgattaagacaaatgtcagtaaagattgttttcttaaagagaagagacagccataaaaggtgatgtcaccccctacagcaagcataatgagtcaaggtcttggtgaaagccaacctgctcttaagatggtgatggaatccatgtcaattctcagtctaggcagcttccttaatgccttccaggtgattttaaaagagccaccagggatataggcttgtgcattaattaacaaagtagactccccatgaagatgagataaattcttttaatctcatatattatgttaaggcaaccattaagtgtttgatgaatgagaagaaggtcacaggaaaaaaaaacatggataattattattatattattttatgattacaaatattctctgaacactaaaaaaagtttgaatgattctaagaatataactgcagatctattgcattccctagagaaactaggata

SEQ ID NO: 899040 - DNA, 620 bp, Homo sapiens
atgatgttattttaatgtattccaataagttatcaaattcgagttattttacttccaaataaagaagcttttctacaaagtgtgcacagaaaagtacagctttcatttacttttctcaaaaataggaaagtattctaatctaatgtgcctagaaagaatattcataaccatttcattgaagctagctatatcttataccaactttaagacaaattaaatattcagacaagagtagaataaaacaacagtattcactgcagaagagttgaattttacagagtagttctatagctttgggaaaatattgacataaactgagataattgagtgatatttaactatacaactataatacatttgactcaaaacaatacacctctatgtgtattcttttgtttaatggaagcataagatatatttttagcatgtcctttgtttcaagattatcaaggtgtgtattatacattccatttgtttcagtcggtgttggatatatacagacaagatacaaagctaatctattaccttaccatggatagtgtaaaaagatattagacttatgggtcagaggcaamggattgtaatatttatggcaaaagcagtaggccaaatgtcagcat

SEQ ID NO: 899041 - DNA, 646 bp, Homo sapiens
atctgatatgatttgaatctgtgtccccaggaaacctcagtttaaactgtaatctcctatgttgaaggtggggtctggtgggaggtgrttagatcatgggggaggatccctcatgacttagtgctgtgtttatgatagtgatttcttgtgagatctggttgttttaagtgtgtggcacctcttcccaccacctctctctcttgttccttcttttgccatgtgatgtgcaagattctgattcaccttcaaccttcagaaccatcagccaattaaacctcttataaattaccgttttccaggtatttctttatagcaatacaagaatagcctaatacatcagattgttggccaatgtagggacttcaacattggctatctgcatagcttaggtaaaagatggttaaaaccctgaaattatttgggagtgaaagtctggaagacagtgattcataaaattgaaacatatagttacctgaaagacacaactcctaaaggtaaggctttgaggaacaatgtatctatggtcacagaaaaaggtgaagggcatgaaataattaataggtagagtagctgcttaaaggcccatggaacagctggaaaaaagagaatgggaaactcagatacctgtgttctcagctcaagttca

SEQ ID NO: 899042 - DNA, 647 bp, Homo sapiens
agaaagaggattactttccttgcctgtgaatagggttggtttctctagaagagcagaatggaagcaccttcaccattctataccaatggmatttctgagtggacaagctgaaattcagtaatgtctccaagcactgtggctctcctttcaaaatgaacttcgaggctgccaaccctgcatgacatagcctacaggccactccactccctccctgttctcatcaaacaagagaagttgcacaagctggaggggcagctggatcacagtttatgctgcccccaggatgcatctttcatcctaatggtgcttattcagctgtggggatgcattggtatctagctgatttttgaaaaagtgcaaaagtccatttaaaaacacaaccaaatcctccttttgagagaggcgccttgtgtgggggtggggaggaaaaggatgagaaatttttccgtcttattttctgatattctttgctttgtaggcgaatacttacagagatgcctgcaggcggttttccagagtccgtttctgaccaaagtcaataaagctctttctctatgtgggaaggaagctctcttttagactactttcttactttgtgctttcttatgtagataagtcatctaaaaatcacacagccacaggtcctt

SEQ ID NO: 899043 - DNA, 561 bp, Homo sapiens
taatttttgtttttaattatctttaggtggtatatcacatttattgacattragtctactgtttctttattcactttctgtcttgattacctgtctcgtgctgtcagtggagtattaaagtctcccactattattgtgttgcagtctctctcatttcttaggtctagtagtaattgttttataaatttgggagctccagtgttaggtgcatatgtatttagaactgtgatattttcctattaggctagtccttttatcattacataatgtccctttttgtctttttctactgttgtttctttaaagtcttttttgtttgatataagaatctcctctcacttttggtgtccatttacatgaaatatctttttccacccttttacctgcagtttatgtgagtccttatgtgttaggcgagtctcttaaagacagcaaatacttggttggtgaattcttatccattctgccattctgtatattttaattggagcatttagaccatttacgttcagcattagtattgagatgtgaggtcctttactattcattgtgctagttgtt

SEQ ID NO: 899044 - DNA, 647 bp, Homo sapiens
ctcccatgacaggtggggattatgggaactacaattcaagataagatttcaatggggacatagcaaaaccatatcagtttgttaatatccaagagaacaaagtgatttcttctatgggggtcagacatsctctgttcccagtcagtttcttggcttatggatataatagctgctattgccagaatggaggtaattcttgggcctaacagcataaatttccttttaccagacgcatctgtatattgctagcagcagtgactgtcactgcacctctagggaacttggtctgctggtagtgggaaagttattttaagttgggaatgcttctttatcatggagtggcagcaactcatccagtggcactcatccagtggcagtactggaatagtctttctgaacttggatttgctttccctgcttacataccactaacacatcggcaggattctatatatggcctctgaccaatgaactcaccacttgataagtaaggcaataggctaataactcactggccttactgtataaatatccaatcatcctcatgaagctattgaaatgacctattgaaaactttgccctagtgccatttggaaaatagcagatgtgatatggagtgttacgttgtaagatatagaacatgagca

SEQ ID NO: 899045 - DNA, 671 bp, Homo sapiens
ttttgagatggtttaagtacttttaaatcacaaaattctttccttcccccttacctcccttcttccttccctctttccatcccttcctttcttccttctttccttctctcacccattcatttattaaatattcattgagtaatccagaagactgaggaagtaaaagactgagagaacataatcatggaccctcattcttcttactatccataaaaatttggagacagctcagctcctgtaacctttgtgatttgctactgatctgagtagatgtttggctcaacattactaaaaataaaacagaactaaaaagaaaccatgtattttactttaatgctggtttagtgagtcaaccagaaacgtcctaactttgaacatgtaaaggactatacttcaaagtatttttaagcaatagttaaatgtaaatatgaaattatatatcatttgtctagatcgattgtcaatgtgtttagaatcgctcttgtagatgatgataaggtttagctttgttcttttccagttaattttgggtttgcattgtagagaacagatcaagtgtgtcagaaaagtaggcactggctagggaggaggaaatcattaactatttcmggccactaatatgaaatggtattcactgaagaaataaaatagcaaattacatttataaagaa

SEQ ID NO: 899046 - DNA, 550 bp, Homo sapiens
tctgcctcttccactgtcatccccaggtctaagccaccacatctctggcttgggctatgtttgtcttcctatattttgtccaccacattgaagctagagtgaattttaaaaataaataaattagacaggttttcctggttaccatcctggctctgctacgtataagcatgtgtgatcatatgttataaaatctttccaaacctcaattttgttatctgtaaaatggggagaataatataatatcatctacctcatagacttgctgtggagatattaaatgagtttatatttgtaaagcacttaaagcaattcaaatacatgatcaacattattattgacctaaaaggaagaagctgaggcaaaattaatatatgtagagagtttatttgttgggccaatcttgagggttgcagcttgtggrcatagattcaaattgccctgaatatacactccaattaacagcagttacaaatagatttttaaagaaaaaggagagggagttcttaagaatttacattaaggtaacataagctattgattggttatacat

SEQ ID NO: 899047 - DNA, 604 bp, Homo sapiens
acctcctgggctcaagcaatcctcccacctcagcctattgggcagctgggactacaggcatgcataaccacatccagctaattttttgtagagatggggtttctccatgtattgcccaggctggtctcgaactccttggctcaagtgattctcccaccttagcctcccaaagtgctgggattacaagcatgagccaccacacctggcctatgtgtgttttatgattaaaaaagaaatacatacaattattgggacagaacaaaataaagagaaaaatacaaattacctgtaattcaactatccagagataattattttttacggactgaatgatgttctccaaaattcatatgttgaagccctagcccctaatgtgattaatatggtttggctgtgtccccacccaaatctcatcttgaattgtaactcccacaattcccatgtgttgtgggaagaaactaatgggaggtaattgaatcatggggacgggtctttcccatgctgttcttatgatagwgaataagtctcacgagatctgatggctttaaaaaatgggagttttcctgtataagctctccctctctttgcctgctgccatccatgt

SEQ ID NO: 899048 - DNA, 534 bp, Homo sapiens
tgtgagtcaaattctttctttgtaactgcttgaaaaattcagtaaccaattatttataataattggaaattaaatgagaatcaaaattcccagtgagtatatggcaagtttgttatttcctttctaccaataatgaatgataatgagtcaaataaaagcaatttgctttttcatgaaaagtagtgatgattattttaacaatcacaaaatgctttcctgaacatgttcttttatcatttctgtagtattgaactttaaaaaaagatatcattgagaataagtgaagcatggaacctgtaaattgcctgtttttgaagccatcgtgtccatcatttttagtgagagaataatgttctgatatctccacttgacatcttagactctattgtgttataacttcccacaacttgccaaagggccattctaaacttttgctcttcaatcggccatcattacrggaatattggcttccaatttttgtgtactaatatgaatttggctcatgaatgttactactccgaccaacaaaattca

SEQ ID NO: 899049 - DNA, 613 bp, Homo sapiens
tctctattatcccttgataaccatggaatctcctttatagggctgtcttaggtgatgcttggcacataataatattgcctaaatgccaggtattatttggaggaggaggaggaggagaagtggtgtactagttcggataaaggaaaattttgtgctatggaaagaataagaattaagtcagccaaacagcaatgtaataaaaagcccagattctttctttctgctctcccacatggtcagatattttgtcatagtttaaaatactgcatctgagcatgaatatatccattggaagaagagaaactatctagaccagtgtctctttataaaatgaagaaatatttttcaaaagctttcagcaaaactcccctcacatcccattgatcagactgtcacatgcatgctcctcagccaatcactaacaaattcagtggattttctataatttccttggactaatctggatttatccctgaactgaggatgtgagtgcctcatcaagaaatggatgcataaacacagttggaattcagttactaatgaaggggtgagagttgagctgtttgccagggcctcarcagtgaccacaatcagtacatagttgcaattcaag

SEQ ID NO: 899050 - DNA, 667 bp, Homo sapiens
aatccccaggcatgattctgaaaatatgtccaatagaggaaaaatatatcaccacttgttttccacaatcacaatatggaaccaaattatggtctctatcatrtagatatatatatatgtgtgtgtgagtatatgtgtgtatatatatacatatatagtcaatttatatctttatatatttatttagtgaatgcaacatcgatatatatgcatctgtctagtgcaattgaaaaatatctatttcctatggatctgggtcactgcttttctaactaggagccctcgagttctctgtaatggccttaaacattgccatgatggctgccatatgcggtatgtaaaaagaaatcagcacagtgactcttccacctttacttttatctttttcatatattgaggttgttgaaattgtttgttagtataatttatttcgggggaggtagtgcagcatttgcctttaaaaaaagattaaaaataaaaaaaggaggagggagttttcttgaaaactgttgtgctaggttgccctttgaagactatgagaaaagtaacagaaaaatacagtcgcctgtccagatgctgtaactatggggtacctaataccttgtggacgatacacatatcagtgttacttatgtagaaagatacagcatttccaacatcgcgtttt

SEQ ID NO: 899051 - DNA, 593 bp, Homo sapiens
ttagctgatgtgatcagcttagacaatgccttgactaatggcaaaagccacagggcacacagacacccaaggagctgctgtgtcartgctctacgcagtaaaccagatccatcccaatagtttcatggtcactgagcttaggatcatcattccaagaaggaagaaataaagagagagagagagaaaaacaagagaacacgagattgttttcttatttttccaaattcctagtttgctctactatggttttatttaaattctaaacatgaagaacaccttttatttgtatgtttgaagcagactgctagttttaaaaaattaatcacagcttttctagaggcaggaggatggtcaagatgaaccacagcagtgccttgcagccttgcgacacccatttttaaagctttatttggaatgtggcacattataattgacagacttgacaagcattctggtttcatgggctgcatgtcaggattcctgccctatatttccatatcaccgagcacttccagtgtgtccttgaactaatttaaaatctccctgggtttcaggttccccatcttcgttgaaggccccacatcatttgccat

SEQ ID NO: 899052 - DNA, 639 bp, Homo sapiens
ttgttctgatacagacgatgcttagaccacactttaaggaacaccgcagaagtgtttcttattcgcagaataaaaggtttcatttccaaaaactgtttygccaattagatcttctgttcatttatcccaccttctttactattgctgctttggaagaaaatcagattattgttggaaaattagaaaacacaggtgaataaaaatgaaaaatcaaactcacatccagagaaataactcatgctaaactgttaattttttgtgtatattcttaaaaaatgtatacatacacataatataaaatatttgtgtatatgtctatactttataggttgtttagttcacttaataaatcataaatgtctttgcatactggcaaatccataatatcttcatcatcacttttaatggttattccattaaacagatgtatggttattcagccagtgccctaacatcgaatatttagattttctcccaatagttctatcttataaaccaaacctgtgatgagcatttctgtacatatgcctacttgttcagtcatttcctaaggacaaattcctagtagcagaattatcaagtcaaaggataatagattttaaggctttgataaattgccaaatgtccccaagaaatgtt

SEQ ID NO: 899053 - DNA, 593 bp, Homo sapiens
aaattgttttttatgaatataataaatttgctaagaaagaaggcatgtgttgctatttgagagagacagaaagagagagaaatggaaaggaagagaaaaaaatctgatgaaaccatagagaaagacaaaatcaactctattgaattctagattgccatcttgtcaggatttttgcaagattcctttgccactcttaattttcattactttccattttctttgaataagcttagaagcaggttctaattttaccagaggcttttcatcaaatcagactttttattctccctaggttatcctagtcacaaaaacatctctcttttcaaagcttgcataatattagctaactctagtggggtacagcttcttgaacccacacagttaagatgcaaacattattctttaacctgacttcagttatctttcatcacagagattgacattcttagaagccagcatcttcacagaacctctgaggtttatgaaaaatttccttaaccactggctgtgcagacatgaactttytgaacttcaagcaagtcatatctctgttcagtgttttgaggaatctcagatgctcgactctcctattt

SEQ ID NO: 899054 - DNA, 554 bp, Homo sapiens
tcagactaagcagttttcagagcaaaaaatattacaggattaaagaggatcattttataatgataaaggagtctatgaaccaataggatgtaacaatattaaacatttatgcaccaaatcaaattttcaaacacttgcagcaaaaactgatataactgtaaggataaataaacaaatacacaagtgttatgagggattccttatcatcttctgaataacagatagaacaaatagaaagaaaatcagtaaaaatatagaagacttaaataacactaccaattaacttgacataattgacctttctagacccctgcatccaacaatagaggaatacacagcactctacaacctagcacctgacccagcagtctagccaattctgtctatcaagaggaaaacacttgtgtcaatgtaaacaccattgttctggacctctccaggccatgagcaatggcacagaatccctgtcttagctgcataggcccctccttgaggcattgctkctggatattctggtagctgctccgtgaaaaggttattgtttcaaggaaata

SEQ ID NO: 899055 - DNA, 647 bp, Homo sapiens
tgccaggcaaaattatattgattctcctcaggtgccacccccaacttcccacttctggtaccaatttactgtattagtccattttcaggctgctgataaagacttacacaagaatgagaagaaaaagaggtttaattggacttacagttccacatggctagggaggcctcagaatcatggcaggaggtgaaaggcacttcttacatggtggcagcaagagaaaaatgaggaagaagcaaaagtggaaatccctgataaacccatcagatctcataagacttattcactatcatgagactagcatggggaagactgacccccatgattcaattacctccccttaggtccctcccataacacatgggaattctgggagatacaattcaagttgagatttgggtgaggacacagccaaaccatatcaccatctctatggggaaaaaaaaaaaattctttaattagctggccatggtggagcatccctatagtcctagccactcaggaggctaacgcaggaggatggcttgaacccaggagatcgagcttatagtgaactatgaccatawcattgcagtcaagcctgggcaagcaagatcctgtctctgggaaaaaaaaaaaaaaagcaatcagtgaaagaagaaatcaca

SEQ ID NO: 899056 - DNA, 585 bp, Homo sapiens
gtagcggtaatagaaaaatgaggtagaagcaaaagtggaaacccctgataaacccrgcagatctactgagacttattcactgtcatgagaatagcaagggaaagaccggcccccatgattcaatgatctcccccaggtccctcctacaacacatgagaattctaggagatacaattcaagttgagatttgggtgggaacacagccaaaccatatcattccacccctggcccctccaaatctcatgtcctcacatttcaaaaccaatcatgccttctcaatagtcccttctacctatgagcctgtaaaatcaaaagcaagctagttatttctcagataaaatggaggtacaggtattggataagtacagccattccaaatgggagaaattgcacatggtcttgtgcagctctgcccctgtggctttgcagggtaaagcctccctcccacctgcttttacgggctggctttgagtgtctgcagtttttccaggtgaatgctgcaagctgtcagttgatctaccattctggggtcttgaggacagtggccctcttctcacagctccactaggcagtgccctagtagga

SEQ ID NO: 899057 - DNA, 633 bp, Homo sapiens
cattgcagatcattattttcactatacctcataaaattagcrtttttaaatgttactaaatggtatttatacttatttttaatactgtgtaatgtttcatccagtagttaggtataccttaaatatctaatcactattttatcatctgttcaacatttaattttttcaatttttgagaattacaaatgctacaaagaatatttttgcaaatggctctttttttttctttttttcgggggttgtgggtggtaccaaactatttaaagaaagggtacaaatgaaagaacttatgtgtatgttttggtatatgtgtttcccccgcccccaccaccaaattattctcttagagttattctcactagtgctcttactaagtcaaagtctagaaaaatttttaagtccttttcattttgttttttttaaaggggtatgccaatttataatgtcaatactgagtgttgctattttaaaattttagtctaactttatataatacatttttaagtactttcttgatttttttcttttgattttctcagttccagccctgtcacattcagtgcctctgctgtcacattacttgacctaaccagcccctgtcaaagcaagaaagttgctgggttttgctggtaa

SEQ ID NO: 899058 - DNA, 616 bp, Homo sapiens
gtgactgaatgaatgaatgaatgaatgaactaagttagtgagcagcagtaaacattgattctatttgactctgccctgaattatgaggtttcaaaggactaccccaggagcatctcgcatyctgagaaattgattgtgtgtgtgtgtttgtacacactgagatactgtgaagggcctaaaaactcctctcccaacattcccccaggaacagagaaaattagatcgcagttttgatgctcccttttcttccaaaggattcctcttcctcttcagctcagtgcctggaggaacatatcagagctggttctggatctcagggaaccagcacagccaaccagtcgctgaggccatggctggttgctctgtggatggacggagggattgagggtgagcttgttcttgtttttaatccccatgggacttaaaaccccttcagctcttgaagtccattaggaactgcatttgttttggatggcttttgtggcacacttcctctttcaaatgaactctttggctgtttggaaggcctgtgtctccttctcttacttctctctcatgtttacatgtgcctttaaaaagtcagctggaaaggttggcacttgctacggaaatgcca

SEQ ID NO: 899059 - DNA, 577 bp, Homo sapiens
cactttccccagcccgaaaaggagctaccagcgctgtactgcccctttaagacctgctggctctcgggctctacaaaagggagtgacctctgggctttgacagctcycctaataactaccacggcgcaggccccgcccacctagctaccagcagcgccgattggccggcgggccggtatcccgcgctgtgattggcccgtcgcttcccctgagcgaacctttagaactctgagacaatattctgttacattgtagcaaaatggcgactgtcattcacaaccccctgaaagcgtaagtaagactaaaaaatgtacatattccgcgtggtttcaatatgaaaaaaaaggcgccttctgcgtggcgagcgctgccagagcattgcgcttgcaggcgcctccagccgcggcggggcttctctcttctttcagctcttacttcttcatcttctttttttcccccaacgcgcagaaatgtcaggagatgcaattaacaagaagaaaattgttacatttgtgttctgctaaattgcagagagagccagatataggggttgcaggcggagaagcccggcgctcga

SEQ ID NO: 899060 - DNA, 577 bp, Homo sapiens
cactttccccagcccgaaaaggagctaccagcgctgtactgcccctttaagacctgctggctctcgggctctacaaaagggagtgacctctgggctttgacagctctcctaataactaccacggcgcargccccgcccacctagctaccagcagcgccgattggccggcgggccggtatcccgcgctgtgattggcccgtcgcttcccctgagcgaacctttagaactctgagacaatattctgttacattgtagcaaaatggcgactgtcattcacaaccccctgaaagcgtaagtaagactaaaaaatgtacatattccgcgtggtttcaatatgaaaaaaaaggcgccttctgcgtggcgagcgctgccagagcattgcgcttgcaggcgcctccagccgcggcggggcttctctcttctttcagctcttacttcttcatcttctttttttcccccaacgcgcagaaatgtcaggagatgcaattaacaagaagaaaattgttacatttgtgttctgctaaattgcagagagagccagatataggggttgcaggcggagaagcccggcgctcga

SEQ ID NO: 899061 - DNA, 551 bp, Homo sapiens
aaagcatgaatgtgcctattttaattttaaygaaagaaacagaaaatgtagaaattatttctatgggatgcaatattcatgctatagctgccatagactttctgggaatcctttttgcttttcttctttgagttgttgcaggatcgctagagcccaggagattgaggctgcactgagctgatattgtaccactgcactctaccctaggcaacaaagacagacactgtctctaaaaataaataaaatattattcaagttacatataagtgtgaatttttgttcagtggcaattccatttagagtactttttatgtaccagcaaaaaatatataaactatgtttgattttagaaattaaaatatgataggctatttaattttatctgaaaaattacaacttgcatggaaacagacattataaagaggaccctggagactaagttacaggacacatactaattaattttaaaactcagttaaatgatgacagcacttcacataaacacataacaatataaagtgagaactgtaactgttctttctttcaatatt

SEQ ID NO: 899062 - DNA, 630 bp, Homo sapiens
actatgggcactcacacttctttattctgaacttacttgactccmcaactgatgtcaacacaattgctcagtctttttaccttaaaaccttttattttcttatgttctctggcagctgtctcttctgcttttctttttccttctcaatattcttcctcattctttttattttctcttcattctttgttagtgccctttttttgaaactgatgtctaaagattggggcccaattctgattgatatttcaccttattactttcagagtaccctatactttttgcatataatgtatcagcttttgccattcatttttaggattaaaatcctcccttaccctcaagatagaaactccttgatgactgagaccatgtttgtttgtttgtttttcagaatctgtagcatttcctggcataccacaggcatccaataaattagtgaattatctaatgaatgaacttgatctgacgtgaagcaccctactcctagctcaattccctactgaccggctcctaatttcagaatttctccaatttttgctatttttcttatagtgacaatttcttctgcccaaggagagaaggaacgagtccagaaaagaatgtgtaatcgtgaaaaatgaaatctcacct

SEQ ID NO: 899063 - DNA, 602 bp, Homo sapiens
cttccttatatctatatttaatctccttatcaaacattcccttgaccacacccttagttttctctcttgagcatactttttttattctttacatgtccaggctgagaatttttcagatctttaggttttgcttcccttttgattataaacctatctttaatttctctcttctattttactataagaagttgaaagaagcaatgaagcattctgagcactttcctgagagatttcttccgccaagtatcttagttcactgctcttaagttctgtcttccaggaaacaccagaacatgaacacaattcagacaacttctttgccaccttaaaacaagtatagccttttctccaatttccaataccttgttcctcatttccatttaagagctcatcagaattgcctttaccttccatacaatcatgcatcacttaacaatggggatactgtctgagaaatacattgtcgggcaagttcgtcattgtattggacatcagagagtgcacttacacaaacctatatggtatagcttactatataccaaggctgtatatggtatagcctrttgcttctaggctataaatctgtacagcatgttactgtg

SEQ ID NO: 899064 - DNA, 600 bp, Homo sapiens
tccctatgcgtttcccgattttttttgtctttgtctttataatgtttaatgtgcatgtctagatctcagttaaagtagtttagaggaaggttctgatcactggttataatttggttcagattttcattagatccctttttaaattctttgtttcttgtaacatatttagttattaggcctgtgtcccaatttattttaatttagcaaacatattttctatgggcttaccccagtcaggtgcccagccaaataaaatatgtgatttgcagagaagtaatgagctttttcatagatcttatgttacttcttgttcctcaccggtcctttcattctgtgacatcccaaagggcaagagtggtgccctgaggtgttctaccccaaagacagatcttagggatttaaatgggtcacaacagacaaacagattacctttacatccaagatacaatgaatgagccatgtgaactggaccagttcaagcaagccccacaaggaaatttgttattgctcaaacaccataaattttgggtcaatatttrtagtaaactcttgatgtccttacacagataatctcaatactcaccatcctgtgcatgttga

SEQ ID NO: 899065 - DNA, 641 bp, Homo sapiens
aaacaaacagaccaattaggaaattgatacaagacatgaagagacatttcacagaagagaatgtacagatgtcaaataagcaaataaacacataaaatatgttaaacattatcagccattatggaaatataaattaaaaccacagtgaaacatcactatatatctgtctaatgtctaaaataaaaaatacaacaccaagtgctggagaagatgtagaggacctggatcatgcatacgttgctcacaggaatacaaaatattacagctactgtggaaaactgtttggtacttacttaaatatctaaacaagcaactaccaaacaactgggcatgtatcccagagaaacaaaaacttatattcacacaagaacctgtacacaaatgttataataattttattcgtaatactcaaaaactggaaataacccatatgtttggcaaaaggtgaacgattacacaaactgtggtacacccatactatggaagtctatcctcaaagattacgtactgtatgrcttcacttatatattattcctgaaatgacaaagttgtagaaatgaagaacagataagtgcttgccagtggttaagggtgttagagggagataagtgtggctctgaaagggcaatatgagggatctt

SEQ ID NO: 899066 - DNA, 639 bp, Homo sapiens
ctctaaaaagaaaaaaagtgtcacacttgaatatgtgtaaatagatatatgccctgagctctgaaggctaatctaaaatactacacattttttgkgggggagggggagaaactatgagagttggaatgaaagtaaactccccccagtgataacttttgataggaaagacttcattgtcaatttttttggttatgcatgttttaataaattcagccctattatgcatataatttgaacttccagtagaacaaagacatgtttaatccaaggcactggacacacctgtttttctattttgctgtgttgataacttctcagctaaatttgttcttgaattatatatccaccagctaaacagcagatcctttcttcctatcctaccatcctgttcccttcaaagttcagattgcctctgaaatctttagctagtcaaaatttatgtttctaaaactgacttgttagctgtttgaacacacacattaaacaaatctaagatcacagttgtgtctgcatctgctggtgtgccttcagcagctctatgtggtgacattctgttcttctgagatgaagtggggcacacatatcccactccaagccataccagtctcgctcatgcgatgaacgccaaacaggagaagt

SEQ ID NO: 899067 - DNA, 615 bp, Homo sapiens
catggatacaaaaatcctctaggagccgtaacttcctgtcaatcctaaaatttartaaggcaaatgtttggcttcgagccatactgggaataaggtaaggccttttgaaaaagccacgatgcccaggtgagggttgaattgatcactgagaaccctacaaatgcgctcatggcaaggctgggaataccctacacttaccctctcggtcatttacttcagagtctgcggggcattctaatccgcgttgtcatttgctttgtgccacattcctaagaggtaggcagggcaggttttatcatcctctgtttacagatgaagataatgaaggtcacatagctcaagtgagctacccagggccacagacatacaaagtggtagaaccagaatttaaatcttggttggtctgactccaagtgtagtatttgtttcactttttctttctttctttctttcttttttttttttaactgtttctgcattctgggttctgaccaggtgaccttgaatcataaagattcagggcctgtcttgagctgctcaatatggaaggcatcttttctctaaagagtgtgagctccctgccaagcagcacaggcgcttaataggctttcagag

SEQ ID NO: 899068 - DNA, 625 bp, Homo sapiens
gcaatcaacacagatgacttctgtgaccaaatgtggggagttttccccatacaccgagcaagcaatcagttctgcagcagacaccagctgagtatcctccaattcagttctgaccctgtctgcctggagatagcatcagctcctacaggttgagagctcaatcccacaagactccaaccaacttcagatgccagtcgcaagtccaggcatccagaacttctggccactggcttcaagttaggttcccacgaccctctctttggattggacaaatgtgctagaatggctcaaagaactcagggaaacacttacatttactggcttattataaaggatattgcaagggatacggatgagatgcatagggtgaggtacgggggaggggtgcagagcttccattccctccttgggtgtgtcatcctccaggaatcttcttgtgttcagctattcagaaactccccaaaccatgtcctcttgagctttttatggagacttcattggagagccatgattgacaatcatgtagaaatgcarctggacaaaaagggtccaattacatgatctagtatgagtcacatgatctaatactaacaggctaagcagagaaacccagcaagacctgtct

SEQ ID NO: 899069 - DNA, 654 bp, Homo sapiens
ggacagcttcttactagctaagagaagatttgtcactcagcagaattgaaaagctgtgtatattcccaaagaaaacctccacaagactatttagaaagttattatagctctaaaaggagaaaaacctctaatgtttctcattgcctaaaataacaaaaactactaatagatatactttgccttccattacatgacaggtgagctctgtagcactattaggagacagcagaacagggagttaagctctgggctacagagcctgtttcctcaccttcattttataaatgcttcataactaatgatgctgagatgacaatctttatcctttggcagaaatcaatagtctgtcagaggaaatcctttcaggcagagattatttagtcatcttcatatcatcatcatgatgagagataacatttattgaattcttattatgtgcaagtcattgtagatgaattaccacttctcattctccttctagccttggaaaacattaaatatcagggggcacgaggcactaattactcacattaaaccaagccagtgcctgtcctcagacagctttatttcaagcagcctgaaagaggacccacaaagtggaacaacaaaacctgtcctgcacatcrttgaaaaacaaagtttctacataaatgg

SEQ ID NO: 899070 - DNA, 664 bp, Homo sapiens
gcagagccaaaatctagaaataattttgcagaatggtgcgctaattttcccaattttccaaagcagagttctttccaccatactctgaaattcttacccatttgttggagcccccaagacaaaagacaggaactaagttgccatgggagaagatccaaatataagaaaaggagagtgagccaggtgaaaaacattggctaagcttggggtgtgcctcaaaagcctttatggtggcattagatcctagatataaaggctcagaattgaccacttatggggtccccttatggggcttatgaagagcccccatatccagaaacagggcagatccacaagttctaatgtaagggacaccttacattagacaaattaatgtaatgtaaggaacatagcctagtcagcaagacttaaatcacttattgaagcatcctcctcccttttggagcaagtattgctattttccagtcttctgctaaaatctcagtgtacccttagcactgagtccccgccatcccagggtgatgaatatcagaagttcctcaccccttccacctccccacccagtaagagagacctsggaaagcataagaagacttggtttaaaaaaatcctgctaatttccttcccaaaaggttgccaaaggctgagcttgcagcccgctttg

SEQ ID NO: 899071 - DNA, 536 bp, Homo sapiens
tgcaataagatcttttataaaatattcagatgtccttcatgtgttgtaaagttgaatttgttttgtgggttacagtgaaatgccaagtatggggcgtgtgtgtgtgtacrtgtgtgtgtgtgtgtgtgtgtgtacaaacagaatgtaagaatgcagttgaatctgtgtaatttttttctcctttgcattttcattttctgtaatattctatggctgaatgtatacttttacaatcagaaaaaaattatttcttaaaaataaatgtattgaattttatatttgccatatgatgagtgcatttaaaatgttcatagcaaatagcctggaacaaaactcataaaaatgtaagcaatggttataactagatggaaaaactaggggcgatttctttctttcctttctttactaaattttctaatctttttgcaatgaccagatgccaattttgaaatgaaaaaaatacataattttaaataaaatcgagaagaataattttagatgcaatgagcaatgggacattatcaaagtgaagtggc

SEQ ID NO: 899072 - DNA, 652 bp, Homo sapiens
ggttgatagaaaatgtgtgatgtataggtctcaccaggkcctcttcatgattttcagagacatgttccctgactcaaatgcagcaacaacttgacagaagatgaaaatggagagagaagaaaacaattcatgctcatggcataagcagaggaaaagggaaaaagagaatcactcactttctgattattggagttgccaggcagcacaatgaagctttgctagtagaaaagtgcctgtaccctctgccatcacatgcctcccttgggaccagagcccctggcccgctagaaagtctgaagaatgcacaaccctgtaatgccatcctggcagtgctgcagctatgcctgtaactgcgatttcagatacgtggttcacagaggggtggacctgcatcacttcaactgctgggcactcatgaacaaagtaaaaggcactctaccttgacgggggctatggaggaggaggggtagggagagtggaaacaagaatgtccaggaaggacaaacagtggctcacacctagcctgtaatcccagtatttggggaagctgaggcggggagattgcttgcattcaggagttgaagaccagcctgggcaacatagggagacctcgtctctactaaaaatcaaaaaaattagctgggagtggtag

SEQ ID NO: 899073 - DNA, 652 bp, Homo sapiens
ggttgatagaaaatgtgtgatgtataggtctcaccagggcctcttcatgattttcagagacatgttccctgactcaaatgcagcaacaacttgacagwagatgaaaatggagagagaagaaaacaattcatgctcatggcataagcagaggaaaagggaaaaagagaatcactcactttctgattattggagttgccaggcagcacaatgaagctttgctagtagaaaagtgcctgtaccctctgccatcacatgcctcccttgggaccagagcccctggcccgctagaaagtctgaagaatgcacaaccctgtaatgccatcctggcagtgctgcagctatgcctgtaactgcgatttcagatacgtggttcacagaggggtggacctgcatcacttcaactgctgggcactcatgaacaaagtaaaaggcactctaccttgacgggggctatggaggaggaggggtagggagagtggaaacaagaatgtccaggaaggacaaacagtggctcacacctagcctgtaatcccagtatttggggaagctgaggcggggagattgcttgcattcaggagttgaagaccagcctgggcaacatagggagacctcgtctctactaaaaatcaaaaaaattagctgggagtggtag

SEQ ID NO: 899074 - DNA, 634 bp, Homo sapiens
gtgggaggggcacccaggacactgaagaaatctcctggtcagaacaccttgtatgaacaggactcctagggaaaggggtttcctagtccggctaggggttggaggtagtgctacaccagggacctcccttggtttgggtgaccatcgctatgactctgttttccaaaccaaacctgggacatgtaaaatgacaagtgcaggtgtctttacaggaagaacaagctgaaacacagataactctcaacataggaaaggagtctatcccacagccttttctaatctttttatttaaaaacacgaattacaggtaattttcctaatgaaacacatttaaaaggcatcttttgtggtctctgtatagagtgtatgggggacctgttcatgtctacatcctagccactgttagtttcaacataccactctatttcaaaacttcccttttctggcaaagatccaaaacttactaaaattcttttgtcttctttcccatggtcaggcccagcagttggaattctttttgaggccattttcccaagtctttatcacgtcacaagacttgctgtgtacatggcaaaaggaaggcccaacrgagccacattgggaagtgggccctggggagtctgctgagacactg

SEQ ID NO: 899075 - DNA, 578 bp, Homo sapiens
aattctacatagggttctcaccctgccccagacgtgttcagattcatcctttttggagaccttagttaggtctgaacctaccctggagtattgcctcacagaactcattaaaggagatcagagttttggctgctgaatcctgctgcctttctagagctggtgctcacaatttcctgaaattcaaaagcagataaatcgggaaaaaaagtatgttttgtaaggtgtttgtttttaaattttttattaaaaccagtgcttgcagagacattgtatttagcaacttgttttctattcctgcagatccagtagttgctgcacaagtcaaaaaagtaaatataaacagaatgaaattttctctagactacattaaactcttctgtatctctttcatctgtctatatttagcttttattctatacaattttttaaaaaatttgatgacagagaaacagaagaaaaaataaaaatgggccctttatctaaatcctgaaaattaagaaacacttagtaccagctccccgggtgttaagagaattaaatcatataatgtgttaygcccagcaccgtgctctgtatca

SEQ ID NO: 899076 - DNA, 622 bp, Homo sapiens
aggccatctgtgtatgctaattgcttatattcaatgacaaataaacttttcccatcttcatagcaggaggtagcttagcagcttgaagccaggtgcctgctgaaggtaagatttcactctgctacaaaaatggttgaatagggttctatcttgatttggctatttacattttagagcagtgtctctgcactccctggcactgggctacagcactcctgcttgctttctcctggttactagtgtcctctgttgacttctacaatttgctactgaggcacagcccagagcacagctcacattttatgtgaaccccatttgccacagcagcactctagtgtcacatcagagagtgaggcctgagctgcaggaggagagcctgcaggcctcatgggtagatttacaccttcacaataatgggaatgtaagcagtgtttcagccccagtttctatttataatggtgaaatggaaaaaatactaccgaattcccaggatgagtccagatacccttaccctgaatactctgcagctgcattcctaagcccttatctaggtgccacagtagaatttgcagtcatggtacagcatgcaraccctaattacagccatatgggcagcatgggg

SEQ ID NO: 899077 - DNA, 642 bp, Homo sapiens
atggaaagtagaggctgagaaaatgctgactggcttctggatctgttacacacatttggttttktttttttttttttactttttattttggaataattttagatttaccaaaatgttacaaagatagtaaagaaagttcccgtatatctttcacccagcttcccctcatgtcagcatcttacgtaacgatggtacctttgtcaaaacgtagaaattaacattggtacaatacgattaactaagctccacagttactgagtgtcaccagtgttctcactactgtcccttttctgttccaggatccaatcctggataccacgtttcatttagtcatcatgtctctttggtctcatgggatctgttagcttctcagttttttataaccttaatagttttaaaaggtagtgactggttattttgtagaatgtctgtcaatttgggtttttctgatgtttttctcaggattagactaggtgttatgagttttaggagagaataccacagaggtgaagtcctcttaataatcctatcgggatgcatgctatcagcatgacttaagcactggtaaggttgaccttgtttctctgctgtaaagttaccattttcctctttctatattctattctttggatgtaagttact

SEQ ID NO: 899078 - DNA, 570 bp, Homo sapiens
ctatcccatcaaaaatattcatgatggtggtggagccagaaatctctttgcactgctccatttgctttcagtcacagtgatttactgaatgccaatcataaggcactctgctaagagtatggaattcagaagcgaatcaatcaagcttcctgcctgcacagaactgaatgtcatacagaagacagacaaaaaaactaattatgagggaatgccatgggaacacatgataaaagcaacagactttaaggattctaacattctaaggttcttctaggattctgttattaaatagattcttcttcttcttcttcttttttttttttttagacagagtcttgcactgtcacccaggctggagtgcaatggcgcgatctcagctcactgcaaccttcgcctcctgggttcaagggactctcctgcctcagccccctgagtagctgggattacaggcgcgtgccaccatgactgactratttttgtatctttagtagagatggggtttcaccatgttggccaggctggtctcgaactcctgacctcaagtgatctgcctgcctaggccacccaaaa

SEQ ID NO: 899079 - DNA, 582 bp, Homo sapiens
ccatctctcgggttcaagcaattctcctgcctcagcctcctgagtagctgggactacaggtgtgcaccaccaggcctggctacttttttttgtatttttagtacaaatggcgtctcagcatgttkgccaggctggtctcgaactcctgacctcaggtgatccatccgccttggcttcccaaagtgctgctattacaggcataagccactgcacccggccccagtgtttttatctttatttgttctacgtacatgatcgcagatatttttcagtcaccaatccacttgcactttcgtcgctactgggccaccctccccaagtcccagaaactataaaagggaactcatggaggtgaatcaggaaggcaaagtgagtttgaggagagagaaagaagaaagatattttacctagttcttgcacaagtttatttaaaagaagaaagtggacacagagacacatgaaaatatctgtctccactgaccaagaaggcagcttatttcacttgcttaggctgtgagtcctgatgaagtttttcaagacatcagttattgaactctgcctaacggctagagaggagaggag

SEQ ID NO: 899080 - DNA, 644 bp, Homo sapiens
aagccttggcagccatcattgcaccaagtttaattatctttctggtattatcaagactcaacattagcactaattgtgctgggtccaactctaatgtcttcaaataattattagcaattgcttattatctcttttgaaaaccctaaatacatacctattttttaagacgttggctcattgagactggaaagaacgcagacttccattcttggggctgatgtgagtcagaacattgttcaggaaaataaaagtgtgtgggtttttgggtgccagtttgaaatattgactgtgtttcttgattgattggctaagcctagttggaatatcaagcttcagttttcagatgtgaggcccaaaataaaatgtttcacttcgttctctaagccacttacttgtccctcaggtttgcttttccctcatttctcagactcctattctgcataccttaaaacatttctcctctgttgcattcagaagaaacagaagcctctcctgttgcagacagcccttccctctacagagtaagtttctcctttcctccctaaattrctaggctatactagaagtcatcattcatattttgcataatttctacccattattaatgcatctattcatgcttccatgaatccatgcattcatcc

SEQ ID NO: 899081 - DNA, 692 bp, Homo sapiens
gtccatatcccccaggagaacacagtctagtagataatgaargcatttatcacctataaaaagtggatgccaggctggaaaaaaatgccttttccacaatgggaaaaagggatttcatagacaagtgtggttccctgggtctgtgaattggtgccaggttagatccagtagaatcaacctgagactttactaaacacaaacagtagagattccttgacattacctcctagaaattctcattcagtagtactgagatgaggtccagcaatccatatctttgacaacctctttacacgtagctaggtttgggaatcacaattgagccttgctcctatagactattatgttgaaagaccaatggatttatggtcagattgaccagagttcaaatctcactctactcatgtgtgcagttagaaaacagtccacaagactgccctcactgtgatgccaactacagcgtttggaaatccctaagaccaaccttccttctgataccaattgcaatttccgagatctgcaatactactctcaggataattttccagaaagactcaaaggactctgaacgttgttatactcacaattatgatttgtcatcgtgaaaggatacggattaaaactagacaagggaagagatgcacagcccagagcgcaagcaagttccaaatgtggagtttccagttgtcctc

SEQ ID NO: 899082 - DNA, 654 bp, Homo sapiens
tagaaacatattatgtccttaaaaggcaaggcacaatattataaataggttctctctcaattaattactggtttaatgcaattacattatcaatcccagtaggacattgttgggaaacttgacaaaatgattctaaaacacatatggacaaataaataggtgaaaaaaagccaagaaaatttaagaaagttaacaaagtgagattataatatgtttaatatctgagagtgctaggggagcaatacatttaaaagtgtggcactatttcaaaaagagacagattaatggaacagaaaagagactagtgacagaggcaatatcacacacacacacacacacacacacacacgaaggtagcaaatgcatgataaaggtgcctttttaattggtgtggagcatacggattgtttaatctatagtgcttgaacaactggctaagtattgggagaaaaaacagatagctccctactttcagcaaaacaccaagcaaaatcgctagtggctgagcttgctgtcctctcrtataactcgcttcctccagccatccgtgtttagtgcaacggtcaacagcattcattacagtgacgtaatttcctgtttatctgtcttcacaattagaccatgaactcttcagagaccagcaactttgcctta

SEQ ID NO: 899083 - DNA, 588 bp, Homo sapiens
gacgcctaagggaactcgagtgacctacgtgaagtgtcaagtatagattttgacagttccatttatttattcaataacggctatggaacatctgctatacaccaatagagggaggcagagagcatggtgaatgcaacattgcataatggtgttgggaaaagtgtcccgatttcaaggaagctgacagccagtctctgtcatttcctagctaggtaactttgagtaaattactcaacctctttagattttattttcctacaatgcaaaatcagggtaacaatagttgctgtcttttaaaatggttgcataactgaatgaaacaatgcatacaaattgcaaagctcagtgcctgagccacattataaaagatcaataaatgttagcggctgctgtcaccactactacaaaccctggatgctagatgctagggcagtggttctcaaccttggctgagwgaatgtcaaagttacctggggaacgcagtacactgttggtaggaatgtaaattagtgcaactgctatggaaaatagtgtggaggttcctcaaaaaactagaaatagatatatgatttgatccaggaatcccat

SEQ ID NO: 899084 - DNA, 587 bp, Homo sapiens
acaatttcaacattaactatcatcttttgaatattagtggtgagccaggatgccactataggatccacgcattctacatttacttctcagagtcaccctgaattatttatctcaggttacasaagaggagcctaaagctagcttcaagatgtatctggcacatggctggtacttgcttaaggtcacggagctaggaaagagctgagattcaggctcatatccacctgactgcaagttcaggtagacctcagaaaagatacttatttatggctttactctctagctgaatttctaaaatgttgtttgtaagtcttttccctttaaaattgaactacattttattatgggcttctgttataatttcagggataataaatcgtcatcactgatctcttccattgcccccagcttttctaacctcagtttatgttatttacggtcacagcgttctctcagtcactctgccaagtagctaatggtgtataaacacatgcttaagtccacccaggaatgttgttgctagacttccctttggtagattgaaaatttctattgttctgagagtacaggtccctgcattttcagaa

SEQ ID NO: 899085 - DNA, 634 bp, Homo sapiens
aaaagattctaatccctaattagaaaattagatgatttctaatccctagtggagtgtactcaccagatgcctccagstgggctagaaacatctactcctattgttttatgtgtctagttacaggaaccctatgaagttaatattactgtctccatcttacagatcaggaaattgaggcacatagagtttaagtaacttttcaaggacatagagcacgcacatggcagaatttgaacccaggcttgtgtctgactctaaaatccatgttcttacccctcttcctggttgtttttatgtaatctatacatcacccatgtcctggagaattcttgtttgatgaagacctagtggcagaatctataaaaaaaattaagtatcctttgcattcagaatattaaactccagtgaatcctcttggtgcttgtggctaattttttttttttttttttatgaaggggattgctggggataattgagaaacaaagatctgtggcattgtacaaaactaagctggtctgatgaccttatgggaaatggtggtgttttggtgttaagccctaggctttctagaagtgttttccagggaagccatcttcgctttccagaatgcaacctgggtcacaaaagctgctca

SEQ ID NO: 899086 - DNA, 599 bp, Homo sapiens
gcagttttaataaaaagctgtattgtcctgatcttgtgcartatactgaactatcattttccaactgttggcttgcatactggtttgtgtgagtaagcccgtccatccacatcactaaaagatagtagtagtaacaacaatgacatttattgagcatttatcatatgccagatgctaggtctagccttttataggaattaaccctattaatccttgcagcaattctttgagatagatgcgattgttttccccatttcaaggataagaaagctgaggcccagagaggttaagcaacttgaccaaggtgacacagcatagggcccctgctagcctgtaagagcctgtgtgcaaattgaaactggtgtccccttttgaattagaacaagatgccctttctggcagatacagctataccagcatacaacttggcaagtggttttcatagttatacaaggaagaagcagccccttcctccagattggcttgcatagcttagcaaatacaaggcaatctgtatttcagctccaactcatctccttaaatggtgggagggaaatgtatgcagtgcaaaacctgcaaaaccataccaagtagctcta

SEQ ID NO: 899087 - DNA, 609 bp, Homo sapiens
aatactttcttgaagtcagccctttactgtgcaatgtgggatagaattctaacacctccagtataatggcaggaggaggaatggttaggaacattggagagctatttggcctatgtctctttgttatgaagggcccacagtttacgtttttgactttttcaccaaataaaggcttatagcaagttacccagatatgttggcagaatggcaaggctacattcatcatagaactttaagcttgtgccccactgctgggccatactgcctgtcaggcccaaattaatatcttttataagccccgcaacgatgttgtaaagaatacaattatagcttaggacattgccatctgtggtgggacatttcaaacagaattaagtctagagattatgagtgatgcatcattgtcactcaaactgaaattggtatagcaccttctgttttattcaaaattctaaagggaaattattctgccacaaaaattctcatctgttaagtagcccttaaatgactttttttttttgcctttgcaaaaacaaataaaaccattttatttgtgtgtgmgttagaacattgaaatgttgagcctagatttttaaatgtgtcgtgatt

SEQ ID NO: 899088 - DNA, 517 bp, Homo sapiens
atctgtttcttttctctttcttgagtagcacctcamacagggctggattgtggggtgttctaaatgcaggggtgaggcaggtgtactggagggttttaccccatgtgtgctttcctctgagctcaacaactgcagctaagaaaggtgtctcagtggataatcgcatgatccactgccctgtgtgggaccatagtcttttttttttttttttttttttttgagcaggagtcttgctctgtcacccaggctggagtgcagtggccttttctcggctcactgcaagctccgcctcctgggttcacgccattctcctgcctcagcctggcaagtagctgggaccacaggcgcccgccaccatgcctggcggctaattttttgtatttttagtagagacggggtttcactgtgttagccaggatggtgttgatctcctgacctcgtgatctgcctgcctcggcccccagaagtgctgggattacaggtgtgaaccactgcgcccggccgggaccacagtctt

SEQ ID NO: 899089 - DNA, 601 bp, Homo sapiens
ccgtaaatgtaagcctctgtcctggggactggcccaagctgggaggagggagactgrctgacgaacagtctaggttcctgcaggtctagagacccagtttgcaaatgagataagacgtaattctagaatctgataaggacaggtgagattctaacactgtctcatcccattgctagccctagagtttctcatggggatagttcctcaggctggtcttttatgttctcatgatacctttgggattatttaaatataaactctgacttttcacaggagtgggagccccaagatggccctgggtagggaggtccctaagtcacctgggcctccacccctagactgaatccttcttcctcacccctatgcagccacctggaccgcgcccggcccagggctgacatactgggcatttgttgtgatctctgactatcctgatgagtcatgaagaagcatatttacccattcgaacactagcaagtgcctgaaacggggcaggggtcgggtagacctcggaatctctgcactccggagtcgaggatgtcagacacaagaaaggagagtgcccttaaggtcggccacactcagcttcctggggaattca

SEQ ID NO: 899090 - DNA, 288 bp, Homo sapiens
aaagatatcaatcacaaaattcccccatcaaagaaaatgctgtaacatttattgtgggccaactatgtgccaggaactctgtattcttggcttcacttgaacctcacaacagtcctattcttataagatcacccccattttacataccagaaaatgaagtctccaagaggtaaagaactcacccatgactaatcagacatgcttattaaattctaagtacaatctctggcacaaggcaaatgctcaataaatcatacwgtgttaggaagaattcagcttcaagttgta

SEQ ID NO: 899091 - DNA, 442 bp, Homo sapiens
aatgttctctgttgaaaaagctggcttcaatttattgagcaagatgctggtgttatcatctaacataaaacctatcttataataaagtgttgacacatgtaatgagtactgtactgaaaaatggtggtatgtatatggtttgtactgattatgtatcgcttttataccatcaaaaagttgaaaaatcataaagttgaatcatcctaaaatgggtacattctgtactatgtttccaaggcttcagaagtgttgcatacacattcctagccagctgatagtgctaggagccaacagtagtctcccccgggggccaagaggagggcgaaatctctactatggtatawgatgttctcgtgggccaagtatgagggtgatatttcattgttggcactgggtttctggaatccatcctcttcaccagggagatttaatgaaccaaatg

SEQ ID NO: 899092 - DNA, 518 bp, Homo sapiens
aatagcatgggaaagaccatgccccatgattcagttacctccctctgggtccttcccacaacacgtgggwatcctgggaggtacaattcaagttgagctttggttggggacacagccaaaccatatcactatcctttgggaaacataaagttaggttgccaactttatagcacttcccagtttaaattgtaggaggacaagttcccttttttttttttttgagatggagtctcgctctgtcacccaggctggagtgcagtggcgcgatctcagctcactgcaagccccacctcccgggttcatgccattctcctgcctcagccttccgagtagctgggactacaggcgcccaccaccatgcccggctaattttttgtatttttagtagagatggggtttcactgtgtaagccaggatggtctcgatctccttgccttatgatccacccacctcgccctcccaaagtgctgggattacaggcgtgagccaccaggcctggccgacaagttcccatttct

SEQ ID NO: 899093 - DNA, 512 bp, Homo sapiens
ggaaggggggcttttggggatgaaagacaatcacttaatcacttttaaacaggcatactatattataatgttagcacctgactcgtaggtctgttttaagttaatratgactgaatcaatatgtgccagcacggtatctatttctcaaggctgctgtaaataagtaccacagactgtgcagcttaaacaaaggacatttattctgtcacagttctggaggctggaagtccctgatcaaagtatccacaggaccacgctccctctgaaggctcaagggaaggctctgttccaggcctgtctcccacctgctggcaagttccctgacttgtggcagcataactccattcttcacacagccttgtccctgtgtacatgtctctctctgtccatgtttttcctttctgaaatgcaaattaaaaccacaacaccaccttaccccagccaggatggccattattaaaaagtcaaaaaacaatagattggcgtggatgtggtgaaaagggaatgcttat

SEQ ID NO: 899094 - DNA, 642 bp, Homo sapiens
tgacttgtgcccagtctagaatgacattctcctcaagatcattctgggttttctgcccaaagccccatgaatgacaaggttttacagtctgattggtaggaaaaggcactgttcccagccctgtgtcagctccggtcactgttttcaaatcctttcagatgtttttttcctgtgttgggtagtttcctgacatgcacgttttgaccaatagtctgctaaatactggagggagttccttgcaggtcttcagaacactgtgcagctcattcctctctcatctgtcctgggaactctatctgccttggtctctcagctctgtctcctcaacttggggagttggccagactgtacctcaatttacctttcctttgtcagagcctggaaacttcccaggcagttagctggggcagttgtaggacccaccttgtttgattttcttctctcagggattttgcccttcattgcctgatattcaatgtcttcacaaccattgttttatatattttgttttaggctcaagggaatcttatcctttatactctgtcttggacaaaagccccatttgggggaaaaatgtgtgtgtgcatgtacaggcrttggaggggagtctaaaatataaaccaaactgttaactctggtgag

SEQ ID NO: 899095 - DNA, 656 bp, Homo sapiens
ttttataatatggtgaatgtaatgtgtttatgtatatgtgaatatgtatgtgtgaattttatgatgagatgctcctcaaaaataagggaaattatttttccctttgaaatttaaaaattaataagatagatcaaaaacacacatgctaacttaaaaagaatctgacagtacagagcaatattatcatgtacccatttaagagaggaatatcaatggattaaaagaaaatcaaggggaaaatgatgactggccctctgtgctacagttcttgaaaaggacaataggttcttctaaacaaggtaatgatgtacgtgttcagtcacatgtacaatccatgtagaacaactcacaaatgttatctgatgagtatttcctgttgatgtgtattgtacaatgcaatctacacagactggtgaggcagaagaagaatcatgatacctcatcccaattggggcacaggcaggtttcagaacattaaattttaacataatccatagatacaaaattgaaagtgatttaacttcctcatgatcattcatagccagccaaacstagttagaaaaaacttgagctagttcagcaaatgactctcaaagtactctgtaggaatcttaagtgaattctgatgcctacgtatagcccattcagatcagaaa

SEQ ID NO: 899096 - DNA, 624 bp, Homo sapiens
aaaaaatccccaggacagttgttttactggagaattttaccaaatatttaaagaaaaaattgacaccaattttacacaatcttttccagwaaacagaagatgaaggaatgcttatctactcattttatgtggccagtattaccccgataccaaaaccagataaagacagtacaaaaaaaaattacagaccagtatttctcaatagacacaaaatcacaaaacatagacacaaaagacatagacacaaaacacagacacatagacacaaaaatcctcaataaaatattaccaagttaaataaaacagtatatgaaaagaattatttaccatgtcctagttggacttatcccaggtatgcaaggttgatttaatatttgaaaatcactcaatgtaatctaccatgtcaacagcttaaataagaaatatcttatgattatatcagttgaaaatagtctatgtagaaattacaagaaatctaccaaaaaatttcctgcaaataaatgaattcagcaagtacatgagatctatgaccaacacatgaaaatcaatctcatgtatatattctaacaacaaacatacagagactgaaattaaaaacacaatacccatttacattgctcaaag

SEQ ID NO: 899097 - DNA, 698 bp, Homo sapiens
gaaacacttctgaatttctattgtggtcatacttatgtataactacacatgtgatatcatcacatggaactacacacacacacacacacacacacacacacacacacacacacacacgagtacttgtatacctggcaaaatatgatcttgtatatatgtacttgtatacctggcaaaatacaatctgtaatacaatacatgtatattgtatatatgtacttgtatacctggcaaaatacaatctgcagattgtaccattatcagttttctagttttgatattgtactgtatttatataagttaacattgagagaggcaagtgaggggtgtctaaaaccttcctgtaaattccttagtaacttcttgtgaatttataattatttcaaaatttaaaatgtttttaaaaagccatatttgaaaaattttgaaatcattctgctactgtgcaaaacagatttgatgatgtcaatattattttaaaagttgtatgcattgaggagaaatgataatatacaattcattgctctacatgcaagtaacttgagcaactaagaaacaaagtaggacagagttttgtaatccttacctaggcactactttatagccrcatgaaatattaacaggtagaagggtaaaatacataaatcattggtgcaggaaggatatttaaaatacttaatatcttttatggtctggac

SEQ ID NO: 899098 - DNA, 637 bp, Homo sapiens
cgtacccaaatttgaactagctcatttcatggctctggggccgggtccatggctggcagtggaaatccctgatctgattcagaagagggtattccagcacaaagagaaatgtaaccaacgaaggaccaatacactgaggcagggcagagggacttttgataggctacggtcctgttctcctgtgtatcacacttaactcatctaactgcttcccgggacaccttccacctctagttgacaggaagtagctgcagcaggatggggaaaaaaaaaaaaaaaagccaaaataccaaatagcattgctacggagtttctaaggctgcacagggaagggaaagactgggctttggaaaatcaagaggcaatttttatcctcccctcaagtggaacaacatgtggtcctggaggcatgggggtaactggaatagagtacgtagtctttctggtttcaggagacaacccatcaataaaacctgcttcctctgcttaaaagaaaaagaaaaagaaagtatacaacactcaaattctgatgtccatacataaaaccttatcagaacacatgcatgacctttgtatattgacatatggtgcttttgcacagtgagygcaaagaaactggatgacctgcaaaacgttt

SEQ ID NO: 899099 - DNA, 614 bp, Homo sapiens
gtacctctgctaccaccaccactatcattattgctaactggcattcctacttgcagcacaatatttgctataagatcgttaggtrgcataccagatttaaacataattgaacatgtaagatccactcttacatggttcaccaggtaacatcaaaacataatactctaaattaaagaaaagcataagaaagatagacaagcctgcaggtctaattatcttttctattaattctaaaaattctaaattatagcttaatctaatcgtggcctttctttaagccttggaaaattaaacaattgactgtgttgattagtatattgccaacagctgtgtccccctgtgtcctctcccttagtagaaagaaatggtccttttatcacacccgttgtcaaagatcctcatctctctctctctctctctctctctacctagaagcagtataatttaggattaggagtataacctatggactcaaatagaggcttaaagctgttttgtgccacatagtagctatgtaagttgaagcatgttataacgtctataaaacagggataataacagtgcctaccacacagagttgttctgaagctgttaaatgggatgttgcttacttt

SEQ ID NO: 899100 - DNA, 648 bp, Homo sapiens
tccagaggaaaagaacatccttatctctgaagacacagggtcacagagaggaacttgaacagacaggctttgctaagttctgccaagttattatcattaaatcataccccctttgtccaattacatttttccacgactctcccatttccatcaaacttagcataaaaatacatagtttggccgggcatggtggctcatgtgggtaatcccagcactttgggaagctgcggtgtgaggggtgtgagaatggcttgagcccaggagttagagaccagcctgggcaagatggtgaaacctcatgtctacaaattaaaacaaaaaaattaaaatcagccaggtaaggcagcgcagcctcagaaggctgaggtgagagggttacttgagtccaggaggttgaggctgcagtgaactatgatcactgcactccagtctaggtgacagagtgaggcactgtcagaaataaataaataaataaataaataaataaataaataaatgaatgatagaggacggttggatggatrgatagatagatagatagatagacagatagatagatagatagatagataggtttaactacttcttgggactttgtttccttatgaaggcttccatgtcacataaaactcaaccagggaccctaag

SEQ ID NO: 899101 - DNA, 648 bp, Homo sapiens
tccagaggaaaagaacatccttatctctgaagacacagggtcacagagaggaacttgaacagacaggctttgctaagttctgccaagttattatcattaaatcataccccctttgtccaattacatttttccacgactctcccatttccatcaaacttagcataaaaatacatagtttggccgggcatggtggctcatgtgggtaatcccagcactttgggaagctgcggtgtgaggggtgtgagaatggcttgagcccaggagttagagaccagcctgggcaagatggtgaaacctcatgtctacaaattaaaacaaaaaaattaaaatcagccaggtaaggcagcgcagcctcagaaggctgaggtgagagggttacttgagtccaggaggttgaggctgcagtgaactatgatcactgcactccagtctaggtgacagagtgaggcactgtcagaaataaataaataaataaataaataaataaataaataaatgaatgatagaggacggttggatggatggatagatagatagatagatagacagatagatagatagatagatagayaggtttaactacttcttgggactttgtttccttatgaaggcttccatgtcacataaaactcaaccagggaccctaag

SEQ ID NO: 899102 - DNA, 529 bp, Homo sapiens
gtacagataataaagaatggggtaaatacatagttttgaattatttttatatctattatacttttctataattcatggcctagtgattttctttcagtttaacctttcaacgcttatactacacttttttaaaaggaatgagttgtttgcttgctagacacaatacagaacattcatctgcatatttgaaaaagaaacaagttctttttttccccaaaaattgattttaaatgacttgtaattttttgaacagtgttaaactgattttcgatgtatttttctgcgcaaatgattaataaaatgttcgactgctaagcaatttttgtataaatacaaacgacaagttctcagttattttgataaaggtcatagggagtaagaggaatggggcaaatgacatgatgtgaacattttagaatacactattttatctttattaagcccataaacagcaaaataaggagttattttttttwaaaaaaaaggtaattcccatttgaaaataattaatctaacatgcatccagatc

SEQ ID NO: 899103 - DNA, 655 bp, Homo sapiens
tggtccaaatacatcttctccaaagctacttcctctccctgcacttccatgtctatggcagggttctatacgcttgtagggtgatgggctccctgactccagctctttctggctcctacyagcctgctcagctgtgctttcatcttgtcatttgcccacagaaaacctcccatgactcccactgcctttggaagagtaggcaaatcactgagtcttactcctgaaagttttctactgcctaactccaattttacttttaaatttttcctctatttaatttcttattatctcccaacactttgctctacccagttattccacttattctttagctgacacaccttatttgtccttcctttctatacttcactcttgttgctacagacccagcttaaaaacacctcctaaaagaagcattctagggcaatgtctggtgatttctagacttttctctttctctgaatttctgtcagacttactatgtaaaacactcatgtagcattccctaacttgtatttttataattcaaacaattatttgatgtagcatatgattatatatataataatatgaacagaataaagataaaaatcaagttaaaaatgacatagagaaagatatatttgaatcaagagccaagggtttcagtagccca

SEQ ID NO: 899104 - DNA, 587 bp, Homo sapiens
ttaacaatgtgctaatagcccataatgaagatggcagccatgagttaatcaacacattaagttgggatcagaagtgtcaactcaagtgcagtctactaatttactgacccttaatgggtcagcaagatctataacccataggctgatctttctacttctgttaaagtcattgtggaaggcaattcactttcttccatgattatgatctctgaactgatatggacaaggagtcaacataaaatccatttatgagaatgtgcttggggttactgagtaatgcgatctcaagctaactggtgagttaagtgtctgggtagaagctctttatgaaaccaccagctttgtgtttctcatgtccacaaaactgaaaatacacatgtgcaatcttcactgaaagcttctaactccactaagtcctgagttcttgagttagctaagactcgctacccactcycatttctattctgctctctgaagataaaccttactttttaaaatgtcaatgggtcaaaaagaactgagtagtgggatggtaaggtgatgggctatacctgccaaatagtaattgtgaaataagttttgcttta

SEQ ID NO: 899105 - DNA, 672 bp, Homo sapiens
cgatgacaaacccaacgagaagaattgcagggtcttgacaatgcttctccctgcatttggcgcaggtaatcaggaaacrtgaatttcctatttccagccaggcacttcttggaataggtgcaggatcatctacaggcgcagctgctgctgtacttgaggggtcccagaacccagacacatctctttgagcagccaaatgagtatcttcccaaccactaccacctcattcacttttttttcagcctgaaatattaaagtaagtccaaaatgtctttaaaattttaaacttaattataccccttggaatctatgctttggaaaactggtatttttttcctttaaataaaccaatatctggaatatgtacatacatacatgcatatgtatatattgaaatatgcttagaaaaccactttactatagcttgcagcctagtatgaaaaagaaaaatccactgttcactctttcatatgcttttaaaaagcttttcagaatatacctagtgagctgttgtctgttcagtgacgcatacgcttgtttgtgaagcaaatcttatttcttctcttaacagtaacctatgggtgcgtggagagatgaaaatgatttctacctttttatccttacattgtgtgctcttttaaaggtgaatcttgtaatgttctctattctaca

SEQ ID NO: 899106 - DNA, 577 bp, Homo sapiens
agtcaattacagacttcagagttgttaaataatatgtgtctctcttagtcaccactaatagactctaattaatcttatctggcatgaagatttgcttccggtttacctaccacaacttccaccctcctgtaaaccatcccttctacctgctttgcactcctctcccaatttatgtctttgttcagtcctctctggaatgttgctcccttttctctctaactgaccagatcctggtcatcctggaaaatccagtttaaatgtttgctctgcatgaggaagtgttctctgcttccctgcaatggcatactatcttttctgagtttgtcaccctactcagcactgtcctgggcaataatcacacagcgtgtacacgtctctccactcatcagtaagctccctgaggatggcagacaatgcgtcttttcattctttatggaaatctgcctcatctcacagggtaaagacgtaaaacacatgtaatgcatacattctttggacctarcaacttaatcgaatcattataacaatagttaatatttcaggatttttctaaagtctttaaaatataaagtaaaaa

SEQ ID NO: 899107 - DNA, 660 bp, Homo sapiens
ctcttattctgtggctagacagaaaattgatctaatgtatttagggggcaatttggcaatttctattaaacgtaaaactggggaatctatttgagcccaggattgactttctaggactccatgtacagctataccaatacacatgtgcaaaatagattttcagggatgagctgggcttcatcatttataaaacaaaaggtgagaaacaaaataagtgtgttcatcaacagggacattgtcaagtaagttatggccaggatttatgttctgtgaggaatgatcaaatattttgttttgtttagcaaattctataaaattcttgaacatcaaatcagggaataattttgactttgaatgtatagggagtcaattttattacagatgcaaaattttgggattcagatttttaaaactgtctttagaatacgtattgagttggatgtgaggaaagagaaaattaagtcctaaatcttgattttgtatttaagtaactacattgagaaaatgcaaagtttaactgcttcatactaaaattaacagaataagttattagatgatctaagtagctatatttttcttcctaatrttaacaattaaccatgataggagcaattcgtctacaaaggggaaggaaattaaatggctttgataatacatttt

SEQ ID NO: 899108 - DNA, 629 bp, Homo sapiens
tttgtatttcagtctgctactttgagataacacaaaaggtaatagcagttttccaatcaacacatgttctgtaatttctaacttatgtaaatgaaacgggtgtaaacatgtggttcgcagagatgggagaattcactaagttccagattccatgaagccagtagtttaataatagctcaagaaaaagttgacaaaatcaatgtaaattttaaaactctataatgtgttctaaagacacaagctgctgtttcacgtgctcttttcctatcagtgttcatttagtaagtaataggtgagtcacgagtctttgtaaatacaggacataaagataggacacagggcttaccccagtccatatgttgattccttccaccctacagatgatctagaagtgaatgcgctaccataaataaatcacaactcatcaactccaggaagcaagtgtggcctaccaccccatcaactcaagtttttgaaagcataatatatttatgtttataatcataaagcttatagcaatatgtttttgtatatacagtcccttttaatmgtcgccctttttatctttgaattgcctgcaatagtcatatcatgctcaataagaattatttgatgaaagctgccttact

SEQ ID NO: 899109 - DNA, 561 bp, Homo sapiens
tatccttcccaaccctgaacaccaagactttcaatcagatagaaaagaagaagccgcaatttttcagtatcrtttctcctcaccattccagtgttccgtaagagaaaatgtacagtcagccgatgcacgcttctgccttagaatactggtgatgaaaagcgtgggttgacatttctaaaatagcaataattactttaggcagcactttactttaagattctttccaatctagattctgaaagaaacactatttgtacaaaaagcacaaaaggcctaggaaagcaactgctgaacaacgtgcttaccacaagtgtgtgagctgatgcatctgtggaccctgataacacagaggagacccagaagctctgggctttccaggaagtgtccggaggagggtcaatgagagagcctactcttatagggagtctcagctgactgtgaaccctgcaggcctagtctttcacctagccctccaccaattatgcctggctgctcatctttcattttccaagacaagaacctggaataaaaaaaaagatgtgcattgcctttctttttcat

SEQ ID NO: 899110 - DNA, 605 bp, Homo sapiens
aaaattaaggaaaaggtctaggaggcaaaaaataaggaaatcaaaatgagatatgtcagtaggatttgaagtcacagtgaaccaggggaactcctgacayagatgcgtgacctatgtgctaggatctggcattttaacacctacatgaggatgagacatttgacttcagaccactaaagaaagggctcctgaagaaattcctgaatttccaacagctacattgtcctaaataaataaatactagcacaaaaaaaaaagaaaagatgcttttagccaagaaaaaaaggaaggaaaagaaatatgtcaactccttatggctttgagccaggggaaattcgcccatgaagtataaaattccaggtctataccacatacaggtattaagtctatatctatagtacttgaatcacatagtaaagccaagctaagaaatgaatagtaaaaacatatcattaaaaccctaggtcccagcaagaagcacactccaaaccattttgtaagaacattttacaacttaaagaaaacagacgtttaccaaataaacatcacctgctgaagttaagctcataattaaaactacaatctacataaggaaataaatattg

SEQ ID NO: 899111 - DNA, 580 bp, Homo sapiens
caaattacaagaaacatggaggacgcagaagttaaataacaccacaaggaatcaaataggcaaatcaggaaggacaaaaatctctaacagatttctctaacaaatcaatggcattaaataagaagaaaatgaagagaatttaaaagacttaagggccaggcccagtggcttacgcctgtaatcccaacactttgagaggtcgaagtgggacaattgcttgatctaggagttcaagaccagcctgggtaacatagtgagaccgcatctctacaaaaactgtaaattagccagatgtggtggcatgcacctgtggtcctagcaactgggaaggctgaggtaggacaattgcttgagttcaggaggtcaaggctgcatagagccatggttgtgccacagcacttcagactgggtgacagagcaagatcctgtttcaaaaaaaaaaaaagacaaaagataaaaaatgcaatatgtagatattgtttggatccygatttgaacaaattaactgtaaaatgacattcctgaaagcagtattgaaattcaaatatggtattagatgattttaagaatttatttttaa

SEQ ID NO: 899112 - DNA, 627 bp, Homo sapiens
ccttttattactatgcttagtcatttttaaaaacttctcaattaatctttayaatttcagagttttttcaacaattaaaatgttttcaattgaatttttttttcaacaattaaaatcctttggctccctatgcttttctttctttagacatgctgtttgcactttcaggctgtcctgctgcacaaatgttaatatgtaatcagtcattcactaagtagatatggatgttggacactgacaatgcaaaggcagggtaccatataacatttgagattcaaacacagatgttgaaattggaaagtcagacctggtttagaatctctctgctagctggaagatcacatttataaaagaaggatgagaacagtaagtaactcatagacctcttgcaaggtttaagtgagagaattcatgtaaagtgcttatcataagcttacaacatagtaaaagctccataaacattaaatataaatagtatattaaatattactcatataaatattaatattaaagatgatagacaattttaaactttctctccatgcctactctttctcctgagctttgttaccaggcatgtttctacctgatgctattccagtgactaccatcaatgaatccagaaca

SEQ ID NO: 899113 - DNA, 645 bp, Homo sapiens
tagtcaatttggctcgtgacaccacagagatgtgactttagtcaatcctggaggtggtcttcatgtattactttattctgtaagattcccaggtgcattcagacttcccatattttatatcaatttcaatgtaggacactatttgaagatggttggattacaataaacttcaatccaaaatttcattccagagagaaagatgtgttcctgtttagcagagatatttagtacttagatcaaaaatgatatatccagccttctttttcaacaaataagaaggagcaacatataaaggcaaaaacttggctaagccctgtgttgcctacatctcacgttaggtctctgccaaatcttgctcttctgctctagacactgactgttttagaaaataatcatgctcagaaaaatgtgttctaattagaattattcaaggaccattttagattaatgggaacaataaaatgtaaccatttcacaataatgaaactaagctgagaactgtatagtcctaacgtttgtgtactgaaatacacattgtttatagcaaatatasggctttagaagatcttattaatatttttaggcccatgaggcggtaatggagtacagaaatctggattcatctcatattaaaattgcaaggtt

SEQ ID NO: 899114 - DNA, 606 bp, Homo sapiens
attacagccagtactatctgctcattttyttgtgtgttatttgagattaccctgtaaggatgcagcatgaaaatggaacttgacttgcccaatcttactggtgctgagaaagcaacttattggtattgtgatcaggaagtgattgtagacaccttaatcactaaagcactacttatgtgattctctgtgatgttttcacagccattcaaatgaagtttcattgaaagttattgagaatgtgaaaagtattctgcaaaaagaaatattttaaaatcgtatttcttaagtggcatatcaagatcaatgtattagatagctcttttagactagatttttgtctagagcaacttacatagattaactctcaaaactagaaattattcatcctcttactgatgacattactatattaggccagtctcacattgctataaagaagtacctgagtctgggtaattcataaagaaaagaagtttaattggctcatgggtctgcaggctgtacaggaagcatagtgacatctgcttctggggaggcctcaggaagcttccagtcatggcagaaggcaaagcgggagcaggcacatcacatgatgaaagaggagca

SEQ ID NO: 899115 - DNA, 645 bp, Homo sapiens
gttgggaggctgaggcaggagaatggcctcaacctgggaggcagagcttgcagtgagctgagattgggccacygcactccaatctgggcgacagagcgacactccatctcaaaaaaacaaaaaaaaaaaaaaaaaaaaaagaagaggggcctgaatattagaaggaaaactaacaaacagaaagcaataacatcaacatcaacaaaaaggatgcccaggcaaaaaccccaaccaaaggtcaccaacgtcaaagaccaaaggtagataaatccacgaagatgaggaaaaaccagcgcaaaaatgctgaaaattccaaagatcagaatgctacttcttctccaaagtcacagttcctcaccagcaagggaacaaaacaggatggagaatgactttgacgaactgacagaagtaggcttcagaagccactgggtaataacaaactcctccaagctaaaggagcatattctaacccaatgcagggaagctaagaaccttgataaaaggttacaggaacggttaacttgaataaccagtttagagaagaacacaaatgacctgatggagctgaaaaacacagcacgagaactttgtgaggcatacaagagtatcaatagcctaattgatcaagtggaagaaaggatatca

SEQ ID NO: 899116 - DNA, 681 bp, Homo sapiens
ggaagatttctgactggctgcaatgggaacaacacaaaatataatgaggaattccttagtatggcaatccttgcaaaagaagaaaataaagaaaacaaaaccyatgatcctctctgtaggcagcgcactcaccaggagacaggaaagctagaagcaccgctagggcccactgcatgccttcctctctgaggccttggaaggaaagggaccagatgaagaggagcagaagatcctcttaaaactcaggccccactcaacaaggaagtgatccctagcacagaagacagtaggaggagctggtcttcctgagacacaagcagagagaagtgactgaggatctgtctaagaggactcccaagccttcctccctcccagaaggattggtgcctgggaggacctgcagaggagctcctgcctctcttgctcaggtccgttctccggcgccctcttgtggcagctgagagcaggccctctgcagaagagagccaggggccaggagagctcaggcctgcagcagagggaatgcagatgtagcggaagctgaccctggagtcagcaggcccagccctaggagggggcagtcccacagcaggctcacaccctgcccttcagagttgcagcagctaatgctgatgccaggaccttgtcctgccaggaagtctctgattagggaactgaacc

SEQ ID NO: 899117 - DNA, 681 bp, Homo sapiens
ggaagatttctgactggctgcaatgggaacaacacaaaatataatgaggaattccttagtatggcaatccttgcaaaagaagaaaataaagaaaacaaaacccrtgatcctctctgtaggcagcgcactcaccaggagacaggaaagctagaagcaccgctagggcccactgcatgccttcctctctgaggccttggaaggaaagggaccagatgaagaggagcagaagatcctcttaaaactcaggccccactcaacaaggaagtgatccctagcacagaagacagtaggaggagctggtcttcctgagacacaagcagagagaagtgactgaggatctgtctaagaggactcccaagccttcctccctcccagaaggattggtgcctgggaggacctgcagaggagctcctgcctctcttgctcaggtccgttctccggcgccctcttgtggcagctgagagcaggccctctgcagaagagagccaggggccaggagagctcaggcctgcagcagagggaatgcagatgtagcggaagctgaccctggagtcagcaggcccagccctaggagggggcagtcccacagcaggctcacaccctgcccttcagagttgcagcagctaatgctgatgccaggaccttgtcctgccaggaagtctctgattagggaactgaacc

SEQ ID NO: 899118 - DNA, 586 bp, Homo sapiens
gtaagatcgaagccagatgagaagccaagagatgttttaaaacatgagccaaagaaatataacatcatatattttataaaatgcaaagatatcttaaaatgcaaaaaatatttgcaccagagtctgggtttcttagaagtctgaagaaattctgacattttttataaggcaagaataaatagctagggtgattttataaatgagcccaattgcatttgcttgttgaaatttgacagtgcagctgtggtctagtataaagagaacataggattgcttatgttccccacaagtcacaagatgtttcacatacgacaataacacatgaaattttacaatatggcattacaacttaacctaaattccaggaggatagtatagctcactaaatgatgagtaacaatgaagcatggttatatataaaatcagctacccaaatttagaaatagaggccacctttctattccaagataatgtaaaattstaagtattttgtcaagaaagagggaaaagcaaagataaaatgtgagcaaccgcttgtggagagatttaatatagtcctgtgggaattgtgccctaccttcactgt

SEQ ID NO: 899119 - DNA, 586 bp, Homo sapiens
gtaagatcgaagccagatgagaagccaagagatgttttaaaacatgagccaaagaaatataacatcatatattttataaaatgcaaagatatcttaaaatgcaaaaaatatttgcaccagagtctgggtttcttagaagtctgaagaaattctgacattttttataaggcaagaataaatagctagggtgattttataaatgagcccaattgcatttgcttgttgaaatttgacagtgcagctgtggtctagtataaagagaacataggattgcttatgttccccacaagtcacaagatgtttcacatacgacaataacacatgaaattttacaatatggcattacaacttaacctaaattccaggaggatagtatagctcactaaatgatgagtaacaatgaagcatggttatatataaaatcagctacccaaatttagaaatagaggccacctttctattccaagataatgtaaaattctaagtattttgtcaagaaagagggaaaagcaaagataaaatgtsagcaaccgcttgtggagagatttaatatagtcctgtgggaattgtgccctaccttcactgt

SEQ ID NO: 899120 - DNA, 329 bp, Homo sapiens
agtcaagtgggtcatacagctgctccatctccacacaagcagcaatggcaactccagcctccggcgcaggctttgggggcagttgttcatttccacctggaaaggctggccccggggcatgctcactctcttcagctacagtgggccagtcagcagacgaaagcaggctggtggataatcttatgtcttgctctgtttcggagggacatgcagagtcttctccaaacccacctgaggtaacttcttggctgamcctgtctgtactagcgtcagggccccaagtaaatgcacctatatcattttgagatctttgaatttcttcggccaac

SEQ ID NO: 899121 - DNA, 508 bp, Homo sapiens
atatatgtatacatatgggggtggcgtaggaggggctagaaacaccatgctaatgaacccactgtcacctggtaattgtatagctcaattgcaggaaaaccatctaaagaaacacactatctcaaatgacaaggtaacctagtaaaacacataaaagcctttcccccactcactaatgccaaacccatgacccacaacggatgtgtaatatgtgttggtacacatgtcattatacagagcgataagttatatatccagatttttcctagcactcccacttgccaattctgtgcttccttttaaggctaacctaatttatatcagctgaattaagcatgtctttttattctgatgctttgacagctggggccttgctgaccctggagagactgcccctcccagggctgggccaattcctagagayagtgaaggatgtctgtctttcatatgcaaaccaaccaatccagatcccaggccccaatcacctcctttattgggctctcactgg

SEQ ID NO: 899122 - DNA, 563 bp, Homo sapiens
acaactcagcccataacattccacacacrtgtgagtatgtgtgtgtttgtactcatgcatgaaatatatttttagcttttttataggttttagcaagattgtgctattctaagtgttactcaataagttattcagcaattatttatcaagtatctaccacgtcccaagcctagttctggtatattagagatagtttagtttcatgagctcttcttggtcacaattggactcagttcaacattgatgtggtcaggaacttcaagcattctctccactctactctcctccgtgcatctcaggaaaaggtcatagggatctcttagacttcccgtaagttctgcatggagtccaacagagctgagcacatggagtgaagaaaacctgaacgaaactgaattctgcaatacattgagttctaccaacttaagagtcggttcatcacaaattaccccaagtagggattacctatgtagcaagttatttctgataatgctgcattttcattggcagcaatctaattaatgcaaggtatgcgaaaggagtatggaaggattaataaggta

SEQ ID NO: 899123 - DNA, 563 bp, Homo sapiens
acaactcagcccataacattccacacacatgtgrgtatgtgtgtgtttgtactcatgcatgaaatatatttttagcttttttataggttttagcaagattgtgctattctaagtgttactcaataagttattcagcaattatttatcaagtatctaccacgtcccaagcctagttctggtatattagagatagtttagtttcatgagctcttcttggtcacaattggactcagttcaacattgatgtggtcaggaacttcaagcattctctccactctactctcctccgtgcatctcaggaaaaggtcatagggatctcttagacttcccgtaagttctgcatggagtccaacagagctgagcacatggagtgaagaaaacctgaacgaaactgaattctgcaatacattgagttctaccaacttaagagtcggttcatcacaaattaccccaagtagggattacctatgtagcaagttatttctgataatgctgcattttcattggcagcaatctaattaatgcaaggtatgcgaaaggagtatggaaggattaataaggta

SEQ ID NO: 899124 - DNA, 577 bp, Homo sapiens
ttaggctgtacttaaaatatgtaaggaaggatgcttcgttctcatggctaacgttggggcacagaggccaatatttcaaagtaaggtggtttgacattccgagtacttctttttgtaraaatgaagtcccactgttgctcatgctggtcttgaactcctggcttcaagccatccttcctgcctcagcctcccaaagtgctaggattacaggagtgggccacagcacccacctctgagcaattttgaataaaaggaaattggaagaccttcgaagctgcctcaaaccaacaactttctttctcttggtgtccctccatttccccaagttcaggaaggggaactgtctaaccgttcccttatctgactgatgaaaacttcttccaaaagaaatgaaattctcttaagttcccctgcttaggaatctcattaaataatctcatagaataagacagataaaagtcatcaccacacccagagagacttttaatttattcttcctagagcagttccaagagattacttgaggctttatcttcataataagacaacttttgttcacagtgcagttctacccctt

SEQ ID NO: 899125 - DNA, 643 bp, Homo sapiens
aggaacacataatttaccagaagcaaatatctgaaataagtagaattttccaaatatacattcaatagaagaaaaatatgtgtaggaaagactgagagatgactacatgaaatttaaaactttctttacatcaaaataaaccaaagtaaaaagatgacaaaaatatttgtatcacatatgaacttaaatgtgttaattccttagttttaaaaagccaatgaattaaaactacaaacatcttaatttgaggggaaaaaaaaaagcacattatgcgggcaacaattttccagaaggaaaatccaggtaaatatcatcataataaagagatagtggatgagaaatttcaaccaatttttgcaaaatagagagtgagtgaaagagtggttactgatgaaagagcaaagggggagcctgaacctagaaagtacagaacaggctgactgatctgccctactgagccccagagagaagctggcctccaaaaccccatgaatgacacatgggactctaaagacaggggttcatagacagagtgtacrtggaattcagtcactgttgtctctctccacccccatctcaccctctccttcatacacatacgcatgcaagcagaatcctcagaagtcaagcttttatttcccaa

SEQ ID NO: 899126 - DNA, 721 bp, Homo sapiens
caggaggctgaggtgggagcattctttgattccagggaggttgaggccacagtgagtcatgatcttgccactgcactccagcctaggcaccaaagtgaaatcctgtctcaaacaaasaaagaaataaacaaaatcccccaaaactgaagtctagcattcatgaaaagaaggccaacccacaaaaggaaaatgagcacccccccaaaaaatatggagaattcaagaaaaggaactattaatggatcttatatataagatgcttggctttatcataataaaagaaataaaaatttaaattataacacaatgccactttcactaacatattggcaaagatcaaagcatttgatgacacatatgaattgataaggctatagaaaagcaagtactcataaataactgtgggagagtgaactggtacaacttctcaagagggcaattttgcagtatcaataaaaattactcttgaatgtatacattggtcaaaacttatacacactaaaaagagtaaaatttatgtaaatcatatcttaattttttaaaatgagaaaagttagtattagtcttctcaaaataaactttatgttacctttagagagaatgaggttgatctatagttactggtgtgcaataaactctaagatatattaagtgaaaacaataaaatcaactatttgaacccaagtttctttattctcttttcatgttactgtgcttcctt

SEQ ID NO: 899127 - DNA, 721 bp, Homo sapiens
caggaggctgaggtgggagcattctttgattccagggaggttgaggccacagtgagtcatgatcttgccactgcactccagcctaggcaccaaagtgaaatcctgtctcaaacaaagaaagaaataaacaaaatyccccaaaactgaagtctagcattcatgaaaagaaggccaacccacaaaaggaaaatgagcacccccccaaaaaatatggagaattcaagaaaaggaactattaatggatcttatatataagatgcttggctttatcataataaaagaaataaaaatttaaattataacacaatgccactttcactaacatattggcaaagatcaaagcatttgatgacacatatgaattgataaggctatagaaaagcaagtactcataaataactgtgggagagtgaactggtacaacttctcaagagggcaattttgcagtatcaataaaaattactcttgaatgtatacattggtcaaaacttatacacactaaaaagagtaaaatttatgtaaatcatatcttaattttttaaaatgagaaaagttagtattagtcttctcaaaataaactttatgttacctttagagagaatgaggttgatctatagttactggtgtgcaataaactctaagatatattaagtgaaaacaataaaatcaactatttgaacccaagtttctttattctcttttcatgttactgtgcttcctt

SEQ ID NO: 899128 - DNA, 569 bp, Homo sapiens
gaatgtgttatcaacagacctgttctacaggaaatgctaaaggaagttctttgggctaaagagaaatgacaccggagtgcacgttaaacttcagaaacagaggaagagcagcagaaatgattaatatccatgtaaataaagtagaatctatttcttgtcttagtttctttaaatgatatttgttaaaatttaaaaaatcagcataatacagtagaaaaacataggtgttggagtccgagtgacctgagtatttaccactttcttgcaaggtaactttggaccagttactgaaactcctagaagtctctttttctgtaaaatagagatgtttgtgtccatcctttagaactattagaagaatgacttacaatgtatgtgaagtgtgtggcatataataagaaaccaataaaaggcatttctttttttctttttctctttgagacagagtcttgctctgtcatacaggctggagtgcagtcatgtaatcrcagctcactgcagcctcaagctcctgggttcaaacaatcctcctgccaccttcacccaaagtgcagggattataggcatga

SEQ ID NO: 899129 - DNA, 652 bp, Homo sapiens
ggagagactcactttatgttgagtacatacacgtgaaatatttattttgtgtattagtttgggttctctgagacgcagatgccaggatgggattaaatgtgtgagagatttaatgaggaagtrcttgtcaaggctgaaggggacagagctggagaaggcagagtgagtcttcagaccatgccataagtctgaccttgtgaaagagagggggaaagaaggaaggctggatagaaagaatctccactgcaacacagatataagaaagatccagccaggccaatggtgagtctctctactccccctcaccccatttctgtctctgtctctttccttgaatctgtgtttgaaattttagattgtttatgacctcaagaagtaggcattgttattattaaagccaccattaagtacagaagtactctgtttcaaaagccatcacaaaggaaataaatatctcattctgccataagactcaatcttgagtcttaacaggatctcaaagtggttgagtgagaaataaaagccactaacattcattgagtagttataggtgtcatgttctgtcccaggttctccacatgacttaactcacttgctcctcacaataattctgtccgataggtcctaaactgccgccatttaaagataaagc

SEQ ID NO: 899130 - DNA, 604 bp, Homo sapiens
taaggctcactgtatgaggctgagacggaagtaaataaagcattcgcccacactgactgcataatacatagtgacttattgttttctaagcttttacaggtacattatctcatttgatcctcacaatgacctcataataaacatgctgttggtttattatccccatttaacagacatggaatggtgaactcagagtaatcagtgattttcccaaagtcacacagcaatccaagaggtactttaaatcttccccacctctttcccctccagaagaggaaacatttcttaagtaccaaacaatataattagtaccattaccaaaactggaatagtagaaatatttaattcattcaaatgtgcctctggtgattttgtaaatactgaggtattcatttcctacctactgcaaatctgtgaattctaccctggacaaaaggtcatccaaacatgatccttgttcagagttatggaaatgtatgcagcytaaaagaaaatgggccaaatgcagggtaaaaatatccatgtaactcccagtgccatttactcttgctgcctcaaatccttttcgaaattaggcaggttataaatcataaaaaaagtatat

SEQ ID NO: 899131 - DNA, 568 bp, Homo sapiens
taaaccaaactggtaaaaattcagaactgaaagctgctgtayaccgtgcacttcagttccctaagttagtgcttctaaccttagagatcacattcttttattcgagaatactggactaaaatgctatcttatgtatcatctgaacaattaaactgtaacataaatttaacggttcttcataagcatgctttttctaaaggaaaatactgaaataattgataaaaagtttttctccttaaaaactgtacaaaattcaagaaaatctatgaggaccagaattctatctttaacatgagctaaacattaaaaagtcaagagaaaactagaaaaaggaatattttgcttcaaaaagagggggagatttcatatttttctatcagttataaaggccgaggtacattcctaaaaaccaactgcgagcacatgaattctgtcttctttgttttgagtaactccatattgtttttttgggtcatatgaacaatatgctccctaaaataacaactgctcctgtccataatatcatattcacttctagagtacccatatgacaatcaaatatttcttt

SEQ ID NO: 899132 - DNA, 630 bp, Homo sapiens
aacttttatgcatctctagtcttcagtgtgttttgttcactccaccttggggaatttctcttagctgcacctgaccataagaccagctycactgcaaattactggcttcttttttcttgtccagcctcctaccccttcttctcatcctctcctctgttcaaattcctctgtcaattatgctgtgtcattcaacactccccaattaagaaaacaaaacccttccccagctcacctttgttcgatgaaacccaacaaagtcttcagtaaggccatgcagttgcttccctccttggagggcaattgccttagctaatgaaagtttgttcatttgtttttcattttgttacacacaaaccaagtatcttggtttggtataggaccaaagggctgcattggtcatattgaggttctgtgaaaggcactccctggagtggggccgggctgagttctatggccatttgcagccaccttgaaggcaactaaggagcaagaagaaaactagttgctactgtagttgacaactgtggggagaaacatttaaggcataggacacaatttcgcttaggtgaaattgtgggaagagaaaggaatccaagaaagggtgaagaaataaaacaagaaaaaaaagag

SEQ ID NO: 899133 - DNA, 624 bp, Homo sapiens
tattcctattgatgcccttttacttgcttcatgtatttggatgttgaacccaggtctcctactcagattctttgcctgcttcctttgatttatgctaactcattcagatctcactgttgctgtcggtattcacaggattcacacaccttcagttccatagctccccagggatcccctggctgtgatatttgccagcgtgcagcagcatcaaccacagcaaaagtgccttggcctggcttttcctgggtcacttgaacttaaggcctctgaagccttagtactgaacatccacatgctcttcattctcacgaagcagcatgctctatttttgctgtatctaggtaccactgttatctacaactccatggtggtgctatgggaagctttctcacaactcccaggttagattacttgagaaataaaattttttatctcagctttttagtttcaaggggtatatgtgcaggtttgttacctgggtatattgtgtgatgytaaggttttgagtatggttgcccacacacggtacccagtagtttttcaacccttcctccaccagtagtccccagtgtctattgttgctatctttatgtccatgaataaccattgtttactcccacttat

SEQ ID NO: 899134 - DNA, 644 bp, Homo sapiens
tttcaaggggtatatgtgcaggtttgttacctgggtatattgtgtgatgctaaggttttgagtatggttgcccacacacggtacccagtagtttttcaacccttcctccaccagtagtccccagtgtcyattgttgctatctttatgtccatgaataaccattgtttactcccacttataggtgaaaataatggggtatttggttttctgttcctatgtttattcacttaggatgttcgtctctagctccatttagttccaaaggataagatttagttgttcttttatatggctgcataatattccatggtatatatgtaccacattttctttatccaatccaatgttgatggacacctagggttgattccatgtctttgctattgtgaatagtgctgcaatgaacttacagtgtgtgtgtttttggtagaatgatttattttcttttggatatataaccagtagtgggattgctgggtcgaatggtaactgttttaagttctttgagaaatctccaaactgctttccacagtggctgaattaatttacattctcatcaacagtgcataagtgtttccttttctccacaatctcaccagcttcagtttgactttttaataatagccattatgactggtgtgaga

SEQ ID NO: 899135 - DNA, 608 bp, Homo sapiens
tttattcatcccataaatatttgttaagcacttactatatgctaggcactgttccaggaaccaaagatttgacgactaaagagagagaaatagagaaagagaaaaggaaaaccaggagaattatatgkgaaaaactattacaaaggtttatacctacataaaggaaatggagtgattaggctgggttctccagacattttatgagatgagtttcattctgctttcttgagcctagggatgaagtgctgacagtaagattccagagcagaagaaaacacactgggaagcatagaagggtaatagcaactgaccagagatccagcagatacatttgacaacaatcagcaggtcctgatattctaattaaagtcacagggtcagtggagcttctgggacttcctgaagcatcaagaaaactcttgagaattagggaagagtagagatagcaaaagaactgtattttatatcatacagtttctgttaactgtgtgatataaaacaacaccatttcaggaaagggaggaatatactacctgttcaagaggagaggattaggatgagaatgaaagagcaacaacagctacttcaaaggtgatggggaatttgga

SEQ ID NO: 899136 - DNA, 543 bp, Homo sapiens
tgctcatgcgtcagaagaatattgttaaaataaccatactaccaaaagcaatctacagatccaatgcaatccctatcaaaatactaatgtcatttttcacagaaatagaaaaaacaatccaaaaatttatatggaagctgaaaagagccagaatagccaaagcaatcctgagtagaaagaacaaagctggaggcatcacaccacctgacttcaaaatatgttacaagactctagtaaccaaaattgcatggtactagtataaaaacagacacataggccagtggaaagaaacagaggccccatacataaattcacatagttacaacaaactgatttttttttataaaggtgccaagaacatattgggaaaaggacactctcttcaataaatactgctgggaaaactgaatatcaacatgcagaagaatgaaaccsgatccctatctcaccatatgtaaaaatcaagtgaagatggattaaaggtaaatgtaaaacccaaaactataaatctattagaagaaaacatagtgggaccaggtgcag

SEQ ID NO: 899137 - DNA, 534 bp, Homo sapiens
agtggcagaaccagaatttgaattgactaccaagatgcttcaggttgaaatcaagtaacacttcatgcaaactgtgagactcattttttgttttaacttgtaagttcagtggtacatatgcaggtttgtttcattggtaaacttgtgtcatgtaagtttgtgagactcattttttaacatgacaaaagacacaaagcgttttttatgttgactcctcattctaaacaatttaaggagttctcttttgaaccacctttggagctagttctcaatgtaagaaaatcactcatcttgctgttgttccctattttatacactaaaaagtactatccagtttgatctgccctttcacctactgttcttacttctaaatgatttttgaccgcggatttgatttcaggaaaaaaatagttttcatcagtgagcaygttcaaaagcatatgcctcagattctacaggtagcttcaggaaaggaatttcaaagacaattaagcaataatagcatcctaaaaaaattattgtttggaagagatt

SEQ ID NO: 899138 - DNA, 440 bp, Homo sapiens
ctgataaagagctggagatagagatctagatttttcatgaaattgcattttaatatccataagtatttcagcttcaaatcatttaaatagcattttgttcattcatcttattgaaaatattagctttgtcttactttttgattttacagttattttcgtttattatactaatgctgtatattccacgctacaaacgactctttcatgggaattagcaaagcaatcatgttctaaattttttttctaaatcaaaagaacttcacactaaattagccataccctggtcatttctgacagaccatgtgtctagcaggtaaatgtgttctcagtggaactatctaccaagaamaggagactccacttgaatgtcttagtccctaatctcccattctgtgcactgggaccgatgagcccacagtggagtgagattctcagcctgt

SEQ ID NO: 899139 - DNA, 577 bp, Homo sapiens
catctccacatccctgtctccccaaccactccagcctgtggtgaccgccattctattttctacttctctgtgatcaacttttttagattccacattcgaatgacatcatatggtatwtgttcttccatgcctggcttacttaacataatgtcttacaggttcatccatgttgtcacaaatgacaggacttccttcttttttatatgtatcttggctattgtgaatagtgctgcaataaacatgggagggcaggatatctcttcaacatactgatttcatctcttttggatatatacccagtagtaggattgctggatccactctccatcttgaacattttcagccacactggcctccccgcaggctcttgagcacaccaggcatgctcctaccttaacatccttgaacttgctcctctctgcttggaattctcctttcccttagtatttatctccatataacagactacatattttattcatatgcttctttattagctattttaccctctagaatctagacttcaaagacaaagatctttgggttttctactactatatcttcacattttagaata

SEQ ID NO: 899140 - DNA, 580 bp, Homo sapiens
tttcttgttttctctttctctctttttttaacagaaactcttaagctcaaggctaaattacagtggggacttgcctttgtctacagtccatggtttctgtattggctcaagccttgaaatcttgaaacaagcctaaattaaaattttctcttagcttaagaaaaaaagttacatattgtcaagacccttatgtgtgtggtccattaaaaaggtcttgatattagaagataacagcaaattgtttcttatcccacaacagctttgcctttcagtgtcctttgtggtggttttcgtaggtcagtggtacaattcaacactcttccaataagccataataataattgttggcacaactgttattacaacaggacttgcctgggttccatctattaatttttacagacagtaggaagctcacaccgaggagacattggtaacttcctggacaagrgcaaagaaaggaactagcatattgtacatactgtgtacgtgcacagaacactggtctgtgcctttggagtgttctcagaggggcaggccagaagggaggattcaggtaggaaatgaatctaggacttct

SEQ ID NO: 899141 - DNA, 659 bp, Homo sapiens
aaacatttaaagaattaatgccaatcccactcaaactattccaaaaaatagaggaggggaaaatactttcaaactatttttatgaggccagcattatcctgataacaaaatcagacaaagacacatcaaaaagggaaatacagaccaatatctctgatgagcattgaagcaaaaatcctcaacaaaatactagtggatcaaattcaacaacacatgaagatcattcatcacagccaagtgggaactatccttgggatgcataaatggtccaacatatgcaaatcaattattgtgataaatcataccaacagaatgaaggaaaaaaaactatatgatcatttcaattgatgctaaaaaagcatttgataaaatataacatcctttcatgataaataccctcaaaaaactggggataggaggaacatacttccacagaataagagacatgtatgacagatgcacagctagaatactaccataagaaaaattgaaagcctttcatcgaagacatgaaacacaacaaggatgcccactttcrccactgttattcaacataatactgatatcctagctggagcaatcagtcatgagaaagaaataaagggcattcaaattggaaaggaaaaagtcaacttattgttatctacagatgatatgat

SEQ ID NO: 899142 - DNA, 614 bp, Homo sapiens
ttgacctgctagaggcccattgtgaaggatgagataaattgaggtaggggtgaaggactagcagggaatttgggagccacatttgagcttcttctaagcagtggtaaattcttctgacttgtaacatacaatctggagaccactactagggtttttctttatttcttctcctaatatatttaaagacagggctacttatctgagccaaacagctcttgcaaggaaaggagagccatggtttcataaaaatgccacatgggtgacaaagagagaaaagaaggaagataacagcaaggttattcagtggagattgccagttattcacagtccaaatgtgagcttgcccatgttagttctgtggggtgggtggctacatcaagatgccaggcagaggtgtggccagatgaaggccattatttatgggggcaagaaagcaaaagattagtttcaaattcttgccattatccttcaatctcccacctccaccacatacacaagcakctcacacacacacacacacacacacacacacacacactcacaaaagctcaatattttgcctttggaattcacagaattccatgtcaaccttgccctgtgtgctcataaaaaca

SEQ ID NO: 899143 - DNA, 614 bp, Homo sapiens
ttgacctgctagaggcccattgtgaaggatgagataaattgaggtaggggtgaaggactagcagggaatttgggagccacatttgagcttcttctaagcagtggtaaattcttctgacttgtaacatacaatctggagaccactactagggtttttctttatttcttctcctaatatatttaaagacagggctacttatctgagccaaacagctcttgcaaggaaaggagagccatggtttcataaaaatgccacatgggtgacaaagagagaaaagaaggaagataacagcaaggttattcagtggagattgccagttattcacagtccaaatgtgagcttgcccatgttagttctgtggggtgggtggctacatcaagatgccaggcagaggtgtggccagatgaaggccattatttatgggggcaagaaagcaaaagattagtttcaaattcttgccattatccttcaatctcccacctccaccacatacacaagcatcwcacacacacacacacacacacacacacacacacactcacaaaagctcaatattttgcctttggaattcacagaattccatgtcaaccttgccctgtgtgctcataaaaaca

SEQ ID NO: 899144 - DNA, 638 bp, Homo sapiens
tcttctaagtttgcctgctcttggttctgtctgctctcgggatgcacacattatctgctcccagccaagtggaacgctccctggggaagattcatggagaatgagttagcagagctctagcagtggctgggtgcatgagactttctgattcaggaggaaagtatctggaagtccacagagagcagaaataaaaagccactttctcaaatcacctccctcagtcgtgatgctaatattttttatcttcatctttctgcctcctgtgtctccattcctcagatggctttgaacccaggaagaaaatatatggattgtatattgtttttctattattgccaaaacaggtaaccacagccttagtgacttataaaaatacattgtttcattttatagttctgtaggtcacagcttccgggaattatgacatggacatcttaaggggctgttattccacctaacacaggttataggctgtctgataccccatgaaggctcagtgcttcctaccttgggagraaccggcaggaagcagttagctgcacaaacccaatccgtcctgattttgttccaaaagcctaaatccactgtggagatttgctatgtgacttgggagatttaaagagaaggagtgcaggaag

SEQ ID NO: 899145 - DNA, 621 bp, Homo sapiens
atgtagtggctcattaacattctctcaatatgagctgtctatgagctatcgtttccacaatttcctggtacaaagagaatttatgttcataatgatgaagctgaagctctgattgcatgatccccaaggtactttgtgcttttatcaaagaaaaattgtttgttcattgtagtgtctatctgtggacaaatacctttcagttaaacagaatatttttagtaacagtgaaccccaaatgtgtcacacagtctgaaatacctaggactttatctctgatgttactaaagacatcaactaccacacctggcactggtagcagcaccatccctttgccccatgcctagtgtgtagctcaagtctttgggcttgacatcctgaacccaaggaaagaggctgagtggaggagagtggagttcatcatagcttagactgtaaagtcagacacaagtctgaaacgttggttttcacatttcaactagctcattacagcctagtaggtacckgaccaataaaaataaggatgatttccacagcctttttaaatactcagaaaagagtcttaagcacttgatgggacttaaaaatcccagaaagtgattctcatccctcacagaatatgaa

SEQ ID NO: 899146 - DNA, 584 bp, Homo sapiens
acaagtgtcaaaaagaaagcaaaaatcacaattaaggatggcaaagagaactctatattytgttattcctactttttggtgggggtagggctgtttgagtcattgatttcccaaccaaaatgcttgtaggaatttttaaaaatttatccttgtattagggatttccagagaaacagaatcaatagcatgtatgtgtgtgtataaatatgcagggataaagagatttattttaaagaattggtttacatgagcatggcagctgttaagtccaaattctgcagcgcgaactggcaggcagaaggcccagagaagagctgtagcttaaatccaaaagcagtctgctgacaaaattctctccttttagcaggaggtcaatcttttttcttaaggccttcaactgactggataaggtacagccacattatggatggtaatctgctttactcagagtcccatccaaaaaatacctgcgtagaaacacctgtgatgtttgaccaaagatccaggtactatggcccacccaagttgacacatgaaattaaccatatcaattcttataattcaaaacacttgcctgtatgttc

SEQ ID NO: 899147 - DNA, 602 bp, Homo sapiens
catgtgcacttttctaaagcatgaacattgcacaggccaggaaagttctctcacggaactttcttccaagccatcattgattaaagtttttagtaattgggctgccaccctgtgccagagactatctgtgccccctgtgccacccagaatgggatcctcatcaccagcttgcaggaagtgatctgctcccaaaacctcattttacctcctgctttctcagaccaattccagtaccaactgtatcagttcagttattctgggaagcagatgctgagacagcgttaggagtgcaagtggttcattgaaagataacatctgtgaaagataaagggggagagccccagactgtgctacagagctgacaaaatcttggccaaaccaatggggagctctagagcaaagactgcctgttagagggacccacattaggcatagaagccaggctctagcaccactgccatgctcagccctgggctgtgggcttcccggraagagtagagccttggttaaaacactgtgacagttcctgcaggtgctgcagatggaggctggcagctaactgcctcctgacagttacacagaaagctgtttcctggagggag

SEQ ID NO: 899148 - DNA, 667 bp, Homo sapiens
cctttgttttggccaatttctcccatttggaatggctgtatttacccaatayttgtatctgcattgtatctaggaagtaactagcttgcttttgattttacaggctcataggttgaagggacttgccttgtctcagatgagactttggactgtggacttttgagttaatgctgaaatgagttaagactttgggagactgttggggaggcatgattggttttgaaacataaggacatgagatttgggaggagccagggtggaatgatatggtttggctgtgtccccacccaaatcttgagttcccacatgttgtgggagggactcagtgggaggaaattgaatcatgggagcaggtctttcctgtgctgttctcatgatagtgaataagcctcatgaaatccgatgattttaaagatgggagtttccctgcacaagctctctctcattacctgctgccatccatgtaagacatgacttgctcctccttgacttctgccatgattatgaggcttccttagccacatggtactgtaagtccattaaacctctttttcttcgcagtctcgggtatgtctttatcagtagcgtgaaaatgaactaatacaattcctgattggaaaactacacaggaaactttcgggatgatggaaatattttatattttgat

SEQ ID NO: 899149 - DNA, 502 bp, Homo sapiens
gttgaaaatctgaaataaaaatggagagtcatagtacaattctgcaaaacttagggtgtggtcaaattactgagtattgttcattttattttgttgttattttcatcttgtactacattacagtcagagaatgtatcctccacaagggctgcatattgcagggtattgaactcttccattgttccaggggtcctatgagtggtgggaaacaaatgctaactctctgtagaatacttgtttgttaatttatttgtgtgttcctgatctctctagaactataaaaaatgtatttgtcttccattggtattgtgtttttcagcttctcctggattctatcaactgtatattttaattatcttatgtattttgatgttgatatttcatgtaagggatacatgtttttatattgtcttttaatattgtgcccttcataaataacaratacagtataattagtgcatgtaagataaataaataaatatagcttttgcgtaaattaaag

SEQ ID NO: 899150 - DNA, 542 bp, Homo sapiens
gaaagaaaacaaaaagagattttgtagagttttgttgaggtcatagagtgtggaagtcaggaaataataggtaaatatgtagttayaactgtaatgaatgctgaaaaaatgaacagagtcagtgatagtgaataatcaattaagcgatctattttaatggtatggttaaggaaagccactctgagaaggaagtttttccacagagacctgaagcaaagactatccatgaagagagagaaagtgtcccactctattagtttcttagcactgccataacaactacaaacctgatggcttgaaacaacagaaatgcattcttccacaattctggaggttagacatcccacaggaatgtgtaagcagtgttggttatctttggaggctgtgagggagaatggggtccatgcctcaccagtagcagcctgcagtttgggcagcctgatgttccttggtttgtagatatatcactccagtctcagcctccatcttcacagtgtcttctgccctgagtatctctgtgtttcaagtctccctctaccttt

SEQ ID NO: 899151 - DNA, 644 bp, Homo sapiens
gtattttaaagaaaacttcagacattatatgtttgtactcataaatattaatacgtcaatatatgtctctacccgagggtgacttttagaaatayaccctcataactatcattagtggtaaaattaataataatgtcttaatattatactctttttttccctggtcatctcaaaaatgtctatttgcagttggtttctagtcagaatccagggtctaaacaagacatttggttggtgtgattctccttttttttcttgttatatatgtgttgagtaaacaggcaaaaaaataaagaatactatattttacatttcagatttggcccattgaatctttatggtggcatctagcaaaatctcctatgactccttctgtatttacctgttaactgttcatgatatcttaaggcttgattgattgctgtgcaattttttggcaacaaaactgttgaattgtatcaggattcaataatctctgaaaataccactttttgtgatgttaagatttatcagtgggtccattgttaatggcctagcaattataacattgtttcctgtcaaccttttatcctgatagttttactcacccactagttgcctagattcattatttcatcagagtttaataagggtgacttatgttc

SEQ ID NO: 899152 - DNA, 643 bp, Homo sapiens
atgggagtgggcaagaaactatcgcatatgaaatatagttaagtgatatttgacattcatattaaaattatgtttaatactggatcatctgatttcctagactttaaactcctttgaacaggggataagaaagtgcttgacatattaccgactttgataaatatctttttaaagatcaaagaataataagcatgtggattagtgactgaggcctgaactgatattgctcagatgaggaaaacctatcaattgctttgggtagggcagaacctaagcttggactagaacttgagttgttttactcctattgcagaacattcctgtgttttcctcagcaaaacttccttcccctaaccccagggaaagttaaacagaaaaaaaagagttaaggacataatagcaatctacaaatatttgaatagaggggcatttccagttgatgtaagtaattaagggtgataaccacaggaactagagtgggactctgcctaagtatgagagagcgttccaacaatgacagctgcctcacagctcgaayagaggttggcaagcacttttcagaggtgttgcaaaaagaatttgtatattggttgtttttaaagtccctcctaactgcaaggacttgttattctaggaaataaag

SEQ ID NO: 899153 - DNA, 643 bp, Homo sapiens
atgggagtgggcaagaaactatcgcatatgaaatatagttaagtgatatttgacattcatattaaaattatgtttaatactggatcatctgatttcctagactttaaactcctttgaacaggggataagaaagtgcttgacatattaccgactttgataaatatctttttaaagatcaaagaataataagcatgtggattagtgactgaggcctgaactgatattgctcagatgaggaaaacctatcaattgctttgggtagggcagaacctaagcttggactagaacttgagttgttttactcctattgcagaacattcctgtgttttcctcagcaaaacttccttcccctaaccccagggaaagttaaacagaaaaaaaagagttaaggacataatagcaatctacaaatatttgaatagaggggcatttccagttgatgtaagtaattaagggtgataaccacaggaactagagtgggactctgcctaagtatgagagagcgttccaacaatgacagctgcctcacagctcgaacagaggttggcaagcacttttcagaggtgttgcaraaagaatttgtatattggttgtttttaaagtccctcctaactgcaaggacttgttattctaggaaataaag

SEQ ID NO: 899154 - DNA, 644 bp, Homo sapiens
attgctaccaaaagcttttctcagtcttgttttttacattttagatagcagagatagttgatctatcaaactctacaaggacccaattttcttcattctctttgttcccctttgtttgtcttcaacctctttgattcttacttgatatttctttctcatattactttgctaagagctgaagagaaatgctaacagtattgccacttcatgtactgtttttctaagttctcctatactacagtctaactggaggggtgtgtgtgtgtgtgtgtgtgtgtgtgtgtgtgtgtgtgtgtctgtgtttagtataacttgaatttctctcattttagcctccaatatgaatttcttgtctgttccttaaaagatctctaagttaataatatatattttagctttgggtacgtaagattgtactttattactaagctacatgtcagctattgaaataaagcctaaagttttattaaaacctgcagaattcagctacatcacaaatttaaatccccacttccagatcttgctgaaaaaaaatccagtgcaatcacctrtatttttctgctccctcttatgtcaaataggtctgtgaagattttttttcttacaagtcaatctttgcctcagcccatcctgctgagacaaat

SEQ ID NO: 899155 - DNA, 700 bp, Homo sapiens
tgaataagtctcaagagatctgttgcttttataaagagcagttccccagcacacgctctcttgcctgmcaccctgtaagacatgcctttttcttccaccttgattgtgaggcttccccagcaatgtggaactgtgagtccattaaatctttctttctttataaattacccagtctcaagtatgtctttattgcagcatgagagtggactaatacacatcgattacccaacttcaaactatactacaaagctacagtaaccaaaacagcatggtaccggtacgaaaacagacccatagaccaatgggacagaatagagagcccagaaataaagctgagcacctacaactatcttatctttgacaaagtcaacaaaaaaaaagaaatggggaaaagattccctatttaataaatggtgctgggctaactggctatctatatgcagaataatgaaactggacccctacctatcaccatatacaaaaattcactcaagatgaattaaagacttaagtataagacatcagactataacattcttagaaaaaaacctaggaaatatccttcttgatactggcgttggcaaataatttatggctaagtcctcaaaagcaattacaacaaaaataaaaatttacaaatgagacctaataaagagcttcttcacagcaagataagtgaccaacagagtaaagagacacc

SEQ ID NO: 899156 - DNA, 617 bp, Homo sapiens
tcataaggatcctaagggaatcagcactcccaactttggtggcgtttcagggttggctggagcagagtgctatgggcacaccaccatggtcaaaactcaatcaggaaatgcaggatggacatatccaaaggagaacaaagtaaagaataataatcattgtgataagaagccagtgttgcaggcaggaaaatcatagcttgcataaataaaaaagataagccaagcacagaaatgtgaatgagaaaaatccagagcagtgtggtcaatctgatgtataaagcaagcctctaatgtgagccacatacctgatttttagttttctgttatcctaatttaaaatgtaaaaagcaacaggtaaaatcaattgtaataaacattttatttccctgtatatatccaagtattaatatttcaacacataatcaatatagaaatttaaaatgaggtattttaagttatttagttccattctaagacttcaaaatccagtgtgaatttttcacttacacaacatcttatttcagagtagccacaattcaagygctcaatagcacatgtggctactggttgttgtattgacagtgcaggcacaaattcataaaggtgatttaatgggt

SEQ ID NO: 899157 - DNA, 625 bp, Homo sapiens
gtatcagccattaaacaacagcaacaacaaacaattgcaggcttcatctccatctacaatgctgtgttttgattatatcgttttttggtgagaagaaatagaagtagttgagggaccaggaagtgggtcccctaagattgaggaggcattcttctggatttttaaacatttccttgagatttatctgcctcattaacaatggcttttgtcttagaagtgtctttgattttgtatactgacatgatttcctgtactgttatgaatgcatgctgtccttcagtaagcccatcaaacattcttactatgttgtaactgcctgacagattcatcttgctgtccaaatagggttaacttacaagacagggaattacaatagagaaagagtttaataaagctggttaaacagaagacaagagagtttaaagcgttggctaaacagaagactgagaaatcaacttcttcaaatatttggaggctaggactttttaaagaaatttctttaggtgggtggctraagaatgggtgctgctgattggttggggaggcaattggagcagtatggaaaatggcccttctgctctgagtcctcttctgcataggtgctacaggattggttgagtattga

SEQ ID NO: 899158 - DNA, 690 bp, Homo sapiens
taatttcatgtacatcaagtttaaatgggagcccctggttaactacctgcagggcttgagcctgctgaatagcctgcttggctattggaaaaggctgcctcagtcttatccaaatctaaggcaagaggggcgttgccacttttaaatctgcaagagaatcagaagttaacataacatcatcaacaagactatgacatagagtggggctatgcatattgccctgtagcaacactgtgaaagtccattgtcaccctccaatgaaggcaaactattcctggttctctggacaagaatcccagttccattgttaagcagtccagcaagtctgtgacagatggtacagctgccaagccgtgtaaaacatccccagccagaatgtcctcaggcatgggagagacatacacagttcatgagcggaaaaccaagcagcagataccaagatgcaaagatacaggtttcgctttcactgaccagtcttcataaccatcaataactgcagctctgcccagaaacttatccgggttcagagtccagtagattgccaagtccacatatggtctttggtcrtccagtgcccccctaagccaggcatcttggtcagtctcttatcaaacagaaaaggctttacacttccacctaactgcagcaggcagtctgtgaactggaatgcttgggcaggactgggttgcg

SEQ ID NO: 899159 - DNA, 592 bp, Homo sapiens
tgttgaattttgggatatagcagagagagaacttgacacgacttgttaccccaggctgtggaatcttggaaaagagctrctatacagcccatgtctggttgactgaaggaccatcctagtggaaagcagataatctgggcttctggtctgccattcacacaagcttaacaattgcttttgtttaaagtgcagacagaatatttgatccattccaaccaggcattcacatcttgataccctgtctcagttgccaaagtttgttttaggtctttaagttctataatagctaccttggtcttgtcattagatagagaagaaacaacagtttcattgtgagaggttttggaagaaggcttaggggaaggtataggcagtaggggagcaatgaagtgtatttcaaaggatctgatagggtctgttcctgaaacctcagcccccatcccataaaaccagcttaaataaaggaaccgacttagagaagaagaactttgagggtttgagataataacctgtactggattgcactggttgagctgacagttaggggaagctgtttctttagtaaaatgaatgtgtggttttaggaaattac

SEQ ID NO: 899160 - DNA, 592 bp, Homo sapiens
tgttgaattttgggatatagcagagagagaacttgacacgacttgttaccccaggctgtggaatcttggaaaagagctactatacagcccatgtctggttgactgaaggaccatcctagtggaaagcagataatctgggcttctggtctgccattcacacaagcttaacaattgcttttgtttaaagtgcagacagaatatttgatccattccaaccaggcattcacatcttgataccctgtctcagttgccaaagtttgttttaggtctttaagttctataatagctaccttggtcttgtcattagatagagaagaaacaacagtttcattgtgagaggttttggaagaaggcttaggggaaggtataggcagtaggggagcaatgaagtgtatttcaaaggatctgatagggtctgttcctgaaacctcagcccccatcccataaaaccagcttaaataaaggaaccgacttagagaagaagaactttgagggtttgagataataacctgtactggattgyactggttgagctgacagttaggggaagctgtttctttagtaaaatgaatgtgtggttttaggaaattac

SEQ ID NO: 899161 - DNA, 609 bp, Homo sapiens
ttttagcttatattttttcttttctatcttccccacaaagacatktttttgtccactaaggaaacatattgagtgagatctcatgcagattagtgtaattctcttgtgtaattttgtttaaaaaatagttaaagggctatgggaaaatgtggtgactttgataaaaatattttaaaagtaaaaataatgtgttttgaccgtgtgaatgatgtcacatttactgtgtaatatgtaatttaaaacaactaccaccaaaattttttttagtttgactctcttgattcaccataattatatcacaacaaactcttttcagcaggatcagtttttaaggttgagtttattataaaaatatttacttataatcctccattcattaattgttttatggtctgatatgctttggctctgtgtccccacccaaatctcatctcaaattgtaatccccacgtgttgaaggagggacctggtggtaggtgattggatcatggcgggagtttttcccatgctgttctctgacactgagtgagttctcacaagatctgatggtttaaacgtgttttgcggtttgcccctcactctctctctctctcctgccactatgtaaga

SEQ ID NO: 899162 - DNA, 682 bp, Homo sapiens
atccagaccccaagagaggattcttggatctcacgcaagaaagaagtcagggcaagtccacagagtaaagtgaaagccagtttattaggaaagtaaaacaataaaagaatggctactccatagacagagcagccccaagggctgctggttgcccatttttatggttatttcttgatgatatgctaaacaaggggtggattattcatgcctccccttttcagaccatatagggcaactttctgatgttgccatggcatttgtaaactgtcatggcactggtgggagtgtagcagtgaggacgaccagagatcactcttgtcgccatcttggtttgggtgggttttagctggcttctttactgcaccctgtttcatcagcaagctctttatgacctgtatgttgtgctgaactcctgtatcatcctgtgacttagaatgtcttaaccatccggtaatgcagcccagtaggtctcagcatcatttttacccagcccttattcaagatggagttgctgtggttcaaacacctctgaaaatgggatctcatacttggtgttaacaataccaatcgcttaaaaacaygttacaaatttattttttgaaggatgtgaacttaagtgtggatgccataagaaaaacattttggaaaatattcatgtgctttgctttgtgtgtttctgcat

SEQ ID NO: 899163 - DNA, 637 bp, Homo sapiens
tcttatgttgggggtttgggtcawttcaaacttttgataaattaatggatgaatattttatatataaattcttgaatgtttgactagttcattaggatatagataaaaatttactaaagtaaaataaatttaaagaaatatggccaaatttccctacctaataactacagggtctttatctagttatatttgtgtattattgttctaaaaatatcattgctctttgataattaaaaagaaacaatcttgttttcatttagatttttttagttcctagagaggctggacatcttaatgttatttgctattttcataaaatattaaatttatgaattatgttttcctaggctttgttaatttaaatttaaactgagggaagggaatctttctataataaggccatgaactcacttctacaaatatttataaatatttactcatttttatattctttatttttattctattggttgtggttttaaaatatatatatacggatgtaataaatgttttatgcagccaaatctattacaaatttttcttttgtaatattgtattgatttgtatgcctggaaagtcctttccccatcccaaacccagtcagctacttattcttccttattttatagcttaatca

SEQ ID NO: 899164 - DNA, 588 bp, Homo sapiens
tcttatttgggcaaaagaagatccaaacaaagtcacacaatagctaaaccaatgccatctgtgtggaaacaatattttaaacacaaacaaaatcaaacgctccatatgccttcactcctgaacatttgctagaaaatttctgaatatttattgttagagagtcagtgcagtcaggcagaagaagcagaaaagcccagacgggaagtccctggccttccatcactggccttcttccatactctgcccctgttattaccaaatgcattgtgcatagtatctgggaatatataccacactctttctgcctctgtttatttagacataagataactttacataccccttcttattggaattcaggggttttgcaaagtatatctgcaaagcagagtttttcaggctttgccatgtcatggcacacatagaaaataataatatttgtacggtctggtctggtaaacagagatcaagtagacagaggtgcctccagttgcccagtactgcctrgctgctttgaaagctgagggtatcaatatcttggcacaaccataacacatccatgacccatcagtgcaccttggcaccttg

SEQ ID NO: 899165 - DNA, 636 bp, Homo sapiens
gagagagggcatccctgtcttgtgccagttttcaaagggaatgcttccagtttttgcccattcagtatgatactggctgtgggtttatcataaatagctcttaytattttgagatatgttccttgaatacctagtttattgagagtttttagcatgaagcgctgttgaattatatccaaggccttttctgcatctgttgagataatcatgtggttttcttctttggttctgtttatatgatggattaagtttattgatttgcgtatgttgaaccagccttgcatccagggatgaatccaaattgattttggtggataagctttttgatgtgctgctggatttggtttgccagtattttattgaggatttctgcatcgatgttcgtcagggatattggtctaaaattctcttgttttgttgtgtctctgccaggctttggtatcaggatgatgctggcctcataaaatgagttagggaggattccctctttttctattgattggaatagtttcaaaaggaatggtaccagctcctccttgtacctctggtagaattcggctgtgaatctgtctgaccctggactttttttggttggtaggctgttagttattgcctcaatttcagagcctgttattg

SEQ ID NO: 899166 - DNA, 594 bp, Homo sapiens
ggaggggataagagaaatgctgtttatcattaatgggaacttctcttggttgccttttggatccttcaatcttgtataatcccacygggaagtcaaagtaatgcttacaaagcaccatccttttaatgtctattaattgattatcagttcttttgttgcccatgaactgtactcagaagtctgtggcacttacatataaatatctgtatcttgtagaaagagaaggtacatagcaagtaagtaataaaattaccccagaacccatatgctcccaaaccattctgacgtctgtaactattcttttttgagacggagtctcatgctgtcacctaggctgtagtgcagtggcccaatcttggctcactgcaacctccgcctcgcctgtaactattctttacatcacggaattaacttagaataggaaacctccagaagtgtacctgtccccaaatttcaggcaacttcataagcatttctggattttgtctataggtatccttaaaagtgtacaaacttaaaacagaacatcgaaagtcagtgacccctaattatattacttctccttcacaaaacatatctttcaaatcaacaagc

SEQ ID NO: 899167 - DNA, 567 bp, Homo sapiens
aatatgtcatcttactgccttctggactctggtttctgatgggaaatcatctgttaatcttaccaaggctcccatgyctacaatgggtcattttttccctgttgtttctaagattctcagtctttgtctttcaacagtttgactctgatgtgtctaggtgtggatcttttttaatttgtccaactttgagttatttgagcttatttaatatgtagtttaatgttttcaccagaatttggaagctctcagccattatttattcatattatttttctctctcctttcctcggtttcccattatgcatatattggtatgtgtcccacaggtgtctgagggtttgtttatttttcttcatcttttcttactgttaaagagattggaaaactctggtgacttatctgcatgtttgttgtttcatctgaaagctcaaatctgctgctcaccctctctagtgcattttttatttcatttattatacttttcagcttcagaatttctattttgttcttattttaaaataacctctgttgctttattgacattttgtgttcaatggaataacataa

SEQ ID NO: 899168 - DNA, 505 bp, Homo sapiens
ttttaaaaattaaaatcagaaaatagaacaagaacatagatttatttgaatatacattattttccaaatacttttgaattcaattatttggaacataattgaatctaaatgtctcacaatacattatgcaattatatctacatataagatattattcaggtatgttgaatatgccaaaaatattagtttaataatttaaaattatcagtgaagcaacatagaaaaggtttatgccatacatgtgatcaagaatgagtccattcaaagctcaggaataaaatcatgagttccttaagacctcaggaaagataaaaaaaaaaaaagtcaagcaacgtgcaatctttgctataatagaggtttatctaattattgtgtgacgtaaggtggasagacaatattgggtatttagtcagcttttgaagtgaaggaggaaccacctgaaacaaaatttgggaggacaatatcagcaggcagatatttgtgtacagttggttaaccagctata

SEQ ID NO: 899169 - DNA, 579 bp, Homo sapiens
aattgacttaaccggcaggccccsactccaaataaaactggtttaaagattgccttgagatcagaaattaaggcaaatgcttatgactgatgcaatgtaatacaaaaattcaaaatatgctttgccacccggcagactgattctcatttagataagcacccataccttccgaaaccaagggctcacataagtgaaatggtctaaactgcattaatcagcattcatccttcagtgagcaggtcaaaggcaaggagcccaggtgaggtgcacctctcatagacttgcgtagctctctattctttatgattatgtttgtgtggccttttttgttaacgtcatgaccctaccagagtatggtgtccatgagggcaaggcctgtgtctgcttcaaggtggctggcacataggaggtgtcttaacagacaggattggatcaaaggtgtcaaatgcaagggggttgcaaaaaactcagtaactaaggtaagtcagatttaaatgcaatatttatagatataaaggtcaatgcaaaaaattactgatgaatataatatcaacattttaaataatagaggatcgatat

SEQ ID NO: 899170 - DNA, 612 bp, Homo sapiens
cgtgttttgttggtgttttgttttgattatttataacataataacatgtgtttattactgaaaactgcacaaataaagataatcaaaaatcacccataatcctaccaccagaactaaccactgtttatcatcttagtgtatttcctttccaacctatataatatgtacagatagttggatgctattttaattctaagcaaaattgaaaatatttgaagctgttgtcaaagaggaagtaccctggtttgagtattttaactcatcatctttcagaaatgaaaaataaaaataatagaacttgatactagtttcttttttaaaactagattttgttgtttctgtgattccagcttttactggtataattttccttttttgacttgaattcatctcataatacctctatttcacttctttttcttctctggtactttaggccttatgcttaaaaatgcttttgatactttgggctttttttaacataacagkttattcctatagatggggcaagtaaaatatttgggtttatgtatgaatctttaaaattatttttataattataaagttattaaagcctggagtgcagtggcaccattacagctcactgcagcc

SEQ ID NO: 899171 - DNA, 612 bp, Homo sapiens
cgtgttttgttggtgttttgttttgattatttataacataataacatgtgtttattactgaaaactgcacaaataaagataatcaaaaatcacccataatcctaccaccagaactaaccactgtttatcatcttagtgtatttcctttccaacctatataatatgtacagatagttggatgctattttaattctaagcaaaattgaaaatatttgaagctgttgtcaaagaggaagtaccctggtttgagtattttaactcatcatctttcagaaatgaaaaataaaaataatagaacttgatactagtttcttttttaaaactagattttgttgtttctgtgattccagcttttactggtataattttccttttttgacttgaattcatctcataatacctctatttcacttctttttcttctctggtactttaggccttatgcttaaaaatgcttttgatactttgggctttttttaacataacaggttattcctatagatggggcaagtaaaatatttgggtttatgtatgaatctttaaaattatktttataattataaagttattaaagcctggagtgcagtggcaccattacagctcactgcagcc

SEQ ID NO: 899172 - DNA, 582 bp, Homo sapiens
gtgaagcctattttgttcagtgctggtggtactgggacaatggcaccatttctgcccttaaggatatagacaaatagacagttacaatgtcatgctctaagtgcttaagaacaaaggggatgaggatgttaaatattgagaaatggagccctggtcttccttgagggttcagaaagctttctcagaataggtgagtgttgatactgaaggataagatgttcaccgggaaataaggagggaaaaggtataccaggacaagaagtggctttgaggaaggcagagtcaggtgaatgtgaggggctccgagccctctgggacagcagcagcacagtgtggttgtggggtggcagagtcagaagatgagatgaagccaatcttgggggtctttgtagatgatactaagttacttaggctttatcttaagctcaaaagagagtggttgaggaactctaagcaggtgagttagatgattaaaattttgctttagaaagattattatggctkcagggtggagaagagttaggaggagggaacacagcattggagcccataacatcatgttgcagatgacagcaatagacc

SEQ ID NO: 899173 - DNA, 654 bp, Homo sapiens
gcactgaccttgcaaataccaaggtcactgatgacttccctttgtcacgtgttttggccgctgaatgtgacttccgtgtagcatgacactaccagccatgtcttctctccccttggtttctgtgtcctcactctcctgggctctttcctctctctcttgcccctctctcccacctgccctgtggattgtttcctctttctctgcctgttcagtaaagccctgtattctccacacgccttgactatcctctcttctcactccaaaaaatgaagaaagtagatctcagccttttgtgtttgcaacacattttggagcaggagaaattttggaggcagcctgatgggattaaaatgcatccacagctatattgaactatcgccaccctggttgccttttggcacagtgtgggtgtttgaatagaacttcctgctctcttttatgtactcttcttgtgaagtcaagtttctcaacccaggaatctgcacggccctggcctgatgttaagtgatggagtgccatgcctcttaacttttcctcatggcaagrtggagcttcctctctgcacagagacttgcacagaaggctcagggctacatttgagctgacagacatgcccaccctcagttgtagtgcatgaaggaatagcttttacag

SEQ ID NO: 899174 - DNA, 669 bp, Homo sapiens
aattcctgtaatacatatgatacctttcaggatctattaggaaatttctaaaagaagaaaatccaattatggaagataattgccatctaatttcaaaggaagaatcatccctagtgacttctttatgacrcaacttgttttgttgtcacttatggatgaaaaacatacctatagtcttgttgattttgcttagtctcagtaatcattgacttgtatttgttgaatgatttcagtagggtcagatgccatatgaggatgtttacagagcagaaataaaatcaaagaccatggtttgtgggccaggagggttgacttgtgctgcattttatctcagagtaatcttcaatcagcaggctcagagttctcagaatagctggtattcattccctattacccagttatagaaaagaagctttaaggcatacacacacagtcatacacatgtatgtatacatgcagacatatatacacacacacactgttgtttgtttttgtttacagattagtaaaaccaggtgccaaatttattttgatatatgtcaagacttgtcttacaggcaggatgtccaggcttctcttgctatgaatccttgaagatctctgtcttctgaaaaagatgcatgatgctaccccactacgattatctactggctgaattgtagccttatt

SEQ ID NO: 899175 - DNA, 652 bp, Homo sapiens
ctgggttggcagacttagaagatcctgtggcccagtttcagaattttatggataaggaacctgaaactttgaggacagtgatagcctgaaggtctaaatactttggaagtattggtgctgtatgcgcaattcctttcccaaaagccaggaatgtgatagagatatctatgcatgcatgggatgcaggagtttgggaggctcagggaggctcatagggagattcttctggagattttgccactattttgtcaacacaactctaaaccgattagtagggagagaggtctgctccttggcaattcactttgtttctgtcctaagtatagaaaaaggcccagggattattatgctgaaactctctttcaccgaactgcatttccactttggaggctatttgggcagaggcagatgggaagctgttgcaggtgtagcatagagcaatggcattgaaggtgggggaggatttaggcaaagaacccagtccccagattcctggatcatcacccttacaagtccaaatgtttgcacatcacctctgcagcacctcttcctgagaattgagccagcaatttgtcactttaaatctcctttgccttcctaacgtcacatccagtttcagaacagatcytccagggctccttcaactcaagac

SEQ ID NO: 899176 - DNA, 664 bp, Homo sapiens
ggagtagcatggacctgctcagtggttcagtaaattacagaattttcgtgggattataaatccacttctggatacaagtatttgacaaayagaaataattgctattacccacaagctttcatgggctttgaaaagaaaggaaaattagtctttgtcaattgcttgtatgtagcttgtctataaaacaaaaaaatcactgtggcaccctacttttcagcattcatttgaacagcaatgggggcctttttggacagcctgtttaactgctcaacaactagctttctggttaattatgcatttcaagctaggaagcaacgcactcgtgccaacttgaaactgccgaaatgctctagttttactttcagatcatgaaaatgcgagaaatggcaccctaagtcagaccaatggtctttagagcccatattctctctcttaataaatacagcacatggaagaccagtgagaaaatgatgattcattagtttaattaaatatttcttggatttctttcctcaacatgcacaaactcttgggatattgaattttacatatttgatagctgttgcataaaaccatatatttaaatgtgttcttttcaaattaccatatctattgcaaaaaatgtattgtcataattactgaaggcatcagcaaaattgttgca

SEQ ID NO: 899177 - DNA, 640 bp, Homo sapiens
ttctatattttgtagcaattcaagtttaagcacttttatgcatttaattatactctcaaatgttctgccctaatccctaaagcgggttttgatgatttctaaggggcactactcatcagtggcataaacattygtttatttggcttaagtgggaacatttttcaccatgacttgctttgaaaagggattatatacttttcagtcacaatttagagatgccaatttgagatacaaagtagctaaattgattaactggtatgagagatttccttagtagcccatcagtctcaactaattctttttttttttttttttttttttgaggcagtctctctttctgtagcccagactggagtgcagtggcatgatttcggctcactgcagcctccacctcccaggttcaaacaattctcatgtctcaggctccaaagtagctgggattacaggcacatgccaccacacccgctaatttttgtgtttttagtagagacagggtttcaccatgttggccaggctggtctcaaactcctgacctcaagtgatccaccccgctaggcttctcaatgttttgggattacaggcatgagccaccacaactaattcttaagtaccccaagttaatatcctcctgataagtcta

SEQ ID NO: 899178 - DNA, 614 bp, Homo sapiens
agaggcacacatgtaaatgccactaaataaataaataaataaacctcccttggaaaaacgtcttgcgtaaactcaacaagcaaataatgtgactgttcagagtcaatcagccttaaagaaatgmatgttataactcagggcccaaatacaatgctgtatttgcgtcagtaggcacagtcctcataacaactggttattaatcatccaagcgaggcgatgtcattattacctgccacaaaggggcaaatttaaaggaagtcttttgctctgatgggcttatttgcatgcatattttaagaaacatattgtctgtggtataaataaataactactgaacaactgacataatggtaaggcacggttttttgagttactgcttcagggtagcttgggatttaataataatgatagcttttgtttttaatcatttaccatgtgccagtttatttctcattgatcatctctaatcttcacaagtgctccacaagtgagtttggaggtctgttttgtagctttcttgcatttacagcacatagtttagtagtgacacaaaataactgtttaagtaaatgttagtgctatcatcatcatcatcatcatcatccctgcagtgg

SEQ ID NO: 899179 - DNA, 608 bp, Homo sapiens
tgccattttggaaatcgttatagtttaatgcaaaatgcctgaattaaaattctagttctgtcacttaagtatatatgactctagccagcttactttcatgaaccatttatttttctcatttgtaaaatgcgaatgataatatctccttgtagtatcgtcagaaaagtcagggacagtgaatacaaagtaattagcacagtacctgggacaagtagatgctcagtccatgatttcagtcattattgccatcagtgccctgagtagggcccttaaaccctgctctgtggttctggcataatgaattagaggacaaacctggctaacttcacatggagcccaagattatcagagcatcttccttctacattcttttttatttattttctattgaaagactctctcttctccagctttcttttttctacccatatttccgtgttagcatgcagattaatatttaaatttaaatgcttggtgttctttcccttgtgtagggcctctacaatgaaggtgatttttgttgtgyttgaatatgtgtcttttaattgtattggaaggatgggaagatgtacttccttgagtatgtccaaagtgttagggccctctta

SEQ ID NO: 899180 - DNA, 655 bp, Homo sapiens
tttttctttttattgttaagttgtaagagttctttgtatattctggacattaaactcttatcagaaatatgagtaaggtttgatatttagaaatatactctaacctatacatgttgacttggaaataaaggattcatagctctctcaatggatggataaaacattgactatgatcatagtctaaaatgttagttataacatattgatattttcatttttttatacctctgtgataattgggcagagttgggcttctgttggataaactgattagtatttaccaatacactattcatattttagagacattttggaggactttttattaaagggactaagaacttagggttctttttaaaagatcagtattttataagtgcccactgatcactttaccttataattctccttggaattttgtaaagagacacatcacttttaagtcataggccataatgtattctaataaaaaaagtaatctgtttcctgggggtatcttctcataccccctgaagttacaatattatgtaatttatcttgtaatattcatctccyacattcatcactcaaatactctatccattcttggatacactttctttggaacatcaactcctagccagagtatgtggctccttaaaatagtgctgtttga

SEQ ID NO: 899181 - DNA, 604 bp, Homo sapiens
cagtgacaagctcagtttttcctgcaggcactttgaattccagccttccaatttgaacctaacaccattaacttagttttagctaccatgtttttaaaggcacaaaactctgtttctgtaaataacctgaacagaatgccacactcacactcatacctccatcattgcttctcattggccttagagacatttctcaggacttgaattataaaatatcatgaacaaaccggcaaaccaaaaaatttgctccacaccatttaaaatgaaataaagttagtatttatcatttataagctttacagggaactttgctaaggagccagtgacttccatatagaaggcagtggtatattcaaaatttagatgaacgtatatgatgaaatcttatgcaactctgctaaagtttggagaacaattttttcacatgatgtagaggacacgtgtgctactgagtagcaaggaaataagtgtttagcagatttacaaatcccatgtctgctmctgccccagctccgagggtcacagcaccagcaggtgtatggctggaggcacctggtgtgggagcaggcagtgaggtccccacactgccagtcagctacaagca

SEQ ID NO: 899182 - DNA, 634 bp, Homo sapiens
gattttgttttttctttttttttragaggtaaaacagataatttgtatgctgatggaaattatctagtagaaatgagaaaatagtgatgctgagaggaggcagattatgactggaacaatgaggtttggtgaacaaaagagaatgtgattttgtgcataggaagagagtcagacttagatgggagcattgactattcatccatgatatccaaaaggaaggcagggtgtctggatatagatgtggttgggtgggaagcttagatggtggaagcatgtgcaaggtatcttctgaatgcttctgttttctcagtgccatagcaagcctcaggagagagtgaagggagggaaagggtgttttaagtataagggataagagatggggtgaaagggccttttcaagctgtaatgtgcttataaatcccctggggatcttgttaaaatacagattctgatttaggaagcctagggcagagcctgagattctgcatttcaataaggctccaggtaatgcagatgctattggtccatggaccacattttgagtagcaaatctcttgaacagggtttctcaatcttgacacccttgatattttgaactggatgagtacgtactgtgtcctacacattgtaggat

SEQ ID NO: 899183 - DNA, 634 bp, Homo sapiens
gattttgttttttctttttttttaagaggtaaaacagataatttgtatgctgatggaaattatctagtagaaatgagaaaakagtgatgctgagaggaggcagattatgactggaacaatgaggtttggtgaacaaaagagaatgtgattttgtgcataggaagagagtcagacttagatgggagcattgactattcatccatgatatccaaaaggaaggcagggtgtctggatatagatgtggttgggtgggaagcttagatggtggaagcatgtgcaaggtatcttctgaatgcttctgttttctcagtgccatagcaagcctcaggagagagtgaagggagggaaagggtgttttaagtataagggataagagatggggtgaaagggccttttcaagctgtaatgtgcttataaatcccctggggatcttgttaaaatacagattctgatttaggaagcctagggcagagcctgagattctgcatttcaataaggctccaggtaatgcagatgctattggtccatggaccacattttgagtagcaaatctcttgaacagggtttctcaatcttgacacccttgatattttgaactggatgagtacgtactgtgtcctacacattgtaggat

SEQ ID NO: 899184 - DNA, 634 bp, Homo sapiens
gattttgttttttctttttttttaagaggtaaaacagataatttgtatgctgatggaaattatctagtagaaatgagaaaatagtgaygctgagaggaggcagattatgactggaacaatgaggtttggtgaacaaaagagaatgtgattttgtgcataggaagagagtcagacttagatgggagcattgactattcatccatgatatccaaaaggaaggcagggtgtctggatatagatgtggttgggtgggaagcttagatggtggaagcatgtgcaaggtatcttctgaatgcttctgttttctcagtgccatagcaagcctcaggagagagtgaagggagggaaagggtgttttaagtataagggataagagatggggtgaaagggccttttcaagctgtaatgtgcttataaatcccctggggatcttgttaaaatacagattctgatttaggaagcctagggcagagcctgagattctgcatttcaataaggctccaggtaatgcagatgctattggtccatggaccacattttgagtagcaaatctcttgaacagggtttctcaatcttgacacccttgatattttgaactggatgagtacgtactgtgtcctacacattgtaggat

SEQ ID NO: 899185 - DNA, 680 bp, Homo sapiens
tgtttttgtttacagcatggttgagattttaatgttctctgagtacccaaagaacagtctcaaatgtcatatttgtctgacacacaaatagttccccctttaagtgagctagaaactaacaaattaagtctctacctgcttttgactaacaggagcatctacacactgtgctttccttaataagcaggtataaggggcagtctgggaggcagtggtttgctctgatttgcttccatttcattaaggatgaaagaaggcatttggtgtcgtgccattgaaggtgtacttccaggggtaacttaacattgttttcatctagcctaagtgtaataccacaagggatattgaagggggagccctgccaatcccttcaatccatgtccacaggaaggcatgactagaattcatttattcattcactcactcattcaacaaatgtaatttaaacacatgccaggcactgggtttgaaggtgcagaggtaacgatgagctagagaaacacattcccttaccacttgctccccacacatatctgggcttacactatcccattgcatgaaacttgagcaaaaatgaacacgaaggcaacagtttttctatccaactgacagttattagcaaaggagggagctagtatcttcctcacagaaatcagartgaggcactactggaagtttcg

SEQ ID NO: 899186 - DNA, 647 bp, Homo sapiens
gaggagaccaaagacagctaccttctttatttgatatggtcacctgatgttagcttttggcctgcattgttcttcrtatttgtcactatcaatgtttgaagtagcaaatttgtaaaaatggccaggatcatgcagatctggtgtgcggaggtatggtcccaatgtctgtgctggaggggatcttgtgaccctcaatcacacctcttatgttccaagtcacttattgtgatgcttaaggctaaaagtccaagtattttcagctcaagaagttagaagatgagctccctagatgcctgggcatccccaggtcaccaggttctttgaagtgatggtggtatttacggtagctggttcactacaagaagagaggtgatggacacatgaatgggaagagcaagtttctgaagctggtggccactatcaaagctggcttggctcaaggccaacatggcctgaaggcaaagtccagtgaccttggctcagctgtctcggcagaaagaagtgaaatgcctcctggacacctggtctttcattgatattcctgcagcccctggggcatgggcacagatagatgcccctggtctttgcccctgtgagggtgtgtgtgtgtgtgtgtgtgcacgtgtacatatctcaggaatctggct

SEQ ID NO: 899187 - DNA, 590 bp, Homo sapiens
gaaaataggcaaaagatttgaatagacattctcaaaagaagacatrcaaatggccgacagatatatttaaaaaaaaattaacatcgctaatcatcaaggaaatgcaaatcaaaaccacaatgaggtatcacctcaccccagttggaaaggctattatcaaaaagacaaaaagataacaagtgctggcaaagatgtggaaaaaaggaaacccatctgtacagttgatggacatgtaaactagtacagccattatagaaaacagtgtggaggtgcttcaaaaattaaaaatagaactaccatatgatccaggaatcccactacaaggtatatatccaaaggaaatgaaatcagcatgttgaagagataactgcaaacaggctattttatatgttagaaatacatctcagtgttatttgcacttgtttattttccaatttaggatatttatactaaagacactcaggaatccaaaacttctttaaaacaaagtaaattttgtcatccttgctattaattagtggggtggggagacagttctcaaaagaagattaaattggctatggctcaacagaaaaatactagaagaaact

SEQ ID NO: 899188 - DNA, 590 bp, Homo sapiens
gaaaataggcaaaagatttgaatagacattctcaaaagaagacatacaaatggccracagatatatttaaaaaaaaattaacatcgctaatcatcaaggaaatgcaaatcaaaaccacaatgaggtatcacctcaccccagttggaaaggctattatcaaaaagacaaaaagataacaagtgctggcaaagatgtggaaaaaaggaaacccatctgtacagttgatggacatgtaaactagtacagccattatagaaaacagtgtggaggtgcttcaaaaattaaaaatagaactaccatatgatccaggaatcccactacaaggtatatatccaaaggaaatgaaatcagcatgttgaagagataactgcaaacaggctattttatatgttagaaatacatctcagtgttatttgcacttgtttattttccaatttaggatatttatactaaagacactcaggaatccaaaacttctttaaaacaaagtaaattttgtcatccttgctattaattagtggggtggggagacagttctcaaaagaagattaaattggctatggctcaacagaaaaatactagaagaaact

SEQ ID NO: 899189 - DNA, 590 bp, Homo sapiens
gaaaataggcaaaagatttgaatagacattctcaaaagaagacatacaaatggccgacagatatatttaaaaaaaaattaacatcgctaatcatcarggaaatgcaaatcaaaaccacaatgaggtatcacctcaccccagttggaaaggctattatcaaaaagacaaaaagataacaagtgctggcaaagatgtggaaaaaaggaaacccatctgtacagttgatggacatgtaaactagtacagccattatagaaaacagtgtggaggtgcttcaaaaattaaaaatagaactaccatatgatccaggaatcccactacaaggtatatatccaaaggaaatgaaatcagcatgttgaagagataactgcaaacaggctattttatatgttagaaatacatctcagtgttatttgcacttgtttattttccaatttaggatatttatactaaagacactcaggaatccaaaacttctttaaaacaaagtaaattttgtcatccttgctattaattagtggggtggggagacagttctcaaaagaagattaaattggctatggctcaacagaaaaatactagaagaaact

SEQ ID NO: 899190 - DNA, 616 bp, Homo sapiens
aggaaacccatctgtacagttgatggacatgtaaactagtacagccattatagaaaacagtgtggaggtgcttcaaaaattaaaaatagaactaccatatgatccaggaatcccactacaaggtatatatccaaaggaaatgaaatcagcatgttgaagagataactgcaaacaggctattttatatgttagaaatacatctcagtgttatttgcacttgtttattttccaatttaggatatttatactaaagacactcaggaatccaaaacttctttaaaacaaagtaaattttgtcatccttgctattaattagtggggtggggagacagttctcaaaagaagattaaattggctatggctcaacagaaaaatactagaagaaactactccttaggttttgaatgagaaggcttagactctctgttcctggctctgccatggacgagttgtatggcatatggctttgggcaaatcatacattcacttagctttatgattggagygaaataccactagaccctcttttagagtttagcagcctataaattatatgactactcagttttgttttatttaaaaaaaaaaaaaagcttgttactcagtgcagatgttt

SEQ ID NO: 899191 - DNA, 576 bp, Homo sapiens
atggtaccatacctggcccaggaacactcaaagtaatatacccaagcaatataattcaaacataaagcacatcaagtgaggatgagatgtggtgagttgaatgtatyaagttcctacagctttttttatgtatgtagctacttgaatggagacgttcagtaaaaggttctcatttgaagcctaattaaagaaatctattttaaagcgagatggaggtaagaggagaaaagataaatgagggctggaggctgatgttacacagcgatggccatccaggtgttccaggtgggtgaatcggaagatggaaagaactgcttcctacaggagttatttgcattgagagcaggtgttcagtagagaagtcccaaaacaggcaatgtgccagatctttttaccaagtgactgagtccctccaagtgcactccccatcctcccctacgctgctccctgcctgggagagtgtcagcctcctctgggatggaccacatcagtgaggtcctgcacccactggcttctgcttgggtcagccagtggggcttcctgaaaggagatgtggggcatggggctgggaggaga

SEQ ID NO: 899192 - DNA, 613 bp, Homo sapiens
cattttggagctttaagatttgattgccccactggattttggactcacatggggcctatagcccctttgttttggccaatttctcccatttgaaatggctgtatttacccaacacctatacttccattgtatctaggaagtaattagcttgcttttactaccttggttttacaggctcatggtcagaagggacctgcgctgtctcagataagactttggactgtaaacttttgagctaatgctgaaatgagttaagactctagggaacagttaggaaagcatgattggttttgaaacgtgagaacatgaaatttgggaagagccagggaaggaatgatatgtggtttggctgtgtccccacccaaatctcatcttgaattgtaagtcccacaattcccatgtgtcatgggaggaacttaatggatgtagtcgaatcataggggcaggtctttcccatgcttttctcatgatggtgaataatgagatctgatggttttaataatgggagttcccccgcacaagctctctctttgcctgctgccacccatgtaagatgtgacttgcycctccttgtcttccagcatgattgggagacctcctcagccatgtggaa

SEQ ID NO: 899193 - DNA, 580 bp, Homo sapiens
caggtctcaaccaatttttaaaaattgaaattatatcaagtatcttctcaagtacaatggaataaaactagaaaaataaggaaaactagaataaaactagaaaataaaaataaaaacttgggaaactatgaatagatggaaattaaacaacaagcttcttagtgaccattgggtcaagaaagaaattaaagagagaataaaaaaatttcttgaggcaaatgaaatttgaaacacaacataccaaaacctatgggatacagcaaaagcactgctaagagtgaaattaatagcaataaatgtctacatcaagaaaactgaaagacttcaaataaacaatctatcattgaagtagaaaagcaagaaaaaacaaaactcaaattattaggaggaaagaaataataatgatcagagcagaactaaatgaaatagagactaaaaataaaaatacaaagcaacaatgaaatgaaaagttgattttatgaaacaataagcaaaatctataaatcactggctagattaccaagaagaaaagaaakaacacccagataagccaaatcagaaataaaaaaggagtcattac

SEQ ID NO: 899194 - DNA, 581 bp, Homo sapiens
atccctgtttggattgggtgggaaagagccaagaaagctttccaaattgggccaagtttaggtgaacagagttagccccacatggaagccrgttttgtgagttcttttatgcacaacgccaagtagcttccaaagaaaattaagctgaagtcacccagactcaggagctaggaagggtattctgatactgccctgtttttctaggcatccattaaccttcatgttgtccctcctgtaaatgatgaatgggatcaagtgtgagctgaaagtgcaagagtagacattagggttggcttcaatgagagtttcaattggctttaagggtaaatagataaataaagaattattacctacatatagacatctgagaaattgtaggggtctctaaagagtacaactttattattaatatcagtattaactactaaaatatattgcttgcttgcatgtctggcgttgtcttaagcactttacgtgcaatctttctattaatgtttgtaatagctctatcatctaataatagctccatagaggcgctattattagtatcattacacagatgagcaaactgaagcttagag

SEQ ID NO: 899195 - DNA, 581 bp, Homo sapiens
atccctgtttggattgggtgggaaagagccaagaaagctttccaaattgggccaagtttaggtgaacagagttagccccacatggaagccagttttgtgagttcttttatgcacaacgccaagtagcttccaaagaaaattaagctgaagtcacccagactcaggagctaggaagggtattctgatactgccctgtttttctaggcatccattaaccttcatgttgtccctcctgtaaatgatgaatgggatcaagtgtgagctgaaagtgcaagagtagacattagggttggcttcaatgagagtttcaattggctttaagggtaaatagataaataaagaattattacctacatatagacatctgagaaattgtaggggtctctaaagagtacaactttattattaatatcagtattaactactaaaatatattgcttgcttgcatgtctggcgttgtcttaagcactttacgtgcaatctttctattaatgtttgtaatagctctatcatctaataatagctccatagaggcgctattattagtatsattacacagatgagcaaactgaagcttagag

SEQ ID NO: 899196 - DNA, 621 bp, Homo sapiens
tgagacaatgctggagcaagttaagaatttggggggctattggctgtattttggatataaaaaggactgcaatctggggaggccaagggcaaaatgctatggtctgaatgtttgtagcyctccaaagtccatatgttgaaatcctaaccccaaggtgatagtactaagagatgaggcctttgggaggtgatagtgtcatgaggatggaacctttatgaatggaattagtgtccttttaggtgaggccccagagagctaccttgttccttccttgatgtgaggattcagcaagaagttgccctttatgaagcaaagagtaagacctcactagacatcagagctgctggtgccttgatcttggactccttaaccccaagaattatgagaaataaatttctgttgtttataagctacctacgtcatggtattttctcatattagtctgaacagaacattccaagatataggtagtgtcagcattataaaacgaattatgtgagatgtgctaatcggagaggaaattcagaaggtcaatctattgtatacagcagaagagaaaagttttaaagctagttgaaagaaaaagagttaacttagcaaatttaggggtagaatatactg

SEQ ID NO: 899197 - DNA, 589 bp, Homo sapiens
gcagaaagaacacacacacaaaaaaaacattcaagcaaggatactatactctgcaaatctgttcttcaaaaacaaaaaagataaggactttcctagacaaacaaaagccraaagagtttatcaccactatatctgccttacaagaaatgctaaaaggagttcttaaagttaaaagaaaaaggttctaactaataacgtaagttgtgaaagtataaaacttactgtaaaggtaagaatatgtatttagaatatgttaatactgaaatggtgattaataaatcacatttaaccctttagtacaaacatcaaaagacaaaattatttttaaagtgtaactacaataatttattaatggatatataatataaaaatatgtaaattgtgacatcaataacataaaatgtaggagcagaagttaccatgtagagtttttgtatgcagtcgaaattaagttgttatcaggttaaaatatactgttacaactggaagactttatataagcctcaggataaccacaaagaaaatatctgtagtagacatacaaaagtaaagataaagaattcaaaaacataatactaaaaaaaaagcc

SEQ ID NO: 899198 - DNA, 609 bp, Homo sapiens
ttctgccttgaaatacatagatgttatctataatagtcatttctattgatctagatggtcactttcctatttgctattacacaggtatagacaatagtgaaagacaatgctccctgtacctcagatggtgcataataaaatgcccccacacccctgctacacaatacaattacaattatatttttattatataataaaaatgtttaaagcaccttccgatgtatttgtttcctgtaaggaaagtaagtctttcagattaattactatttagaggtttctccccactaaagaaaagctattgtttgttgtgcaattattttctgcctctaaaatatctcccacctaacacaagtgagaataaaagctttcggcttcctagctcactgaggattgacatttaaccttttcatgcctagacacatgtgggttactgagtacatgtggatcaccaaggaggaactccatggagcctgggaaggtcaacagaaggggccatagcggagagaaaaggcacaatactcaggtaagagaatttctaagacagcatctaccatcccagttctcaattctgagcrcttctctccttctgcataactacttctccaattc

SEQ ID NO: 899199 - DNA, 635 bp, Homo sapiens
gcagcattattcacagtaaccaagatatggaattaaagtaagtgtccatcatggatgtatggataaagaaaatgtatatatacaatggaatactattcagccttaaaataaaaagaggaaaattatgtcacttgtgacaacacgaatgaacctggaggacattgtgctaagtaaaataagccaggcacagcaagaccaaaaccacgtgatctcacttctgtgtggaatctaaaacagcccaactcattaaaacagagttgaatggtggttaccaaagaatgggtttggggagatgttggccaaaggatacaaaatttgagttcaataaaaggaataagtccaagagatctattgtacaaacaatgactataattgataacaatatattatatacttaaaaatcactaagagaatagattttcagtgttctcaccacaaaaaaaagtatgtgaggtaatgtatatgttatctcaatttatcctttccacaatgtatacatatttcaaaayatcaagttgtacaccataaatatatacatttttactggtcaattacaatttattttcaaaagtacttgttctttatctaaaacttacatttaacaaagcatcatctattttctctgactaccccac

SEQ ID NO: 899200 - DNA, 621 bp, Homo sapiens
aagtttcatattttccgttttctacatgttcttgtcctgagtaacaggactgactatgagagacttcacataaaatgaatttcgcacatggaaggaaaaaaccttcagtagcatgatggccttcattatagatttgtgacttaacatctatatgttaagtcacaaaacaagtcttaaaacattcaaaaaattgaaataatatcaagcatcttctctgaccacatggaataaaactagaaatcaacaaaaagagaaattttgtaaagtatacaaacacatggaaactaaacaatatgctcctgaatgaagagtgggtcaatgaagaaattaagaaggaaactgaaaagttcttgaaacaaatgataatgaaaacacaacataccaaaatctatgagatatagcaaaaacaaatacaaagcaaaaacaaaaatataagtgcctacatcaaaaaagtagaaaaacctcaaacctcacaacgcattttaaagaactacaaaagcaagagcaaaccaaacccaaaatcattacaagaaaggaaataataaacatcacagcaaaaataaataacactaaaatgaagaacacaatacaaaagaytagccaaatgaaaagctggttttt

SEQ ID NO: 899201 - DNA, 566 bp, Homo sapiens
gaaaatataaaagagaaagtaaggtgcatggagtatataaagagagggttcaatttgcgttgaaaatgaactgtaggtgaaaagaatagccaatatataaagaaataatggctgagaatgtccagaacagataaaagacaaaaatcttcatgcttagaaaatatgagtcccaagcaggataaaaacctacataactcatagaaaaactgctgaagattaaggccaaagatccttagaatagctagaaaaatttaaagagaaaatttgtaatttggtggagattacaattccaggaaccagaaaaaatgggtttgtactcacatctctcagactccaaagctcatttaccctgcagttgctctattctgctccctagtgtacttaatttctgacttttcatctactgctgagttattctaagcatatatgaaatgcccttrgaaatatttttttctgttctaaaccactgcttttagtttttattctctgcttcttaaactttaaacgtgttgtttatttatttatttatttattattattattacttttcttgaggtggagtctct

SEQ ID NO: 899202 - DNA, 648 bp, Homo sapiens
gatctctctctctctcctttccagaggcagccactatcctgaattttgtgataatctctccattccttttctttatattttaatcacatacatgtgtctcttaaacaacatatttagactttcctatttttgagcttgagatgaacaaaactatacttctgtattttttcttagtttgctttttgagttcaaaattatttttcctgagattcaatcatgctggtgcatatagctgtagttcattcaccttcactactgtatcatctttaattgtatgattatattacaatttttaaaacctattctactttcatagacaattgggctgttttctagtgtttgttcctatcataaacaatgctagtatgaacattctcatacatgtttcctgatgcacatgtgcaaagatctctctaggatatattccctgaagtggaactgcttggacaagggttataggcatgttcaccttcattggtagatatacatttatttcccaagatgtttgtgccaatttattatttatttatttttgagatggagtctcrctctgttggcccaggttggagtgcagtggcatgatctcggctcactacaagctccacctcccaggttcacaccgttttcctgcctcagcctcttgagtag

SEQ ID NO: 899203 - DNA, 632 bp, Homo sapiens
ttttttatgttttattttacaggaatcacaaaaatattttcccaagtttgtagtttaacactctttatggggtcttttagtgaatagttattaattacaataagattaaatttcttaatattttattatagtttacattatttatttatgagatccctaaggagacagaagcctttcacttatattttcttctaaagtttttaatgttttgcctttcacatttgaaacaatatatcagaaattgatttttgtgtaaggtatgaactaaaggtcaattttccatttttttccttatagatgaacaattatactagaaccatttatagaataatccattctttcctactaattctgagttctgttgtgccattattcaagtttttaatatgtaaataggtaattttcttgtttttccatttcgtttcattgccctatttatctctgcaccaattacaaaattttattattacttttttagggtaataaaattcttcttgtttcttcatctttaggattactttagctcttggcttttccaacaggtttttgaatctaggatttttatttgtttaaatctgtaattccartgaatatgcagatttgaagaaacacatctttatattaacctttcc

SEQ ID NO: 899204 - DNA, 672 bp, Homo sapiens
atttattttcttttctttattttttatgagacagagttttactcttgtcacccaggctggagtgcagtggcatgatctcagctcactgcaacctccamctcccagtattctcctgcttcagcctgccaagtgagtagctgggattacagggatgtgccaccatacctggtaatttttttttttttttttttttttagtggaaactgggtttcaccatgttggccaggctagtctcgaattcctgacctcaggtgatctgcccacctcagcctcctaaactgctgggattacaggcttgagccaccgaggtgggcctagttttactttaaatcagcaatgtgagctcaactcttaatgactctatgaggtttctcaggaggtaaactagaggctttgggtggttaaatggcttttaactctggctggactttataatcctatatgggttaaaattcactaacccaatctagatgcgaggcctcagctcagtaggtctgaagtcctcccaggtgatttccataagcagccagattgagatcgcctgtagcagaggggggttattatgtgccttcgctgtgaccttctgaattttcatgtgcaaagaatgacgtttattaagctttttatccacatgtggaacagctaagtgtttttcatatgacattattcttt

SEQ ID NO: 899205 - DNA, 611 bp, Homo sapiens
ttgggagaactgatcctgaaggaaaaacaaggaataacacatctgatcttctaaagcaagttctaagacaaatataaattgttagaattactaggggagacctcmagttttagagtccaagaattcttagtttgaatctctaatgttactgtcttagacaatttcattaaggtctttgagccacagttctcttacctataaaataaggaaaataaaagtgcttaattaattaacagtgagaattcagattaaaatttataaacatgcttagtacaatgactgagatattagtattagtaaaataatttttgtatcctatttttaaaatcctattatttagaaaaaatgcatgtaagtctctctctcaaaagaagatatagtagtatcagaattattaatgttgcctttaagaatgtttttcctttattgttgttcttcttacattcctgaaaaccaaataataagatgataattcttctagtagtaatgaagttgatgatttattttctttatatgcattaatacctttcatatgatacatttgcttcaaatattcacaaaatagtgacctaaatcagaaaacataataatagctaagataaatgcttcct

SEQ ID NO: 899206 - DNA, 622 bp, Homo sapiens
gcaaactttgctatgtatggtcatgtattaggccattcttatgttgctataaagaaayatgtaagactaggtaatttataaaaaaagaagtttaattggatcatggttctgtaggctgtagaggaagcatagtgctggcatctgcttctccagaagcctcaggaagttttaatcatggtggaatgcaaagcaagagaaggcagtttacttgaggaaaacaggaacaatgcagggagagggtaggaaggcgtcacacacttttaaaccaccagatgttcagatttcatgagaaatcaccctctgtggtgagtatagcaccaagccatgaagtatctgccaccatgacacaaatacatcccaccaccacccacctccaacactggagatgacaactcaacatgagatttggaggggacatccaaactacatcagggcatgtacaagtatacatttctgggagaacaaaaataccatgagaaggtgaaaacagttgaaaactttacacacaaaggtacagagaattactcttcgaaattgacattcccttatatttttatttttaacatatttaaccatttgtgacaaagccacaaatccttaaaaatcaaaaataaatcatgtg

SEQ ID NO: 899207 - DNA, 576 bp, Homo sapiens
gctttttagtgagaagcaagctagagggagaagagctattaatcctaattgcmcagagctaattatcttcctcaattaagaaaaaaaaaagaagctagtaaaaagaaagggggaaaaaaagaccacaccctctaacagattgtgaggtgggtggagaactattagcacagccaagggaatagttcttctctaccacagaagaacaatgtcatggccaaaacccttgggtttatctatcacttcactcattcgactgggaaaaacttagaaatagctgctgggtagaagcaggtagagtgggaaagttgaacatctgaagacggttatctctgtctggagaaagtttcatgcattccatcctgaattggaaagaattacaagaagtctgaaaggattatccgtacaagtacaacacacaggtctactgaacacaaatgcaaggttttataagcaatttcagaaggaaaagcaaaaaccaaccccagcaaccactattggtcagagccctagccaagatatctaattcccctctttgtaccctcaggcaatggaactgcatacagaccagtcttcaaa

SEQ ID NO: 899208 - DNA, 576 bp, Homo sapiens
gctttttagtgagaagcaagctagagggagaagagctattaatcctaattgcccagagctaattaycttcctcaattaagaaaaaaaaaagaagctagtaaaaagaaagggggaaaaaaagaccacaccctctaacagattgtgaggtgggtggagaactattagcacagccaagggaatagttcttctctaccacagaagaacaatgtcatggccaaaacccttgggtttatctatcacttcactcattcgactgggaaaaacttagaaatagctgctgggtagaagcaggtagagtgggaaagttgaacatctgaagacggttatctctgtctggagaaagtttcatgcattccatcctgaattggaaagaattacaagaagtctgaaaggattatccgtacaagtacaacacacaggtctactgaacacaaatgcaaggttttataagcaatttcagaaggaaaagcaaaaaccaaccccagcaaccactattggtcagagccctagccaagatatctaattcccctctttgtaccctcaggcaatggaactgcatacagaccagtcttcaaa

SEQ ID NO: 899209 - DNA, 598 bp, Homo sapiens
aaatctttggggtgtatgcccaggaatggaattgcagggtcatatggtaattttgtttaactttggaggtgtcacyaaactgctttccaaaacagctgaacaattttacattccatcagaagtatatgagggcttcaatttctccatatcctaacacttgttacttttaaaaaattattagtatcatattatctgaaatttcatgctctttaaaatgtagtcactgaagtcctaaatgattctatggacaaaaaataataataataaaaataaaaaactatcagaaaacaaatcaaaataaaagaaaacccaaaccatatttcctgcacattaagagaaatctttcaaaatctgcttctatgacaggatttcaaaattctcatttttatgataggcagacataggtaaaaacatgcaatattagaatacttctttttctttcttaatgttatgagtggagtattatacctaatataggaaggaacgtgaaggcttcaaaataatatttatgcaccccggtgagatatctgtgtgacaaagatcaaggaggtttaattagcaacttcttgactaaataaagttaaaggcactctctcag

SEQ ID NO: 899210 - DNA, 535 bp, Homo sapiens
tcaaagtagtagaggggattatttgagttaaatggaaaaaagtacagccaatcaaaagaagataggtaaagaaagagaaagaagtcaaatagtgraaagaataaaggagaaaaataagatgatgaaaaaaaagctagtatcattaatccaacaaatcattgtagcatactcttcaataaaaagaataaattgttaaactggattttccctaagatatatgtgttttataaaatattattaagttggcacaaaagtaattgtggttttgtcattacttttaattgcaaaaatcgctgttacttttgcaccaacctaataaaaatatttcaaaatactaagcaataaaacattaaattgcagtagaaaatttaaaatgtgacagtatgaccagagattttattaattttctttgtttataatagacaaagcaaatggaaaaacagaatataatatatttaaactatatagttaacaaatataatctaatagatacacataaaaccttgaaccaaacagttgaaaaatacgtattttt

SEQ ID NO: 899211 - DNA, 628 bp, Homo sapiens
gcctctgtaaaaagggcacaaagcacattcatgagggctccacttcaagacctaatcacctccgaggagcctcacctcaraataccctcacattgggaattaggtttgggggtacacaaacattcagatcatagtaattacatatgttaaccttcatgtacatgatattatttgtttctgaaaacaataaaataaaaagggcgggtgttgtttcatttcatattgagatgagaacccagaggtttaacacagagatctcacaagtaaaactgaagatgtgaaagttaaactcagatcttttgatacccaaccctttctgtttttatgtcattcttcctcttgaaggcctttaattaatataattatgatattacataatattgaatcatataaattttaaatataaatatgaaataaagttacatataaaataaataatacaataaaccatgtaattcttactacctgatgaaagggaagtttgatagaacatatcaagtgagataaatatttttactgctcttatttatttgttcactacttggttgactctctttcctactggattgtaagattgattagaggaaggattctccctcttttgtttcctagttacccactgtctaag

SEQ ID NO: 899212 - DNA, 583 bp, Homo sapiens
aaaccaggtgtttgtgcttagaagagctatacctctcagagaatctgtgtatggtcctctgaatttctcttttagccatgaattgcatacattcattaatcaagggaaaagaggatattggattgtggagaacagaggacacagctctgatgaagatataaaacttctgactcggaaagggatctcaaagctgtaagctaatacaagtcatgtttgtaagaataaagtctctgtgttaagtggtatgacttaccaggccaaaggcaagtattttccacttaagtaggcatgacccttctgagtttattggttgcagggaatctgcaacagatgagcctttggaattttttaggctattggtttcttggaaaaacattaagtactttttaacattaattttccaaattttctggtaaactctatttgagaagctcagaatattgcaggtgagaagtcatccccagttygcagaaaggaaatcagaggccctgccacatatattgtgatggtaaattttatgtgtcaaattaactgggacacaaagtgcccagatatttggtcaaatatttttagggtattttta

SEQ ID NO: 899213 - DNA, 333 bp, Homo sapiens
tcctgtggtcttgagaaactaggctaagagaaagattgtaattatrtgggattatgtaaaccaccagcaaaccataaaaaggtatagttaatcaatagtactaaataaccatcacaacttgtaaaaatgttgttttttggccattagacaaacgatgcacagcctggtatttactaatcctgacgactgaatgacataagtgatccatttgaaaattactgttgattcatttatattcatttggaaataagacattcaccaaaatagagataatgagaatcttttactgtattataaaaaagaaaatgaaaacctaaacacccaggatgcaaa

SEQ ID NO: 899214 - DNA, 551 bp, Homo sapiens
gcacaatgcataaagaaagatgctctttacttttctggctctttgagagagmagtgttgtcatatttccttcctggtcctaagatatgattgatactcctctctgctctactcagagcactctgtctggaggaaacacatgggacaatagcaccaatggcttctgactcctacctacagtaccactgcctttgttatatttgaccagtcattttctttctttgcctaggatgggaaggtatgagactcaataaaaaatacaacaaattgatgagttttaatagaaaagtgaaaaaatatataattttaatttattggagcctagtcatttttccaatatggtgtcccttagtcaatgttttttttttaatctattttagctcaacagaattgaaaaactatgactaacctcacaatagcaacaacaataacaaaaatctattgatgctccccatattttgagaactttgaataggatatattgtaaagaaaggtaaagatcaagaaatgtttcactgaaaaaaatacacttatttggaatttaagtgtaac

SEQ ID NO: 899215 - DNA, 551 bp, Homo sapiens
gcacaatgcataaagaaagatgctctttacttttctggctctttgagagagcagtgttgtcatatttccttcctggtcctaagatatgattgatactcctctctgctctactcagagcactctgtctggaggaaacacatgggacaatagcaccaatggcttctgactcctacctacagtaccactgcctttgttatatttgaccagtcattttctttctttgcctaggatgggaaggtatgagactcaataaaaaatacaacaaattgatgagttttaatagaaaagtgaaaaaatatataattttaatttattggagcctagtcatttttccaatatggtgtcccttagtcaatgttttttttttaatctattttagctcaacagaattgaaaaactatgactaacctcacaatagcaacaacaataacaaaaatctattgakgctccccatattttgagaactttgaataggatatattgtaaagaaaggtaaagatcaagaaatgtttcactgaaaaaaatacacttatttggaatttaagtgtaac

SEQ ID NO: 899216 - DNA, 623 bp, Homo sapiens
ttattttagggcaccatataatgcaaattaaggcaagaatcataaattactctctatactaggatataattagatgcgagatgttattttgagattctagtatttggcatagcatttctcaatgtatgttttacagaactttatttccctgagatgctaataagcatttcacaaaaattaaaaaggattacattgtcagatgagtttgagaaagagttgatttcacttcactgtagaactcagagcctttggtatgctaatatgggcacaattaatatagtatgcgtgtttttcagacttatgctctaggacttttcagaatttcatgggattagtgatctaagaaacatactttggaaatggtcattctagagcattgctttactaattcagtaggtggcagcctttcctgacttaatattctttaatgaggtgttaaatgttaacttgaaattgtaactaatgagatttagtacctggttatagtttataacaccagaggagttgatcctacttgaatttttaatgaattaccatcttaagcctattaaattygtctgagtataaagtacttccaggtctcatctttgatctagttattactaaaatgaaacagtaatagg

SEQ ID NO: 899217 - DNA, 634 bp, Homo sapiens
ctcttctatctttttacttgtttcaaattcttgtttttttctgactcaaactccactaaaagtagatataataaaaaaaattaattcaaaagatgaagaaaaaagattcaaaattaagtgactaaaagcaaatgcttctactttccatccttttcaggagatactatcatgcactctaatagtatataagaagcacagatcatcagaaaaatctgtttaatttacacgatgtaattttccaaggttaaaagacacaagcaagaaaacaaggattgatttttgtatgagcgtatctaaaagataattttgaagaaatgaatggtgataataaagtaaatgggacatgaggacaggatgggaacataatagaaaggatatgataaaataactttttttttattttacacagtcactaaatgtgtaaaatttacacattttagtaaatgtgtagttcactagctaaatgtgaaagcagacaggtgactggtcacatatggagaagcagatttggaagccctactacagatayaggtgatttttgaagtcacataattaaaaattttgagacaaaaggggacctatatcatatatagacatagatcatgtcaaatgagaaaatgagaatgatataaaa

SEQ ID NO: 899218 - DNA, 634 bp, Homo sapiens
ctcttctatctttttacttgtttcaaattcttgtttttttctgactcaaactccactaaaagtagatataataaaaaaaattaattcaaaagatgaagaaaaaagattcaaaattaagtgactaaaagcaaatgcttctactttccatccttttcaggagatactatcatgcactctaatagtatataagaagcacagatcatcagaaaaatctgtttaatttacacgatgtaattttccaaggttaaaagacacaagcaagaaaacaaggattgatttttgtatgagcgtatctaaaagataattttgaagaaatgaatggtgataataaagtaaatgggacatgaggacaggatgggaacataatagaaaggatatgataaaataactttttttttattttacacagtcactaaatgtgtaaaatttacacattttagtaaatgtgtagttcactagctaaatgtgaaagcagacaggtgactggtcacatatggagaagcagatttggaagccctactacagatacaggtgatttttgaagtcacataattaaaaattttgagacaaaaggggacctatatcatatatagacatagatcatgtcaaatragaaaatgagaatgatataaaa

SEQ ID NO: 899219 - DNA, 524 bp, Homo sapiens
tgactgtgtgatacttcatctccctgatctgtctgcctattacatcagcattctctgatgatgcattctcactgctggctgatattttctgaggactgtaggaggggaggatattagttttcaaccctcttcttgtgaaaataatcaattattccttgggttttgacctgagatctatctccccatatcaaagagtcaagccatttccagtgtaatgccataaaataccccggctgcagcattacagatgaagtaaattaaacattacagacaaatatattctgaccactcatttctaatagtgattggcctacatagaagacttgaaggatactggctggttcaatccaggaaaatattgcaaggcagcaacagagtttggtttaacatgtgggtacttacataaatcacaggcaaatattttgaaaaatatacttttattttattttyatttctataaaagaaaaaataactagaggaaatggaattttgtgctaccagaacaaaacctaaattgctcactt

SEQ ID NO: 899220 - DNA, 573 bp, Homo sapiens
ggctcagaaaacagtattttaaaatgaaggcctccgcagcagcctcagagcaaaagtttttttctgaccttttcctgttcccctgtctctcagtcgtgttctccctggaggctagccataaaaactagaatctctcttccccaaggcaggtcacagaaatcagagccccttttctccaaagctagtcataaaacctaataatattactctatttttcccttgcctttctgtgtaaaaactggccataaagaaattgtctgacataccttgtttgactgtagatcatgagacccccattctagagagggctcttcctcacaccaaggagggaatgcatgctcagaagaatctagacagccagagtttccccactcagcccattatcattatatcttgccctttttgtccgatcatgtttctacatggctatccataacctaaacataaacattgacaatttcttctgtatccttgagtcttctgaaagctcccatgtrtacatgttaaataaatttgtatgctttttcttctataaatctgccttttgtgagttgatttttcagagaatcttcc

SEQ ID NO: 899221 - DNA, 634 bp, Homo sapiens
acaattgtagcttaacaaataggaataatttttctgacataacaatttcagaggttgagagtctgggtgtgatactgtggttctgtgatataatcagtggcctgggctcctactctttctactctatcatctaagcattcaattgcctttctcaatctggctgactcatgatcctatgatagttgcttatatccaggcttacatctgtttcaggaaggaagaatgaggacaaagcagtgcctctttaggaaagcaaaagtgttccaaggaatcatcaacttttgttttacgagaaagaatttgtaaactaaaatctactccagagtaattaagttatatagttggacacactgttactacaaacaaaattgaggttttgttagtaagcagcaaaaaagaataaatattgagtaggcaactaaaagtatttgctacaaaaaatatatttacataggtagacagtatttatttttacttagcacaaagtgataatttacccaaaattgtaactagcaagagtaattaattataataatctttatataactatataatatataattacwtataaagttaatgtaaataattaatttgataatctataaatcaccactttatgctacataggtacaca

SEQ ID NO: 899222 - DNA, 634 bp, Homo sapiens
acaattgtagcttaacaaataggaataatttttctgacataacaatttcagaggttgagagtctgggtgtgatactgtggttctgtgatataatcagtggcctgggctcctactctttctactctatcatctaagcattcaattgcctttctcaatctggctgactcatgatcctatgatagttgcttatatccaggcttacatctgtttcaggaaggaagaatgaggacaaagcagtgcctctttaggaaagcaaaagtgttccaaggaatcatcaacttttgttttacgagaaagaatttgtaaactaaaatctactccagagtaattaagttatatagttggacacactgttactacaaacaaaattgaggttttgttagtaagcagcaaaaaagaataaatattgagtaggcaactaaaagtatttgctacaaaaaatatatttacataggtagacagtatttatttttacttagcacaaagtgataatttacccaaaattgtaactagcaagagtaattaattataataatctttatataactatataatatataattacatataaagttaatgtaaataaktaatttgataatctataaatcaccactttatgctacataggtacaca

SEQ ID NO: 899223 - DNA, 634 bp, Homo sapiens
acaattgtagcttaacaaataggaataatttttctgacataacaatttcagaggttgagagtctgggtgtgatactgtggttctgtgatataatcagtggcctgggctcctactctttctactctatcatctaagcattcaattgcctttctcaatctggctgactcatgatcctatgatagttgcttatatccaggcttacatctgtttcaggaaggaagaatgaggacaaagcagtgcctctttaggaaagcaaaagtgttccaaggaatcatcaacttttgttttacgagaaagaatttgtaaactaaaatctactccagagtaattaagttatatagttggacacactgttactacaaacaaaattgaggttttgttagtaagcagcaaaaaagaataaatattgagtaggcaactaaaagtatttgctacaaaaaatatatttacataggtagacagtatttatttttacttagcacaaagtgataatttacccaaaattgtaactagcaagagtaattaattataataatctttatataactatataatatataattacatataaagttaatgtaaataattaatytgataatctataaatcaccactttatgctacataggtacaca

SEQ ID NO: 899224 - DNA, 620 bp, Homo sapiens
acagtgagatcctatctctacaaaaaaattaaaatatttgttggggatagtggcacacacctatagtctcagctactcagtaggctgaagcaggaggattgcttgagcccaggagtttgaggctgcagtgagycacaattacattactacactccagcataggtgactgaatgagatcctgtctctaaaaataaataaataaaatgctgctgaacaaccattggaaaaatggtttagaaaatttagaaggaaataaaaactttttgaaacaaatgaaaatggaagcacaaccttacaaaacctatagaatacagcaaaagtagtataagaggaaattttatggtaataaatgtctacactcaaaagtaaaaaaaattcaaattcaatttgaaattttcgagattcaatcagaatgaaatagaaaactgaaaccgaccaaaggagtaatgagattaaaacagtaataagtcttccaagaaagaagagccaaggactgtattcgctaccaaattctactaaacttatgtgaaaaaaactaatagttcacctcaaactatttcaaaacctaagcagaaaagaattcatcctgactcattctatgagaccattaccctgatact

SEQ ID NO: 899225 - DNA, 560 bp, Homo sapiens
tatcagataaatgccagttaaagtcactccttacccatcagtgggtaatggctaaaatgaaaatgagcaaaagtattaagaatgagtgaggatgtgraataactagaacttttaccttattaatttagaaaaatatttgatattcattactaatgctaaacctacttatacacgtcaacctaccaattcctgcacagcagtgagaaagaactgattattgatacacacaacaacatgcatgaatcttacagagttaatgttgagtgaaataagtgagacacaacatagtacctgatgtaagactctatttacaggaggttccaaaagaaacaagactaatatggtgatatggtttggctccatgtccccaccaaaatctcacttgaattgtaatctccataagggtggggccaggtggaggtaactggatcatggtgttggtttcccccatgctgttttcatgatagtgagtctcacaagatctgatggttttgtaagcatctggcatttccccagcttgcactcactgtctctcctgccaccctgtgaaaggcgccttc

SEQ ID NO: 899226 - DNA, 560 bp, Homo sapiens
tatcagataaatgccagttaaagtcactccttacccatcagtgggtaatggctaaaatgaaaatgagcaaaagtattaagaatgagtgaggatgtgaaataactagaacttttacyttattaatttagaaaaatatttgatattcattactaatgctaaacctacttatacacgtcaacctaccaattcctgcacagcagtgagaaagaactgattattgatacacacaacaacatgcatgaatcttacagagttaatgttgagtgaaataagtgagacacaacatagtacctgatgtaagactctatttacaggaggttccaaaagaaacaagactaatatggtgatatggtttggctccatgtccccaccaaaatctcacttgaattgtaatctccataagggtggggccaggtggaggtaactggatcatggtgttggtttcccccatgctgttttcatgatagtgagtctcacaagatctgatggttttgtaagcatctggcatttccccagcttgcactcactgtctctcctgccaccctgtgaaaggcgccttc

SEQ ID NO: 899227 - DNA, 600 bp, Homo sapiens
tattggccattctggagtatgcaatttattagaaaacatttttcctaatgtggagttgctgatgggaaattaacaaaaagggcctgtgttaragcctagttggtctctacattctttccaggctcccttgacattctttaattcagtctagctggtgcatgaacttgacagtcgaggcaagataccctcattccatctgccattttgtttcttcagagcctaaatacagttttatcatttgggcagtgccctgtgtattgggcaaatatcctaatttgattttgacggcatcatctcccatctcaaatcttcaggcctctgtatctgtctaaacccacatggttagaaaatgcttttcttttctgttctttttttaagctggaatctgtcagcagaattttctgcgtttgcttttatttcctgggtctcttctttctgttctatatattcattttcttgtgtctttccctgaagctatgcatgttttgctttatgttattttccagattcaacttcatcaacacagtagacatcaaacccatttgttttcttcttttaagatgctaatgtttatccatttatcaagtatcatcgatgcac

SEQ ID NO: 899228 - DNA, 619 bp, Homo sapiens
cccgagaactgtggacacacctggttgaggactctgtgtaagagcatgcaaaatattgccagtccagagtttcttttggagggtagtgctaaatattgcttttgcgttatgactaccgcattattttggtgaccagcacagagtggtggaaaccaaacactcttgaattgtctgtcagtgtaacgaagataacttgcatttccacagggctttatatttttgaaaccacattcccatctatagccttgtacagcaaagtgcaaatactgtagcattatctccactttacaggagaatacacaaatgtgggagttaagtgcctgcctgcagaccagagatccctaaccttgtactcccattgctccattgctctggcaagggctttattggaacctgaatcaaatccttgtcaatcttgacttttcattcttggtttttgagcacttaaagtaggtctatggttttggtctaacccatttgtgttctttcctatgatctttgagtagatgatatcaattttaaatcttttaggcaggccagtatttggagaatttatattactamagaaaacccaacattttcaccctgaataagacatgtgtcattacctaacctttat

SEQ ID NO: 899229 - DNA, 615 bp, Homo sapiens
agcaatcatctcaggggaactcctgagcaatcaaatgtgatgtcccctctcaacatcttcttctgacaaacggcaatcacgccccttccaggtgctattttcggccccaaagaaatggagaccggtttactgggaatctttcagaacacagcagcagatccagaggccttaaagggctactgagtacatctgctgggtgctcactgcatgctaacacttcagtggccatatgcattacttcatcatttaatctttgaaacaactccaaacggtgggcattctgttcctctttttataggtaagaaaactaaggcccagcgtcaacacggttcagtataaacccaagtctgaagcctggtcctaagctctatgcacccctcaaattgggagatcacatagggaaaaaggagtgaagtaatgcaattaagtcttaaaaaaaaagggggggggccataaaaactaaaacaggagttcctaacctggggccatrggtgccctgaaattggaatgacggatgtaagagcatttatctaaggagagagacacaagagatttggtggattcccaaaagtgtcttgttactcactccttgagggttaaaaatcatcaacctat

SEQ ID NO: 899230 - DNA, 257 bp, Homo sapiens
gctactagcagcctaatgtctactctcaaaaagcatccctccactgaattagctaatcctctgatctgtattggtatcactcagtgattagcagggattagaggagcayctactactaaaagtcagggagatacaaaaaaagattggactaagaactggccctcagacttagtggccagctggagaaacccggtgtatgcttgggtccaacagaaaagatacaccataggatgatcccactttgcagcatgtagatg

SEQ ID NO: 899231 - DNA, 260 bp, Homo sapiens
gttaaaatttcctactattattgtattgcagtctacttcttcctttagatctattaatgtttgctttgtatactttgggagctctggtactggatacataagtatttataattgttatatcgttttgctgaattgacccctttatcattacgtagtggccttttatgtccttttcacagcctttgatttgtagtctattttttctcatataagtatarctacttctgctcctttttggtttctgtttgcatggaatatca

SEQ ID NO: 899232 - DNA, 637 bp, Homo sapiens
aagaaaatcattcacaaaggttgtttcatcagtatgtggctagtggctttgacgtgtacctttgaacaagggtagaaagcaggtaaagagacaaagggaggtcaccaggagggtgcagggttctgggctgagagtcgtaggagcaaaagagtccatacttcctgaggaaagcgaagataaaatcatttgggtagggaatcctggctaaagacagattccagagggccctgggtggtaggcgaagacctcaggctttaaccagcaggcaatggacatgaaactaatcacagtggcacccaagtgactctagcttctccatagccctttgacctgacaaattatgagtctgtttctctgactatatgtcttcatatgttgcacaaagctcagaagagtttcacgtaagccttgagggcctgacacaaaaagctggtgaaggccatgaaggaagggaggcctgtgccctggggcgactcagcctgttcagggactcattgcccagcagaaggcttggtgcccagccctcagccttctgtgactgactctatgtggctgagagttgggtctcagccgattagagatggagtggggtagatagggggtccwgtaggatgcttccaaggctccaggatgaaat

SEQ ID NO: 899233 - DNA, 683 bp, Homo sapiens
gaaggtctggtccagatcatattgcagttagatgaaggccccacttgacagaaaggcttcatctaaagtgggagttgtgagtccttctgtgttattctagacgaggttcagttccccttggaattctgtttggaaagcaacatacttaataggttgcagtcaccacacaatatgtcaaagtgggaataagggtaagtgagcatgtctttaaaagttgtagaaccagacccagataaagaaagattaaattaaattaacatatagcataaaaaggtataggcaccagaaggaaactaaatacaagaatgatgttgctgtcacaaatctagattcacagaattgtagagctaaacagacctttgggtatcaaattgcccatcttcttcattttgcagaagattgccagctcaagagaggaagttacatgcccaaggccacacagctggttaattgcaggactgagactagaattcctagtttggtattcttttttactacaaactgtcactatttttaaaaaataattctcttgaggcatattttacatatcctaattcacccaagtatacaattcaataattttttttttgtaaatttaccaagttgtgcagycatcaactttcaagcagttttagaacattcccatcaccccagtatgattttttatgtcattaactgttagt

SEQ ID NO: 899234 - DNA, 645 bp, Homo sapiens
cagctgttcactgtcacatggcatttcagcagcccccagagctggctggagaagggcaggcctggtcagtctctgtctttgagatgtccagtgacctctgagtcttttttctcccaaaccgaaggaatgatccctacttttccttgcttatactttggggatgatgagatcccattcgtaagaaactctcagctccctggaggaggaatgagtgaataggtgctgctattatttttgctaatagcataattctaactcgagatttcaggaagagccatgtcagcttctggtcacctttgtggagctccttggcttacctctgaggaaagaacctccaatagcctcatccctttcctttcccagggtggacttttgatgtcccaggggtcaaacttaatcctttacacttctcctgtcagatatctaggtgcagtactgatgttacaattgaagggattctctctctctctctctctctccctgtgtgtgtgtgtgtgtgtgtgtgtgtgtgtacttcaaagcagtaaagggttkctttagtgtttaatgtttaaacagtaattaattgacacggagattggacagataagagcatagaaacctaagaatgctgggtacctctacaccctttggaaaactggatat

SEQ ID NO: 899235 - DNA, 622 bp, Homo sapiens
gcgtggaagcatctggaaggaagagcatggggcatgagagagaagcaaaggcttctttgaagaatggacactggaaaygagggcgaaacaatgaatagaaattatggggatagccatccagacggaaggtttgaagactgcaagtcaggagggcgctggcatgttggggggattggtggtaggcagcatgggggagcgtggtgagccagcagagcgtgtgtacgggtgggaccaggtggggcatttgtattatgttctaggagcagtgtgggtggtgggggtcttggcatcctcagactcatccttggcagagttcctgccaatgccctgtcaaggacgggcgtgggcaggtggggacatggagaggatggtgctgcaggcagtggggaccgagaacagagggtgtgtgcgagagccgtcctagggaccacgttgacaaggtgtggaaatggattaaattttggagaaacccaggaggatccctggtttcctggcttgggcatcgaggtgaacagaggggtctctcctgaaatacacagcgctgaaggaggaataggattggaggcagagaagtctttccccttttctgactgaactgcaccagggcaggggcctgggggac

SEQ ID NO: 899236 - DNA, 616 bp, Homo sapiens
gagcccaaagctatttcctatgctaatgactgccagtcaactctgcctgaaatttttaagcaggccgtaaagtcaggtgtcaacaggagamcattataaaaatggcactagataagggtcatttgtagagctttctattcctttattttacatttttcttctgtttgtccagagaaatcaattcagtaaacctatggactgtcttttaaaacgtgaattatggggttatttaagttctcatcgctggaaattctttttcccttagcacttccagtttcactattccccaagacttcaaattacaaatgtttcaacaaagtaaactttctaatgtacagtggatttccattttttccccatcacaaatagtgtggtgttccccactcacctgtaaagagactttaatacagtagttctctacagctctgaaggaggatagatgaaagtgtaacaaactgtaaaatcacaacctgtatgagactgcagagggacattcaccaaattctaaaaagccaaggtctagggaacgtctgcttttaagtaccaaagaggtagtaaaaaataaaaaccaaagaaaaatgaaatggtttactcaacatccagcggcataatgaat

SEQ ID NO: 899237 - DNA, 643 bp, Homo sapiens
aactgagcagtatgcggtgtgaagcactgtcctgaaagacgagttatttctctgtcagtcaattcaagatgtttgttacacacaactctaaaaacagactgataagagtttaaatcccaactctgtcacttccaaattacctaacctctctggtacccaattctcctttttgcaaatttgacactcagacattttcttaaaaatcacacataagcgagggttgggaacaagcctttgcaaaattatgtataatcagaatcatctttagaaaccctgaaaagcaacattgtctctataaacctatccctccacagtaaaatcctcaggcacattcaagtttaagatctacaaaagaagagtctagatcaagggtcaacaaactatggcctgtgggccaaattcaacccaccacctgtttttgtaaatggttttattggcatatagaccccctcatttacgtatttcatacggctgctttcccaccaccacagcatgcaacagaggccatatgkccctcaaagcctaaaatattttctatctggccttttactgaaaaagtttgctgcctcatggtctagatgcagatgtctgtctattgtgcttccttgccctttaagatgcctatcaaatccctagcagtgaa

SEQ ID NO: 899238 - DNA, 611 bp, Homo sapiens
ctgtggacacacctggttgaggactctgtgtaagagcatgcaaaatattgccagtccagagtttcttttggagggtagtgctaaatattgcttttgcgttatgactaccgcattattttggtgaccagcacagagtggtggaaaccaaacactcttgaattgtctgtcagtgtaacgaagataacttgcatttccacagggctttatatttttgaaaccacattcccatctatagccttgtacagcaaagtgcaaatactgtagcattatctccactttacaggagaatacacaaatgtgggagttaagtgcctgcctgcagaccagagatccctaaccttgtactcccattgctccattgctctggcaagggctttattggaacctgaatcaaatccttgtcaatcttgacttttcattcttggtttttgagcacttaaagtaggtctatggttttggtctaacccatttgtgttctttcctatgatctttgagtagatgatatcaattttaaatcttttaggcaggccagtatttggagaatttatattactamagaaaacccaacattttcaccctgaataagacatgtgtcattacctaacctttat

SEQ ID NO: 899239 - DNA, 584 bp, Homo sapiens
cactggtgaaaaaaggcattaaatggaacaggcaacaaatagtatgtaatgaggaatagtgaagagtgctattttagaagtgaaaagggtgcagtggtgtagagaattgcatcggaaggcagtggttagggagaaattctctgtgaaagggacatttgagctgacacctgaaagacgagaaagagacatttatttcaagatttcaggggaggccaccaggagtccaaggctaggccccagaggagagacagcagggtaagccgggagccctggattcaagctccggcttgctgtttctgtgtgccacatctcaggacaggtcatgcatccttctgagtctcttcttaacctcctctgctaacttcacaaggtctctgtgaggttccgctatgatcatagtgtgtcattttgtacaatgataagcagaatataattgccaggaatattattagattcatgtttctttgtctggtgggcatattgggtgtgggtgtgtaggaaggtgtggtccctagcaatgaaagtgrtctgggacccattctgtggaatcagtttccattcaattttctttcctggtacttcct

SEQ ID NO: 899240 - DNA, 581 bp, Homo sapiens
gtcctgacatgagctatctgtgaatgtgaccttatttgaaagtagggtctttgtrgatgaaatcaagttaagatgaggtcatgctgcattacggtagatcttaacccaatgatgacatgcttataaaaagaggtagttttggccgggcgcggtggctcacgcctgtaatcccagcactttgggaggccgaggcaggtggatcaagaggtcaggagttcaagaccagcctggccaagacagtgaaaccccgtctctactaaaaatacaaaaaattaactgggcgtggtggtgggcgcctgtaatcccagctactcgggaggctgaggcagggaattgcttgaacctgggaggcagaggttgcagtgagccaagatcgtgccactgcactccagcctgggcaacagagcaaaactccatctcaaaaaaaaaaaaaaaaaaaaaaaagaggtagttttgtacccagacatacagagaggagacttccagaaaatacacaggcagaggagaggaggccaggtgatgatggaggcagagactggaatgattcagctgcaagccaagcaatgccaaggtctgccaac

SEQ ID NO: 899241 - DNA, 581 bp, Homo sapiens
gtcctgacatgagctatctgtgaatgtgaccttatttgaaagtagggtctttgtagatgaaatcaagttaagatgaggtmatgctgcattacggtagatcttaacccaatgatgacatgcttataaaaagaggtagttttggccgggcgcggtggctcacgcctgtaatcccagcactttgggaggccgaggcaggtggatcaagaggtcaggagttcaagaccagcctggccaagacagtgaaaccccgtctctactaaaaatacaaaaaattaactgggcgtggtggtgggcgcctgtaatcccagctactcgggaggctgaggcagggaattgcttgaacctgggaggcagaggttgcagtgagccaagatcgtgccactgcactccagcctgggcaacagagcaaaactccatctcaaaaaaaaaaaaaaaaaaaaaaaagaggtagttttgtacccagacatacagagaggagacttccagaaaatacacaggcagaggagaggaggccaggtgatgatggaggcagagactggaatgattcagctgcaagccaagcaatgccaaggtctgccaac

SEQ ID NO: 899242 - DNA, 588 bp, Homo sapiens
ggggcggtaaaaatgttctggacctagatagcagtgacgtggcacaatctcgtgaatatactaaaaaccactggattgcatacttaaaaatggtaaatkttatggtttgtgaattatatttcaattaaaattaataaatgtatgaaaacaatgaatcacaaacttaaatgtaagatgtacaactatgaaacttttttttttttgagacggagttttgctctttctgcccaggctggagtgcaatggcatggtcttggcccactgcaacttctgcctcccaggttcaagtgattctcctgcctcagcctcccaagtagctgggattacaggtgcacgccaccacgtccggctaatttttgtattattagtagagacggggtttggccatgttggccaggctggtgtcgaactactgacctcatgtgatccgcccacctcggccttcaaaagtgctgggataatagatgtgagccaccgcgcccggccaccacttaaaaaaaaaaaaaataggctatagcctttgggatctggggatgttcaacatcatcagccattagaaaaattacaatgagatatcactacacatct

SEQ ID NO: 899243 - DNA, 588 bp, Homo sapiens
ggggcggtaaaaatgttctggacctagatagcagtgacgtggcacaatctcgtgaatatactaaaaaccactggattgcatacttaaaaatggtaaattttatggtttgtgaattatatttcaattaaaattaataaatgtatgaaaacaatgaatcacaaacttaaatgtaagatgtacaactatgaaacttttttttttttgagacggagttttgctctttctgcccaggctggagtgcaatggcatggtcttggcccactgcaacttctgcctcccaggttcaagtgattctcctgcctcagcctcccaagtagctgggattacaggtgcacgccaccacgtccggctaatttttgtattattagtagagacggggtttggccatgttggccaggctggtgtcgaactactgacctcatgtgatccgcccacctcggccttcaaaagtgctgggataatagatgtgagccacygcgcccggccaccacttaaaaaaaaaaaaaataggctatagcctttgggatctggggatgttcaacatcatcagccattagaaaaattacaatgagatatcactacacatct

SEQ ID NO: 899244 - DNA, 639 bp, Homo sapiens
taaccagcttagaggtctgggggttttagggaagctgggaagtattattgcatgttagagcttgagaacacagggcaggccaaaaggttaggttctgatatgtgtgaaggttgagtacccggcccggcacctagacaatgcttcagtttggcttgcaaccaacaggacacaacagtgaaggtacccattgctgggggaagaggagtaggaggctgtggtcatcacggttggggaaggaagccatagttgaaaccacatgtaaataattaggaagaaaaaagaccatggtgtcatatagatttgtaaatctctaaaaatgaggatggttaggggtactgaaaagaattaagtattgtcatgaaatgctttcctccactgtacattaattttatttaaaaactcttatataagcatttactttgtatcaggcactgttttgaacgctgtgcaagtatgagctctcctacgcctcattacaaacctatgagctaagcacttttaggtcatcactgtttcaggatctggaaaatrtggtcctggaaggttaagtcacttacctgaagtcacctagcttccacgtgggattcacatgcaggcagccctgcttgagttcacggcctctctacaagactcaggcag

SEQ ID NO: 899245 - DNA, 601 bp, Homo sapiens
tccatttttctttctctctccttttttttttttttccaaatcaagacatgrtaaacttacctcttccattcatctgaatagtttattattggagtattctgtctcacctgcactaattgcagaaaactacatacaagttttctcttttccactgaacttcctttctacatttcccttcttccccattcccctctctgctttcaatccagaagtttttctttatctttatggggaatattgtggtatagcaggaagtacaggtgctgtaccaaagtaagataccagccttcaaatagaaactcacttgcattcatttagcagactaataaattcttgtgtcaggtattttgctaaatgccaggaatactaaaatgaaaggattatagttgctgaaaaaaaataaagtaggagattattaattctgtatattctgaataaagaaagcctttgcaaagaaaagaacattcaacctgagtcttgagggaattgcgaatttcattgttttacaaagagaaagaaaaagccagctaaatgagtcatatgttgctaaactacaaggaatatttcaggaatgtgacataggcatgtatggatacaggag

SEQ ID NO: 899246 - DNA, 620 bp, Homo sapiens
aaaagtagttccttttgtttccaaaaggaacattgcagaagtaaagtataagactgagaactaaaactagtcatgactaagtagatgtaccccggctctagtttttttcctgrgaaatcttacttagttttgattccttggttctctactctatggacagaaatatttttcctcatatctgaaatctaattaatatcaaaaggtggtcatggttactgtccttgttgattaggccaaacatggagatactgtccttaaagttgttgttttgttttgtttttaattaatgaaggcatatacaaagcatttaatgagcacatgtgattcttggcttccttatttaacatgttaatgataatgatcatggaaagtcagaaaaataggttttgaattctgattcataagctgagtgaccttgaacaattaacctctttgagtcttactttaaagaggaggtcataataatcgtacttggcctttcctactttactatacagtgctatctaacttttattttccttagagaactcaagtatactctaatgctctgagaattgagaaatgcttaaacatttgaatatctactttaaatcctcacaccagagagtaactatcacatt

SEQ ID NO: 899247 - DNA, 617 bp, Homo sapiens
aaattcattatgccgctggatgttgagtaaaccatttcatttttctttggtttttattttttactacctctttggtacttaaaagcagacgttccctagaccttggctttttagaatttggtgaatgtccctctgcagtctcatacaggttgtgattttacagtttgttacactttcatctatcctccttcagagctgtagagaactactgtattaaagtctctttacaggtgagtggggaacaccacactatttgtgatggggaaaaaatggaaatccactgtacattagaaagtttactttgttgaaacatttgtaatttgaagtcttggggaatagtgaaactggaagtgctaagggaaaaagaatttccagcgatgagaacttaaataaccccataattcacgttttaaaagacagtccataggtttactgaattgatttctctggacaaacagaagaaaaatgtaaaataaaggaatagaaagctctacaaatgacccttatctagtgccatttttataatgktctcctgttgacacctgactttacggcctgcttaaaaatttcaggcagagttgactggcagtcattagcataggaaatagctttgggct

SEQ ID NO: 899248 - DNA, 613 bp, Homo sapiens
atccattttgataacctgttttgtgtgctgtaactgttcagtttagaaaatacagagttgattccaaatttttcctgctggtttgaaagaattcatacatctttcaaagtgtgactgatattcagcaaggaagtgccttactagttgaacaggatctgatttgtcattcttgtttttgctgtaaagcaaaatctacttttagttaaatcagtaatttacaggtatataaactaaagcatcaagaaaacagcaaagaagttttttccaagatcattcacatccagaaatgaaatgaaacccctacgaggctccttcttcattttgatggggccattgtggttctggcccctcagtttggttgagggcaacatgcggagtatctcagctgaacacagatccttcatttgatgtcctgtctaaacgtgacttcacaaagatcttttagtcagacactggatagcagaactcctcccctgggagaaaaggtctttaaggtattttgaggggaggagaagggttaagaggtctaatccataactctaaatccccatgcttggaggarctcattgacattgtcggttttaagggctcctttggagccattatggtgtgt

SEQ ID NO: 899249 - DNA, 571 bp, Homo sapiens
tgctaaaagattggtttatttacttccccaaacccaagtttttgtatttgagctttgttcttttctctctttctcttttttttttttttttgagayggagtctcgctctgtcacccaggctggagaggctggagtgcagtggcacaatcttggctcactgcaacctctgcctcccgggttcaagcaattctctcgcctcagcctcctgagtagctgggattataggcactcgccaccacacccagcttatttttatatttttagtagagacagggtttcaccatgttggccaggctgctctcgaactcctgacctctgttgatccacccacctcggcctcccaaagtgctgggattacaggtgcagccaccgtgcccggcctcttttctcttttttaaggctttcctttcagttttgtgaacctaaaaaaaaaaaaaaaaaaaaaaaaaaaaagcgttgcctgcagtgtgtaaggctttccactagtgctttccaaggacgatatcactgtcatcatctgtgtttaactcactcatcctcagctaaaaagctcctctcctctcccagtaga

SEQ ID NO: 899250 - DNA, 571 bp, Homo sapiens
tgctaaaagattggtttatttacttccccaaacccaagtttttgtatttgagctttgttcttttctctctttctcttttttttttttttttgagacggagtctcgctctgtcwcccaggctggagaggctggagtgcagtggcacaatcttggctcactgcaacctctgcctcccgggttcaagcaattctctcgcctcagcctcctgagtagctgggattataggcactcgccaccacacccagcttatttttatatttttagtagagacagggtttcaccatgttggccaggctgctctcgaactcctgacctctgttgatccacccacctcggcctcccaaagtgctgggattacaggtgcagccaccgtgcccggcctcttttctcttttttaaggctttcctttcagttttgtgaacctaaaaaaaaaaaaaaaaaaaaaaaaaaaaagcgttgcctgcagtgtgtaaggctttccactagtgctttccaaggacgatatcactgtcatcatctgtgtttaactcactcatcctcagctaaaaagctcctctcctctcccagtaga

SEQ ID NO: 899251 - DNA, 591 bp, Homo sapiens
acttttgtatgcacacagcccaagttaggattaaaggtgaacagaacccactcatgaggtcctggttctcactcacagaaacaattcacagttggaattgtgactgtcatatctggatccatccacaaatgagatggtttctcatttctggacccagatcacaggcacattgatgactctcatacctgaacttagggcaacatgtaggatcatgggtttataccatcattaaggtctcagagcaggtttcattctcatgcagaccatacgaagctcttaagtggcacagaaggtatcttataaacacccagcacgcaggtgacattgtgattgctctatgcacccagaacatacactgaggtatgtcatcttcccgtatagacacagtccattgtggaaattctgaatatcacatccagatcagttgaaagttgacattgtgactctcatatatagaaccagttcacaggtggaatggtgacttttatamtaaacatcagcatacctgtgaggcagtgactgccctaattagacagtgattgcagttgaggttggagcttacatgtatgaatactgtctatcactgatatt

SEQ ID NO: 899252 - DNA, 631 bp, Homo sapiens
gtgtctcatgatcttcactgtgcttagatgaaaaacagttgtttcattttttgcttactataaataatgatgtaatgaatattcatgyattgacacacaatttacccatgtaacacacctgcacaggtaccccatgaacataaaagttggtaggaaaaataaataaataaataaatctgggagagaaacacacacatgtacaaaataaaataaaatgattccttttttgtcaaatttaatgttttctatatttttcaaattttgtaaaatggcatgtaattactttttagtttgaccaagagccagagcattttactttataaaggtattttagaaatggagttagtttaaagcattatgctaagagaaagaagccaaacacaaaggcaatgtattttctgattctgtttgtatgaagcatcaagaatagacagatctgtggagacagaaggtagattggtggtttccaggggctggataggagggagtgaatgtggagtgactgctatggtatgtggattatatctcaattttaaaaacttgagtcaaaatttttaaaagtaactgaggtagtttagtcattattaatattatccttcactgctactaatttaaaatttcttttttaaaa

SEQ ID NO: 899253 - DNA, 595 bp, Homo sapiens
tcaagccatgtactattaacacgtgcatttcattatgagaaatccttaggctattctctggagaagttgctgtttcagaaattttaggtgtcccatatggcatggataaggatgtaattatgaaaagatgtagattatcacagaaagatatacctttaagttattttgcccaaaactagcaaatctgaggtttcttccagaccatgaggacctgataaatagtttcttttctgaaaaagaaatggaataactctatgaaagaggctctaaatgggaggcagaaaatgaaagaaaaatgtatgttattccatggctatgatttctctgcttaactttcagggttaaaatattagctagctccatcatcatccagtcaaatccgtaaaccaaatcccttcctctttcagaatacctcttactttaggttctcatctcctgagtagactattgccatcatttctctgctttaacttagtctatgcacttcggccgtaaagcaagacaggraaatacagtttgggatagatgaatgttcagcaccaatcatttaaaaggggctgtcttacctataggacacacttctaaatattatcct

SEQ ID NO: 899254 - DNA, 578 bp, Homo sapiens
tacttgtttgcttaacatacactttgctccaccaaattggattacatacataaccttgatattagttgcattctctatacacttgaagattgaggtaaaagggatctgacctaccatgccamgaaatgtggaatctgtggctttctctaagatttatagaaatttgtggggtaaagcagagaaaagggttacattatcagaataacttcaattattaaaaactttcaatttccacagatacataaaaaagctctgccagccattaacagatggcaatagcaattacttgtgtggagtcactttggatttatgcacaattagggattttggttacctaagctgtttgtaactagaggagcatctgtgattagtttacagctccacttaccttcctgctaatgtggtccctctattacaattagttaacccagtcatggaattcagttctctttcttaattttaaggaaaaaaaaaagaaagaaaaaaactacaaaacccaaacaaaaacaaaacaaaaataccatgaccaaagcatcccacctacacaagacatttagtagaggaaatgaaatacagag

SEQ ID NO: 899255 - DNA, 631 bp, Homo sapiens
ggacatgcttcaaactgaagggttctgagcaccctctgtccatttgggcttgcgacgtggcgggcaggatggagaggaacagcccgcttcccttacatcttcagagtgcttagaaatgctttcaggcctcagcaagacagcaaaattaacctgaatataaaggtgtaattctatttctcagggcagcagagctaaaaaacgaaggaaggggcttcttttgaagccgatgcgataatcaaagtgctttcaggtgtacttcgggcatacctcccctggtttcagcaggctaacttcattaaagcgcctagctactgctttaatgttttctaggctttcccccagggtacattaagcagaaacaagctctcatgggagcttgttccctgatgttttgcattgtggatggaatgcaggggcaacatttatgctggaataatattaaatgggaaatcgtttctagagcacaataaatatgatcactttcagctagtaacctcttctctctttmtaatccaaactttccctccccacctttaaaaaagtgacaacaattttaggaaactctggtctagagtcaccagataaagcatggaccatatgcctccatttattatttgctgaatctgattca

SEQ ID NO: 899256 - DNA, 464 bp, Homo sapiens
tatatcagattttaaaccaacaacagtaaacagacaaagaagggtattacataatgataaagagttcaattcaacaagaaaactatcctaaatatatacagacccaatattggaggacccagattcataaaacaagtacttctagtcccatggaaaggcttagacagccatgtgataatagtaggggacttcaacactccactgacagtgttggatccttgagacagaaaactgacaaagaaattctggacttacactcaacatttgatcagttggctctaatagacatctacagaatactccaccaaacaaccacagatacacattcttctcatctgcacatagaacakactctatgattgaccacatgtttagttataaagcaagtctcaataaattaaaaaaatttgaaatcacaccaatcatactcttggaacacagtgcaataaaaataaaaatcaata

SEQ ID NO: 899257 - DNA, 577 bp, Homo sapiens
gtatctccttgtggttttgatttgtatttctctaatgatcagagatattgagcttttttttgtatgtttgttggctgcatgtatgtcatctattgaaaagtgtctgtttgtggtctttgcccactttttaatggggttgtttgtttttttcttgtagatttgtttaagttccttatagatgctagatagtaaacctttgtcagatgcatagtttgcaaaaattttctcccattctgtaggttgattgtttactctgttgatagtttcttttgctgtgcagaagctctttagtttaattagatcccatttgtcaatttttgcctttgttgtgattgcttttgtcatctttgtcatgaactgtttgccagttcctatgttcagaatggtgttgcttatgttgtattttttccacaatgaaatttaaaatacagtttatctagaaataaattgagttaatratatgcgagagggcttcaaagacaactataaagcattatttgtagaaattagagaagacctaaataaataaatgatattgtaaagatgtcatttcttctcaaaatgatctatagtatct

SEQ ID NO: 899258 - DNA, 600 bp, Homo sapiens
gctttgctggagttatttgcagtgtgtgacagggacagaaagtgtgaatgcatgcagcctcacatctgatgggtacatccctaagctgcacaactgtggcagcctcagatgaatcatggcattttargatccgcatgtgtcgtcaacatacgtgggttgaattagcatggaagcatagtagtactctagaaacacaaataaaacacaccattgaagtacctgcagtttttcacatagaagccaaatgcttgtgaaatcagtacattttgagctttttgtttttagagctaatgctcttgtttactagataagaccatcttagcattttctatttaagtgtttaaaattcagtcataaaatttcactctaagctaaagctgtttatagtaacttaggctgtatgtgggtgtattaagaaggaaaaatagaatatatttctaaaaagatatattaaagtttttctggttcatgctgcttgattgatgatagatagatgattgattgctagatagatagatagatcaccataagtttgtttccatctgagtttgtttttagaaatgtgccttggcaaagaatcttctttagacagttaagtaa

SEQ ID NO: 899259 - DNA, 602 bp, Homo sapiens
accctatcccttatttttgttttggggttttttgtttgttttttttttttgagacaagttctcgctctgtcacctaccctatcccctttttttgtttgtttttgggttgtttttttttttttttttttgagacaaggtctcactctgccacccaggttggagggcagtggtgtgattatagcttactgcagccccaacctcctgggcttcccacctcaacctcccgagtagctgggactacaggtgcacaccaccacacctggctaatttttaacagttatttttagtagagatgaggtcttgctatattgcccaggctggtcttgaactcctgggctcaagtgatcctcctgcccttggcctcccaaagtgctgggattatgggcgtgagccaccccacccggccttacccttattcttgttatatcatggtcacagacggctaccagaaagaagattccttcccagaagttccagcagacttccctttacacctgactagccagaactgcagcacctggccatctccagctgcacaggaggmtggacagcaagaaacctcacatggtatctcaaaacattattctgtctcccttctcctc

SEQ ID NO: 899260 - DNA, 668 bp, Homo sapiens
acaactagtctatgaagtgggggtgtctgtaaaaacagcattattacatggttttgctgaggagagtactgtgccctaccactgtatgagtacttaaacaacaaccacaatagcaaytgttaacagtgcattcattataaaacacccatttgatggcaggaccctcatgaaagacaatttggcaactgcacttacccttggatccagtcatttcatttctagaagtttatgctacagatgcagtacttacatgtgaagtcattggttgttgcaatgtgtgtactagcaaaaggttagaaacaatattaatgtcccacaatcatggtacatctatataatgaactgttatgtggccttgaagaagattaaaacaatccctttatgtactgatagggaagtatctccaagatattgttaagtgaaaaaagaaaggtgcagaaacaatataaactactatgatttactttagaaaaataagtatacatggtatatatgaacttgtatatatattcaaattatatatatgaaacctgtaacaatgtttgccttctgggaggtaactgagaggctaggatgggagagaaaattattttccatgatctatccttttgtatcttggaattgagtatgtatcatctattaaaaattttttaactaaaaataccctt

SEQ ID NO: 899261 - DNA, 622 bp, Homo sapiens
ctctttctgcatgtttattccattccttctcagagcagacatttctccgtwtggctggaaacatggccaccagcaatttatcctatagcttctgttactgaaaagttctgtgactgccaagttaaaaaaaattgtaagcaagtaactcatgaggtgagggtcacatagaaatatggtgacacgtgtgtttgcctatatgactataagtggctgggtggctatttccctggataagagatagttgctgggcagaaaattacccagcatgtatgctcagtacagtgtgcccaactagtgcctttcaaatgtttggacagaaacccacagtaagaaatgtattttacattgagacacacatatagacacaggtttgattgagaaaaattttcttgaaacaatactcatccttactatgtacaaggcattctgctattttctattatattcaaaggtagttcatttttaaaaaattctgactgtaactcatctaaatgatctcatgactcagtgtataatgatctgtagtttgaaaaatactgcacaagacattaaaagtatcaggtaagttcatgtgtcagtagatatttgggtatagatatttgttgagtcttgaaggaataac

SEQ ID NO: 899262 - DNA, 671 bp, Homo sapiens
aaattagtgcctgagaggactaaacagaatatgtacgtaagagatatatatatatatatatatatatatatakatagatagatagagagagagagagagagagagagaaagtgtgaaagagagaacgaagacgattagattggggggtggtgtagaaatgaattcactttttattacttttactctataaaatgcattttagactctgaaattttacaaggaaatagtaagaattaaggaagtctttaaagtgccacttgaaaatcatgttatattgcaagtactacactggctttaatattcaagactctcatttcttttttttttttttttttttttgagacagagtctcactctgtcgcccaggctggaatgcagtggcccaatctcagctcactgcaacccctgcctcccaggttcaagcaattctcctgcctcaggctctacctcagattacaggcatgcgccaccacgcctggctaatttttgtatttttagtagagatggggtttcaccatattggtcaggctggtaagactctcatttttttttttttttttttttgagatgcggtctcaccctgtagcacaggctggagtgcagtggctggatcatgggtcactgcagcctttagccccctgctcaagagatcttcccacctccatctcccg

SEQ ID NO: 899263 - DNA, 643 bp, Homo sapiens
tattttgttcagtaaatgcattcaataagcatataatttaaggtgatccaatatttatagcattgtaaatattctcctagttatacattcacaaagcagggtaaacatattacatatgacatgccctgtgcttagttttgacacataagattaacttagttgacccggttgtttctggcatttttgttccctaatttctgtgagtgtcaccaggatttcacatgggatctcctggtgttttgttgtattaagtggctggtttgaaaccatctttctctgtagaagtctttccccattattctgagaatccttgaggcttatgctggcttgaaaccatcttactctgtagaagtctttccccggtattctgagaatcctttaggtttatgatcatattactgttttggctcctatttctaagcttactctctcttttggtgtgggtacaacccaggttttaaactcagccccttccttcaatttcacataaagctttacttacacaaagattctgcaagttacagcagactctgcygaagttggatggggaatgaagaagacaaagggcgaacattacggaaatgctgatagttgaaaagtgagcatgaggcatccctgttaatcaatttgcatttaaaacatc

SEQ ID NO: 899264 - DNA, 620 bp, Homo sapiens
ctaactaaggaaaggaatctatcattctgttttagttattactctgttttagttattactctaggactgctcactcaacaratgttgagtacctattacgtgctagcaactgtgctagacaaatcaggtacccgtgtcttgagagctgagatagagacaaaggtacaataggagctggagctggggctttactagggaagggtgataattttttttttttttttttgagacagagtttcactcttgttgcccaggctggagtgcaatggcaccatctcggctcactgcaacctccacctcccgggttcaagcgatgctcatacctcagcctcctgaatagctgggattacaggtgcgcaccaccacacccagctaatttgtgtatttttagtagagatggggtttcaccatgttggtcagcctggtctgtaactcctgacctcagctgatccatccacctctgcctcccaaagtgctgcgcccagccaggtgataatttttgaagggagaaataactcagtggatagatcttgaacatttgtattgaggaatttggatttaaaatagtaagcagtagcaaataaccatagggtcttatacagtaagatctttgataaaga

SEQ ID NO: 899265 - DNA, 492 bp, Homo sapiens
actttattgatattatctgcttttatttttctcataatcagattatagactcttcaaggactacactgtatcttcatcttttaccccacatcctatcaaaattgtcctttagaggagaaaaaaacaaaatattaaaatgtgctgattgaaggctgggtgtcatggctcatgcctataattgcagcactttaggaggctgaatcaggaggagcacttgagcccaggagttcaagactagcctgggcaacataatgaaacccccatctgtacaaaaaaataaaaaattaaccaggagtgatggcacatacttgtagtcccagctactcgggaggctgaggtgggagaattacttaaggattacttaagcctgggagatcaaggctgcagtgagccatgattgcaccactgcactccaccctgagtgacagarcaagaccctgtctcaaaaaaaaaaaaaaaaaaagctggttgtggtggcattttgggagccca

SEQ ID NO: 899266 - DNA, 607 bp, Homo sapiens
cttgtcagttcagaacaattttcttttatttctttcttattcttattctttctgttcggctactctgcattttatgtgtgcattttttgttttaaatttgcactcacgtgtggattttttttctaaatttgcatttaatttttacttttttgtctctcaagaattccaattttttaatttccttggttcttggagaaatgttcagtttcaaacatctgaaacagtttttagagcactcaatcaacttttcactgcctccttttaagtattcatttttgaaaattcttataaaatctttcttgatttcagaatattcatttttcacaactgatgctcaatttttatacctgtgacaacttcttgaatcatgtcaataataggaatgagaatacttctaatttttttcttccacccaagaaaagatagcaccacccttttgaattgcagcattattttttatgtgtgtgaggatatgttcctatttatatgtcctcayagctgaagaaagaaagtcagtcatacttggcctctgctagaacagtagaagccaaaggagataagacttcctccatatccctaagataaaaacctttgatcttctaattat

SEQ ID NO: 899267 - DNA, 607 bp, Homo sapiens
cttgtcagttcagaacaattttcttttatttctttcttattcttattctttctgttcggctactctgcattttatgtgtgcattttttgttttaaatttgcactcacgtgtggattttttttctaaatttgcatttaatttttacttttttgtctctcaagaattccaattttttaatttccttggttcttggagaaatgttcagtttcaaacatctgaaacagtttttagagcactcaatcaacttttcactgcctccttttaagtattcatttttgaaaattcttataaaatctttcttgatttcagaatattcatttttcacaactgatgctcaatttttatacctgtgacaacttcttgaatcatgtcaataataggaatgagaatacttctaatttttttcttccacccaagaaaagatagcaccacccttttgaattgcagcattattttttatgtgtgtgaggatatgttcctatttatatgtcctcacagctgaagaaagaaagtcagtcatacttggcctctgctagaacagtagaagccaraggagataagacttcctccatatccctaagataaaaacctttgatcttctaattat

SEQ ID NO: 899268 - DNA, 455 bp, Homo sapiens
tctgctctctgcaagttgtccgaggcagcaggctcctggtttgtgtagtagggttaaaggtgaggaagagtgaggtaagccccaacgcagccctctcagagaagtgggagctcaagatctgcctccacctccctcatctccagacacctgcactccaggctgggagccctcagccctggaggaaccatctctgaagttaggggatgcctcctgctgatggtgcaggtcagagggatcctagcccatttccaaattctttagcctcaagactgttactaggagcctagaaggtctcttcttccatattctcgccatcctcatttccaacaacacacatgtgcatgcgcacatgcacacactcacacaaagtcaacacacaygcatgcacacacacgcacacatgcacagtcaacagacgtgtgcatgcacgcacacacatacagtcaacatgtgtg

SEQ ID NO: 899269 - DNA, 703 bp, Homo sapiens
taatgatagagagtgcaaacaatgtcttagaaaaccttaaaaagaatcaatcatgccctgcctaagcagtttctgtccaggaatatgagtgggctcgtggctgggatttcatgctgcatataaacaacacactcaaattagctatccatcctaactgatcctgatttcatatgatggaatgaactatcagtatctcatgatcttcaaccaagagcactatgattttcaggggctctgccacttgggcagattcacaaatcacttagaggtgaaggagtgtagtggtaactagcagtaactctaaaagcctaccagcctggctctgagggctggatctacctcttacacttagctgtgtgaccctgggcaagttccctgacctctttgtatgtcagttccctctcctgtaactgggaatgatggcaacctccatatgattgtaataagtatcagatgagtatagtgcttagcgtagtgcctggcacatgagctgtacaagcagtcactggtatcaccatcatcaccaccatcctcattctgtggtgagggaaatgcctttgaggatcacagaaaaccgtagtaaagatgctttcaaattcctccacaagggggaatggatctgkagcatggcattgacttgtgatccaaattcatggctgcccaaaagctcttagagacgccatgaaatgagaaggggacacat

SEQ ID NO: 899270 - DNA, 489 bp, Homo sapiens
taatcccagctactcggaaggctgaaggaggagaatcgcttgaacctgggaggccagaagttacagtgagccaagatcacgccactgcactccagcctgggtgacaagagygagactccatttcaaaaaattgtatgtgtatgtgttacttttacaattaaaaataaaacattaaagaaaaatactttagaaaaacatttgataacatagaaaggcatgaacagtatattgttaagtttttaaaatcataaaactctttatatatcacatttttatatgtaaatacaaacagcaaatatcacatttttataaaaatgatatagatatgtgtatgtgtacgtaggtgtattgtatacatgagatgctgggggattagcataatatacaaaaaagaaaacaaaatggtaatttctgccagggttacatctgttggccttaaccacttttgccttcctaggtcccttcctccataaaaaaatgtagaaaatt

SEQ ID NO: 899271 - DNA, 489 bp, Homo sapiens
taatcccagctactcggaaggctgaaggaggagaatcgcttgaacctgggaggccagaagttacagtgagccaagatcacgccactgcactccagcctgggtgacaagagtgagactccatttcaaaaaattgtatgtgtatgtgttacttttacaattaaaaataaaacattaaagaaaaatactttagaaaaacatttgataacatagaaaggcatgaacagtatattgttaagtttttaaaatcataaaactctttatatatcacatttttatatgtaaatacaaacagcaaatatcacatttttataaaaatgatatagatatgtgtatgtgtacgtaggtgtattgtatacatgagatgctgggggattagcataatatacaaaaaagaaaacaaaatgstaatttctgccagggttacatctgttggccttaaccacttttgccttcctaggtcccttcctccataaaaaaatgtagaaaatt

SEQ ID NO: 899272 - DNA, 540 bp, Homo sapiens
atactttgcaaaatgcaaaactttttacaaatttgaggtattctttcacaccaacagcactgaacacatcattttggaaatctatacactcttttttaaaaattttgtattgatacataatttttatacatatttatggggtacatgtgatattcagttacgtgcatagactgtgtaatcatcaaattagagttatctgaggtgtccatcacctcaagtatttaccatttctatgtgttggaaacatttcaagtcttctcttctagccattttgaaatatacaatacagtgttgttaactacagccaccctattctactattgaatattagaacttatttcttctacttaactgtgtgtttgtacccattaaccaacttctctttatctccctgcaccacctcccaccrcatacacccctcctagacgctgggatctatcatttttctctctacctctatgagattaactttttttttagtcctacacgtgagtgacaacatgcagtatttgtctttctgtgcctggcttatttcactta

SEQ ID NO: 899273 - DNA, 601 bp, Homo sapiens
agaatttctgtttggttatttttttgatgtctccttggtaaatttctcattcatatcctgaactgtttttctgatttctttgtactgtttttcagaattatcttgtatttcactcggcttctttaatatcattagtttgaattctttttccaggattccataagtttttttttttttttcttctttgagacagagggcttgctctacttcccaggctgaagtgcagtggcatgatcttggctaacagaaacctctgcctcccagtctcaagcaatactcctgtctcagcctttcaagtaactggaaccacaggtgtgcaccaccacatgctgctaattttttgtagagacaaggcttcaccatgttgcccaggctagtcttgaactcttgagctcaagcaatctgcctgcctcagcctcccaaagtgctggaattttaggcatgagccacagcccctggcctaggatttcataaatttctttttgattggaatttgttactggagaactatcatattyctttaaaggtgtcatatttccttactttttttatgtatctcaggtccttaagttgatatctgcctatctggtataacagtcac

SEQ ID NO: 899274 - DNA, 573 bp, Homo sapiens
ccatgaattggaactagattctgccccagctctgcagcttactagctgtgcrgccttagggaaagttactctcctgccttgggcctcggtttcctagtaaaatgaggggattggaccagatgacctttgctattacttcacattctaacaatctatgatcctggctattatttgaaaactcagagggattctagcaaagcttatggaagactacagtgttctttttttttttttttttttttttttttttgagacagagtctttctctgtcgcccaggctagagtgcagtggcagcgatctcggctcactgcaacctttgcctcccaggttcaagcaatcttcttgcctcagcctcccgagtagctgggattacaggcatgcaccatcacacccggctaatttttgtgtttttagtagagacgtcatgttggtcaggctggtcttaaactcctgacctcaggtgatccacccgccttggcctcccaaagtgctaggattacaggtgtgagccaccgtgcccagcccagtgttctgtttatagagcaaatacagatttttcactatttctgctg

SEQ ID NO: 899275 - DNA, 655 bp, Homo sapiens
tacattttatcagaatgaatttttgctgtacaaaccacagagatttttctctatggaaaccatgggtcatgtaattgtagcgaggtgacagagttttagatctcataagcaagtcatttaaatkgtgtgagcctcagattcttcatctctaaaacagagaaaataatacctactgcagcaggctcctgggaggatgaagactaagtgggatgtacacttttacctacatgcataaaagtaacactcagtaagtgaacctgcattcatagatgaatcatagcagcatcttaagaggctctgggcagcatttatgcccctctgcatgtggagcagacttgggtatacatttaccctttatatacatgttaacattctctaggacataacattgatatgtctgttaaaaattatagggttatcactgcccaaacagttgcttcacgactcagcttcccacactacaggaggctaatttagacacagctggtgatatttacaaagtgttatcagagtcctcaggccagtcttagaacctggtgtgcccacatacttcccactgtaactaaaccatctacactagcaggaggtatctacacttgctgagtaccaattctacttgacaaagccttatttcttaggtattcaagtctacagg

SEQ ID NO: 899276 - DNA, 667 bp, Homo sapiens
aatggggcctgtatagtgtcttctccatccaagaacagtccagtagtccaagttacaaatatatagcaaacttgaacycaaattttatgtacaatagtattaatatccaatgtgatggatctaggttgtgcattccttatgagactctaatgcctgacgatctttcactgcctcccatcccccaaagatgggaccatctagttgcaagaaaataagctcagggttcccactgattccacattatggtgagtacataacaataatagaaataaagtgcaaaatacatgtaatgtgcttgaatcatcccaaaaccatcaaaattgtcttccagaaaaccagtcactggtgccaaaaagtttggagaccactggcctaggggatggggcctggacaaatgagtagaacctaacagcctgagctgactgccagagactctaaacctggattgtgagattatgagttccccaatagctgaaactctcagaagtggcacaagtaaccattcggcagagaaattttaaagaaattcacattaagccggggttgaacttggcacactgcaaaaccctcctaaagctttaagctcaggtattttctaagacccacgtttcagttggtagaagaaaatgcctacattttcttctgtgcactggcaactcatagatct

SEQ ID NO: 899277 - DNA, 667 bp, Homo sapiens
aatggggcctgtatagtgtcttctccatccaagaacagtccagtagtccaagttacaaatatatagcaaacttgaactcaaattttatgtacaatagtattaatatccaatgtgakggatctaggttgtgcattccttatgagactctaatgcctgacgatctttcactgcctcccatcccccaaagatgggaccatctagttgcaagaaaataagctcagggttcccactgattccacattatggtgagtacataacaataatagaaataaagtgcaaaatacatgtaatgtgcttgaatcatcccaaaaccatcaaaattgtcttccagaaaaccagtcactggtgccaaaaagtttggagaccactggcctaggggatggggcctggacaaatgagtagaacctaacagcctgagctgactgccagagactctaaacctggattgtgagattatgagttccccaatagctgaaactctcagaagtggcacaagtaaccattcggcagagaaattttaaagaaattcacattaagccggggttgaacttggcacactgcaaaaccctcctaaagctttaagctcaggtattttctaagacccacgtttcagttggtagaagaaaatgcctacattttcttctgtgcactggcaactcatagatct

SEQ ID NO: 899278 - DNA, 371 bp, Homo sapiens
ctctatactctgtcttcctaagtgttactatcctgtcctgaggcaccatcatcctttgccgggaaccacagtagcctccctggtagcacccttatctctacaatctgttctccacagagtagctagagtgatcctgtaaagtataagtcaagttatatcccttctctgctcaaaatcctccagtggctccctatttccctcagaagtcctttcaagagtctacatggcccatgtgatctggccccaccaaccacttcccctcactctactcttamctctcacctttcctccaggatcatttttctccagccatagaaatgtccttaaaccttacacaggtgaggcgctcctgtcttagcacatatgtgtac

SEQ ID NO: 899279 - DNA, 614 bp, Homo sapiens
tcataccttaagttccttgaagcattccacagctgtaatcatttacttcaaaatgggtcaataggctagagagagggccttattttgcccctagcactttttagacttataaaygatgtttttatttatttttaaattgatgaaaactatatatttatgatgtacaacatgttttcaaataggtataccttatggaaaggctaaattgagctattaataattatacattacctcacatacttatgcatgttgtatttttaactagagacagtttttcttaaaaggaaataagttggccactgttctttcatcttcaggttaattcagaatttaaaatgactatatgcccagctgatatgcacgtatgaaaagtgaagcactgtactcctgaaatagattatgagtgtgaacaatggaaagaagatggaatggcacatctcaccactcaatcctgtaccattcaatatggtagccactagtcatacgtagctattaaatcactgacatgtggctaacccacattaagaagtgcagtaaccataaataccagatttcaaagatttagtatgaaaaaaagaatataaaaatcttaaaatttatattaattatatgtt

SEQ ID NO: 899280 - DNA, 616 bp, Homo sapiens
aggaaggcttccttccctgactccctttaggccaactgagttgttccccaaccctggtcccctagtccttatcatgcctagaagttgcccattgtctaktcctgtccccattacatcataagttcctggaaagtagaggaggaagtgctgacatggtatggagtacaatgagatgtgctcaatgaaaaaatgatccgttttgtatgggttgagcaactaagaggctttattaacagtgagttggagagtcacacagcaaatgcttattgagcacctactatattccatatattgtaataggtgccagaggatacaaggatggttcaaagcacaatgaaacttattgttctatctcagtgagtttatgtgctggatatttatatgtaaagataattaaaaaatttaaaaacagtctatgaaaatgtccatggtctatacacacaacgaatattaaggaattaatataaggttagagtggtagttcataaaccttctcactcatcaatagggagttatttcctgccagaagaggtggggttttgaaagataagatttaacaaaatgaaaattgtgaagcttgtccaggtgaatacataaagggataaaagtgtggaat

SEQ ID NO: 899281 - DNA, 620 bp, Homo sapiens
aacatctgcaccatgcagaatgacagccttctgaagaggacagagtccaatgggagtggcgggattctgggtggacggtgccacgtctgttacctgctgaaacatctaaactgacctggatgctcttcccaccyctctgcttccccgtccaacacctccaacatgctgaggagcagaatcagaaacagagccctggcaatggcttcagctgcacagctggtcatgctctgaagccaggacagactgggctcaggaaagaggctgttcgactacagaacagattctcccattaatcaggaaagctcatgggaggaagaattggagccagtcagctactggtctggatatggctaataatttctgtctttggtttctggaggaactgtgccagggtttcttccaactgcacacagcaaatatgactttccttctgtatctgaaaaactggcagcaaaaacactgaaaagaaatgggactatggccaaaaggataagcttaaatgaaattaggcgtaaactaaaatcaaatgacaggtcaaaaaatactaaacctgtgatgtctcttcctttcagaagacaaacgcagtgttgtagtaggagttacatcttgttttctaaatt

SEQ ID NO: 899282 - DNA, 604 bp, Homo sapiens
atggattcctattatacttagaataaaatccaaactccttaccatgttgtctgtgtaactgagcccttccctgcctctccagcttcctcttctgccactctccccaacactcactcaatacactacagccacatcacaactttaagtccctcgggacacaaaactctttctcccatactggggtcactgaacatgggcaagttcactctgtctagaatgttcttccacgagctctttgcacagccagctccttcttacctttcagtccaacttaaaacatcagctcttcagaggagagactttctcaagctatcctatctcagtctcagtaccctgtacgtcaacagcaatcacataattttatttttgccacttaagactgaaagctcggggggggactagaaccttatctgtcttgtttgccctgaatctagcacagtgtctgaacagagcaggcgctcaataaatatttgttgaatgaatgaatgaataacagattaaggaaaactaagtaggcatttgctaagggctgataactaccctatccaatgtaackctacagaataaacatataaacttcagacaaaacaagcttttgtgtgtc

SEQ ID NO: 899283 - DNA, 521 bp, Homo sapiens
actgaaggtcaaaggaacattaaagggcttacatatttcaaagtggtaagtggatrttttttgtggccctctcactttatgcatgcaggtgacatacatttcactgacatttaacaagcagaatttattcagcagcattcaaggaaaatcctggtatcgctttcaaacatgatttatttatatttctagcgctttatattaatacagattggttcattttcctgacagcctgagtccctcccaaatgccagtaagtgaataaagtcattcgtaagcccatttcacatttactacctacctcaatgtgtctaggtgttgtaattttataacctttttcctggggatattcatttatttttgatgctgcagataatagtaactaatgtgagatatactcattttacttctcttcttaggaagtacttcacataagatttaaaagatctgaaatgtcttctctggtaatagaaaacaacagtacctcagctcatgggaaatataacaaaatcaatcatgttaca

SEQ ID NO: 899284 - DNA, 513 bp, Homo sapiens
tcccagtcaactgactcaaatgttaatctccttcggcagcaccctcagagaaacacccaggatcaatactttgcatccttcaatccaatcaagttgacactcagtattaaccaccacaagtccaccccttgtcaacttgaacccatacacatctcctgagatcatacataatattagaataaagacaatgataaggtcataattatgccaaacacaatacaactatccttcatacaactggaaatacaccaatccccaacctaaatgttattacataaagttaacacttaaatgctgacatgaagtcaataaatcttctgtcatatgataaaggaaaaaagaaaataaaatgaagatattttcttagtacaagtgtataygtgcacaaacatagtttttaaaaaaagaagtaggaaatactcatgacaattatagtcctcgtttctgcaactggtcacatggtcatagctggcattaatgagtaccttcttctgctacccattctgtattccc

SEQ ID NO: 899285 - DNA, 600 bp, Homo sapiens
aggtgggtgcattagtctctgttcttcttggtttgcctctcctagcataaaactttcaccctatgagcaggttgcagtgtgagcaattggattcagtatgctcatcctgctgcatggtrgagcttctaccatatgaatgggttctatactaaagaagggagccccatatctctcagctaccctggcctggaattcagcttctgcaacagggaatctgggagtgggtttgagggtgggggtggggatgagaaatgccgatagcctggtcctcttggaatgatgctatagccctaaactaggagttgtggaaaagacagccctgtgatttttttttcattcacccatagtagagcttctattatgctgagctggaggacagagaagggagcaggtcatagctcaaatgccacagactgtcactcttcttaccgagatattcattttttaaaaatgtttctccatttgtcatactctcttaggacaatttccagagacttaaacattttaagaatcattttcaccagttatgatttgcaggggagagagtctgtagagctccttacattgcaattctggttttaataacttgttgttaaaaaa

SEQ ID NO: 899286 - DNA, 549 bp, Homo sapiens
cctaaattcctattgctcctttgaccatataatgttcaaattcactaataagtattggaaatgacatctacctttttcccaaaacttaggtttttggataatagagagcgagaaaatgaaaggcctatttctgaaagaagaagaaggcagagaaccatggcaggaaaagtctgtatcgcttgttctaacttaaggggtgtgtgtgtgtttgtgtgtctgtgtgtgtgtgtgtgtgtgtgtgcgcgtataggtactgttagctaatttttatgaatggcgtgctaatcagtggaaaagtttcatgtctacagaaattcttttccattggctctttaaaatatactaataactcaagacattttgcttccttttcagagatgattgtgcaagtcactggccaacaaccaagaaatcaaaatatctttccactggtacttaatcaattttctttgacttacctaamcaaaatctataagcaacatgtggtcacaacacccagaaaaaaaatgagagtgatcccatttttatgatgagtatgttagtatagag

SEQ ID NO: 899287 - DNA, 645 bp, Homo sapiens
ctatggagtactcattcttttattcctttactttcttaatgaacttgctttcacttttcactgcggactcgccctgaattctttcttgtgtgagatccaacaaccctctctaggggtctggatggggacccctttcctgtaacatatttctctgtcctgtaacactaagaataacaagacattacagctgtttctgtaataaacagccaataaacattaacagcttaaaatggtaaaggtttatttctttcactgtgtgccctttctgggtttgcaggcacattgtgtattactgtcattcaggaagcaagcttcaaagttgcttgttaccatgccagagacaaaattaaatatatcaaaacatactggctccaaaagtgacacacaacacttctactcaacttccactggggaacacaaggcacatggccacgcctaacttcaagtgggcgggagagtcattcttccatgttcctggagagtgggaagcagaatatttgtgagtagccttaaaactatcctgaggcatgtggctaagaagaaaggcatcaaagagcctggcatgtttgagacacagtaaaaaggtgaaatcttagcttggaaaccaccaatgaaaaacgytatatgccatacaatttggaattt

SEQ ID NO: 899288 - DNA, 593 bp, Homo sapiens
taggaagatatggtattatctgttggtttcaccagggtttgtgaatactgattacagtctttatacataacagtatttttaaatggctgctatatttggggagccccttgtctatactgaaggtttggactgttcttgtaaacaggtatatgcatctttaaaataatcaaatgtccacctccaccttgccccattgtttactagatttagacttatgagatggagcagagaaaagcctcactgggatgggtggagggtcttggtcttgtcttttggccttgagactttaggtactttccatacccaccaatatgtctagactcagaggctaacatgactgctagtgctcaccttggccctttagttcctgtctaagcatggatagacatgagttagtataaaccctttaaaagtcacaaagctaaatctggttctacttgcttgggtccttatcggagctccactcctttgggtcacatgtcaaaaaaaaaaaaaaaaagaaccagcatctgccagcaaagacccttttgcagtattaggcactttgttattataagagtcatcactkaacatcaaatagaggaggttacaaa

SEQ ID NO: 899289 - DNA, 634 bp, Homo sapiens
acaggtacttccagatctaattgaatacatccagtgggaaatttcgctttgcgtgattttttggctatccttctcatartggaccccagttttagttgtcagagtaacacaggcacagctgcttgaaggtcttgaaaatgaggttaacaaatattcagcttttggtgggagtttttctcaagttgttggaatagaatttggactcaattcagatgcggaactgggacactgaatgatagataacagatactgtgaaagttcaaggaccatacgaaaaaaatttaccttcttgctgctataaacaatatattgcacatgggaaagatagttacgttatgcctgatagttgttcttgaatgtttgacacagaaactgtacaagtaccttccacagtcatcatgaatcacttttaatcgataaaaattttgtagggaaggaagcagtgtctttcaggccattgaatgaatttgattactactacgaacaaatcatcattattaacagccttcgaggaagaatcagataagccatcagcagtaattgcagtacctggcatagaagggtgaatttgccatatttctcagcacatgaaagaacatttgtaccaacttagagccggaggggaacaaggttt

SEQ ID NO: 899290 - DNA, 621 bp, Homo sapiens
ggagttctggagaccttggagagaattaagtgaggtgcattcaactcgaggctggagacatgaatacctatttggaaaatagtstgtttttttccttcaatttctgagatggggagtaaaaactgaaatttccctcttttgtcctttacagattctaaaaatggcggccccaggctgatgttgtggtaatctaatcagctcgggtcctccacaccccatgcagtgcgtttgtctgcagcatattacaggcttattatgtttacatgaaaagactgggctgtttttccttccccgagccagttacaaaaatgtgttgattttttactgcaaattacagtgctgtgttttagctgattaatttgattcgtttttcctgaaaggcaaataaaatgtctccacttttgaaaaaaaaaaacagccttgcaaatttcagtggtgatgatgggtgcgcttcaacattaaaaaaaaattatttgggtaccaataatagtttttgtttggtttaatccaaccatcttttattcaatatgccaaagtagattaaaatgtttagtaactgtataagtatcatctattttatatgattaaatgtttcaatctagagtaagacatttcccaacc

SEQ ID NO: 899291 - DNA, 613 bp, Homo sapiens
agaggtcagttcatgaagcttaaggaaagaagccatctctgtgacataaaagtgcaaggtaggggctggccatggtggctcacacctgtaatcccagcaytttgggaggccaaggtgggcagatcactggaatccaggaattcaagaccagcctgggcaatatgcgagaccccatctctacaaaatatgcaaaagttagctgggcatggtggcacatacctgtagtaccagctccttgggaggctaaggtgggaggattgcttgagcctgggaggcaagggttgcagtgagttgagattgcaccactatgctctggtctgtgcaacagagtgagaccctgtctcaaaaaaaaaaaattttaaggtggactaggggcaatatctcatgactgtaatcccagtgctttgagagtctaaggcaggagcatcacctgaggctaggagttcgagaccagcctaggcaatgtggcaagatcccatctccacaaaataaaattttaaaaaattagttgggtatggtggcacacacttgtagtcctagctactcgagaggctgaggtaggaggattacttaagcccaggagatcgaggccacagtgaactatgtgtggcag

SEQ ID NO: 899292 - DNA, 622 bp, Homo sapiens
caatctaggggctggggacctggtccatgcacatggtctgtgcagccctagggggcgccactcacatctctrtgtatgttcccaacaggaacagggtaattgtaaggaaaaggcaggtatcttgtttctactttgggaaaacttacagtgataaaagaagaaaaagtgtgtgattcaaaagtgtttttctttatttcccataaattccctactattttcttgtattttattactttttttttttacaacccgtaggttttgacattttctattttctctggaaccttaaaagatgttcacaatgaacatgggctattcttcatatggtctaagatatctcccatctcatgaactcacattacttatgaaaacagatgatgtaagcattccaacctctccttgacttgccaatgttagtcatgtggggtcaagtgaaattaaaaaggccttggaaaccagagagtcctgggtttgaattctgattctgattctgtgacttcaaggatacatttttttcttttattaaaggagcatcatatgactcctagccagctggacagtgaggataaaatgagacaaggcatgcaaaacgtacagacatagaaggcacgcaataggtttt

SEQ ID NO: 899293 - DNA, 574 bp, Homo sapiens
tttatatcaggattgttacaggaaataaatgaggtgacatatttaaagtacttgccagagttcttggagcacaatacgggctcaacaaatgttaactccttccccttgccttgttctgagtgttctgtggaggagtggtgcagagtgcaatctaggggctggggacctggtccatgcacatggtctgtgcagccctagggggcgccactcacatctctgtgtatgttcccaacaggaacagggtaattgtaaggaaaaggcaggtatcttgtttctactttgggaaaacttacagtgataaaagaagaaaaagtgtgtgattcaaaagtgtttttctttatttcccataaattccctactattttcttgtattttattactttttttttttacaacccgtaggttttgacattttctattttctctggaaccttaaaagatgttcacaatgaacatgggctattcttcatatggtctaagatatctcccatctcatgaactcacattacttatgaaaacagatgatgtaagcattccarcctctccttgacttgccaatgttagtcatgtgggg

SEQ ID NO: 899294 - DNA, 674 bp, Homo sapiens
gttgtgaattcctcataagactatttcactcaaagagaatgacacggcagggagggtaggtcagacaatcctaaaagcaccatcactcctaatgcgtgtctgattccagcattaattaattctaactggaaactgcatgaagagtctctaattgaacacccagaggcagtggtctcaggcctgcacacagtgtgccatagtggttgggtttgaattctggctctaccacttactgactttgtgattttgggtaagttaacttttgagcctcatttctctcatctgtaaatgcgattagtaatacccactcagatgactgttatgagcattaaatgatatgatgcatataaatcacatagtacatctcacacatagtctactacatgtcagtaaatattcattcttactattgcagttacattgaatctgacctttctattggttaaaaaacaaaacaaaataaaaaaacaaaaacacttggagaggatttcttccctgccctgtagagttcatttccatgagccccctgagcagatctggcttacagagctaayggaagcttcttcaccgatactattccgaaaacggtattgggaaagagagtgacgagagagaaaggagagacagatagacagaaagagagggaattatagagagagaactcttactttctc

SEQ ID NO: 899295 - DNA, 632 bp, Homo sapiens
aaatcaaaaagttctttaaaactaatgagaacaaaacacaacataccagaatctctggaacacagctaaggcagtgttaaaagggaaattcacagcaataactgctcacatccaaaagtcagaaagatctcaaattaacaaactaacaaacatcacaactgaaagaatcagagaagcaagaacgaatcaaccccaaagctagcagaagataagaaataacaaaaatcagagctgacatgaaggaaattgagacatgaaaaaccagtcacaagatcaatgattccagaagttgtttttttgaaaaaaattagtaagatagataggctggtagctagactaataaagaagaaaaaggagaagatccaaataaacacaattacaaatgatgaaggtaatattagcactgaccccacagaaataaaaataaccatcagaagctactatgaacacctctatgtacacaaactagaaaacctagaagagatgggtagattcctggacwcatataccctctcaagagaaactcctccccacctcattctatgaggctggcatcattctgatactaaaactaggcagagacacaacaacaacaaagcttaaagccaatatccttgatgaacactgatgca

SEQ ID NO: 899296 - DNA, 632 bp, Homo sapiens
aaatcaaaaagttctttaaaactaatgagaacaaaacacaacataccagaatctctggaacacagctaaggcagtgttaaaagggaaattcacagcaataactgctcacatccaaaagtcagaaagatctcaaattaacaaactaacaaacatcacaactgaaagaatcagagaagcaagaacgaatcaaccccaaagctagcagaagataagaaataacaaaaatcagagctgacatgaaggaaattgagacatgaaaaaccagtcacaagatcaatgattccagaagttgtttttttgaaaaaaattagtaagatagataggctggtagctagactaataaagaagaaaaaggagaagatccaaataaacacaattacaaatgatgaaggtaatattagcactgaccccacagaaataaaaataaccatcagaagctactatgaacacctctatgtacacaaactagaaaacctagaagagatgggtagattcctggacacatataccctcycaagagaaactcctccccacctcattctatgaggctggcatcattctgatactaaaactaggcagagacacaacaacaacaaagcttaaagccaatatccttgatgaacactgatgca

SEQ ID NO: 899297 - DNA, 565 bp, Homo sapiens
gctttctctcctcatccagtaagggagcttatgagatgggtccctgacaaaggatacgatgaacctttctgtggaggacagatgaagccacagcttgtaggcttctagtctgtaaattctgtctttggtatgacttctttctttctttcttttttttttttttttttactcctcagtgacttccccattgcagcttctataagtccccatgtctccttaccttctttccccatctccttgtcaacacagaaaagaataagatattctcacatgcatcttagcccaggaattctcatttttgaactctttaactgtgaagggaagggctttgtctcctgctaaatgttcaggcagcatgttacaatgaagtgaagttgcccccccactggagtgctaagtcagtgagtctttattgattcctgtaaatgctaraaaacgggggttttactgctagaaatgacacaaacaagcgctgttggtatagatctttccggaattattctagaggagccattgtcactatggtgtatggtggaaacctgttaacaaacacgtccagctgcag

SEQ ID NO: 899298 - DNA, 563 bp, Homo sapiens
tgagatattttctttgctggattttctttgcttgctcccttggagactgcaaaaggtggtccaacagctgcactccgtggcctgayggcttgacccccggccttcttgacttcttaagtaagaatgcctttcagcattaagcctaatttggccaagacagtgagcagcttgttactttcaggttagctcattccatcttcagccacctgaagttactcatatgtaaaaaaaatttcacatgcagaggatgttttatgtaaccatctttcgcttattaatatcccaccattaggcaaaaaggtcaagaaagggctagattaggccacaaatccatattatgagacaaagatatagcggcctttaaatttttagccattgatcagtattttatttgaggacatttggctgttaagaataagaatgaataaaacacatttgccctccaccagcagctaaagtctctatgcttttcaaatatcaactgttgctagtggcagacgaacagctatattccaatatcctacatatagaaaatggattatttatctaaattatatatggtg

SEQ ID NO: 899299 - DNA, 696 bp, Homo sapiens
tgctaggctccagagtcagttttcctacatgaaaatcctggctataccatctgttatatgatcaggcaagtactttacctcactgtagtagtaagtacttcataaggttgtcagtattaaatgaaagagaacctgtaagatacagaacagtgcttggcatccgtaaagtctcattggattatgcctgctactggtattaatattttgctttatagtgggatataaacaggcaataaagtattatggttcacatcacactcatgaaatctgtgaagtcagaaatgctgtattaaaacatacagaaatatttaaaaatcactgaaacatgttttgcaccaacaaaacttatataattaagcctaaattggataaagtttcaaaagtaaacagttaacaatcgaaaggtcactataatgtcacttctcccccattaacattatgttgcttatggggacacataagtcattcatttgagaaatatactcaaattgaaataagtatcaacaactttccaaaggtagtttattttagtttagctgtattattttgtacaactattatgctaggccctgagctaaaatacaaaataaatacagaaatcataaaagctctttagggagagatgggatatataarggtattagatggtagcataaagcagtacagtgcaaaagtgaggaatacattacttaaaaa

SEQ ID NO: 899300 - DNA, 677 bp, Homo sapiens
gactccatccattgaaagaagaaagaaagaagggaaggaaagtggatgacaggaagagaaggggaggggagggaggggagggcagggcagggcagggcagggaatgtgtttcctaaagtatatgttaaaaagagaatataaattaacaacaccaaaaagctgaaacagggccatagaggagccaagctcaagcatactctatagaataagtcttggagtaaccaagaagcactaccttccatctataatgtaaaacaataataacagtagtaaagatgtattgagctaaggcactatgtactaggtattaagttatttacacctatgaattcattgtatcttcctatcctatgcagtacaaattaatattattcttttattgcagatgagggattgagaaactagcctgcattagtttcatctatgtattaaaacaacatgtaaactagaaatataatatatacagctatagcatgtatatttagataggtagatacatgatagatagatgatggatggatgcatggatggatagacagataracagacagactgatttaactcttcctaggcccacccatttgaagaacccaatgccttaacaaccacagtcgcattgtatgttggatgtttgacacggaaagagcatttggcagtttctttggtctatttccagt

SEQ ID NO: 899301 - DNA, 602 bp, Homo sapiens
aaaagaatgaactcctgtcatttgcaataacatggatagaactgaaggtcattatgttaagtaaaataaggcaggcacaraaagacaaatatcaggtgttttcactcatacgttaaagctaaaaaaaagttgatctcatggaggtagggagtagaatgataaataccaggggctgggaagggtaggagagagggtgagatgaaaacaggttagttaataggtacaaaaatacaattaaataaaaggaatatgttctagagctcgatagcacagtagggtgactattattgtgtattttgaaatagctagaagatttggagtgtccctagcacaaagaaatagtaaatgttcgaggtgacaaatatcctaatcaccctgacttggtcattacacatggtatatatgtatcaaaatatcatatgtacccccataaatatgtataattagtatgtatcaatttataaattacttctgaaaaaaaagtgcctcccccagcccctgcactctgccagcttcctaggacagaagactgatcagcctcaaacacagagactctttaaggagggcgttgctaattccaacccagtctcagctctgacatg

SEQ ID NO: 899302 - DNA, 697 bp, Homo sapiens
aaagagtatatttggattgtttctaccacaaagaataaatacatgaggtgatggataaccccccaagaaagagycacttaagtttttatttaagccagcagaagaaaataaataactaaaatcagagaagaaccaagcaaaattgagatccaaagaaccaaacaggatcaacaaaatgaaaaattgattctttgaaaggataaataagagtgatggactgctagctagattaaaaaggaaaaaaagaaagaagatccaaataagcacaactggaaatgacaaaggtgacattacaaccaaccccacaaaaatacaaaagatcctcagagactattatgaacacttctatgcacacaaactaaaaactatagcggaaatggacaaattcctgaaatcatacaaactcccaaaactttgaacagaccaataatgagttctgaaattgaattataatatttttttaaaactaccaaccaataaaaagccctcaaccagattgattcacagccgaattctaccctatatacaaggaacatctagtaccaatcctactgaaactattccaaaacataaaggagggactccttcctaactcattctttgaaactagtatcatcctgataccaaaatctggcaaaagaacaacaaataagggaaactacaggccagtatccctgatgaacatagatacaaaaat

SEQ ID NO: 899303 - DNA, 656 bp, Homo sapiens
gaaagaaggtatttataagccaggcgcggtggtgygtgcctgtaatctgagcattttggaaagcagaggtgggcagatcacctaaggtcaggagttcaagaccagcctggccaacatggtgaaaccctgtctctactaaaaataaaaaaattagctgtgtgtggtggcgggagcctgtaatcccagcaacttgggaggctggggcaggagaatcacttgtgcccgggaggtggaggttgcagtgagaagagatcgagccactgcactccagcctaggtgacagagcgaggctccatctgaaaaaaaaaaaaaaaaaaaaaaaaaaaaaaagaaggtatttatgctaaaataggtttaggaaattgggggttaaatgcacataaacaggttttcttttattacaggacttctcagagcctttaatatgctgatgtgtactatgatattcacagaagggaggtaaaatgtagagtttcccaaacttatttgatgagagaagctttatttcaatagattagttttccttagaacacactttggtatacagtgttctttatacacacacacacacacacacacacacacacagaggcatactcaaacaatctttatttacttattactaggtgattaataattggataatgagtttaata

SEQ ID NO: 899304 - DNA, 656 bp, Homo sapiens
gaaagaaggtatttataagccaggcgcggtggtgcgtgcctgtaatctgagcattttggaaagcagaggtgggcagatcacctaaggtcaggagttcaagaccagcctggcyaacatggtgaaaccctgtctctactaaaaataaaaaaattagctgtgtgtggtggcgggagcctgtaatcccagcaacttgggaggctggggcaggagaatcacttgtgcccgggaggtggaggttgcagtgagaagagatcgagccactgcactccagcctaggtgacagagcgaggctccatctgaaaaaaaaaaaaaaaaaaaaaaaaaaaaaaagaaggtatttatgctaaaataggtttaggaaattgggggttaaatgcacataaacaggttttcttttattacaggacttctcagagcctttaatatgctgatgtgtactatgatattcacagaagggaggtaaaatgtagagtttcccaaacttatttgatgagagaagctttatttcaatagattagttttccttagaacacactttggtatacagtgttctttatacacacacacacacacacacacacacacacagaggcatactcaaacaatctttatttacttattactaggtgattaataattggataatgagtttaata

SEQ ID NO: 899305 - DNA, 522 bp, Homo sapiens
agaatctctgattacatggcctaatccattttggtgaataaatttgttcttgatgtctattgcacctacattaacagacccttctctgttagagagcctgggagcctttgggagagatttcagatatattaaaccccattacagaaaatgtaatttctgtcaatataatcccatgtattcttcaatttagtattttagagataacaagctacttacaatatatttgcctttggaggattaatttacaaagtgcactatctgcaagacacagacagactcacataagaattgcttgtaagggttatcaatttctatgaccttactgctgccttgagagatcaatttttgcagcccttttcatcagtggatggtaaaccaagcaaaggcatactacatctaaatgygttactacgagttgtgtggctgctgaggttttttgtttgcctatttctacctgctactgtgtcttaattttcaaggctgttaatactacatattggaaatttcaaatatgtaataatt

SEQ ID NO: 899306 - DNA, 621 bp, Homo sapiens
aactagaagctggcattcacagggtattcttgtgactgtagccattggatttagtggctcttacaagagccctaatcagttattaggactcttgtaagaaaatagtgtcatgtacatggatattcatttcagcattctttataatgacagatccctagaaacaacttaaacacctaccaatgaggaaatggtaaaatccattatattgcaacattaggacaatggcatagctccatttgcgatggaaatgtttacataaatgttcatcaagctacaggttatgtgaagaaagctttgcttagaagaacatggtattatgcccctaatcattgtgtgtgtgtgtgtgtgtgtgtgtgtgtgtgtgtgtgtgtatgtatgtttatatgtagctaagcttatatttctttaagagtattagagaatctgtagacagtaattacctggggaaggaaattagaggtctgattgagacaaagacattttcactaattgatttttwaaaaaacaagcatatatactacattttcacttaaaatactacttataaaagaacttattcttggtttcagaacttgagtatcaatctagggtctatcatttcttggcatcatgatcttaagc

SEQ ID NO: 899307 - DNA, 583 bp, Homo sapiens
aaaagattattataatcagcacttcccttaagggatagtgtaggtatagaaggcattgccactaatcaatctaactaattaacaaaatctyttcttaatagttgattagcttcttaggtacttgcagatgttgtaaaatgatatttctctgtctagttaggaaccttctgaagtaattctatgtccaccactatcctgctgacagttcacttacgcctagttggcaagaaacacgacggggggtgaagcagagccatgtcattgtttggaggcaacaccattgtgattttctgtggtttaccaagttggctgtggcatgctaacataaccaaatgtgggcttcctttaattatcagggagtaagtagagtggtaaacactgaggaatagaactaattgagtaaaggtgaaaatgctatttctgaaagtgagcaagtaattttttttttttttttttttttttttttttttacttttatcagtattacagagagccatacaagggaggaaaagggcaaaggtatgtggaaaatgttgcctgtgaaactgggaaactaccttgtgttttggctcctaacagatgc

SEQ ID NO: 899308 - DNA, 553 bp, Homo sapiens
tgcagtgaaggcagctaatgaaaaaacagattttttttcattttaattggttatttcacatggtgtttgtgctacacctgtgcttataatgagaatggagaattaatctaaccttctgctcacatgattccarttttcatggtttatacaagataatgataacctgatttgcaacacaatttgttgtagacctgtgttttaaatatttttattagcagttcagggacttcatatacaagaactgatataatatgtattgccaacaagaattagcacaaacagtataccttttagttagattctagtttcattatttgtttcaattacttctcagataatgaaagaacacaaggatacaggatattgagaatcttaaaatgttatgaagtatgcatttttgttttgaaaacctgtccctgtctgtttaatggtttggtttttaggaactattttccttcctgaagtgggcagatttacaaactagaattcatactggactatggatcctttaatcattaatagagccttattaaacttttcattgtatttttta

SEQ ID NO: 899309 - DNA, 646 bp, Homo sapiens
ttcttgcttccatcattttctttttggttgtgatcaagcttttaagcttataaatactgtgtatgatgtacatttatcctgtgtgttgctattgtacagtactgaccacatgacaaaacaagaarcagtcaggaggtgggggagtgggttgtcatagcaacagactgatttgcaaaatgtaagcagtctgcagcagtgcaaggagagggaagagcatgtccccaaagtgtcataaatctgtctaaccgcagttgatgcatgagttacatttctacactaacctgcaagacaccgaaaagctaaacagagacttcttttaggtaaaataaacacaagctttacttagggtaagtaaaggcatattttgagctccagtcaactaaactttgattttttttcttagtttattcctttgtctgtccatcataatgggattacgtgtggcaatgggaaaagggagaatacaaaatagaggtgtgcacagcaggctgcggggcttagcccaggctaattgactatatccaaattaagtatgccatcacttgcagtgtgacaaatggatttgacttattcagtatacaaaaatagagatcattaatgcaatcatcagtggcaggcctagtgaagtgggcctaggaaaactgtc

SEQ ID NO: 899310 - DNA, 612 bp, Homo sapiens
gtcataaatctgtctaaccgcagttgatgcatgagttacatttctacactaacctgcaagacaccgaaaagctaaacagagacttcttttaggtaaaataaacacaagctttacttagggtaagtaaaggcatattttgagctccagtcaactaaactttgattttttttcttagtttattcctttgtctgtccatcataatgggattacgtgtggcaatgggaaaagggagaatacaaaatagaggtgtgcacagcaggctgcggggcttagcccaggctaattgactatatccaaattaagtatgccatcacttgcagtgtgacaaatggatttgacttattcagtatacaaaaatagagatcattaatgcaatcatcagtggcaggcctagtgaagtgggcctaggaaaactgtcccagattctcactcttgcattttctctcctataaagacactccagcaattcgagttcaaacaagtaaaactgttttgaacaccaaggctcttrttcacttcctaaattacccctaatagcactgttcttgctttgtttttgaaattaaaagcagttatttcagagtcttgcttgtgtctctgattatatttatg

SEQ ID NO: 899311 - DNA, 678 bp, Homo sapiens
taccagctgtgtgaacttgagaacttcctttgtcctttctgtgctcaagtttcgtcatctatcaaatgggtctagcggctgttaactacctcagaaggcttttgtgaggagtcatataartgaagcatttggaacagcgcctggcacattctcacttcctgatatatgttacaatgactacttcttccactcttattaatactgctaagctactattaataaagttcctttggctggatgctggaaggagaacatgggtcaaggttctgatgaactaactttccctgacagccccctcccctccccttctgcctgcctcccaggcagaagcagtggatattcaggtaggagtggaggagcagggaaatggcaactctttcctctctgttcaccatgattaataacatggttcatactcccttataatatattttttgttaaaaaagggaatggagaaatgagaaacaaatggcagtgggagtgtagccaagtggagaaactcagggccggacagacctggcaccagcactaagtagctgtgtgctgttggtgtgtttttgacctggccaaccctcagcttcttcatctgtgaaaaggagctaagcacagcccttactcagggggttcaccaagagtacatgaaataatgcctgtaatgcatttgttgtactgacaaat

SEQ ID NO: 899312 - DNA, 658 bp, Homo sapiens
tttgatcaagaattttttgattgcttcttttttccctgcttttatcacactgytgtttcttcaacataatcgaacagcctatgacattgtagcaggaaccattgtggtaaaaagaaatggggtcagagatgcccccccaaagacctgatttccacacgctataatgacaagactaaattatgtatcaaggccatcagtatccctgggttccactaactgatgatttagaaattaaagcaatcactccagtgtgatgcagctgactactctgaaagttttgattgtacttgaatgccaaaaacttttccagaagaaaaacctattaaattcaagtattaaaatttttagatcaaaaaggcaaatgattttataaacaatgaacaatatatactttcttaagatctaaggtactttcataagatctaagaatttgctgaaagcattttcagctttgaaatctccaaatgaaactttaaaattgattttggtttatcccaaaacaatggaaaatgtccagttgtgttttgtaaacatgtatgtaactcatcttttagttcacacttcctggggagccaccaaagaaggtccccatgggagctaggggacccttaccctcaggaacagtcagtctattacttggaaggtctaaatttaaaag

SEQ ID NO: 899313 - DNA, 625 bp, Homo sapiens
ctatgtgtatgtaatgacctcacattcatgttatcatgtcagacagaactgactcaatttgcttatattttactacataaataccatattaagagtcttagaaggaaccttaagggtcatttagttcaacatctcactgagtgaaggaatccctgacagctgaccccgtgactccttttcttcgaacatttcttgtggcagagaactcacctggatcatgaggagaatccattccattcagattgcaagagattttccttatactgagacaaaaatctactgtgctataattggcatttttagggtcatattctactctttggagttacttttaacaattttttcatgtgattgcctctgggtgcattatacatctcaggcagtgtctgagtattttcttcttcaaactaagcagcttaaatttctttagctggctttcaaattaaatgattttttagatatttcatgctggaaacttgatcaagctaccaatgatcagtttatcagtgtatcagtgtgttccrcttacagtcaagtacaatagaattatcatctcccttgtttggtatgctatctttttattaaagtagtttaagatcatattagctgtttgacagccgggttt

SEQ ID NO: 899314 - DNA, 575 bp, Homo sapiens
tctgagcaattccttgttcctgaattttccctgccaagggaccccagcctggggatggcacctttatgaggaacagtgaggaagtggcctggggatgcttcaygataggaggaaggaaattatctgagtctctcagtctgaagtgttttactgatgttggaatggggaatcatcctgaaattaaaaaaaaaaaaaaaaataggtgtatatttctcagagcaaagatacatgtgctgacaatttagattttttgcccagagatgctggcattttgtttctgggggcggttcttatgtttccaacagtgttcccactgcatgccatgttctctcctcctcacccttatcctcccacccccctccccatatggcttcctctttgtctcgcccaccctactcctggtttctttctgtctctctcttctcctgtagttatttcctttcggcagcaaaatgaatccttcacagaacagagtatgactttcctcaaacccattctccatctctttcagctatttcttttctggaagttctcgaatgagcaagatatctgggagacagtctttcctacatatt

SEQ ID NO: 899315 - DNA, 650 bp, Homo sapiens
acagcttattttagctccaagtggcattagttagagtgtttgacgagggctggaggatccactcccaaggtggrgtactcatatgcctggtagactggtactagctgtcacctgggagtcaccaggactcaattctcttccatgtgggcctttccacttggccactcggggttcctcaaacattgtgactagtgctgcctggcaagtatcacttctgctgtattctcttggtcaaagcagttacagcccaatccagagttaagggtagtgggggtatgggggaagatagaagtagactacctcttgatggagaaagtgatagagaaattgcagtcatttttaatgaactccaaacattcactgaaaaatatctattaaaaagatttgtcaatcacctcaagttggtttttcgttatgttctcattgtagtagaaaaattccacagttagcgaaattacataggccaagaggagggggatggtatttgacctccttaaaattgccatcagtttctctttcaaatcctggaaaataggaatacaatgagaataaaaccagtgtacttactgtgcagatgatgtctcaagaaaagtcccagggtactgacatctcccatcccacctccccacagacagacagcgtattactgc

SEQ ID NO: 899316 - DNA, 633 bp, Homo sapiens
aaagaactccaagctagtattctcatgtctgaagataggagggctcccaaggtagttacacaccttttgttacatatataaaagtttasttgtgggatgctgtttccctcacatcattctgtatactcatactagctcagtcttccaatgtgcaacatgattatgctgcaccccttcttggtcttcattaatgctccaggcttcctttccttcttgactcccaagcatttcttcttcctttgccaattttaataagaaccagtcagctcacctttgaccttgaagtcctaaggaggttgtagttatagtaagaaagatcataaatacaaggtgtcataccttgatagtgtcctgcagaggtcagagctatacttattctccctgcagtcacagggagcaattgatgcatttaaatccactacatttcacatgtcacatccatccactcttcacaatagtctcagattattctccagcatgcaatcatcatttccgctactggggttcaggtttgcattgtttcccttatctacactatgagccgcttaacttgtctttatgccaaccactatttttcttaacaacaatgaaaaaaattaattagaaaaattaattggatcacttatctgccct

SEQ ID NO: 899317 - DNA, 633 bp, Homo sapiens
aaagaactccaagctagtattctcatgtctgaagataggagggctcccaaggtagttacacaccttttgttacatatataaaagtttacttgtgggatgctgtttccctcacatcattctgtatactcatactagctcagtcttccaatgtgcaacatgattatgctgcaccccttcttggtcttcattaatgctccaggcttcctttccttcttgactcccaagcatttcttcttcctttgccaattttaataagaaccagtcagctcacctttgaccttgaagtcctaaggaggttgtagttatagtaagaaagatcataaatacaaggtgtcataccttgatagtgtcctgcagaggtcagagctatacttattctccctgcagtcacagggagcaattgatgcatttaaatccactacatttcacatgtcacatccatccactcttcacaatagtctcagattattctccagcatgcaatcatcatttccgctactggggttcaggtttgcattgtttcccttatctacactatgagccgcttaacttgtctttawgccaaccactatttttcttaacaacaatgaaaaaaattaattagaaaaattaattggatcacttatctgccct

SEQ ID NO: 899318 - DNA, 579 bp, Homo sapiens
tagtcatttccattaggatcatttccattttctaatcataatgatgctggctcagaaaatactaagaaaggatacattctggatgtcaactcaaccatcatattgacgtttagttttctgagaacgcaaatctctttcctgattgagaaatcatggaaataatctttccaaggtatgatattagtaactggattatgtaaaaggacagagatctactttttttctaaattgtatagccactagaggagtattctatataaatatgggtcagaactaatggtctactctacatgcctggagtgactgaggcaaatttctacaagttctcactcagaatttttcagaatgaagagcttcataaaaatgatgacgtttgaccaaaaatacaaacagtattttataaccttgtagactctgtttctgaacttttgtggccctttgattatatatatatattatamcagttctatctttaagcatttgtaatctttatttctgaatgggtcttctatattttacctatctctttaaatactgatgcgggtaagagtttttaataactttatctcccatttcatc

SEQ ID NO: 899319 - DNA, 677 bp, Homo sapiens
gctggaaatagaaattttcagaccccacccagacatactaaattgaaactacagatctgtgtattaacaagccctccaggagattttaatgcaaagcaaagtttgatgcttaactaaaatagctgcaattagaatagagaaaatgaatagagttgagatgcatccaaaggatttcatctctcaaagcctccagtgacaatgtttttaagtcaatggcttctttgtctctaacacaaagtaaaatgaaattattaaatcaatgtaatactatgccaatctatgaggtagttttgtggtattagcttgcacccaatttagcatttataattacctgtaacaatttgttgtcataatgaaaccactgtgtatgccttttctttggtacacacaatgtgaacattatgtttttggacctctttatacctgtgtaaactctgtggttatcagcattatggagctacaagagcctttaaaacaaagaggtttcatttatctgatttagttatgaggggatttcatattccttctccactattccacaaggaagtatgcactaaaccacaaggatgacctatccagactagagagcacttttattggctaataccaagcatgyaattatacatattcccacattacatggtgcaattattggaaactgtcactgtacttgatcc

SEQ ID NO: 899320 - DNA, 619 bp, Homo sapiens
cacttatcttttctttgtgctgggaatattacaatttttctcttctggctaaagtatacaataaactactgttaactataayttccctactgtactactgaatactagaatttattccttccatctaactgtatttttgtgccccttaatggacttctctttatctcccttcttcccgtccagcttctggtaaccaccattctatgttctgcctccatgagatctacttttttagttctcacagtagtgattttaaatcttcagtctttagttatttcaatattttaaagtttcttcaattatatgcacaagtaaaacttacttctgccattaactctagtggggcctgagtattctttttagggttactatcttcatcatcatcttcatcattggtatcatcttcaccatcatcctctgctgattctgacaatttatcatcaatatcctgaaggcaatattcattatttttctcctgctttacaatgactgcatctttgctcacttcacctaaaagagaatatacctaatttaatcaaaagagatcgaaaagttcgcaaattaaattttgccagatcctattactattcattaaactgatatattaataaaagtaaca

SEQ ID NO: 899321 - DNA, 641 bp, Homo sapiens
aaggtagtggtacaggaatgtctttaaaagctggagaaatgagacttggggaatgcaaaggaatgactgttagacattgggaagttgagattgcctcagagaagccatcagacccaggatctggaagagacagacagagacagttagcatcttcctagaaccaccaccatatccccactcaaacagctcaaggaagaaagggattctggtctttaatctgaacccacctcttatagatgccaatgggaagagacactaccagttaaaactatggcatatttactatactgaccatacttgtagtaccttatattcacaacaaatacttattgagtatatagtatgtgccaggcattatattaggctccagtatgtggtagtgaatagcctctgctctcctgatgttcctaaatatttcctgtcaacgttctgtatttcttactagactgccagctccgtgacagcaagaaccttgtatgactttttcatgatggatgttcatctgtgccatctgtaaatattgaataaatatttgtggaatacatgaatcyaaaagtgaatggaatgataaagaggtaagatatcaggtgagggagtaagattttacagtacggtgactttactagaatgcaaactctatg

SEQ ID NO: 899322 - DNA, 611 bp, Homo sapiens
tgatatgatttgttaaattaaatttaacctagagctgcccctgtacgtatttttaagttgggcctaagtgtttctcattcatagtgaactgtaacctaactgggtgtgtaaacagactgtaagttactcttgttaacgagaagtcacgtctcagccaatcccagcagccatactttgaccactcacaggtggccaactgttcaaaccatgtgcaaataaggcaaacactgaggtgtaacgaccacggctgtttctggacctcacttccttttctgtgtgtcactttccttttcctgtctgtaggtcatctccaagtgtgcagcagctgacattgttctgaacctattctggttgcaggaggggtggaaggaggctgccagaattgtgaattgttctttgctcagttaaactctgttaaatgtaatgagtgttaagtaaacagattctatggtggaactgccaaggaattcagaagcaagttctggcttccaaagygtattagtttcttgttgctgcactaacgaagtaccaaaaacttagtggcttaaatcaacaccgatgtattgtcttacagttgtggaggtcaaaagtcctaaaatcaaggagttggc

SEQ ID NO: 899323 - DNA, 611 bp, Homo sapiens
tgatatgatttgttaaattaaatttaacctagagctgcccctgtacgtatttttaagttgggcctaagtgtttctcattcatagtgaactgtaacctaactgggtgtgtaaacagactgtaagttactcttgttaacgagaagtcacgtctcagccaatcccagcagccatactttgaccactcacaggtggccaactgttcaaaccatgtgcaaataaggcaaacactgaggtgtaacgaccacggctgtttctggacctcacttccttttctgtgtgtcactttccttttcctgtctgtaggtcatctccaagtgtgcagcagctgacattgttctgaacctattctggttgcaggaggggtggaaggaggctgccagaattgtgaattgttctttgctcagttaaactctgttaaatgtaatgagtgttaagtaaacagattctatggtggaactgccaaggaattcagaagcaagttctggcttccaaagcgtattagtttcttgttgctgcactaacgaagtaccaaaaacttagtggcttaaatcaacaccgaygtattgtcttacagttgtggaggtcaaaagtcctaaaatcaaggagttggc

SEQ ID NO: 899324 - DNA, 657 bp, Homo sapiens
cttgacaacttcaccaagaccaacgttcttcttataattctcctttgtcatcttaatgtcagtaagtagccctaaaggtgataagatggctctctcagttctagatgttattttcagatgtaatataatgtcccyccatggaagaggctccattttcgtttgtgtgcctctttttaagagcaaaaatacctttctctaaaaaccctggcagacgtccactcacatctcacaggttgtgggtcttcagggaccctggaaggtgtggcagttggaggctctcagccggtcacactcctcccagccacctctcatggccagtacatcaccaaagaggcttggggagcctcccttttctcagcctcaaaatgattatgtgcacagtgaggttggacagtttcctgtctactagctgtgtgactttggaaaagtggtgtcccctctctgagcctccatttttccatccctaatgttaattccacttttcaatactcactgttggctgattgtttgccagatgacacttgaggggcctgggactcaacagtgaacaagacacacagtccctgtcctcatattgctgatgcctggtgagagtccccaactcacagagttggtttgatgaccgatgtggagatgaccttgtaaatgggctggtcc

SEQ ID NO: 899325 - DNA, 599 bp, Homo sapiens
gtttgaaggtagttcctctaaaatcattttggaagaaataaaataattaaaaaaataaaatacaaaaataaaataaattcggtaatttctctgatacattttgattaaaagactattcatttacattcacatttttatggtagtgatgttgaaactagcactaagctatatttcctagcacatatataaagagtgatccattgtgtttggagataatgctgttcaagatataaggtgtaggacaggaccaaaaattatcaaacagctaagtacagagtgaatattgtcaaggtagactgtcataaatcttggacttcgttttcctctagtaataatattttgtgttaagatttttatctttatttattcaatgactctgggttgggaaaaagaataaagtccacaaccagaaactagaaaatgctctaaagcgctatttagggaccgaaatgttgttggctacaactctctcagcacattgggcttcacttgaagaaactaacaaacctrtctgcaaatgagcacttgcttataagtagataaggactgctgaagtgtatggaagacagtggtttaacatcatttagaactcatcatta

SEQ ID NO: 899326 - DNA, 650 bp, Homo sapiens
taactttaagcaaggaaatggaatgaaatgtaaattggtgtaaacgtaaagttggagaaaaagactagagggtggcatctttaatagaagataatggcagaaatctagatttaaaaataacaggctgtaggagaacaatgaaagggaggatgaagagatgggtaagtgagccatactcaagggcacatggtgtttcaaaaacacctcccactatttggcttttatccttgaaagagagctcataagaaagtttcaccaggcccactgaagtggaaaagcataataatatacttggtgagtaatctaacttctttttctccaaaggctagtaatcacctataaattaaaataaagcacttaagttttatagcaaaaaacaaacaaactggcgattttcactaaaaccaaaaatgaaaaaaaaaaaaagtaaaaacaaaataaaaaccctgattaagggtgcatttgaaatatatagtctcttctgcatggcttattcctgtgcctcgatctataacaacaaagcaatcaacaarcaaaccatatagtcaaattaaagtctggtattaaaagtaagcttgacttgattgaatcaaagcagttcatttattaagtttttcacttctcaacttaattccttcaaaataggaata

SEQ ID NO: 899327 - DNA, 650 bp, Homo sapiens
taactttaagcaaggaaatggaatgaaatgtaaattggtgtaaacgtaaagttggagaaaaagactagagggtggcatctttaatagaagataatggcagaaatctagatttaaaaataacaggctgtaggagaacaatgaaagggaggatgaagagatgggtaagtgagccatactcaagggcacatggtgtttcaaaaacacctcccactatttggcttttatccttgaaagagagctcataagaaagtttcaccaggcccactgaagtggaaaagcataataatatacttggtgagtaatctaacttctttttctccaaaggctagtaatcacctataaattaaaataaagcacttaagttttatagcaaaaaacaaacaaactggcgattttcactaaaaccaaaaatgaaaaaaaaaaaaagtaaaaacaaaataaaaaccctgattaagggtgcatttgaaatatatagtctcttctgcatggcttattcctgtgcctcgatctataacaacaaagcaatcaacaagcaaaccatatagtcaaattaaagtctggtattaaaartaagcttgacttgattgaatcaaagcagttcatttattaagtttttcacttctcaacttaattccttcaaaataggaata

SEQ ID NO: 899328 - DNA, 630 bp, Homo sapiens
aatgagtttccaattgcatagagaccaagacatacatatccagaagacagaagttaagcaaggctgtataatacacttaactcactgccraaattattggcaaacttgtcatgtgaatgccaaaagaaggacagatcactaaagggaggaataatcagggaatacattttttgtgaaccccaaagcagaacacactctagatatgtggaacagagtggggggaaaagccatggcagaagaccccaataaagttgatacatggaaatagaatcctaatagtatatttgagaaatagtgacaagactgcatggtctgtctgaagtcaagggttgctgtttctatacagcagaatcaggactgctgattattaaagacaaggagccacacactttgctaaaggttttgctttttcgcacagtccctacaactctatgaggtagatacatccttcctcagagataagaaaatggagagggtttcagtatcttgctaaagtctcttgaactgataaatggcaaaggccaggaatgaatctgatttggagaatatcctatgccaggtaagagatgtgggacttaattccttagacaatttgtgtttcctaattgcctttaaacagattttatggct

SEQ ID NO: 899329 - DNA, 648 bp, Homo sapiens
ttcccccagtgttaccatcttcattatcatgatcatcatgacagtaggtatttattgagcacctactctttattagagttcarcagaaatggggaaaagttacaaataggtattctagcaaaatttagtatataacaaagcctaattgtattgtgcatagtcttaatgacagctccatctctgctcatcctctggtttctcttaagacacatagagaaacagggaaggcatttgtagccatctaagattggatttattggaatgaataacattaagtgctgagaataactgacaaaaggatttgattgtgaatcaagaataaaaggttgtggtaagacttagaattttgtgtttattaagagaagagcttaatgcattgtaaggcattccatttgttgttttaacattgccagcatttattattaaagtgggtggttgtagaataattatagtccatatcatgatgatgatgttgtttttagagaagattgaaaatctatagttttttcaaactaatacagcaaggaaaacatgtcatctactgaggcttcaaatagtttgcttgacctcctgagagtactactgagattgtttaaaggaactgcatattcaggaaggtacttttatgcaagtttttgcatttccttg

SEQ ID NO: 899330 - DNA, 491 bp, Homo sapiens
tcagttttcaatgaagcagaaattaatgaggcggtttctgcctcacaataacaagttaaaattatagtactttgtcatgtcaacacagctttaaacactaggaataccagtgctattagcacagttcccaaaatagtgcagaagtttgctagtgaagagaaaaatgttacacagtatacttctgctaaagttaaaattaagaaagttaaaattatttaaatattcacaatatgtgacattctctctatcccatatttatgttactagttacagtgtttgtttccactgtgtgaatttgtttaaagtggatttgtttttgttttgagacagggtctcactctgtcacccaggctggaatgcagtggcacaatctsagctccctgcagccttgagttcgtgggctctagcaatcctcctaccccagcctctggagtagctggaaccacaggtgcatgccaccacactcggctaatttttgtatttttagtaga

SEQ ID NO: 899331 - DNA, 558 bp, Homo sapiens
tgtatgattatcatctacttcacagggtagacatctgatggatcccattcttagccattaatttcacaaattattgtgaaattatgtattcattctttgtttctttttccaagctgtgtattctagttcagggtcacaggtggtcacagcctttcctggtagctcagggccaaggtgggaacaaccctgcacaggacaccccgtcgcaggcacactcacacccacactcacactcagactaggaccatttagatgtgccaacgaacctaatgtgcatatctctgggatttgcaaggaacccgaagtgcccagaggaaacccacacagacatggggagaatacgcaaactccacacagacaggtggccctggccattgtctcatcaacattataacaaaacgaggttgaacaggaacaatcttattggaggacctgctgtacaggaacaagttttctaaggagattwaaaaaatgtagaagcacaaaagagatagaagggttaattttttaaaaggcaatactgagtatctaccatctgcctggcactgctttaagcat

SEQ ID NO: 899332 - DNA, 603 bp, Homo sapiens
caatttagcttattatttgaaacctaaatctgcccaggctaataagcatgaccaattcctcttaccaaaaccaygtaggaatctccatctgcacttcactaaaggatgagaggaacagatgtctttgggtggtattcttgttcttggcttttaaaagaagttcctctcagtctagaaatgaaagaaaataatttacagagtgactgaaagcttactttttgctttcaccttctttttaaaaaattattattatttactttcaagtttgatgctttagaatctttattctcaatttgttgttcacactttggtgctagacataatttgaaaaaatttaatagtttttaataatttgatatcgtgtaccttagtattcctaaagaaaatggtatcctcacggatttaaaatctattatattttgggcaaggttgagcttgtacttatttatttacttatttaacttgtaaagataggactaaggaacatttactctttaaagcttgaaaaagatgtgtgcgtgtatgtgtacacgtgtgtgtacgtgagtgtgtgcgtgtgtgtatatttcacctggccacagtcttcaacacttgaacaacttt

SEQ ID NO: 899333 - DNA, 603 bp, Homo sapiens
caatttagcttattatttgaaacctaaatctgcccaggctaataagcatgaccaattcctcttaccaaaaccatgtaggaatctccatctgcacttcactaaaggatgagaggaacagatgtcttygggtggtattcttgttcttggcttttaaaagaagttcctctcagtctagaaatgaaagaaaataatttacagagtgactgaaagcttactttttgctttcaccttctttttaaaaaattattattatttactttcaagtttgatgctttagaatctttattctcaatttgttgttcacactttggtgctagacataatttgaaaaaatttaatagtttttaataatttgatatcgtgtaccttagtattcctaaagaaaatggtatcctcacggatttaaaatctattatattttgggcaaggttgagcttgtacttatttatttacttatttaacttgtaaagataggactaaggaacatttactctttaaagcttgaaaaagatgtgtgcgtgtatgtgtacacgtgtgtgtacgtgagtgtgtgcgtgtgtgtatatttcacctggccacagtcttcaacacttgaacaacttt

SEQ ID NO: 899334 - DNA, 679 bp, Homo sapiens
tcagcaatgaatatgtgagaaacaatattctaaatgaagccaaacagagctttagcttctgtgaggacactagggaaatatgagacatgatcctaccttaaaaatattcagggtctgatttgagaaaataattgcagtctcatgaagtaatcacagcacaaagtatgtggtgctgacaaaaatagcaagagggatcaagggaacgtagagattgcctaggagatggagggtccatggaaacaatagttgttgaatcttaaagggtggaaacatttcagcaaggacaaaaagagagaaaggaagaacatcccattcaacatttgtgttgtactttttagttgggaaagtaccttcatgttcgtcatgggaccgatccctgtaagaactctgtaggagatatgatgattattctgcatttactggtgaggagtctgaagctcagagaggttaagtaggtgttctaagatgacacggcttggtgccagattcttggagggtcataaagccaggcagagaggaattcgtgttctgcttagaccaggagtaaaayatgatgacaatgaaatccaggagggttggagagatagcaaacagagagatgagccagggatctcccccagccaccaaagcaccgttctacttctgtcatgtatgcattatacttgtttgttctaacctg

SEQ ID NO: 899335 - DNA, 635 bp, Homo sapiens
tggtgcaacagtggtgacatgggggtctgggtcatgtgcttgtrcagcatacttgtgccctgtgaccctgcttgtgcctcaccgcagatgtattatttcaatcttatcatgaattgttattgggcgtgtccaaacttattattcagggtgtgtatgccagtgccagctcctgatggggagttcttgcttcctggtcacatgattcctatgctcagacactcagtctccaaggcctaggaattgttttctggatagtatatgctagcatactaggaattgttttctgaatagtatatgatatagtttggctgtgtctgcatccaaatctcaccttgcattgtaataatccccatgtgtcaagggtggggccaggtggagataattgaatcatgggggcaatttctgccatactgttctcatgatagtcaataattctcacgagatcagatagttttataaatgggggttcccctgcacaagctctctcttgcctgctgctatgtaagacatgtcttgcttccccttcactttctgccatgattgtgaggcctctccagccacgtggagctgtgagtcaattaaacctctttcctttataaattacccagtcccaggtatgtcttaattagcagcat

SEQ ID NO: 899336 - DNA, 570 bp, Homo sapiens
atcagcctctgaggatcttcccagaaaagatccagcctttaaagtgagtgaccaagagttggtctttcttggaatcagaggtaagatgraaagttatgtagaagaagaattagtcaccaatgatgccctaatgataggctgggtggcctgagaggcaaaacacagagaaactgtgcttttaacctgttcatgctgttcctaaccctggtctcttattttatttataaatgcatataggtcacagggcgacttggtagatggagttttgataattagggcctctgctgttaaccctggtggctaaacaacactgagctcatattctgctcacactctcatggcattatctctgtaagttacaagacaactctgccatatcactacagtataaaccaattagcagatcagtctcacagatggaaccactgcagtgtccctggaatctgtcctctcctccctgtttcaacagctgccacactaattcagatccttctaaccaggctacacgcaccagctcttacatatccccctgccccctgcctctttcccttgcatccacccagcccaagg

SEQ ID NO: 899337 - DNA, 564 bp, Homo sapiens
taaaagattggtttatttacttccccaaacccaagtttttgtatttgagttttgttcttttctctctttctctctttttttttttttttttttttttttgagayggagtctcgctctgtcacccaggctggagaggctggagtgcagtggcacaatcttggctcactgcaacctctgcctcccgggttcaagcaattctctcgcctcagcctcctgagtagctgggattataggcactcgccaccacacccagcttatttttatatttttagtagagacagggtttcaccatgttggccaggctgctctcgaactcctgacctctgttgatccacccacctcggcctcccaaagtgctgggattacaggtgcagccaccgtgcccggcctcttttctcttttttaaggctttcctttcagttttgtgaacctaaaaaaaaaaaaaaaaaaaaaaaaaaagcgttgcctgcagtgtgtaaggctttccactagtgctttccaaggacgatatcactgtcatcatctgtgtttaactcactcatcctcagctaaaaagctcctctc

SEQ ID NO: 899338 - DNA, 564 bp, Homo sapiens
taaaagattggtttatttacttccccaaacccaagtttttgtatttgagttttgttcttttctctctttctctctttttttttttttttttttttttttgagacggagtctcgctctgtcwcccaggctggagaggctggagtgcagtggcacaatcttggctcactgcaacctctgcctcccgggttcaagcaattctctcgcctcagcctcctgagtagctgggattataggcactcgccaccacacccagcttatttttatatttttagtagagacagggtttcaccatgttggccaggctgctctcgaactcctgacctctgttgatccacccacctcggcctcccaaagtgctgggattacaggtgcagccaccgtgcccggcctcttttctcttttttaaggctttcctttcagttttgtgaacctaaaaaaaaaaaaaaaaaaaaaaaaaaagcgttgcctgcagtgtgtaaggctttccactagtgctttccaaggacgatatcactgtcatcatctgtgtttaactcactcatcctcagctaaaaagctcctctc

SEQ ID NO: 899339 - DNA, 580 bp, Homo sapiens
agtgccgtgttcttgggctaggtcagaaaggagaggtataaacattagatactagaaaagctcagatgaatgtttgcaatgtgattttaaagagagcagccctctccttttaagttagatcttagagggaaaaaaatatatcctgcactgcatacagatataactgaaaaagggccacagaagcaggtgaatatgcacggcatgagggctgtgaaatggaggcctgcgattgtgttgcagcttacgttgtttagggtgagggagacgatggcaggctgactttagtgtgagctggaacatggatttttctagatcttttttccaagccttttccattagtgggatcagccctgtttccaacagttctggggaaatgggagagttatttgggctgcgtgctttattgactagagaccaaatggggccacagatgtcataatttccctattatcactttgctgagtgcttcctggcctcccttcattatcttgctccacattcrcagttgtaagtgccttctttataggatccaaatggtgttgactccctttggcagtgcttgtgcttgtggggatccagt

SEQ ID NO: 899340 - DNA, 625 bp, Homo sapiens
tctagaagaaatggataaattcgtggacacatacaccctcccaagactaaaccaggaagtagttgaatctctgaatagaacaataacaggttctgaaatttaggcagtaatagcctaccaaccaaaaaaagtccaggaccagaaagatttacagccgaattctaccacaggtacaaagaggagctggtaccattttttctgaaattattccaatcaatagaaaaacagggaatcctccctaactcattttatgaggccagcatcatcctgacaccaaagcctggtggagacaaaacaaaaaaagagaattttaggccaatatccctgataaacatcaatgtgaaaatcctcattaaaatactggcaaaccaaatcgagcagcacatcaaaaagcttatccaccacgagcaagtcttcttcatccctgggatgcaaggctggttcaacatatgcaaatcaataaacataatccatcacataaacagaaccaatracaaaaaccacgattatctcaatagatgcagaaaaggcctttgacaaaattcaacagcctttcatgctaaaaactctcaataaaataggtattgatggaatgtatctcaaaataataagagccatttatgac

SEQ ID NO: 899341 - DNA, 659 bp, Homo sapiens
tccacgaaagaaatcattgtactattagttttatgcaaaagtgtcaatcaacctattcttgatcatattattcaaacttttgttgaatgattctaaattgtcattgagtatcttctgtggcaatgtaaattttttcatacagtgattctaatccttgaaagcgagttttcttgggtttattgggaatttaaatataaaatctaaaaggagtcaaatcaaaatttttacaaatcaggcacaactcatgtaccttttggctaagtaaggattaaaatgttgaatctagttgggttaagatcaatccaacatgcatgaacatctttataaagtacaaaatctttaaaattaaaagctatatattatgagaaatatttctttttataggtgttatttctgaatgtgataccaacttcacggaaatatagtttatgacatataaacaatcatagagtatcatattaatcttttcctgtactgtattaatatttacattgattatctctcatttaagtaagatcccaatttaatgaaggtaatacctgtttgcaactttggcttcttcaacataagtcctcatgattataaaacctatgatyctgaaaatctatgatttattaaagattgtatttcataattgggctgatcactggtattctgga

SEQ ID NO: 899342 - DNA, 517 bp, Homo sapiens
ctaataatctataaaggaaatctcattagactaacagtggacttctcagcagaagctttataaggcagaagagattgagggcctattttcagccttctcaaagaaaaaaaaatgccagtcaagaatttatatagtgccaaactaagcttcataaatgaaggagaaataaagtctttctcagacaagcaaatgctaaggcaaattcatcaccactagaccagccctacaagaaaagctcaaaagagttctaaacatggaaatgaaaggacaatgatttccataataaaagcacatgtaagtacaaagtttacagatcctataaaggaattacacattgagattacaaagccaactaggtaacaacattatgacaggaagaaaaccttacatattaatatgaatcttaaacataaawgacttaaattttccacttaaagatatagataggtcaattgtatttaaaaaaacaagatacaactgcttgctgtccacaagaaacccgcaaaataagtgaagg

SEQ ID NO: 899343 - DNA, 646 bp, Homo sapiens
aaatgacttctgtttttaagttaaaattgttttagaaatagatgttttaaatgaaatttgtttttattatccctgttatagactcagaatttctaagagatgtattgcatggaataatagatagagactcagaagggactatagtgtttatctagttaacctcttaactatggagataataatttaatgtacaataatctcttctgctatctggaattaatcaaatagcagaagagattaaatttgatcattgaagttggatcatggaacagtatctggccttctcgaaatcgtgaagtggtggtagggggttggctggggggcttgaggttagaggcagataatcccactacagaggaggttcagtttagagacaacgtaaaacattgagaaaatagcaagatggataattttccttacaaagtaggttatcattaggaaaaccactttatctacttttggaggagatttttgaacattacatcgctttatacagcataaccaaattaaatgtatagstttttaggggtgagaactctaaatattttccccatatgccacattatcttcttgaatactccagggatttttctagcgttaaagtaaaattcgttaattctctgttataaacccataatttacaagg

SEQ ID NO: 899344 - DNA, 629 bp, Homo sapiens
aaatatgtcaggatgctccatagcttcgtattaccacacatgctgtttcttttaaggaraatgtccatctccttttattcgttcattgcttgttcttagaaactctgcacaaacttaactgcttctttaaaaggttttcttatatcagtctaaatagtttgttcccttatctgtactccctttgcagatagtccaaagttgtatcataaaatgtttgcactctactgtaattattcatttacttttttgtctctctccctgaagtcaaggaccacgtattttttaaagtcagttttattgagatataatttatatactgtaaaattcacccttttgtgcattgttttattaatttagacaaaagtatattgtgctctaaccaccactataatcaagatatagaagagctccattatcctccaaaattttctcatgatgctttgtagtcaacccctttcttcactcccttaactattgatttttatttggtgtctatagtatatgctttttaggatgtcatacatagctagcctttggagtggagcttcttttgctcaatataatgcatttgagattcatccatgttgattggcacatcaatagattgctactttttgttttttgttttt

SEQ ID NO: 899345 - DNA, 668 bp, Homo sapiens
aagaagaaaagagacacagtgacagacatgggggagaaggccatgtgaagacagaggcagagaytgtaataatgcaactgcaagccaaggaatgctaaggattaccagtaatcaccagaggcttggaagaggcaagaaaagactctcacctagagccttcagagagagcatggtcttgccaatacctgaattatggactctcaatttccagaactgggggtgggaataaatttctgttgtaagccatttggtgtgtgctaatttgttatggcagccctaggaaactaaggcacaagtcaaggtctaaaagtgtaattgacacaatctgcattttcaatcatagccatctcttgaaggatgtctaaaacttgagaagatcattcatgaattcaaaattgggagaaggtagcatggaaaattggtgccactatttctgtcttggatcacttcaaccataaaaagactttttttcccctctctttaagggttttggtattaggagtgcttacttttgtcaacctctttggtcagtaggatggaaaatatatactaaacttttaataaaaataatataaaattaacaatgtcaaacaataaagatgtttatgcatcaaaatcatcctttcctcctttcacctttaagatattctccagagataagcactata

SEQ ID NO: 899346 - DNA, 626 bp, Homo sapiens
aagctctaaactgctttaagtgaaaaggtaaaagttcttgacttaaggaaagaaaacattttatgcggaagttgctaaggtctatgaaaagaaccaatcatgtatccatgaaattgtgaagaggagaaaagaaatttgtgatagtttctttgcggttgcactgctaactgcacaagttatagccacagtgcatgataagtgtttatataggccttggtactatcagtggcttcaggcaactatggcaggtcttggagtgtatcccctgaggataacgggagctgctgtatctttttggaaggacacagttcaactcataaggtgtgtcatgctttttttttttttaaattccaatctgacaatttaccttttatttaattatgatttgaccattcacaatgtgatgattgatatgattgagtttaaatctataattttgctgtgtgttttctacttattccatgtgtttttcccccaagtatctgcattcctttgaattaatctagtatcaactaattatttttatcttctttgttgtctggttatttacaactctttgttgtgttatttmatgagtgctctatggctcatctttcatttagtatagcttacttttaactagtaaa

SEQ ID NO: 899347 - DNA, 610 bp, Homo sapiens
ttcagtttaatcaaaaggaaagggagcttttcactgtacaaatatgattgaaagcactgtatatattcactcagatttctcaggtaaggggaagkgtatgtatcctggaaatgacagcatgaacacttgccaagccctcatatgaatcagtgttcactcttgtaaatcataaatccattagccaccaagagaatttctttgttttattctcaaatttgcaatgaaacctgttcttaaagtaattcctttagtaatatacttgtgcaaagtaaaatcatctttaaaattaaccattctcatatgtaatttccaaagttaatttctgaaaagcagaatataaaaattaaaaacaaacttcagtgaagttcattgtaatctgtctaaggtttattcactctgataagaactgctggtaaatttagctaatttctcagaagagctgagtctgaaaatatttccttataaattagtttatttggtttgtttatactaacagtacagttattttgatatacctttaaattatattatctgtactatgattttatatgcttttagtttaaaataagtatttcgcatgaatgcatgagaacccacacttattttatat

SEQ ID NO: 899348 - DNA, 717 bp, Homo sapiens
ttttagccatttatatgtctgcttttgagaaatgtctatccagatcttttgcccactttttagttggattatttatatttttgctgttaaattgtgtgarttccttgtaaattttggaaattagacccttgttggatgaatagtttgcaaatagttttttctattctacaggttgtctcttcaatctattgattgtttcctttgcagtgaagaagtttttagcttaatatagtcccatttgtctatttttgttgttgttgcctgtgttttggaggttttagccataaaatctttgcctagactgatgtcctggagtgtttccctatgttttcttctagtagttttatagtttctgctcttaggtttaactttttaacccattttgagttaatttttgtatagggtgagagacaggggtccagctttatttttctgcatatggttaccgagttcccagcaccatttactgaagatggtgtccttttcccaatgtgtttagtgtctttgtaaaaaccagttggctataaatacgtggatttacttcttggctctctctattctgttccagtggtctatgtgtctgtttttatatcaattccatgctgttttggctactgtagttttgtagtgtattttaaagttaggtagtgtaatgcctccagctttgtgctttttgcttaagtcctgactgctttggctattcagggtcttttgtgg

SEQ ID NO: 899349 - DNA, 731 bp, Homo sapiens
aactgtcatggtgctggtgggagtgtagcagtgaggacacccagaggccactctcatcaccatcttggttttggtgagttttggccggcttctttactgcaacttgtttttatcaggaaggtctttatgacctgtgtcttgtgccgacctcctatctcattctgtgacttagaatgcctaaccatctgagaatgcagcccagtaggtctcagcctcattttactcagcccctattcaagatggagttgctcttgttcaagtgcttctgacagttccttaaaactgtctgatgttatctgattttatgtgcatcatcctaaaatatgatattccagtgaaagccttgctaatataagtaatatttcaaattgcattctgttataaggacaagagattcttactgaacatatgtaaatacatcaccatgaaaataagaatattcaataaagatttccgaattctggaaggatcgggtggggagaaaaagtgaatgtttctggcggggcatggtggctcacatctgtaatcccagcactttgggaggctgaaactggaggatcacttcactggaggatcacttcagcctgggcaacacagtgaaactctcatctcttaaaaaaaaaaaaaatagctgggcatggtgatgcacatttatagtcccagctacttgggaagctgaggtkgggggattgcttgagcccaggagttcaaggaagcagtgagctgtgatc

SEQ ID NO: 899350 - DNA, 437 bp, Homo sapiens
ctaaaaggttataacttagaatttatatttcactcttattaggaatacaggtaaaatagtataacttatctaacaataagcaatgagaaatgtggagaaggcaagtttcaggaaatcaaagatcataattccagctctaaccaatttatattttagcctgcagaaaaacaagttattcctatcagttatgtaaagtgacttttccatttgtacgcaggtagacatggtttgcacacacacacacactttaaacccaatatatagctcactcctccagtctttatcagcacatgctctgagatcacaaaaagcattgaaagattactaatcacactgaccatttttatggtggtggcacaaacaaataattrtcattttgtgagctgtaatactaattttaaaaggggacacaagcaatcaatccacagaatcaaaat

SEQ ID NO: 899351 - DNA, 630 bp, Homo sapiens
taataactatcaattaattgagyggttactatatgtcagacaatgttctaagtgctttattatgcatctcatacctacaacaatactacaagctaagtactattagcctccctttacaaaaggagaaactgaggtacagataagtacgcatgttcacatatgtggtagaggcaggatttggacttagtggcctgacttcaaattccatgcttcaaccaccattcctagagccctgttgttcccagtataggctgccatttttgcattctatagaatcctattttttgttagtgtttactttataaacaattttacctaataaaaactgtccatttttttcataattccttctattgctttaagtctctcacaaccatccatctctgttatatcttggaattactctctttctgctttaaaaatatttaagttagacctctatttcaaaataagacataagagtaaacgtaaaattttttctttattatattattataaatataatattttaatgttacatatttattataatagtttttaaagtttcctataatctgattgtattatatatgtactatcataaattgataagaatctctattatattgcactaaacacttaaatactttc

SEQ ID NO: 899352 - DNA, 307 bp, Homo sapiens
ggagccctccaaactgttcccacctctgcctgttatccagttccaaagtcacttccacatttttgggtatcttaatagcagtaccctactctactactaccaatttacttattaatccattttcmtactgctgtaaagaaatacccgagactggataatttataaagaaaaagagatttaatggactcacagtttcacatggctggggagccttacaaccatggcagaaggcgaaagaggagcaaaggcatgtcttatgtggcgacaggcaagagaacatttgcaggggaactgccctttatgaaac

SEQ ID NO: 899353 - DNA, 563 bp, Homo sapiens
ctcatatctggaagccatttgtattacttatttttaaggtatttatactttcagtacattttttctgttgggggatcctgctttatttaatgatttctacaagatctttttatagtaataaaattattctttggttattttgatggcaaatgctttcccagtaagttgtttgccaattaatttatttactttaaagtattttctaatagaatcttttgaagttgtctcataaaaattcagaaagtattattttatactttcctatatcaaactgatgtatttaaaaaacacatcactcttatttattatcttttggctaaaattatacatttcttaaaaggtacacagaaatttaagttttgtcagaattccagctctttgaggaaggaggtctgactatttactccccactgtgtcccaaaaccaaacctacagctgttcctagcacacagtaggtatactatttagttcaggtatactattwtactaataagttcagtattattttggaatttgtatgaaagtagcaaatcagactcccaaatactttccaggaataaaag

SEQ ID NO: 899354 - DNA, 628 bp, Homo sapiens
ttactcttccaaaccaaaactctgggagtgacaggtagggagagaggagggagtgggatataaacttagaatctccctttcacagacagcctttgcagaaagtccaacttaytcccaggaatggccaagtctttctcagagctgggatgcaatctccctcacccagtcgcacacccctgggccctgcctacaacagtccagggaagcacctttagccctcctttacttctttttgaatcttctaccagcctgctttcctgtctccccttccactcccatctaatcaatgtagaaatggcctctcatttcacttctgagaagccatttcctgtcatctctttaaagtctaccgctttcccactgactgtctctaataagcagaaagcaaatgtctagccctccttgtcagcataattaggaaactgcttcctctggacgtgcctgaagtccctatgttgctaagagcaagactcttcatgttttgccatttgggacgtaactgttttggtgagcagtgtgcaaatcagtttttaacaccaacattctggtctagtctttgagacaggaaaaagatgaaaatacatatgtttccacattttagggtagaaaacccagtctgtggtttccc

SEQ ID NO: 899355 - DNA, 617 bp, Homo sapiens
agtatatgtgtttagcattttttcaaaaagtgttttgtgacacacaatattggctctttttccctgcacctgaaggcctaaattrtagaacattagtttgctgggtctctattagttcaccaatggatgctgatgtctcaatttttcaaaagctttccagtgacttatgcaaagccctcaggaaaactgagtagcaaataggattagcatatttgtaaagacccagaagtaatgcattaacatgctgaggtgtcataagccccaatgaatatgttgataattagtgcttcttagagagcagctagatcaccttcctccatgctaatgatgtgcaaataatccttggtgaatctgaacatctgctagtgggtgtccccaagcaggatgcaatgacaggagacagatttatcaacattgctgttggattccaccaaaaacatactccagcccataaaaccttctatcaggcataatcatattcctagccataattttgctattgtttgcaatcctattttttttctatctatactaattaaagtcttggtgcacccaaagtagtttgtataaattacatgaactcataaaaatttcagtgttcatttgacatgaatcgt

SEQ ID NO: 899356 - DNA, 599 bp, Homo sapiens
ataatctttaaatctcagcattttagtgggcctgtgtctcaggactgtgatcttcacaagtgtttcttcttgtatagctttaggtgtaacaggacaactagaagggactcaagttagagaaacatccttcccccacagccctctcacaggagtctggtaaagcctttcccctggagagcagacctttgtttctggacatacttcagaaggttactcgtcccctccccctgccagagccacaggggtatctttgtcagaacttcaccaggagaacttggtgggattcctgtaggtatgctcacgaaaacaaggaggacccatcacagttcggcccccaggtgtttctcactcccatgctagtccacactcagcctccagcaagtcatcaaaattaccatttaagtgttttaacaagttaattactccagtggattcaggtccaagtaagcagatcttggctgtgaatttctggatttgcctactctccagattttattgtggcagtttgtcctgcaaattccgttctatgatggaactaaaaaactcgctgrttttatttgtccagcttttccttgttttaaaggctggagtaacaactt

SEQ ID NO: 899357 - DNA, 365 bp, Homo sapiens
tccactcagctcttgcacttaccagagacaggagctggtgcctggctctctagctccattctttcttggagaacagcctgcagctgcyggcggctgcaacccaggctctccctttaatgcttgaatccactttccctttcctagaagtgaaatatgcttttatattttattgtacacatattgttttaattgcttttggtggtgagagtgaaggtaacaacagtggctggtgtccctggatggtcaccaactgttagtattcctggctctgtctccactcagcatgggctcctcagagaaaacagagcaaagaaaaggaaactggtcttgggacagatggagtcatttgataggaaagctgggaa

SEQ ID NO: 899358 - DNA, 619 bp, Homo sapiens
ctattgttgaagtgtttctttttttgaataaaattttaaatagtattactattaccctaattatactatttatttcacagttaaattctttgcatctttttttttcttttgagaaaaagctaatgtgayatatatcttcataactgctattgcctttttaaaaatctctttttaaatgatgaattttacaacatccctgaaagcttaggtttgaggtgtgtgcctcttactaacatgaggtgtcagtgctgatctctaacgttgcttttgtgctacttgaattatcagttggcaaagcaaattcttgtccatgcagggtagggctacacgtattttcagcaaggttttaaatttttttctctgttgagttaaaattatgtaaaaagaaaaatcaactgatgttaataatgctgacacctattaaataattactttggttttgtgatcattccatttaactgttgcaattgccccaattcatagttgagaaaactgtgactttaaaaagtcatgtgatgcaggtattgattagataaaccagtacggctccttgcagtgctgggtaacttgagcgtgttggctggatgatctctttgtgatgatgtttgtgttaacggcc

SEQ ID NO: 899359 - DNA, 602 bp, Homo sapiens
cagaaaactttcctaattaggacatgtagtctctgaaactttgctagtatagtgaaattcaactcaataaataagctttctgaactcctactaagcacaaagtattatgttaggtttctagtgagttgcaaagaagaaaagacattaaagttattgaccttgacaagctcacgatgtctttcatgagatctccagttctggttagtctgtcatttaattattcattcaacaaatgcatattgaacacctactatgggccagtccatgcacttggcactgggatgcactgagctagtaggagaaggttcttgcactcatgagtttccatcccagtggagaagaaagacaaaaagaggtagtgacccataaaataacaagataattacagattgtggtaatggctgggataaaataaacagggtgacattttattatgacagaaatgcattatggcctggtttgatgtctttataacagttacatctattttttaagtgaattaaaagcagccacaggaaaggcaaagggcagaargcgtttttgcttatcacctgcatctttgtttgctttcattagaataatgatgttccattagtcaatga

SEQ ID NO: 899360 - DNA, 622 bp, Homo sapiens
acgtgaactctgctctgtcctctgggctcataatgttctgagactcttgctgcctctttcatggattccccttctatttccctgagacgaytcacaggtcacagaaagctgcctcccatccttgcggctccatcaaggtgctttggaggcaggtaaagcgcaggtaaggagtggcaccccaagctcctggcttggtggcagactcagtcccatctctttcctcttggccccaggagccctgctgatgctgtgttgccctttgactgggccatcttctttctccgccctcgccccttcttggtccaagcccagaaatgccttgtagtgtgtggtacgcttcactctctctttgggggacatctgccaaccagcacagtggtgatgacagtttccagatgattttccaggagcaaagaaatgttctgggggaggagagagtggcattggccaaacactgagtgggctgaacattgtggttccggaagaggcccagggaggtggagtttcatgaggctcaaagatttctttttcctctttagattctgcctaaagcaaaagtcactaattgctttgtattttcctggcacttaaatggttctctggtttctgactctcctccagg

SEQ ID NO: 899361 - DNA, 598 bp, Homo sapiens
gggtgtaatggcatagacctgtaatcccagctactctggaggctgaggcaggagaattgcttgaacccaggaggcggaggttgcagtgagccaagattgtgccactgcactccagcctgggcaayggagcaagactccatctcaaaaaaaaaaaaaaaaaaaaaaaagaaaaagaaatggattagtagatgaaaaattttccacaattaacttaattcattattgctcaggtaaaaagagccagggacaaatatgagtgctgacataaaaccttccctgtgtccttattgtttcaatgattatttattgaatgtgaactactaattcatccattcattcagtgagtcaacaactaattatcaaatgcttactaagtgaaaatgagaatataaacgtgtttaggattattccttcaaataatgtataaactaatggttacataaggcttacacatacaaagaactgaaaaagataaaatcattttcagaaaaggggttcaattttttatgaggattccaagatatttatctgtggctaaggaaacaggtacacatttccaaggtggagtttgagttgagtcccccaagttgagtaggat

SEQ ID NO: 899362 - DNA, 619 bp, Homo sapiens
aaagaaaatgtggtatgtatattccacagaatactacttagccataraaagaacaaaataatgtcttttgtagcaacttggatggaactggaggccaatattctaagtgaagtgactcaggaatggaaaaccaaatgcttcatgttactcacttataagtgggagctgcactatgggtgcacaaaagcatacagcatggtataagggacattggaggctcacaagctggaatcgtgggaaggggattgaatgatgaaaaaacacctattgggtacaacgtacaagacttgagtgacaggttcactgaaatgttagacttcacgactatatagttcatccatgtaaccgaaaaccacttgtacacctaaagctactgaaattaaaaaaaaagtaaaataaaaataagtaaatctatatccaatagcatataacaaaagaaaaaagttcagataccccattctcaaagcactattcagttggtgtgtacctggcagaaacactgtatcctgtatattttcagtctgttttagcaaaaacaagtttcttgtatcaccccaggctaatattcctatatcagaaatgcactgaagtatcttcttttcttttgtgctctctatca

SEQ ID NO: 899363 - DNA, 583 bp, Homo sapiens
ctacaagttgtttggtatgtgacttctcacctacaagaaatggtgagagcaggcagatatacccaatgagatagaaaataagaggcaaacacacaggacccccaccactggtatgtaatgtgagtgagtgggcggaagcaagtagattaagaggagcaggatatactaacaaagggcatttgcagtaatgatgtttggtgttgtttacccacataatctagtaaggaatttggttaagatgattagttacacattaaactattatttgaacatttgaacccagtcacttatggcattggttctttccttatctagaatgctttatatatctgagcttttataattttcacaccctgacacccctttttttctttactcttagaatattactttctgtcctgattctttcattccaacatcaaggtgaacaacttttaatttactattatttctgacctgtatagtttctaggaataatcttagatttacctgttacaggtacagttgatgagattcacayattttttaggattagtgttttaactgtagatacctaataaattctctttctaaagattgttat

SEQ ID NO: 899364 - DNA, 585 bp, Homo sapiens
tcaaggtacttgtattctaaagggcatatacagataatactctacaaacaagaaatggtcatttcaacaaagtgaaatgrtgaatatatattgaataactggagtgggtagcaggtctctctggagtaacatttgagcagagacctaaatgctgaaagaaccagctatttaaagatctggggtgaaacatttttaaacagagggatctaaaagtgcaaacacttcagtgagatcatgaaattggtgtatctggagctcactgaacaagaagcgggacatacttaaagctgaggccagagagatggactggggccagggtcacactgatctttgtaggtttaaaaaagtaggaacacggttgagggagctactacagtggtgtaggtgagagatgagagcaaagtctgagggacattagtggcagaggtgaacagcaatcaattcagaatgtggattggaattagagcctttaggacttgcagacttgcaaatggattggacatggcagagagagtaagagaaatcagaaagctttaggtctgagcaatgagattatcatgtttactgagatggagaagactgaag

SEQ ID NO: 899365 - DNA, 549 bp, Homo sapiens
tggtgtcatgcgcctgtggtcccagctactcaggaggttgaggtggaaagattgcttgagctcaggaggtcatggctgcagtgagctgagatcctgtcactgcactccagcctaggggatacagaccttgtctcaaacaaacaaacaacaacaaaacccaaacaaaaacaacaacaaaaaaatccacaacttcgctggtgtttcaaactaggctcacactgtggctgtacaaaagaacgtgatctttgctcttgagaaggggggcatataatcaaacactcaaaattcaacatgattaatgctataggtagaaagtgctctgggaacaaaaaaaaaggaactgctgatatctctgtttctgggctttagcaaatatctcacaagggaagtcctctactgtgacttctctttccagctcacagttttgtttatttctgaagaagatgaattgattttgtagtattgtgttctggaagtcttaartaaatgataataaatgatccttttcctctttaaagtattaatgcgctataccatccaagaacttat

SEQ ID NO: 899366 - DNA, 544 bp, Homo sapiens
cctacttcattccttattttgcccatttccattgtaatatgtytctcctttcatgtcagctttgcctcttcctttggcattttatgccagttttataggtcccatacatttccttaaatgttgatgaaaatccttagcccacactaagagagtaaagaacatgtctgttctgaccctggtaggattcctctctcacacaattctccggattcccaccatagttcctacattgctcttacccagatatgccttatggagaaggctcctccatgttttagacttcatcttactagtcccagttaatctttgactattgattatgcactacataaagatatttctaaatcctgtttcaagcttgccaatttagttgtacacaaatatgaggtaactttcagtagatatggccagacaggtgagttttctctgcagccataacctctctatcaattttcatggaagtacaccagcatatagattggcttttgtcatatgcaaacacagagcagcgttgctacctgcattcagggctcaatggaattcc

SEQ ID NO: 899367 - DNA, 640 bp, Homo sapiens
tagcacagaccaaagcagaaagcaaactaagttttctgtattaaaattttctggagcacagcattgtttaaccctagggactgccaagggttatacctgaaaactaaacgacaggccctcggtgcttatcattatctggaaaagaatgaggatcaaccccttctgttgaatgtctggggtattgtaagctacataaacttcctgaagaggaaacaggaaaaataaagagaataaaaggaaactaactacatttcctttcctttccctttaaacctttcttttctttccattctgtcacctggaatttcacacctggctggtgcactcctggacaagtctttgatctttatctctcaaagccgactcacataaaaatgtgctgaagcatggggatcacggctgtccacacagcatgtgctgctctatttcctttgttttcttggccctaaatgccacacttcccaaggccctggacactcatccccaggttacatagagtcttcattaaatgaactctgggatcatgaaaagctctagaagtaccaccgacttccacagagcccggaaaaaccaccttaagtatagaaccatgactatacctaggacagggataaacrcagacccttcatacctgaggttt

SEQ ID NO: 899368 - DNA, 583 bp, Homo sapiens
ggggtctgccttatctatgtcaatagatgggggaaaactgacctttggtcaycctagttggcctcttcagtttttcaaaactgtaaagaaagttcaatttgctccaccattttttactatggtgcttgtattagtctgttttcacactgctgataatgacatacctaagactgagtgatttataaagaaaaagaggtttaatagattcacagttttacatggctagtgggggcctcacatcatggcgaaggcaagaaggaacaagtcacatcttacatggatggtggccagcaaagagagagaacttgtgcagggaactcctcctctttataaaaccatcagatcttgtgagacttactcactatcacgagaacagcacaggaaagacccacccccatgattcaaatacctcccactgggtccctcccatgacccatgggaattgtgggagctgcaattcaagatgagatttgggtggggagagagccaaaccatatcagtgctgtattactgtatgtatatatattacatagtactatatacaaatgaatagtttgtaacccacttataagtatagaaatat

SEQ ID NO: 899369 - DNA, 635 bp, Homo sapiens
gacagtctttggtgtcagtggagatatttttctcaggatagtaatactaaattaatgatgaggagggggacatatttttcttttaaccaatctccactggatttttgagatggtattaagaatacagstatttagtttggtattttacaggtccaagattctgattaatttcatactttgtaaaaggttacaaacttaggtcttagaattgaataacaacaatatatacttactgacatattaagacaatctcttgctttcagctcaagatgctaatttacataatctgaatgtgtgaaaaatgctaatttaatttagtttgaaaaatgttggaagaaatcatctttgaatataacactgggttcatatctctagcaatgaatatgggcctttggaactaatcttttattatggctaatctcactgaagcatgaacaaaatgatgagtttatttaatgcagggcttcattgcaatagactgtttgacttgtaacaggaggtgacacatcataagctgagaaatctcttacttgagattaagaaaatcctaccacacaatcttgagcaagaaacttgggcttatacactcaggtaacaatggtgtatgcactaccataaaccaatgccatgacaag

SEQ ID NO: 899370 - DNA, 643 bp, Homo sapiens
cattgaatcaacaagtaccaagcattatataggaatcaaaaatagtcaaagacacaaaatccctactcagatctattttactagagtgtcatcaattctcagtgactcagaggctttttatctcctatgtagattacccacagcctgtgcttcccctttttctctgtctttccatttttatggtcacctgaggactcattagtgctcctaccagaggataagtaaaggaagggaaaggatataaaacttaaagtgagtcaattttgctacctttaagtagttgagggaagaagaagtagctattataaggcttgcagattatgtgaagatttcaattatccattctctctctgtcaaacttaccaaaaataattaagggttggctgtaaccctccttggaatgttaaaatgactgatggttgtggcaagtaaccacagtaaataagatgaagtgaggtaaactgtgctaaggggagataaaaaacatagtttcaagtcagtttcagagtcccaaaggagcaatccaataagcatcaagccagtgggcaattttataaatataaacattagatgcatgggcaagaatcacaaattaggttagaagaaggaagtaaacamccatgcaacagtatactactcacac

SEQ ID NO: 899371 - DNA, 577 bp, Homo sapiens
cattaaatgtactgaactgtactctttttcctttttgctttttattttttccatgcctttgggttattgcggaaaccaagttgatcttcctgtagttggtcccatgtgctggatttctctgtttactttcttgtgaaatgatttaacttattcctccatccccccaaatatcttgtttatgaagagtaacttctagagcagtgctttccaataggattttccgtgatgatggaaatggaaatcttccatatccgagctatctactacagcagccgctagctacacatggatactgaactcttgaaatgtggctagtatgactaaggtacaaaattttaattaaaatttaaatgaattaaatttcaacgtgactaacgtttatcatattggacagtgcatctggaggcttagttagattcaacatttttgaggaggagtactctggtaggttgaatggtggctccctaaaacagacagttgaccgttaaacaacagggtttgaactacaygggttcacttatacacagctttctttcaactaaacccggataaatatggtacttgtgggataaggaac

SEQ ID NO: 899372 - DNA, 576 bp, Homo sapiens
agtgaatgtttccccactggttccaaataccaattggggaattcaagccaatgataatgwtcctaaaacatgaacagactttgtttttcaagctgttccagcctctactgccaactccttccctgggacccaccaaatacgaatgaactcgagatggagaggcaactctccatgaatctctcttgggggaacatgggaccggctcatctccagggcccttttagccactctaaccctttgctaggagctcctcaacctttgggacaccagggctgcattatctttcttattacagcgcccatgcatgcgtgtcaggcttttgccatgccagcaggtcaaagatgggttgcctacttactttgtgggatgctgcaatcaattaccttgctttggaagctagctcttgggaagccagcagaggtgtacttacaccttgttcctagactgtaaaacaagtttaagcttcgcatttcagagcctttcttgtccacagctcatgaaagggagcaactgattctgttttctttacccagcagcttcagccactggggaaatggagccatttgattcagctga

SEQ ID NO: 899373 - DNA, 576 bp, Homo sapiens
agtgaatgtttccccactggttccaaataccaattggggaattcaagccaatgataatgttcctaaaacatgaacagactttgtttttcaagctgttccagcctctactgccaactccttccctgggacccaccaaatacgaatgaactcgagatggagaggcaactctccatgaatctctcttgggggaacatgggaccggctcatctccagggcccttttagccactctaaccctttgctaggagctcctcaacctttgggacaccagggctgcattatctttcttattacagcgcccatgcatgcgtgtcaggcttttgccatgccagcaggtcaaagatgggttgcctacttactttgtgggatgctgcaatcaattaccttgctttggaagctagctcttgggaagccagcagaggtgtacttacaccttgttcctagactgtaaaacaagtttaagcttcrcatttcagagcctttcttgtccacagctcatgaaagggagcaactgattctgttttctttacccagcagcttcagccactggggaaatggagccatttgattcagctga

SEQ ID NO: 899374 - DNA, 581 bp, Homo sapiens
tttacttaagaggctatttattgatttaaggcatttaaggtaatctcttccaaatcattagctgaccacaaagctaatcaaacagatttcagtgactgcacacaacaaagaatatggactttgtggaattagtacaggaaatttactaaacaagcagcaacatcaaaaataactactataaatagcaacaataataataaactgtgaggaaaggagggaattttattaccaaagttaccatgctttattatgttaatctagttttcaaccaaaatttagttcatgaaaagaaagaaaatatggctcatacccaggataaaaagacaggcaatagcaactgttcctgaggaagctctgatgttgaccttactagacaaagactttaaatcatttattttaaatatgtttaaagaactaaagaaaaccatatctaaagaaataaaggaaagcatgagaagaataatggctcaccaaatagagacaaccaatggaaaaaaatatataaaaaatgaccaagtagaaattctgaagttgaaaastaggttgactgaaataaaaaatgtactaggaagactcaagac

SEQ ID NO: 899375 - DNA, 640 bp, Homo sapiens
tttggaagactattgggaagacatgataatattttgcaatgtgagaaggacatgagatttgccagggggccaggggtggaatgatatagtttggatatttgtccctgtccaaatttcatattgaaatataatccctaacatcagaggtggggcctggttggaggtgtttggatcatgggggcagatccctcatgaatggtatgggccatctccttgatgacaagtgacctcttgctctgagttcacctgagatctggtcatttaaaagtgtgtggcacctccttccctgactctcttactcctgcttttgccacgtgatgtacagggccccactttgccttccaccatgagtaaaagctccctgaggcttcatcagaaactgagtgatgttggtgctatgcttcctgtacaccttgtagaatcaagagccaattaaacctcttttccttataaattgctgagtctgaggtatttttgtatagcaatgcaagaatggcctaattcaatttgtgtwtttttagttgggaagcatagattcaaagataaaacactctgcagcactaattctgtactagttgttaacaggacctaatcaggaatcagaggtggttttctctgatgtctctctcttattttttaa

SEQ ID NO: 899376 - DNA, 640 bp, Homo sapiens
tttggaagactattgggaagacatgataatattttgcaatgtgagaaggacatgagatttgccagggggccaggggtggaatgatatagtttggatatttgtccctgtccaaatttcatattgaaatataatccctaacatcagaggtggggcctggttggaggtgtttggatcatgggggcagatccctcatgaatggtatgggccatctccttgatgacaagtgacctcttgctctgagttcacctgagatctggtcatttaaaagtgtgtggcacctccttccctgactctcttactcctgcttttgccacgtgatgtacagggccccactttgccttccaccatgagtaaaagctccctgaggcttcatcagaaactgagtgatgttggtgctatgcttcctgtacaccttgtagaatcaagagccaattaaacctcttttccttataaattgctgagtctgaggtatttttgtatagcaatgcaagaatggcctaattcaatttgtgtatttttagttgggaagyatagattcaaagataaaacactctgcagcactaattctgtactagttgttaacaggacctaatcaggaatcagaggtggttttctctgatgtctctctcttattttttaa

SEQ ID NO: 899377 - DNA, 601 bp, Homo sapiens
tatgttgatatactcctccactttggtttctgcatttgggaaattgaggcaataatgccaattccattaggttttcatgaagtgtggcagacactcttaagacttcctaatatccattctgctttttttccaattgagaaatttgcctatttgttcggagcaacaatgcatccaactaaatactcatgcttcctcagcctcctatgcagtaggggtggcagatgggaaatagatagtgttctattgtgagtccctaggggtaactttttatttcctagggggaaaaaggggtgctgaaaggaatggtgcattatctttttgctttgaatgtggaagtgttgtctggagctagtagccatcttacaatcttggggacaaagccaaggctagcagaccagaaagatagcacactactccttgtagaagtaaagccagcaatttctcacctataaaatagaagaacaataaattctatttgtgtaagccattctcagttggcatatacatgtaccaaatgcattcaatccttactgaaaaagagaatraacaacataacagtcataacttgcagaccacaatgcctggcacactatggaaattc

SEQ ID NO: 899378 - DNA, 584 bp, Homo sapiens
actaatggtcattgttttgttttatttcctaagtcctcctgtttcttatctaatctatttgtcttttgaatttatgcaaattcctcttaggacaataacaaattggctctatctccagaaaaatctctccccatcttctttttatcttttatacctttaggcacctttaaaaattctttaattctagagagatattatgaaatctatttcagattgctgaatctgatatactttctggcacttcttcaggttaatgttaaacacaataaaataaaaataatttaaaagcattaattccaaaccacaacttaaaaatgtttagaattataaattttgttatataatcataattaaaaatttaaaaataaaatgaatatataaaaaataattctacttaatatatgtgagtgttattgtagaaatttacagatttcttgaaggaatattttatgtatctaaacttatttctatttgcataattaaatgaaaccatagatgtactatatcatatctaattgccatctacttgtaacrgctgtgcaaatgtgaatgtctgtatatgaaactgcaggcactcacattac

SEQ ID NO: 899379 - DNA, 687 bp, Homo sapiens
atttacactgaaaaattaaaaagaaggaaggtgttctgtactacactattaaattcagctamagagtatgttctgctgagtggctggctaataaaaatagccccaaaatggttcaaagaaaatgctactctgtaggtcaaaagtagtctttgaacagagcattattttttcttaccatctcaaaaattttttatccttgaaaataaagtgaaggcagtgaaatagattgggtcacaactactaaacatgtgctaatcctttgaacattttgacattctatcagagtctatgaaacattttcaaaatgcacttgtgagaataaggaacatagtaccatccaggtctccaaatgtgtgatgtgctactggctggaaaaataattgtaccctcttaataatccaaattaacatgagatttaataatttcaccttttaaataatctaaattaacattgtgagctgagaaaactgctaattgttaaaattcatacagtatcattttctctcactgaaacgtgtacttcttgggaaaataccagaatctttattatctagtgcagtaaaacaaacaaatcaaattgatgaataaatgctgccacgtcttcaatagtttattgtggaaaagatcaattccattttatcacatattgtctggacactttctttatgcaagatgcaaagtcaagtt

SEQ ID NO: 899380 - DNA, 617 bp, Homo sapiens
aagctagcaagatctcagatcaacaaaataacatcaaaactaaattccagtacacttaatatcctctcaatactgaaccaggaagaagatgaatctgtgaatagaasaataacaagttctgaaactgaggcagtaataaatagcctaccaatcgcaagagcccagcacaagatagatttaaacctgaattttgtcagaaatacaaagaggagctgataccctttcttctgaaactattccaaacaattaaaaaggagggactcctccctaactcactctatgaagccagcatcatcctggtaccaaaacctggcagagatataacaaaaatggaacacttcaggccaataactctgatgaatatcgatgcaaaaatcctcaataaaatactggcgaaccaaatactgcagcacatcaaagagcttatcaaccacaatcaagttggcttcatccctgggatgcaagcctctttcaacatatgcaatttcaataaacgtaacttatcacataaacagattcaaagacaaaaaccatatgattatctcaattgacacagaaaaggtcttcaataaaattcaacatcctttaaccttaaacactctcagtaaactaagtat

SEQ ID NO: 899381 - DNA, 604 bp, Homo sapiens
tttcttgtctattgttgacttcctcaggctttggctgtgcatagactagtcagcttccagttgtgtgactagaacaaggctccatgtttcctcaagcttcagccatgcatggaccgaccagcctccagtgtggtcggagcagggcagttgtccttgtcagcagcagcttggtttcactgcaggatcagccgtgtcgggtggtctgggttttgttgactggtccactggtcctgggaggtggctactgctggtttcagccagctatgatgaacccaaggtgtgatacctgaaactttaacagcagtgggggtagacaagatcacaatatggggaccatctcataaaggccttaaagtggatgggttccatcatttgatctagacagagtctccaggttggaagtgatgtactgcatctgtgaggctaacaggtatcctttctcttacccacccttgtatttcctgcacggcctcacctaaggcttgcatttgccttcttaaggttaatcccccaatttcttttaaatctccttttatctgagttatgatagggggtggtcggctgaacamtctcatagagtgaatacccagttaatttagtaggg

SEQ ID NO: 899382 - DNA, 609 bp, Homo sapiens
tttatatttttttttacatacacgggtctgtgagttagcyggagtttggctgatctcagctgggttcatctcacctagactgggctctaggtttcaggtcaggtccaggtttgctccattcttcatctctggacccaggatgaaggagcaatggataattgggacatgcatttttcatggcagaagtcagaaacccaagaggaatgtatggaatcatgttatttcttcaggctctggccaagaattatcaggccattatgtccactcacattccaacgttccatcagccagaatcacatgaccaaaccacaaatcaatggggtagtaaaacatattgtgcctacagtgagtcagtaacaacaagggtggagatgaaaggaaccactgtgagcaaataaagcaacgagaaactccctaccatgaacaaaccccactgcagtaagggagaaatatgggtaaacaattagctgaaactcacttttaccattctatccatttctctggatctacctgcatctattctgcagaactccaagctggtcccttatttccccaaaattcctctcaaagagttatggacccctcgtgggtatctcagactaccatgtg

SEQ ID NO: 899383 - DNA, 699 bp, Homo sapiens
ccccatctctactaaaaatacaaaaaaaattagccgggcgtggaggcaggcgcctgtaatcccagctgctcaggaggctaaggcaagagaatagcttgaacccaggagtyggaggttgcagtgagctgagaccacgccactgcactccagcctgggcaacagaaaggggctctgtctcgaaaaacaacaacaacaacaaaaccaaccaaacaaacaaaaagaacagccaccttatgtgccatgcactgattgggtttcttttatttaaatgggaacacaaatcttcaaagtccatgtgaaatactgagtaaaacctgcattatcttaagacagagtgtattttctggtctaacacctattaatgtatcataaaatagcactggaaacattccttcaggcccccccctcccgcccacacatacatacattcacacacacacataactttcattatttgtttttcaaaatacaaataagtcattatttagaaaataggacaccaccactgagacatatgaaatacttccaaaccatactctatcagacgtagcctgaagaggttgcaaccgcttaacagttaaagttagagagatacctctatttgcagctctaaatattccattagatgctaggtcctgtcagcacttcagtaccaaaagatgatcttccaagaaaagttatttctagttcagttggcac

SEQ ID NO: 899384 - DNA, 699 bp, Homo sapiens
ccccatctctactaaaaatacaaaaaaaattagccgggcgtggaggcaggcgcctgtaatcccagctgctcaggaggctaaggcaagagaatagcttgaacccaggagttggaggttgcagtgagcygagaccacgccactgcactccagcctgggcaacagaaaggggctctgtctcgaaaaacaacaacaacaacaaaaccaaccaaacaaacaaaaagaacagccaccttatgtgccatgcactgattgggtttcttttatttaaatgggaacacaaatcttcaaagtccatgtgaaatactgagtaaaacctgcattatcttaagacagagtgtattttctggtctaacacctattaatgtatcataaaatagcactggaaacattccttcaggcccccccctcccgcccacacatacatacattcacacacacacataactttcattatttgtttttcaaaatacaaataagtcattatttagaaaataggacaccaccactgagacatatgaaatacttccaaaccatactctatcagacgtagcctgaagaggttgcaaccgcttaacagttaaagttagagagatacctctatttgcagctctaaatattccattagatgctaggtcctgtcagcacttcagtaccaaaagatgatcttccaagaaaagttatttctagttcagttggcac

SEQ ID NO: 899385 - DNA, 575 bp, Homo sapiens
attaatgaacagaaactgtattatcttagtcactatagctctatataagtcttgatatttgaaaatgtaaatcatctagttttagttttcatgaagccaatttcactattcttsaccctttgcctttccatataaattttgaatcagcttgtcaatcttcccaaaaggaaactcttaggatttttaaaatttagattgcattgaatctatgaaacaatatgggagagtttacatcttcatataatgaatttttaaatccataaatgtgatacagcttttctcttaagtttttagaaattatcacaataatgttttgtagtgcttctgtaatagcttataaatccttgtttagacttatttttaaatatataacattttaaaagggttttgaatggtaactttaaaaaatttgtttcttagttgatagctaaatttatttaatttttatagttgatctttaatgtccgtctgatactttatgtatatataaaaccatgcctggtacaaataataatagttttatttatatctttccaatgtttatacctttatttccttttcttgatttatttcac

SEQ ID NO: 899386 - DNA, 648 bp, Homo sapiens
ctacaaagtctcccttttcatttggaggaaaggtggtaattatttcccaaactcctacccatttaagcacataattacccagacagttcttcagtcactgccacactccttatattcaatgtcaatacttcagatgcttttccactgttgataattctccctgtgggcacatgctctttaaacatttatcttcaccaatattgaaaggcttgaatttcatatcttaggagaacagatattttctgactgataatccaaaactcccctataaccctttcacccacaactgtaataataattttattatctcttcttccaactccccaaagaatcttctaatactgacaaacaaatctgcttgtcatatgtggcagctaggctaattattttctaagagtcatgctcctcttaccatcataaatcattatgggctgtttccaactcccttgcattttgatgcgggttggggggcaggcaatttagctcttactagtgcaatgtgagcagaaggatgtgtytcactttggggccaaagcagctgagcaggtgtggcttctccaccttctctatgtcccgttccaccccaactgggtgttaaaacctaaaacaagatggcaaggcctccaccggcctgggtccctcctccac

SEQ ID NO: 899387 - DNA, 564 bp, Homo sapiens
tctggtctctatcacccactttaattattttcagagagataccatattcaggtgaggttgtccatttgtgtgtaaactaccaatctccccaactagaatgaaagatctttggggacagggtctttgtctgctatatccccagatcctggaggaatgcctgccatgtagcaggttctcaataaatattgatgacagcagaacactcatcagccttcacttccccaccttgtcaagaaaccaggtcaagggatgttaagatacactagtctattgcattctcttgaattaccagtctaataattatattgttaaaagagagagaaagaaatgaaattagttctgcataacttattagctcctgatcattgcattctttacttaatgctaagaaactagctgtttagtaatatatttttcctttattgtttcttaaattacaaaagcaatgcatggtcattgagagaaattctaataacacagaggcgtataaagaaaatgatgtctatcttctctytcacttcccagatgtaactctgttaacagcttaatgaataatacccttct

SEQ ID NO: 899388 - DNA, 616 bp, Homo sapiens
agcgtgacacaccataatggctccaaaggagcccttaaaaccgacaatgtcaatgagytcctccaagcatggggatttagagttatggattagacctcttaacccttctcctcccctcaaaataccttaaagaccttttctcccaggggaggagttctgctatccagtgtctgactaaaagatctttgtgaagtcacgtttagacaggacatcaaatgaaggatctgtgttcagctgagatactccgcatgttgccctcaaccaaactgaggggccagaaccacaatggccccatcaaaatgaagaaggagcctcgtaggggtttcatttcatttctggatgtgaatgatcttggaaaaaacttctttgctgttttcttgatgctttagtttatatacctgtaaattactgatttaactaaaagtagattttgctttacagcaaaaacaagaatgacaaatcagatcctgttcaactagtaaggcacttccttgctgaatatcagtcacactttgaaagatgtatgaattctttcaaaccagcaggaaaaatttggaatcaactctgtattttctaaactgaacagttacagcacacaaaacaggttatcaaaatg

SEQ ID NO: 899389 - DNA, 595 bp, Homo sapiens
tcatttaaaatgaccctggacgcttattctgtggtcagtccaaagtgtgagkgggatggaattgtccctccacaggtaagccctcggggagggctggccaagagggatgcttgctggaccacaggaagatgaacaggctgggattggctgttgcccttcacagtgcttgtggatggtacaagctgacatagggaattagaaggcatgtgccgtgcatagaagaaggggggtctttgttctgtctttgagtgagaaaaacacctctccagtatctctttaggctatggaccagggatatttttggggaaggctttggtgggcacagcatccaatcattcagaatggcagatgccaagttttaaaatgatgtctggttgtgtttgtgctgagtgttaaaaacacaactggtagagaatgcaggaagtctcttggcatctgggagtatctggaaataatctctgcctctctgagttgtggtcaggactcagacttaatagataggaaagtgtcctgaaactgtgaggtgccatgtaaatgtagtcttgctattatacaggaacaagcgggaggaggagtttaaactgggccttatctc

SEQ ID NO: 899390 - DNA, 595 bp, Homo sapiens
ttactgatcactgttaatgartgaagaacgagtatcctgcagaaaccttctgtctatctttagaaaacagtcctggatgatggaagggcggagagtaacggagcggacacgtgcctgcaaactaggaaacaaatacatcatgtctttaatgccatctgtaatagacaattcaggagccagccaaaactcatttgcacctttgtttgtgccttccccaatcaatagcagcagttaaaccaggatttactgacttctataaagggttacaacagcaatatttaaagaaatgaaactcaacagaaatatttcaatctttctgggcccttcaccaaccattgttgtttggaggtcgcttgatgggaaaggttcattctttttggtgtactctctgtagggggtgtgtgtgtgtgcatggtatgtgtaaatgtgtgcacacccatgtctttgagtacccacacatgagcaggctctcagtctgaacagggctgaagagcaattttgccatccaaagtcactggcccaagctcctgaaatcaatcggaggcctcaagaagtaaggagcaatttaatatagcgtgcttcttggtttctagaa

SEQ ID NO: 899391 - DNA, 641 bp, Homo sapiens
ggagtggcaggactcttaagaaacacttcagtgactgcactctgtaagctaaatgtgagaattcaagatgctgccattaaaatggactttctgattcagaacaagcrgaagcaaaatgggcatgactacaataatagtcactgtcttcatctattttgtgttactgtaacagaatacacgagactgggttacttataaacaatagaagtttatttggctggtgattctggaggctggaaagtccaagagcatggtgctggcatctggtcagggttttaatgttgcatcatcccacagtggaaggcagagggtaagagagtgcaagagcaagagagcaagggggggccaatcttacttttacaagtccattctcatgataactaacctacgcccaatcatgacattaattcattcatgagggcagagtcctcatgtcctaatcgccacttatcaagtttcacctcccaacactgtagctttggggattgagtgtccgacacatgaacttttggggacacatttaaatcatggcaggcaccatgactgaggagatgatcagaatggttggatccattgaactctagcaatgaccaattgatcatggggttcttaagatagttcattaagatccaacttgatct

SEQ ID NO: 899392 - DNA, 554 bp, Homo sapiens
aatatttgttttaaaaatacaaattcctagcacctcttcttgcagattcaggttcagtagagctggggcaggctatctgcatttttatcgagccttccccagggaatgtgaggatgaggaaggtctggaaacactgggttatgttaacctgcccccagagaaactgatgttggatggaaggaagaaatacaattcagtgaacgctgagagtgggaacagcttcacatacagatcagactcaggcatggcaccaggaacctcaggttgaacaaactccttgcatgactatgaagttcaagaagttgtgagaatcatcaattttggaaacatctgccacaagagagaaaatctcagcccaactctggctggtcacgttcctaaaattccccgaaatgttgagtaagccgtaagttaggggagagaatgcaccagcaagtccacagtcytctttgtgcaggtttggtgctggctgttgcaaggcggtgtcttttgcttcctcttgggccctcctaaggcctagaacttacagtacaaattacccaagactgggtgag

SEQ ID NO: 899393 - DNA, 614 bp, Homo sapiens
cctttatagggtttacttaattgttctgccaaagcacatctgatgaattgtgtaatgtacaattcattgagtgctacaatgaaatagggacattgagatataaagagacactttaggtggagtaaccaagaagaaagacccagatactgtctcatattgatggttctgattcattacagaaatggaagactaaaggaagacaggttagctgtttccaagtatttaaaggattgccacagacaacagaagaatgctttgctcttctttgctctaaagaccagagaaaaatttcagcttagtggaagaaaaaaatatatacataacaaatggagtgtttcaacaatagaatatatgagattctgaggtgggatgggccccattataggaaatacttaagcacaagctgacagaatgtcagcaatgatgtaaagagaattcaatgagctctatgccgtctaattctaaagacatatatcccttaagaaattttaaattcaaagtgagctgaattatttcattgtattgacaaacgacttgcctatattcmtgtagtcacttttgattattgactttggtgtttctgaaataatgtaaaatcatcctccgcatctggc

SEQ ID NO: 899394 - DNA, 454 bp, Homo sapiens
aaaggatgacagttggatctcacttgaatctatcattcagaaacataattcaaacaacgcttcttcttgacagcaggctaacaaaagtmtactgaaaagttcttaaaataacttgaattgccactctactctgccctcagactttattttttttaatgcacttacattcttgtttgatcatattgaatggccaaagttttagaattcaaaaccttggtgatgtaatgaactaactgaatacaaccattcatcaatagtcagtcatatagcaatatgcctcaattttcaaattcttatttcataaatatttaagatggcaaatgtcctgtttgctttatcctaataaaatagttttactctgatggttcttcattccggtccatcatgtttctctctcctttgtcttgacatacatttcttatgaagtcatttctaatatatacattaacgtata

SEQ ID NO: 899395 - DNA, 624 bp, Homo sapiens
tgaaaatgagttccttccacctgtgagcctgtaaaatcaaaacaagtcatttacttccaagatacaatgagggtgccagcattgggtaaacattcccattmcaagagaaagaagtcaggcaaagaaagggactagagctcacacaggtccgaaaactagcaggacagtcattaaatcttaaagctctgaaataatctcttttgactccatgcctcacatccatggcacgttaatgcaaggggtgggctcccaaggctttgggcagctcttcccctgtgaatttgcaggatgtagccccatggctcctctcaagtgctacagctgagtgcctgcagcttttccaggcatagagtgcaagctgccaatggatctaccattcttggttctggatgatggtggcccccttctcacagcttcattaggcaataccccactggggactctgtgggcttccaaacccacatttcccctccccactgctctactagaagttctctgtgagggctccactcctgcagcagccttctgcctgaacaccagccttttctatacatcctctgaagtctaggcagaggctaccaagccttcttaactcttgcactctgtgcacccacatgcttaaca

SEQ ID NO: 899396 - DNA, 600 bp, Homo sapiens
caagtagcacagtgcctggaacatattaagtccccaattcttttgacagattgtttccttagtgatcactgattatgagtcctttaaaagttcaaagacaataaaaatagtatatttttatgattgcttcttattcttacatgaattttaatgaattaatgaatttaatatttttaaagtgccgcaactgacaaagatgaccttcaaatgcttgtgcccaaccttgggtggccttgtagggtgatcttatgcatgtgtcaaatacagcgagtttgaaatagcacattaaattacgtatttgcaattatcagagatcttgcaatgtttgcctatttgagcctcattctatcactacatcacatgttttgtttttgttttttcattctcttacctttttttgtaatccatatacccacagtatatttctttatttgatgctttcatcttctagttcaagactaaaacaatgtaaagacacctgatgaaaagaaatttggatttgtaaacataaactcctaggtctcaagcattctcygagtttgattatgttccccccacccaacaatgagaaaaaaagtgttagactctacaggcataaat

SEQ ID NO: 899397 - DNA, 655 bp, Homo sapiens
tttatttggaatgaaaaaaagaaatcaaaccaaattacagtttttaaaaaactgacaataccacaaaagacataggccaaaataaaaaccttaaaaaattttccttttgaacacatatatataatactattttcttatatactttggctgcatactttttaattttataacaacaactttgaagatttttggcaaacagattagaaagataattccaattatttaaggatcattataacttggttttaatattgatagtatagaaaagtttcagctttatgactagttactagtaataccacattgattttttaaagatttttgtcaaatttgggaaaacctctctatgtttattttctatgtaagttgtgagattttagagcatttaaagttttcttgtgcagggaactatattaaagaattatgaactcattaactagattattgttgttagcctcctcatgcggtgtattttatgttatagtcaacaaagttagtatttggggccacattatcaggaaatatacatcatttttatatgagcaatggcacctgggacttatagaacacgayacatcagatataacaagatatattcccatatgttgaggcgcataagacatgagacttgaagacactgatatatttatttgta

SEQ ID NO: 899398 - DNA, 534 bp, Homo sapiens
ctgtatctctgtcaatgtgcctgcaaaatatagtaactcattttatggggaacctttcatttttgagacaaaagattaagtgaaactcacatctgcctgctctgccggmagtgacttgtcaatcttccaggtgctcaccaatcctcctctgaccatcctgtaatttaaaagtggtcacagggactaagacagagcttcactaaatattgctcagtttgttcagggaagataaactaaaatgagtttttgaaaaaagtgtttgtggtttctgtgtgtgttaattcaatctgtttttctccacattctcccaaactcaaaataaacaagtgtaattcagtttcattctgactccttttccaaatattgtctatctctgcatttatttttctttctcaattccacagttgttgtatgaagtaggattgcaaactcaaaatgaagagaatctaattcttgttttgtgtgaagctcttgtgcagataagtaaacctcctgtccacatagggaattaaatgtctataaagcttgtgcatg

SEQ ID NO: 899399 - DNA, 647 bp, Homo sapiens
acaaaggaaaaagtagataaggtggacttcatcaaaatcaaaagcatttgtgtttcaaaggataccattaagaaagtgaaaagacagcctacagaatgggagaaaatgttttcaaatcatgtatctgataaaagacttgtattcagcacttatatacactgttataactgagaatttttataactcaataataaaaaggaaaataactccttttaaatatgggcaaagaatgtgaatacacatttctccagaaaagacacaaatagccaataagcacatgaaaagatgttcaacgtcattagtcattagggatgaaaatacaaaatcagcaaactgactcaaaaagcaggaacctaaacacagaaataataatgttcaaagaaactagaaatgttacccaaaaattgtttcatataaaagtgtcaggctcaaatgagttcataaacaaaatattttaaatctcaaagaactgatcattcctatgccattttaaatgtttccaaatacagagagaaacagatatcctctcaaataatgttataaaactattttaactttgataaccrtctgaaaaacaactacacataaaaacacagaccagtcatttcacaaatacaaatgcagacaccttaaataaaatacataaa

SEQ ID NO: 899400 - DNA, 472 bp, Homo sapiens
gggtactctgagaaataactacagaatatccaaaggagtgctaatttcctacttgagcatggtatcataatttggcgataaatggaaatgtgacttcattttctaattaaagcctggcaagatacggacttaaaaatgatagagaagacaacaacaataataaatatgtggtattttaaagcccagagtatttccttaggttttacccaatttctttacataacatttgagtaccacaccactagtggctcccatagtattttaaactatccaaattgtgtatgttcgccaccatgaggaaacaaaaatttaacctgtgatttaaaaaaaaaaaaatcatagttaacaatgttcaccacagggattcaaagtaaatatcttctaacttttttktcattaattcaatattggtcaatgctataaaatctacctttctaagagaaaatacttcaaaatgactttgatttggaag

SEQ ID NO: 899401 - DNA, 598 bp, Homo sapiens
ttagcaccactatcaccaccaccaccaccaccaaaaataaagtgtaatacaaaacaggaactatctcacttagagggtagctaaggagatgaacatccttttsctaactaacattttaatacacaatttttcaaacactaaacagagtagaacaaattttgcagtaaacgtacatatgaccacaacctagtttaccattaaattttttcttgtgcatgtgtaccacccatctctctaaccctctctgcaataattatttaataaattttcatgatcttgatcagagtttttgatgtatttctaaggaaacagtaaatagcagtagacttctacttaaatacttcaacatacttatcactattaaatatttgtatatagttttattttgatgtaaaatttacatacaatgaaatcttaaaagtattctgagaactgacaaatacatgcatttgtgtaaccaaaacacctatcaagatataaaacatcagcatcaattcaaagacaacacagtgctgatttttctaccctagattagatttttctgttctagaacttcatatacatgtaatcatgtttgttcctttatatgcaagtatgt

SEQ ID NO: 899402 - DNA, 589 bp, Homo sapiens
ctttgacttgtagactcgccacatcaatctctgcctccattttcacatcactttcttcctkgtgtctttgtgtgtcttctcctctttttaaagatgttttattgaattttgggcccacctggataatccaggataatctaatttagagatgattaactaaacactatctgcaaagaccctttttccaaataaatcatatacacaagttccaagtaaaatttctctatatctatctatccagctagcaagttatattgctatctagctatctatctgatatggtatggctctgtggccccacccaaatctcatctcaaattgtaatccccatgttttgaaggagggagctggtgggaaatgactggatcatgggggcctttcctcccatgctgtactcatgatagtgagtgagttctcatgagatctgattgttttacaaggcagttttccctgctcttgcacactttctcttgcctgttctccttctgccatgattgtaagtttcctaaggcctccccaaccatgtggaattgggagtcatttaagcctctttcctttataaattacccagtctttggcagttcttgat

SEQ ID NO: 899403 - DNA, 623 bp, Homo sapiens
aacatctgaatatctttccagtgattttaaaacatgacaattttatctaagaatagcttggaaggttatatatctcagcctgaagatatactttgatggccgtaatctttgcctttctgcttcagtgatatggagacggattggatgccagggtgtcagagaatccgcctagctgattaggcttccatagacataacaaaggccatactttaaattagctccaacagtctaatcagagtgaacagactacttgaatctgtgatggagacatattggcagccgatgaaggctgactagagggattctggtgaaaaaccaaagtatataaatgctaaaagcagtttgattctagtgtgaggaaagggtgatttagaagaaaacatttatgttaacaattcatttctatcttaatttcattttctttaaagtttagctttacatatatgaattttaagaatcatacaaaataattttttctcatctatttaatgagtgacttaaaaatatatatttcawaataattacactcaggagcattttgatagcacagatcacatcatcaagatgcccacttccatctgaagcaaaatgcactaattgaagattcagatcttttgattgaa

SEQ ID NO: 899404 - DNA, 588 bp, Homo sapiens
gtcaatggtgtctgtcaatggtgacctagtcaatgctctgagaacctggaaaccaatagtgtgtgtattagtcagggttctctagagggacagaattaataggatagatgtgtatataaaggggagtttattagggagtattaactcacacgatcacaaggtgaggttccacattaggccgtctgcaagctgaggagcgaggaagccagtccaagtcccaaaactgaagaacttggagtctgacattccaggacagaaagcatccagcatgggagaaagatgcaggctgggaggcttagccagtctaatctttctacgttcttctgcctgctttctattctggttgtgctggcagctgattagattgtgcccacccagactgagggtgggtctccctttcccagtccactgactcaaatattagtctcctttggcaacaccctcacagacacacccaggaataatacttsgcatccttcaatccaatcaagttgacactcaacattaaccatcacagtgtggtttcggttcagagaccagcaagctcaagacacaggaagagctcatgtttcagtttagggctgaagg

SEQ ID NO: 899405 - DNA, 617 bp, Homo sapiens
tatggtattgtaaagaatagttttgccatttaaaaaatcctctgtgctctgcctattcatatctgcctctcctgttgctarcgatcattgactttttactgtctccatcattttgtttttccaggatgttatatagttgaaatcgcacagtatgtagccttttcaaatcagcttctttcacttagtagtatgcattttagtgtcctccgtgtcttttcatggcttgaatagctcatttctttttagtgctgaataatactccattgtcttggtgtatcatcacagttcatttatctgttcacctactgaagaacattttggttgattccaagttctggcaattgtgaataaccctgctttaaacacatccatatgcaagtttttgtgtagacataaattttcaagtgctttgggagagggattgcaggatcatatcataagggtgtttttagctttgttggaagctgccaaactgtcttgcaaagtggctgtaccattttgcatctccgtcagcaatgctccacatccccagcagcatttggtgctgtcagtattctggattttgggcattctaatacgtgtgtggtggtatttcattgtttttgaagtttgcattt

SEQ ID NO: 899406 - DNA, 617 bp, Homo sapiens
tatggtattgtaaagaatagttttgccatttaaaaaatcctctgtgctctgcctattcatatctgcctctcctgttgctagcgatcattgactttttactgtctccatcattttgtttttccaggatgttatatagttgaaatcgcacagtatgtagccttttcaaatcagcttctttcacttagtagtatgcattttagtgtcctccgtgtcttttcatggcttgaatagctcatttctttttagtgctgaataatactccattgtcttggtgtatcatcacagttcatttatctgttcacctactgaagaacattttggttgattccaagttctggcaattgtgaataaccctgctttaaacacatccatatgcaagtttttgtgtagacataaattttcaagtgctttgggagagggattgcaggatcatatcataagggtgtttttagctttgttggaagctgccaaactgtcttgcaaagtggctgtaccattttgcatctccgycagcaatgctccacatccccagcagcatttggtgctgtcagtattctggattttgggcattctaatacgtgtgtggtggtatttcattgtttttgaagtttgcattt

SEQ ID NO: 899407 - DNA, 478 bp, Homo sapiens
ccaataaaagacacaatcttgttcttattcctttttatggctacataatgtacatcattccrtggtgtatatgtacacattttctttatccagtctgtcattgatgagcatttaggttgattccctgtcattgctattgtaaagagtgctgcaatgaacattcacatgtatgtctttatagtagaattatttgtattgttctgggtatagacccagtaataggattgctgggtcaaatggtatttctgtttttagctctttgaggaagcgccacacttctttccacaatggttgaatttatttacactcccaccaagagtgcataagtgttcgcttttctccacaacctctctagcatcttttattttttgactttttagtaatagccattatgacaggtgtgaggtgaaatctcattgtggttttgatttgcatttctctaatgatcagtgatattgaacttttttcatatgcttgt

SEQ ID NO: 899408 - DNA, 600 bp, Homo sapiens
taggtaatttgcaatgaacagaaatttatttggatcacaattccggaggcttgaaagtccaagactgaggaaccacatctggtgagggccctcttgctgcaccataacatggcagaaggcatcacgtgggcaagagaaaccaagagagggcaagagaaggccagactagcttttataacaaactcactcccatgataataaacccaaactcatgataacaacattaattcattcatgagggcagagctctcatgacctaaacacctcccattaggccctggctcttaatactattgcagtggggattaaatttcaaacacatgaacatagggggacacatataaaccacagcattgcacccctggcctccaaaactcatgtacttctcacagtcaaaatgcattcagtacattcaaatagcccccaaactcttaactcattccaggatcaactgtaaagtccaaagtctagattcttatctaaatcagatgtaagactcaaggcataattcctcctgaggcaaatttacctgcagctatgagtccrtgaaattaaacaggttgtatatttccaaaaaactatggtgagacatgcatagaa

SEQ ID NO: 899409 - DNA, 538 bp, Homo sapiens
taacagcaatagaagggataattactagagtgatggtgttgagtaggcaagaatgcgtaagatttattgtacaagaagattgtcctcagctaggagcactaaatagttcattcgtggaagaggtgagaaaacagagtagataaacacagatgcaggtaggtgaaggtcttagtctgttaaggctgtcaaaacaaaatattttagattgcataatttatgaacacaaatttattgctcacagttctggagactgggaagtctaagatcaagttacaggaaaatttggtgtctggtgagggcctgttcctcatatatggcaccttttatgtgtcttcaaagggcaggaggggcaaataaactttctcaggcctcttttataaggacactaatcccattcataagggctcctaatcatctcctacaggctgcatctgttaatactatcataatggggattaagtttcaatgtatgaattttgggaagccacaaacattcagacaacaacagtgggtwaacatggtagagggaacagggtaa

SEQ ID NO: 899410 - DNA, 627 bp, Homo sapiens
gcagatagtacaaaaggttcccacagaccacttctccccacttctcagttacccatgttactaccatcttgccttagtgtaagacatgtgttacaattgatgaaccaagattgataaattattattgaaatctcacagttcacactaaggtttactctttacgttgtgaattctatggggtttgacaaatgtatcccatgtattccttgataaagtattgtaaaaaatgatttaactcccctaaaaatgtcctgtgctccatctagtcaactctctcctcccttgaaaatctggcaaccacaaatcttttattgtctctgtagcattttctagaatgtcatagagtagaaatcatagagtatatagtcttttcaggctgcctctttttactaagcaatattcattaaatattcctccgtatcttcatatggcttcataacttatttatttttactgctgaataatattgctgaataaattgtatggttgtgccacaatttatttacccattcacctcttgaaagctatattggtttctytcagtttttagcaatgatgaataaacctgcaataaatattcatgtgcagttttggtgtggatatattttcgactcatttgggtacata

SEQ ID NO: 899411 - DNA, 652 bp, Homo sapiens
cctccctctcttgctgttgctgttaccatgtgatatgtctgctcccccttcactttctaccatgattgtaaatttccttaggcctccccagaagtcaagcagatactagcatcacacttcctggacagcctacagaaccgtgagcaaattaaatactttttctttataaattacccagcctcagatattactttatagcaatgtgagaatagactaatatagatttatacctcaaaatttcactttatgatgctaatgagatgctattaggtttttaattgcaaattgcaatttttttattgctattatacaggaaaacaattgacttttgtatattaactttccaccctgcaactttgctatattcacttattggttccagaagggaatttttggcaatttgggggagatttctacatggacgattatgtcatttgcaaacatacagttttatttcttctttcccaatcatatactttaatctcctcttcctgtcttattgaattggctcaggctttcagtatgatgttgaataacagtagtgagaatagacgtctctggstttttctcagtctttgaaaaaaagcatctcatttctcaccattaaatatgacattagctgtaagttttttgtaaaccttctttactcatt

SEQ ID NO: 899412 - DNA, 626 bp, Homo sapiens
aaagaactccaagctagtattctcatgtctgaagataggagggctcccaaggtagttacacaccttttgttacatatataaaagtttasttgtgggatgctgtttccctcacatcattctgtatactcatactagctcagtcttccaatgtgcaacatgattatgctgcaccccttcttggtcttcattaatgctccaggcttcctttccttcttgactcccaagcatttcttcttcctttgccaattttaataagaaccagtcagctcacctttgaccttgaagtcctaaggaggttgtagttatagtaagaaagatcataaatacaaggtgtcataccttgatagtgtcctgcagaggtcagagctatacttattctccctgcagtcacagggagcaattgatgcatttaaatccactacatttcacatgtcacatccatccactcttcacaatagtctcagattattctccagcatgcaatcatcatttccgctactggggttcaggtttgcattgtttcccttatctacactatgagccgcttaacttgtctttatgccaaccactatttttcttaacaacaatgaaaaaaattaattagaaaaattaattggatcacttat

SEQ ID NO: 899413 - DNA, 524 bp, Homo sapiens
gtgactcctagaaaaagattccacattcaaggaagctctatgaccaaaggtgattaataaagagtactgagcccagcatggtggctctcgcctgtaaycctagcaccttgggaggccgagcagagcggatcgcttgaggccaggaattagaaaccagcctggccaacatggcgaaaccctgtctctactaaaagtacaaaaattagccaggtgtggttgctcacatgtgtagtctcagttacctgggaggctgaagtgggaggatcacctgagcctgggaggttgaagttgaggtttcagtgagccaagatcgcaacactgcactccagcctgggtgacagagtgagactctgtttcaaaaaaaaaaagaaaaaagaaaaaagaaaataaagagtactatacacatttccctactttgaaatcagactgagttttttaattcaattactgagctccctgatatattaggcttttaaatttgtttaaaaattattttttcagggtcctcactgttctattaatgt

SEQ ID NO: 899414 - DNA, 626 bp, Homo sapiens
aaagaactccaagctagtattctcatgtctgaagataggagggctcccaaggtagttacacaccttttgttacatatataaaagtttacttgtgggatgctgtttccctcacatcattctgtatactcatactagctcagtcttccaatgtgcaacatgattatgctgcaccccttcttggtcttcattaatgctccaggcttcctttccttcttgactcccaagcatttcttcttcctttgccaattttaataagaaccagtcagctcacctttgaccttgaagtcctaaggaggttgtagttatagtaagaaagatcataaatacaaggtgtcataccttgatagtgtcctgcagaggtcagagctatacttattctccctgcagtcacagggagcaattgatgcatttaaatccactacatttcacatgtcacatccatccactcttcacaatagtctcagattattctccagcatgcaatcatcatttccrctactggggttcaggtttgcattgtttcccttatctacactatgagccgcttaacttgtctttatgccaaccactatttttcttaacaacaatgaaaaaaattaattagaaaaattaattggatcacttat

SEQ ID NO: 899415 - DNA, 626 bp, Homo sapiens
aaagaactccaagctagtattctcatgtctgaagataggagggctcccaaggtagttacacaccttttgttacatatataaaagtttacttgtgggatgctgtttccctcacatcattctgtatactcatactagctcagtcttccaatgtgcaacatgattatgctgcaccccttcttggtcttcattaatgctccaggcttcctttccttcttgactcccaagcatttcttcttcctttgccaattttaataagaaccagtcagctcacctttgaccttgaagtcctaaggaggttgtagttatagtaagaaagatcataaatacaaggtgtcataccttgatagtgtcctgcagaggtcagagctatacttattctccctgcagtcacagggagcaattgatgcatttaaatccactacatttcacatgtcacatccatccactcttcacaatagtctcagattattctccagcatgcaatcatcatttccgctactggggttcaggtttgcattgtttcccttatctacactatgagccgcttaacttgtctttawgccaaccactatttttcttaacaacaatgaaaaaaattaattagaaaaattaattggatcacttat

SEQ ID NO: 899416 - DNA, 630 bp, Homo sapiens
gtatcagcttttcagatgctttgggtagagcttgtatccagacactttactaccaagattgagtctctaataacctgatccatgctgggactgatctgtgatccaatatttagcttcttttttaacactttcarcaccaaaagaaccttgtcacagttctggctcactaatcacacagccttgtagaccccaggtggtggtccaacaggaccactgtatttcaccacacgctacttccacatttgtggccttgggggaactgtctgtgctggtcaccaccttgtctttatatttctttcctgagttctttggcttctcaccctttctgaggctttgtctacaggatcacttctcccaaagggaggataagagttgaggtaattgagcactttacctcttatctgtatatttacaatgaaagtaagttaggatttgaatgagctggctcagagagaatgctagtctctaaactactcctttctctgtaaatataaagggattcattacctcagggggagacaacatcacttctgaccttatggccctcccttatcctctggtccctgtattcttgaagccctgttaacccttcctcctcctctcttggctctacttagcaatctatcaatc

SEQ ID NO: 899417 - DNA, 447 bp, Homo sapiens
ctgggctgcattccaacatactgaacacctaatctctggaagaagaaaggaattttattcagtgttttaagaaagtgattttaacttatatacagcatggaaatatgaactaaaaggaaaaataatccagtgacagtaacattatgcagaaaagctacttggtttcttctctctggggatttctacctttctagcattgtctaataagtctggctttcctgtagcaccttaccaggtctcacctatagtagaggtgactaagagtcgtgagcatgagcacaaagaggaatttcatttttcatcactgagttctgtgcrtagagctaaatgagaagcaactttggtattctgcacatttgattaattggcatcaaaaggcagcctcactagttccctaaggaagtgtggtaccttcacacataatcaagaatgtgttctctccaaagg

SEQ ID NO: 899418 - DNA, 596 bp, Homo sapiens
gtgaaccttcaagagtaatgaagagttagcmaagtgctaaagtctgaggtaggaggaggaaaagtggcccctctagacaaagcagaaaccatgtgtagtgcaaggaggtgaaaagggtatggtagattcagagaaccataatacatttcttatggatgggtataagttccctagagtgggaactgactctttagtctctagattcctagtgcatgatgcagcctagaacacagtaaatgctcattaaatgttaaatggatgaacagatcaaatcctgttctcatttaattctcataactcatcttactggataaatattatcctagttttatagatgaggaaaccaagatctggagaggttagatgactttttcaggattacgcaaatatcaagtcagagaaacgtggatctgttcaaacctcatggacatttcgcatagaccactggactaatttctgtttactggcactagaaaacaacttctgatataggctgttttctagcttagttatgagacaggtagagaagggttcatattaaggagttagggttagagttacactgagtgggaaatatcagcaatggattctaagcc

SEQ ID NO: 899419 - DNA, 679 bp, Homo sapiens
attatcttgcttattcctaacaacccctggcaagatcagtaatatyccctccaaatgaggaagctgagctcagaggtagcagggaattgctcaaggtttcacaattacactagtggcagggcccagattcaaaccagtgtgtgattaaagccagtatttttgtccattgtgctattttttcccaggctatttcttcttatccctctttcttctccttctctcccttgtgatgtcaaccacacatagcacatatgttaaaaccaatatcctaataaattaaagaagatactggaccctcaaggagatgtaacaataaggctcctacagctcctatgcctcttaggtatttaatttagcatgtaatttagtattccttaactagatcacaagatcctccagggcagagatttgttatacttattctaaagtcctcactccacacttcctgtgattgccttctgcttggaaggtggagatgataaaatccagaaatgttcattgaactcatggtcctttcaactggaccctgcctattgtcaaaggcgctaactgcaataaggtctttcatcaaaggagaaactgctttctctgtggcagtgggaggaaattttaaatcctaggacttcttatagcaagtgacaccttgccccttaagcttttcacacctgctgcctggtct

SEQ ID NO: 899420 - DNA, 565 bp, Homo sapiens
gcctcatggaaaacctagaaaggctgaaagctaggtctcttgtacaaaacaattagccaagttgtgaatgaaaaggaaagcttattgaaggaagccaaaagtgctactccagtgaacacacatatgataagaaagcaaagcagcctgattgctgacatgaagaaagttttcatggtctagatagaagatcaaatcagccacagcattcctttaagccaaagcctaattcagaggaaggccctaattctcttcaattctttgaaggctgagagaggtgaggaagctgtagaagaaaagttagaagttagcagaggttacttcatgaggtttaaggaaagaagccatgttcataacataaaagtacaaggtgaagcagcaagtgctgatggagaagctgcagcaagttatccataagatctagctaagatcattgatgaagtggctacactaaacaacagattttcaatatagataaaacagccttctrttggaaaaagatgccatctagggccttcatagctagagaagagaagtcaatgcctggctttaaagctttaaagacagg

SEQ ID NO: 899421 - DNA, 693 bp, Homo sapiens
atagtgtcctaaatagagaagaaaactagtaaatcttttcatcagggtcctgcttactattaggttatgaatgataataatttgttagcttaggtaaggccctgtgtcgtgattatcgttatcattttgagaraattctgactactccatggactattttttgctgcaagtgcaaactgtatggaaattgtgacatttccattcactggttggtgccaaaacctttactggtgatggaatatctcacttaagaagacaactgatatttttcttgaggaaatgtacacaggtgtgtaattaaatttcacactgtccttttctatacttacattttttaacctactcaacatgggccatgagtgttatgattaaaaacatacaaaggggaacagtgagcataataaccaatggaggttcatccttcaggtttccactgaaacatcagttacctacatctagattaattcctcttcttgcatactaccctgcaactctgcctattttctctttagctctcaaaactcatataatttctcatctattgcctgaatttggccaatgagtacaagattataaaatccagtctttcaacttgcaaaatattctaaatgtcaatgtctctcaaatttgtatcatcagttttgaagcccagactcttatgcccacctactcattaatatttctactgagata

SEQ ID NO: 899422 - DNA, 693 bp, Homo sapiens
atagtgtcctaaatagagaagaaaactagtaaatcttttcatcagggtcctgcttactattaggttatgaatgataataatttgttagcttaggtaaggccctgtgtcgtgattatcgttatcattttgagagaattctgactactccatggactattttttgctgcaagtgcaaactgtatggaaattgtgacatttccattcactggttggtgccaaaacctttactggtgatggaatatctcacttaagaagacaactgatatttttcttgaggaaatgtacacaggtgtgtaattaaatttcacactgtccttttctatacttacattttttaacctactcaacatgggccatgagtgttatgattaaaaacatacaaaggggaacagtgagcataataaccaatggaggttcatccttcaggtttccactgaaacatcagttacctacatctagattaattcctcttcttgcatactaccctgcaactctgcctattttctctttagctctcaaaactcatataatttctcatctattgcctgaatttggccaatgagtacaagattataaaatccagtctttcaacttgcaaaatattctaaatgtcaatgtctctcaaatttgtatcatcagttttgaagcccagactcttatgcccmcctactcattaatatttctactgagata

SEQ ID NO: 899423 - DNA, 465 bp, Homo sapiens
caacttgaaccagcttaagcaaaagacaactgtatgrtaggatactggatcatctcaacagaactcacaatgggaatgtggttgagcccccagaatagccataaaccgggactctgatgctgtcatatatcttgctcatactctcacttgtatttacttttcagtagcttctgccttcattcttctctccttccataggtcagtttctccataggctacaaaacatggctgcccagggcttctgaattttacatattatagcttatgccactagattgagactgacttaacattctcctgggtcctaccaaaaatcccgaggattcgacccagccagtcaggtgccccacccttcaacctctcagctatggctgggtcagtgagtagaccaggaggtggaataaaatggcaacctccacaggatcacatgggtggagttgaggaaggggcagttcacaagaggag

SEQ ID NO: 899424 - DNA, 465 bp, Homo sapiens
caacttgaaccagcttaagcaaaagacaactgtatgataggatactggatcatctcaacagaactcacaatgggaatgtggttgagcccccagaatagccrtaaaccgggactctgatgctgtcatatatcttgctcatactctcacttgtatttacttttcagtagcttctgccttcattcttctctccttccataggtcagtttctccataggctacaaaacatggctgcccagggcttctgaattttacatattatagcttatgccactagattgagactgacttaacattctcctgggtcctaccaaaaatcccgaggattcgacccagccagtcaggtgccccacccttcaacctctcagctatggctgggtcagtgagtagaccaggaggtggaataaaatggcaacctccacaggatcacatgggtggagttgaggaaggggcagttcacaagaggag

SEQ ID NO: 899425 - DNA, 666 bp, Homo sapiens
acagcttattttagctccaagtggcattagttagagtgtttgacgagggctggaggatccactcccaaggtggrgtactcatatgcctggtagactggtactagctgtcacctgggagtcaccaggactcaattctcttccatgtgggcctttccacttggccactcggggttcctcaaacattgtgactagtgctgcctggcaagtatcacttctgctgtattctcttggtcaaagcagttacagcccaatccagagttaagggtagtgggggtatgggggaagatagaagtagactacctcttgatggagaaagtgatagagaaattgcagtcatttttaatgaactccaaacattcactgaaaaatatctattaaaaagatttgtcaatcacctcaagttggtttttcgttatgttctcattgtagtagaaaaattccacagttagcgaaattacataggccaagaggagggggatggtatttgacctccttaaaattgccatcagtttctctttcaaatcctggaaaataggaatacaatgagaataaaaccagtgtacttactgtgcagatgatgtctcaagaaaagtcccagggtactgacatctcccatcccacctccccacagacagacagcgtattactgcccttcagtcctctttt

SEQ ID NO: 899426 - DNA, 665 bp, Homo sapiens
gataccgtgcctggaacacagtcacatggtttatgttcagtaaagattggttgctgcaagaaaggaaggcaggaaaggagggagggagggaagaggaaatgtggggctggagttgccgtggagtatttaggaggtgggtccatgatgaggcttttgtcagaaagcaacagtgctctcctcttcccaggctcaatgcatctctcttccttgctacatcagagagattgaaagttgacatttggttgacacataacagcaggaccacaccagggactaagaatatggaaatactttggtattagattataaatggctgttaccccacaagttctccaagtgtgcccctagaccatcccagctcctccctggaggcccccctcatccttcctgtgatcctggaagtagataaaggagtgatgcttatcacagcaggtgggctctggatcctttaattgctaggagtttaggtgcgccaagtgcagaatgttaaaatatctccacacacaaagctaccaattcttggatacctaatcctggaagtcccatcaattcccacttgccctctgccctgcccaccccaccctggagagttgcccygtcttggcttaaggcttttaagtcgctgcaggcagtcaacataaacaaacccaggagaaatgtgcctg

SEQ ID NO: 899427 - DNA, 533 bp, Homo sapiens
tgtgtgtgtaatcaaatgccttctagtacgcagcactgtgctaccgagaaaaatgacacactttttgcccagggtcatttcttcacagatgtaattacccattttgaaagtttgtactgtgttatttagaaccagtaagtcatgaaatcacaggacttgaatgctgggaagccttggacaatgctaaatccagctcccccgagtcagccactaacatttcctgagtgcctactgtgtgccaagacctgggcatgagagggcaatggtccctccttccaagagtttacagctaaacttttatcatagagttgagaaaaagacccagaaaggctaagtcactctcctaaggtcacactgacttggtttaactcaatttctggataatggctacttccagccactttcagaaatgatttaccaattttgaaagaatcagaatatagtactatgttcctaacatggcatggtcagcattataatggtycccaaagatgtccatgtcctagtccccagaacctttgaatatgctatgt

SEQ ID NO: 899428 - DNA, 576 bp, Homo sapiens
accaggtgcattatcaatgagcaataatattttgaaaggaatcttttcttctgagtagtaggtcccaawggagggcttaaaatattcagttaaccatgttgtaaacacatgtgcagtcattcaggctttgttgtttcatgtatagaacacaagcagagtagatttagcataattcttaggggccctgggattttcagaatggtcaatgagtattggcttcaacttaaagtcatcagctaccttagccccttacaagagagtcagcctgtcctttgaagctttgaagccaggcattgacttctcctctctagctatgaaaggcctagatggtgtattcttccaatagagtgctgtttggtctacaatcttttgtttagtgtagccaccttcattcatgatcttagctggataacttgctgcagcttctccacccagcacttgatgtttcaccttgtatttttatgttatgaagatggcttctttgcttaaacctcatgaaccaacttctgctagcttccagcttttcttctgcagcttcctcacttctctcagccttcatagaattggaagggagtt

SEQ ID NO: 899429 - DNA, 644 bp, Homo sapiens
aggccctatggtaagcacaaatatgaaggcttttaaaaataggctatataatcagttttaatactgttgttggaatgttcaagaaagccttagycaagtctttttcaacatttttatttatatcttccaaaacttcgtcaacatatcttctggacatactcaccagccatcatatttaatgatgttcaatattttcctcaatggcttatataacagaaacaacaaatgttcattgtttttttactcataaaccactagaaagcctgacatgatcgctcttgcttgatgagagtcaccaaactagtcctgccctcctgctcataacaagagtctcctccaccgtgttcctggtggatggctaattcttttctacagaacacttttagagggaggaattgcttctaaggtagcaaagcattttttcttttgtttacacatccaaggaccttactaatattaagaatgtatgagtctgtgcccctcatgggcataggcttgaagcccaaatctacttccccatcttggaaaaaaaaaaaaaagatcaggttctgtggctgctttgaataccggactggcttctcacttggcagcaaaggagatggcacctgactcagggagcaatgggggtttctttctaatgtgct

SEQ ID NO: 899430 - DNA, 620 bp, Homo sapiens
tgattttttttcactttactcactgactttaatatctaatctcaaattaagatgtgactctactgtctatgttgacmtgtggaagaaaaactgatatctgtaagacagtagagtttatcactagcacaatataatggctcagcaaagtcccttttgcttgtgttctttagtgtaagttttgcaacagctgcaatttgttaaatgccatctatgtgtgattgttctggtgataaatacgtggaaagacagtgatattatctgttgggataaaaggaagcagaaactacaagaagcaaaaactcagaaccaagctagaggacatatttttaacacatctctcaaaaattaattaaagtctccattggcagaatcccaggatcagtagtgagtcctaaaaattaggaatggcatagacccaagaccttcaaagtttatagacataatgaacagatctactagttgaattaaagggagaacttacctggtaaaatactgtcttaaacaagctctagaaaaagatgaattgcaagtcagatttaggcagcagatataggcacataacgcctacaatacaaactccttaatatcaaaagctctgtcttacttatcttcataatttc

SEQ ID NO: 899431 - DNA, 666 bp, Homo sapiens
aacataaaacaaacatacaagcaagcattttaagacattctcttagtttaaagtttaagtagcytgttgcagaaaaaaaattggaaaataaaatatctgttctctaatcctcctgtctgtcttgaatttcaaagtttgaccgtggctttgatgtgcagacttcgtgcctcagggcatgaaagattgagtgcccttctaacttctcttttcagtagaagaaaccctgatgaggatgtgaaacaggactgcagcagtgaaggagttactgctccgtggctactttttctgtctcctttcattttagttctcttagggtcagagtcaatagctggatctggtagactccatgggttagtaaattaggctgggttgaaaaaaagaacttgaagcagttcaaaacttctttgggagttttgaactcaaaacagagttttcaagggttggttgattggttgacatggtacgtaagtgagttagtgagttcattcagaaatgttaccttcatgtaggaagactagggatgagacaaagataaaattcaaaccttttaaccagactatagcacatagtctacagtgacatgatcataaaatatactggagtctgaaggtcttcctaacttttttgtagatgctgtttttcagaaaactccaggaaaaatcaaag

SEQ ID NO: 899432 - DNA, 661 bp, Homo sapiens
tcagagcagaagtgggacaatacaatgcctggaggactggacaattcattgcaagtgaaaaagggctcctgacacctattgtgaattttgcttgcctaagaagaactcatctctttcctccttcaactcttctgcctaaccttgtcaagttgctgcaggaaagaaacatgcttctttttagttggacacaagtttaggagatctgtgataaatcatggcaagaatgattttgacatacttcttggtcctgggcagagtcacaatgatgatattctagaaacaaggttcaaatctttccacacaaagatgtgtacctgtcaaagcagtgaaatggctgacaggactttttcaagcacctctaaaggacaggagctggagaacagacttaggagagtggggcagaaaatgaaaaatccaagtaacaagcaggaagaaacctacaacagtgggtagtcgtctgacaggcgcatataggtggatggaggatgctgttatgtgaacctagcagcaaggtacaatatgtccaaataagcaatgtcagggggtctgagagcaggtaacagggaccccagcttaaaaccttgagttcaggcacagcactctgcatactgggggamctagagggaaagacaacatccaaaagacagggtcacaagcagaa

SEQ ID NO: 899433 - DNA, 648 bp, Homo sapiens
tgtgcagaagacgcaggtttgttacataggtatccatgtgccatggtggtttgctgcacccatcaacccgtcatctacattaggtatttctcttaatgctattcctcccctagccccccacaccccgatagrccacagtgtgtgatgttcccctccctgtgtctgtgtgttctcattgttcaactcctacttatgagtgagaacctgcgatgtttcattctccgttcttgtgttagtttgctgagaattatggtttctggcttcatccatgaccctgcaaaggacgtgaactcatccttttttatggctgcatagtattccatggcatatatgtgccacaatttatttattctgtctatcattgatgggcatttgggttggttccaagtctttgctattgtgaatagtgccgcaataaacatacgtatgcatgtgtctttatagctgaatgatttataattctttggatatatacccagtaatgagattgctgggtcaaatggtatttctggtattagatccttgaggaattgccacactgtcttccacaatgattgaactaatttacactcccaccaacagtgtaaaagtgttcctatttctccacatcgtctccagcacctgttgtttcctgactttttaatgatc

SEQ ID NO: 899434 - DNA, 701 bp, Homo sapiens
aaattgctctcctctaacatgacagatgcagatgtatctttgaagcacctaaaaatgtgcccttttgaggaaaatattagctctgttctacagaaaattgtggctagagatatgaagttaytttttcaaaattacattgttcataattccaggaccacagatagaagataaacatcctgcctcaatataggattctttctactgtgccataactggtctttcattgttgtgttctctctggagcaaattaggctaactgaaacaccagttacatttttttctatcaaggctatagaatatacagtttactaaactctaaatttgaatactgtctaaattcatggaaaaataaaaccccataaccccagcaccttaacacaacttctatttttaatatggtcagttctagtttttggtcttacatatcacatatatttatgtagagacaagtactaaaactttaactccaacccctcaaaatatattcttcaaaagatagtggtagcgtgaaaagttcactggattcacattgggacagatggacaacaatgctaggaaaagagagagtctttaggcccacagagtaaacatcctgtctgcagccaaaacttagattgagagtttatctttgatcactgtgttatctacatcatatccacatagacattctccttcttcagtcttgcacatcatttcatttt

SEQ ID NO: 899435 - DNA, 701 bp, Homo sapiens
aaattgctctcctctaacatgacagatgcagatgtatctttgaagcacctaaaaatgtgcccttttgaggaaaatattagctctgttctacagaaaattgtggctagagatatgaagttattttttcaaaattacattgttcataattccaggaccacagatagaagataaacatcctgcctcaatataggattctttctactgtgccataactggtctttcattgttgtgttctctctggagcaaattaggctaactgaaacaccagttacatttttttctatcaaggctatagaatatacagtttactaaactctaaatttgaatactgtctaaattcatggaaaaataaaaccccataaccccagcaccttaacacaacttctatttttaatatggtcagttctagtttttggtcttacatatcacatatatttatgtagagacaagtactaaaactttaactccaacccctcaaaatatattcttcaaaagatagtggtagcgtgaaaagttcactggattcacattgggacagatggacaacaatgctaggaaaagagagagtctttaggcccacagagtaaacatcctgtctgcagccaaaacttagattgagagtttatctttgatcactgtgwtatctacatcatatccacatagacattctccttcttcagtcttgcacatcatttcatttt

SEQ ID NO: 899436 - DNA, 621 bp, Homo sapiens
ccattaccaatgacatttgctttggggtgtctgagcaccccaagacattcccactatttaccaaacttgtccgacctgcggcctgtgcacagcatatagcccaggacagctttgaatgcagcccaaaacaaattcttaaactttcttaaaatgttatgagattcttttgtgatttttttaaagtttatcagctatcattaatgttagtgtattctgtgtgtggcccaagacaattcttcttccaatgtggtgcagggaagccaaaagattggacacccctggaaccctgaggacctgttgtaggcccaaactggcttcccatgctttcttatgtcccttaccacagaagcaacaggcctaagctgctttaagcctttaagctatcctcatctactttaattcttacagaattgaactcccacacctgtaatcttatttttaaactggacttcatatactgtacccttctctcttatcttactgttactgagaagtgtaacattgtaaactactacctagaaatggatagagaattatgaaaatagcatatttgggaaygtgtagagtttaagaaatcatgcaggtttcttaacgtcaagctccctggtttgtaaccttgct

SEQ ID NO: 899437 - DNA, 581 bp, Homo sapiens
ggaagtaaaagaaaaactcactgaatggaagaaaacactttcaaatcaaatatatgagaagggatttgtagccagaatttataaagaaccctcataytcataatgaaaagatgaataaccaaattaaaaatggacaagggatttgaatagatatttatccacagaagatatacaatgaataataagcacataaaaagatgttcacattgattagccattagggaaatgcaaatcaaaaccacaatgtgatccacaatgtgataccacctgcacccactaggatagctttaattaaaaatagtaacaaacattggcaaggatgtggtaaactgcgactctcaaataatgttgataggaatgtaaaatagtgtagctattttggaaaaccgtttggcagctcctaaaaatgtaaaacatggagttaccagatgaccaagcaattctgcttctagatacatatccaatagaaagaaaaaatatgcctacataaaatcttgtgcatggaagttcctaggagaattattcataatagcccaaaataaaaacaacccaaatgtccataaatgaatgtatggattaaa

SEQ ID NO: 899438 - DNA, 599 bp, Homo sapiens
acatgaggtaggtagtttacgtctgcagttcccacaggcacatagatttcctttttctttccaataggagcctcaagaaaatgaagctttggttgtttcatcagcagtggctttgatgaaccttttggctcacatatccattaactgactcagtaagaaaacatctgcattaaggatgttttcaaggctggaatgactttcttataagtgtactaaacagaatgccaagcccacaggaagcactggcaacagaaagttcagagttggccaatttaatcctcaatgcttctcaagcacaacttaattgaggaaaacttcacagacagatggaacgatagcatatataaactctatatgaatatacataacatatctaaatcactcctcagtcatcttctaagtgcccaggtcatggagaataaaatggttatttacacaattacagcatcagaggattctgccacttccaatgtactttgtgatgggtactgaacctttcttagcctcagcttcctcatctataaaatggggtgaagggaaaygtaagaaattacctctacagttattgaaagaattaaataaaatgataattataaaaa

SEQ ID NO: 899439 - DNA, 603 bp, Homo sapiens
caattctgctaagaggtaggcatagttaaacactaaccagccattgttccctagattgcttttccataactgctcactgctcaggaatcayataaccagaagtcacaagatttgtaactttctcaattgctcctgtatattcatcactattgtaaaacctaagactggtctttgagatcattttcaaacttttgcattcaggtagaccaactcatgccacctgaatccatgacccataccaaagaactgactcgacaggtccacaggtcctgttacccacccctgccagccagaaactgactcgggacatgaagatagtttcaacatccctatgatttcattcccaaccaatcagccgcacccattccctagccccctgcccaccaaattatccttaaaaaccccagcctctcagttctcaaggaagtgaatttgagaaatatctcccatcctacttgcttcacaccacacaatgattaaattctttctctactataatacctgatgtttccatgtatttgctttttctgtgcagcaggcaagaagaatttgttgggctataacaataataaaatatgacttacaaatgcaagcttttaaaat

SEQ ID NO: 899440 - DNA, 614 bp, Homo sapiens
cggaaccagttcagctttttgctctgtcactgcactctgccatttagttctggttggggagaaggcagagactgactgagctgacatctctgactgtgatttttacatcttcaaaaacagcagcaatttctccattatggtgtcctttaagattgatttcattgcaacatctgagacttgtattatctaatgacacaagagtaacatggtaacaaaagcgctcggggtcaccctgtttgactatcttcacagttagccttaaaggcttcagtctgggacagttattctgaggtttcttaccgataatgacaggaggcagacaaatgcctagatagacacgggcaggtcctggcgaaaccccacctccaagttgcagacagtttaaagcctgaaagccaagctacaagttaaatcctcggactggattgagaccccacctgcccgtttggcacactttcctctgattgatccccaccgttcacctatttttcatatacccacactttcctaattggctttctacactgtcrtgtccacctttgagtggcatctttgctttgacctttttgcacagtcacaaatcaatcaatacaagctacctattctgagcccat

SEQ ID NO: 899441 - DNA, 599 bp, Homo sapiens
actcaaagacatggcaaaacctacatgcaggccaggcactgtggttcacacctgtaatcccagcactttaggargccaaggcgggaagacagcttgagcccaggagtttgagaccagcctgggcaacatggtgaaaccctgtttctacaaaaaaaatttttaattagcctgatgtggcgatgcatgcctgtggttccagctacttgggaagctgtttggaggattgcttgagcccaggagttcaaggttgcagtaagccatgatcacactactgcactccagcctgggcaacaaagtgagaccctgtttcagaaccaaccaacaaaaagaacctacttgattttgtataaggctgaacaaagagacccatttgtggaaaagtaactaaactatggcaaggctaaaggaagacgatttattttaacaaagtctgcttgtacagaattctcttggctatgactccccatcaaagaatgtttctttcttcctagcatatggagggcagctttcacctgggagtttttaatctcctgccttcaggaagaaaaagggaagataagaatgtccttctcacatctgctgttcttcaagtgtcttta

SEQ ID NO: 899442 - DNA, 618 bp, Homo sapiens
ggtgtttggttttctttgggttgtatttgtataaatatgttattggtatgtgttccaaaattatgagacactcytatcattctgatatgacttagtgtacattttcagtaataattataattgttataataaattattgtgtgccacagaggtaataaatttctttgtcaattgtgtctttgactatggctgccctaaaactttttgtcatccatggacaattattgtcttgttttgatcctccttagaaggtggttttataatcagctgtaaaactctaacaagtgctcttgaatgaaggtgtctgataactctggagattgtgacatcagaatagtggtaaaactttcaggacccatggagagctgaaatgtttatgaatatcaagcagaataggtattaactgcacagactaaactaatagaagactggagtaatatttttgactttttgcttaaaatgttgctgatcctttgttttgtttttcagagtaaaggaaactttttttttgagctattgacagcttttaacaattaagtatactcctataaataaaatttggagcatatttatttctctccacctgatttctccagaattcagaaactatttgtgaat

SEQ ID NO: 899443 - DNA, 549 bp, Homo sapiens
cactatcacgagactagcatgggaaagaccagcccccgtgattcaattacctcccctggtccctcccacaacacgtgggaattctgggagatacaattcaagttgagatttcggtggggacacagccaaactatatcagtgaccatccttttaaatttaccagtgtaccctcaaaatgttctggacagcaaagttatattttctttctgcaacctctgcctcccaggttcaaatgactctcctgtctcagcctcccaagtagctggaattacaggcatgcaccaccatgcccggctaatttttgtatttttagtagagacagggttttaccgcgttggccaggctggtctcaaactcttgacctcaagtgatccgcctgcctcggcctccaaaagtgctgggaatacaggggtgagccactgcacccwgcccaatgttacattttcataactttactctttctttctttttcctttatgttaggatgtggcatattgaatctctgttgagacctatcctggatatagattatcatccctttaaccttac

SEQ ID NO: 899444 - DNA, 664 bp, Homo sapiens
gatggggatagcattgaacctataaattactttgggcagtatgaccattttcacgacattgattcttcctatycatgagcatggaatatttttccatttgtttgtgtcctctctgatttccttgagtagtggtttgtagttctccttaaagaggttcttccctttgtaagttgtattcttagatattttaatctctttgtagcatttgtgaatgggagttcactcatgatttggttgcttgtctattattggtgtataggaatgcttgtgatttttgcacattgattttgtatcctgagactttgctgaagttgcttatcagcttaaggacattttggactgagatgatggggttttctaaatatacaatcatgtcatctgcaaacattatgtaatttttataactagtttttaccatggataatttaatgaattctgaatactagagcctagtctaaaaatcatagagtattataaaatagaagaatattatgtttgtctataatcatttgaaagataaagggcattttctttcattagtgttaacagtagtttttttttccccatcggtaatgctaaaagttgctattctaagtcttctaaccaccgctaatttaagacaattctgctgggttgcataatttcatactagtttatttagggg

SEQ ID NO: 899445 - DNA, 664 bp, Homo sapiens
tcttccttcctctcttgataaagaatcaccaactatggtagaattgaattgttgtgcccagttattttctaccgccatgaaagagacttctacattctcacctgtcatcatgcaattccattgtctccctgagggaagaacatactttccaacttggctatgtgagttactttggtcaaaaaaatgtgaatgggagtgacatatactatgtctacacaaaaactttaggctgggtgtggtggctcatgtctataatcccagcactttggaggcctaggtgggaaaatctcttgagcttaagagttcaagaccagcctgggcaaagtagtgagaccctatctttacaaaagaaaaaaaaaagtagctgggcatgatagcatgtgcctatagtcctagctactcaggaggctgaaatgagaggatcacttgagtccaggaggttgaggctgcagtgaactaggatgatgcccctgcactccagcctgggcaacagacagagaccctgtctcaaaaaataaaaccaaacaaaaygtaagatccattggttgtggccattgctcttttccttctaccatgagaacagcatgttccatatatgggctgctctttcaacctagatcccagaatgaggaagaaatgcaatagagctaagacaaagctgttc

SEQ ID NO: 899446 - DNA, 627 bp, Homo sapiens
ttatcttgtttttccagtagaaatagcatttcagaatgaccaatagattcagtggccgagtgaatgcgatactttacagaaaaataccagcttataaatgtagaagtgataggatgacaatctaatttttcaacctgtactgatttagataatgattatccattgttatttatacccactaggtttaattgccaacagagaaccaggtatctgttggtatttaagtaatgttgcacagggtgctttctggtcacaatgagaaaggtgtaactgtacaaaagcaggatcagtttatcatctcatgatcaatttaagtgtcacaaatagtgagataacagatattatgtatttcctgatattatacaatatgatatcatttatcatgtattctaaaacaaaatatacacctacgttatttttattttttaatagagatgggatctctctatgttgcccaggctggcctccaactcctgggctcaagtggtcctcccacctcaatctccctagtagcttagactacaggtgcatgccactgcttctggcaatatctgaattttrtcaatgtttaaagcaacttctgttttactgggagcactaggaatagaaggatcaagagcaaagaca

SEQ ID NO: 899447 - DNA, 636 bp, Homo sapiens
gcataaaaaccagagaagaactgtggactcaattctggagaactgggttggagaattaattatagaatttatatagaatcttattattttctataattaattaattatagaaattggatcaggagaatgacatgatcatatctggtatctggtagcagtgccaggagtagagtaagcagtgggatcttattggcatagtaggattgaaaaaccagactagggttttgacagaagcagtgaaagaggacaaatgatggattatacagaggaaggaatgacagcctgtgtgagcagagtttgcctgacctttctgaagtaaactggggtcagggagttggaagagagaaaagtcatagtcaggaaataacatgcaatgatgcttcctgacaaatcaaagagcaataatagatcacactctgaagtttctatagtgccctagtgtctttcagggaaagctttaagacctcttcatgatcagctggcctggcttcactttagaactgccaacatcttgaaagatttgtcactgtcaacacatcaaacctagaaagggtaccaatgatyctatatttgtgtgagtgaatggttgatttatgggtagttctttttgctgtctggcttgtttgtgtttgcagt

SEQ ID NO: 899448 - DNA, 626 bp, Homo sapiens
ctgtgcaggttattgtagagttgttggttgtgtaactcatgcttcctgctctaattggagcttttgatagtttagagggagtgttccctgtttgggaccctttattagctctttacaggttgaaaaattctttyctggggaaagagagctgctgttctttctacacagtagggtgtcagatttcaaaggcttttttctctaggccttggagtcttgagcagtcagagtaagtctgaatatgtacggcctaaactttcactattttcttaagggtctcctttggtcgtatagaatggttttcttaaatagttccctataaagagcatatgcccatggtggaggtgatactgtcaactctatcacttttcatcaagtggtgccttggctgagcctggaatagggtatgaagggctgtgcgtgcagactgggtgccaaggagggaaaggcaccagtgaccccaaaggtattctctagctgagcactgtcctggtttgcataataccaggtatgacagttgtgcagcttttcctgacaccaagcaattctatgattttctgacaccaactgggtgtccaatgattccattcaattctgatactaactacccagagtttgcacagacccca

SEQ ID NO: 899449 - DNA, 542 bp, Homo sapiens
caatgctcttcacaaaactcaggaatcttcctgacaaaataagctgaaagagcccagtttaaataacaaacagaaatgtttaaggatctatattcatgatgcctttttaaatgttcatagaattgaataatgtatataacaaatttaacttctggcagattcctgtcctctctcatgcctcagggaactgtttccatctccaacttgaacttggacctgtatttctaggcctcagatgctgtactcctcagttcccgaatggtctgtttctgctcaacttctgccttcctgtcttccacagccttggaactgcttggcaacttagcagacttctacccaaagtatactttctctgcataggcacatagataaggatgcaacacacacaccacacacacatgtgcacacacacacacacatgcccmtatatatgcgtatatgatttggcttgatgtcccaggtcattcaactgggatcgttcacatgactccagtgtgaccttccagtcccaggtcccaccacacctacattcacctcaggcc

SEQ ID NO: 899450 - DNA, 648 bp, Homo sapiens
tttaagaatgcaggttctgagacatgaggatcctaagttcagcctcccatgttttatacgcatggtacaaattcatgattgagatttctgagatctttaattagaaaagaagccacaagtaaattgtagaaacatctacagctaagtgatactccaaaaagcagtcattttaaatgatttgctctaaatctaagcagtttgtatgtaagtggctaaggtattcttagagattcctttagcagtaactgcaggcattggcaagcctaataaatattaaactgaaatatatgtccttatatcactcaaatatgttggtatatattgctcccataaaaaactgggaagtctatggctgacttgctcatttctgtttctgccactggatctttttctccacaccctgccaaatctttgcaagaaaaacttgatattaaactccataacaaatattgttcttagagaagccatgttaagaaattcttggatctgagaactatagttcagtatccattttgtggtgacattttatttctttaaacttagaagcagtatgccaaatattcaccatttattattcayttgctacttttttactgcccttcctcttatttttgagtggccttttcttcctctttatttcacctctct

SEQ ID NO: 899451 - DNA, 634 bp, Homo sapiens
aacttttattttagttatagggggcacatgtgcaggtttgttacatgggtatattgtacccagatagtgagcatagtacccratagttagtttttcaacccatgccctcctcccttcctcccctctctagtagtccacagtgtctgttgttcccatgtgtatgtccatgtgtgctcaatgtttagctcccacttataagtcagaacatgtggtatttggttttctcttcctagcaaggaatcctgaggaagggagtgaaagaaccaaatttgtgttttagaaaaattggtcaggattgatgtggagagaggccagggccagggagaccagttaggagaaaatggtcttaatggatgtaggctggagtcctccggtctgtttgattggctatttcattctgttgatctactataccatattataaaccagaataacaaattgtaaaatatgaacactgattttttttttaaagagattgtagcatcattccaagtggattttggcttaatgtttgaaagttatcagattcttaggcctagaagggcactgaagaagtaatttgtattagcgctctgtttcaaataaggatgacatggaaaccaaatccaatttttaaagggcacaagaagcaaac

SEQ ID NO: 899452 - DNA, 614 bp, Homo sapiens
tctaagcaataagagtttacaatctctcttastcacccatgccaggtcattgccaaagttcacctttaatgctctctcgcactactgatgggactacaggtcaatgaaacctctctgaaaagcaatttagaaaaaacctaacccctttgaccctataaatccacttttataagctgtatcctaagaaaatataaaaaacacaaacaatactgaataaaaatgtaaattttcatatacgttttaataaaaatagaactacagtaaatataagatgttggttcatagattatataaaacaaaatgatagaatattatgtagtcatacacatacatacaacaatgttagcatgatgcattttgtgtctccgttttggctgaggccctaaaaaagcagagaataatacatcagggaccaagtattcctacctatcaaaggtgctaggcagcccaggaagggggcagttaacattcctagaggaaaccttcaactagtagaggatggaaatccattacatgtcccagcctcccagcatcgggagagataattccaaggtgcattccacagtttcttagagggtctccagcaggattgaacccccgttgctgatgacaat

SEQ ID NO: 899453 - DNA, 581 bp, Homo sapiens
gaaatagtagctcaaaatatgtataatcaacaataattaatcatcctacttctaagtggaattaatgtattyatctgtcagtgtagatagttgcattggttacttcaaaacactcgaggggtagagggtagttctttttcagtagagcagtatattccaggggttgaaatctgggcttgggaccacgagaattatagagtatgagtaatcaatagtgatgtagtccagggtgatccttgaggttgcagtcaattaatataaaagcagttttaatataaaactttaatataaaagcagctttcgtgcatgtgtatcctatataagtcatggttgctgatgatggcagaggcagactgggttctccagctgtccagagagccatgtttctgtaccctattctcaggtttagaaaacttccagacagcacatgagcccaccacttcatggccctttctcatagcaaaaggcatgaaaaataggagaatgaaatagagatgtatgctcttccaagttttagggaccagacaagctttcagaaggaatattttggccattcccacctcagttttcgtttacatcaa

SEQ ID NO: 899454 - DNA, 649 bp, Homo sapiens
caatacaggccacgtggggagggatccaggcaggaaatacagcatggcacaccttgtgtattgcacagttttgccttagctaactaaagaaagggtgtgtgttacaatacttgacagtgtcagaatcaaagggcaaagaaggagactagcccctgatgtttagctcaactcagaaagttggcagtaaggatagttgatgcagcaagtgaagaaaagggaaatggaaaaagaaatataaatctttttcccttcatcttctcatttccaaggttcaaattaactatatagaagaaaaaaagaaacataaaaataagacaattgattaaaaggcagaaaatactaaaaaagggggggaggaatttacacaagtttctatgtagggacaatagaattaagagtagttacaactatatgaactaaatctcaatttagttcatttgaaagcaagaagataatacagacgtgctgtgctttgtataatagatgatgcagtcctgtgcttccttatacacttcacactggcatggaggctctttgggtgtctgtcatccacttctgtgtaaytcatacagcttccaattttctagagtaagtgctcaaaaacgtcttttttttcttcaagattcttcaagattgaattggttgatta

SEQ ID NO: 899455 - DNA, 620 bp, Homo sapiens
gtatttactaatcatagcacctgtaatgaaagtccctcctgaatgcaagtaggggctggataagttatcagttaacttttgtgtactggttatgttttaaatatyttcaaaaggatgttcataccttttttcagaaagtaaaaatgatcagcaaagacatccactggcaaagtaccgtcctgctttttggtagcatgttgcaaaataacatcctggccatttaaaaggagtcagttctaaataatgccagagcctcagaactcttctaaagctcaatgcccaggtggaaactccatagatcagtttagggcatatctggtttaaaagcaacttgacctatataagaattttaagaaggataagaactttattgccttaaatcctagaattcctttcttgtgtaattgcaaatggtcctcaatgctgtttaaatgctgctatgaagaaaagacccagggcttagaaaatgacgattcttttgaaattacctcctcagagccactaagaaggctaaaactggctaatgaatggtaaaagaattacctagtgtatgatcccttcttgcctttcaaactcaacctaattccgcaacaccaacccatctaccctccactcacccc

SEQ ID NO: 899456 - DNA, 597 bp, Homo sapiens
atgcccaggtggaaactccatagatcagtttagggcatatctggyttaaaagcaacttgacctatataagaattttaagaaggataagaactttattgccttaaatcctagaattcctttcttgtgtaattgcaaatggtcctcaatgctgtttaaatgctgctatgaagaaaagacccagggcttagaaaatgacgattcttttgaaattacctcctcagagccactaagaaggctaaaactggctaatgaatggtaaaagaattacctagtgtatgatcccttcttgcctttcaaactcaacctaattccgcaacaccaacccatctaccctccactcacccctaatcagcacttgcctagataactaattttcagaccttgcttaatcattacttactcttgagtatctccaaccaacctgcccttccatggccctgctcaaactagattaaggtggtcaaagaaaaattgcatgggccgagtggaacagacaagagttaattcaagcctattgcaatagaacaaagagattgaacttgactccattcaaacaaaaggctggagagtatttaagcactgggtgagctagtagaa

SEQ ID NO: 899457 - DNA, 620 bp, Homo sapiens
attcctcctatctaaccgaaattttatctsctttgagcaacatctctccagttcccacccccgggccctggtaaccaccattctattccctgcttctattaatttgacttttctagattccacatataattacaatcatgcggtatttgactttctgtgcctggcttatttcacttaatacagtgtcctccaggttcattcatgttgttgcaaaaggcagaatttccttcttttttaaggctgaacagcatttcattgtgtttatataccacatattctttcttcattcatccattaatggatgcttaggttgattctataccttggctattgacattacctgttgttctttgaaacaaactgatctttcctttttctctgttacttcaattctaacaggctttgacagttataggagagagtcttctccaagaaaggtatgcaatttctaattgattattagtttcaatgcatctttgtgtcatcccaacagccccaaaggattcttactcagaagttaaaattagatttcctactcagctgttcttacaaaacaaggacccttttagctttgctcagccctcgtgaagataccatccctgtcattatttgtactgaat

SEQ ID NO: 899458 - DNA, 633 bp, Homo sapiens
tacaaaacaaggacccttttagctttgctcagccctcgtgaagataccatccctgtcattatttgtactgaatgagtctctgtataacaaattagtagaggttcagcaccggggacagttccttgcacactgtagctgctgtgtgctgagaatttgagattaaaactctgaacttctaaaacttgacctctgatcaaactgccaggctagaccttccccaatgcaaaatccaaataaagcacatctgcctcattatgtggtattgtaggtagaaaactattgaaaaatctaacattctcaccctgcagttgacagttgctcttgcaataaagcaaatcagaaaatatctgtaaatatgaattatctgaaccagatctctataatcattaaatgtgataaatgtatggctcttttcatgttggagcatcagggcttatagggtcttggatgccttggatggaaggacttgggaagcaggcagagaggagcacaagtctgaggtatgtggcaatgacagctgttctcatgtccactgaaaatcagatacacatggcccattcctgctctacatcartgctgataattctgcatggatatggaatttaattagaggtaattttgtattaggaacat

SEQ ID NO: 899459 - DNA, 598 bp, Homo sapiens
cagctcaatttctgcagagcaggcaatgaagtataagtttgcagctgaggtaataaattgataactggaatatcttgccctctcatttcctaaaagtttaccaatgtcctctttcattttcagtgtaaaaccatattcactatgctttttaaactactcagctatgtccccccaacccaactctaccccctccagaaatcccgattggcccttgaaaggagcatgacccgtggctgagaatcagtggtcaaaactgatgtgattatattcagtgagactagtgattatccctacaagtaaaggatagaggaagaatgggtttatcagtttttgtgaaaaagactgggttggaggaggagggtgattgttagtttgctataagtaaactatgagcccacaatttcatgtgatttctaaaagataaaatagtctccactggtggggttcagaacaaggaatatgttggcctrgtttttatatgcagagcttttgctattccttcaatattgcattcacttctaggcactttcttttaacaaaagatagtcatgaactacagcacttctgaaacaggatgatgaagaggctaagaatagtg

SEQ ID NO: 899460 - DNA, 612 bp, Homo sapiens
aatgtgtcctacagaaccaaaaggagtaaaccaagagaaaggaaggcaagtgaggaccaaacatgggaaagaggcaaagagatcttccagtatgagaatgaagggaagttccagcaggaaagctctgcccaggccagagctcagtccatcaaagatgcaatagaaagctagaagactctaagaggaatgtatccaggagggaaatgggtcaataaattaaatgacagatttgaccttgtagaaattgtactgagaggctgtttatagagctgttagaggttgtaggaaagacttaatcaggtgccctccctttaaagaaaacctctgagtaaataaaaaagacaactctagaaacaataaaatgtaattcaagacaggaaacagaatcatatcaactttctagtgaacaatttttgcatagtctttataatgaaaacactgaatatgtatggacttaaccaaaagttgaagcataattatattgggaggagrggaagaatattcacctaccataaaggaaattaagagcttttttcaatagttagtgtctaaagcagatgcatttagaggtagaagtatacgtatattatatagaaatatggaagttaatgc

SEQ ID NO: 899461 - DNA, 599 bp, Homo sapiens
aaggaaggcaatcatccacagaggaataatggtacaaaactcattcatctcaacatatggtcccgggtatggaataaaaggtgacgcagaaggagtatggacacatcaatatgccacygagtcacggatggcttctcagaaagacctaacctgtaaagctgcatcagggaaaaaggtttccctccaaggtgtattctttggggctcccattggccaactcttaattggaccatggatctcattcttattggtgattcttatgttcctaccagtagactggaagtacctggtaattaataataaccagagaagaaccactgccccccagatgcctgtggagtcactaattttatcattccttgaagtgcaggtatcacacaagtgcagaatctgatgggccagcaatttggtctcaacactggaatgtccaatggcaggctagagcctggaatttccctcacaaaagcaggcaagcaagctcttcatgcccttttaagcagtgctatgtgttggtcatgcaaaatcaaagaatcagaacatccacttactttgtaagctgtttgacaaaactaatgattgccttttcatacaggttacct

SEQ ID NO: 899462 - DNA, 599 bp, Homo sapiens
aaggaaggcaatcatccacagaggaataatggtacaaaactcattcatctcaacatatggtcccgggtatggaataaaaggtgacgcagaaggagtatggacacatcaatatgccactgagtcacggatggcttctcagaaagacctaacctgtaaagctgcatcagggaaaaaggtttccctccaaggtgtattctttggggctcccattggccaactcttaattggaccatggatctcattcttattggtgattcttatgttcctaccagtagactggaagtacctggtaattaataataaccagagaagaaccactgccccccagatgcctgtggagtcactaattttatcattccttgaagtgcaggtatcacacaagtgcagaatctgatgggccagcaatttggtctcaacactggaatgtccaatggcaggctagagcctggaatttccctcacaaaagcaggcaagcaagctcttcatgcccytttaagcagtgctatgtgttggtcatgcaaaatcaaagaatcagaacatccacttactttgtaagctgtttgacaaaactaatgattgccttttcatacaggttacct

SEQ ID NO: 899463 - DNA, 658 bp, Homo sapiens
gggttataggagaagaaaccagtttttcttatctttcttgtatatattaatttcataataaatagacaatagagtctttttcattcttcaaaagaaaataaattaccttgttgagagaaacgcatacttctggaagtttgcatattttgtcctgagaaattctctctctttcctgctctccttctctttcttcctctctccaaagaaagagaagagatgctacaaaggagcagaaatttggctataaaaaaaggcaatttaaaaaattactttcttagttgaaatttgcactgacagaagctaagaaaagcttttgaccgtaagctggcaaagccccgagaaagtttgtctctaagttaaaagaaaaagggaaagttttaaagaaatatttaatcgaattccacagacaagatttcggttaaaattcattattattaagggataaagtatttctttctagaattaagaagaaatgctttaaaatataaaaataacttattatgtaattttcataaattaacctgtaaataaaatgcactagctttattttttttaaatagagtgttgatggggagagagaraaaatgaggcagaatgaggaaggagagaaaaggagaatttatggctttgaagtcatatcttcagtttgcttctcaaa

SEQ ID NO: 899464 - DNA, 595 bp, Homo sapiens
acagtgtgtcacacattaccacgtaactcctaattattttaaccaatcccctaaagtggatcaataggacaagcatgttatttgcagcaatgtgctgttcackcaataagaacagtggctggaggctccttccaggtaaaagtgcaatttcagttagttgtttatatctccctttgatcacatctagggggaaatgcctgtatttcctcataatgaaaagcaatactgtccggtttaactttcatcaaactgcagctgggtcagaagcaaagtagccctcaggaaattccacatgccaagagcaggaactgtgccccttacaaaggggcagcaggaagaatctgaaatgaaatagaattcattcaaaagaaggaagttctttggggctttataaaagagtgatcatttgagagctgttgaaaagccagtgtgagttctttgacacagcactcaaactgatagacacttccaacatactttataagaaatgcagagcacatgctcactttttctcttccttaatggtaggaagtcaatgtacatagcatagttgctgctgcatagaggtctgtatagaaagacttgtcttcatact

SEQ ID NO: 899465 - DNA, 606 bp, Homo sapiens
tcataaagaatgttatcctgttatccttttcttcatattccctctcattcctgcctcattctgttctctagaattataaaaatgctcaactatatcacattgatatgaaactctggtttttataatattattttgaaggctcttttcacgtaggcagataaatgaggctgccttattccttacaagtaggaatttccatatcatagagaaggacatgcattttggagacaaatggtacaaatcctggatctttttacttcgtgatatgaggcacatttccatttctaatccttggttttctcatctgtgaaaaggtgattcatgtctactacaaaatattgatattagcagtaattgaaagcaaatatgtaaagtgcctagcattaacacagtaggtactcaataaacagcagtcatgtactactgtgatcatttatcttttttacagaggaagaacctgagggccaaagactgtaagttatcttgcccagcgttgcaatggkattggacctgaaatgaacatgatgtgtctagtattcctcctttcctgactcaggaccttcctacacatgagttgaccttagaccacttaatgctgaaagaaat

SEQ ID NO: 899466 - DNA, 644 bp, Homo sapiens
gtattaaatgaagagttcttatgtggctccttacctgcatgtctattgaagtaagtggctactaaaattagaattaattgtgtgtctctcagttctactaaactgagttctttgaagggtgggactttgtcttatgtattctgtatctcaggtcctgagcaaatggtcaaatgcctgggattagacacatagaaggtgtttaagacttgtctgttgttgaacgttgagtaggttttatggttgaccgtctttgatgggtagataggctttcgggagtaccatcgttggtcatgagaatccaagcccatcactagaatgcttctcctcatttgcaatcctggtaaattaattcagcaaatgttaatgatcacttgctaagtgccaggtatgactctagatgttacaagaaatgtgatgaacaggataccatttttgccctcaatggggtgacaactttaaagaacaggactcaaaggaaattagagctatatcaagtcatattttgagattcatcaggaaaytttgatctcttggttggacatctctgagctgattctcataattctaactgtctggatccaggccaggtacatgtgataggctgggccaaagtcagtggaagagttatgtttagctgagaaatg

SEQ ID NO: 899467 - DNA, 551 bp, Homo sapiens
ttgtggagcttatctcccactttctggcatgcatgtgtcttaatagggccmcttctgcctaccagatccaattagcgtgatttcctcactattgtgagcagagagtaggagagattgttctgaggattaaactctcatcacagagaaagcatttaccatctttggcctttcttccttctctcgcatcattcatttcttctgttctccctagtgcaggtgctttcttaaaggttatagggtcctcatttcaagtgtctggtgtcatgaattaggtccatgcctcccttctcaggagacttatctttgtgatctacaggaccatggtcttctgcaagcatgaaccaaattacaaaccttgttaagaactcttcagacttaagaagttccagacacaaaaatctgtgaaattgaactaaattatttgagttgggttgatccaaggagactcaaagcaattccctagaagcaatgctgcctttgtccaaaatccctgtctctggtgtcaaaattgaagaacaagtgtttccactaagagttttcattgggtccct

SEQ ID NO: 899468 - DNA, 604 bp, Homo sapiens
ccttctaacagaagccccagtggagcttccaagcctctcttaaccttgagtttctccccagaaagccaagcttgagacaagggcttgagtacagcttttttgaagcgactccaggaaayagaagtggggaaagagcaggaaagaaggaagaaaggaaagaagggagggaagcagagacagagcatgaggaagacaggaagggaggagagcttgagggagggaagaagagaaggaggatggagggagggaaggagtctaacataagaatgcattatgaactagtcaccactgtaggaaattgagctcaatcccactggtatcctctacagagccatatggaatgcaccttataattgtccactggaaagatgaaaagagaaatgtttgtccgcctacttcccttctccattgatgaggggttgtaccatggttgttaaatccctcccagtttgcaattatgccagtgtccagaatttccacacagtaatatcagagaagcgccagggcaaaacaagagatacaagacacagcttagacactgactgtcaggggctccaagctggttatcacagcaatgatgtaaaaagtgggccattagggtttg

SEQ ID NO: 899469 - DNA, 614 bp, Homo sapiens
ttgggtgttgtctgttcggcaaacattcccatcgtctttcttctgctacttggaggagtgggcgtaggactaaggacgaacaaagcctagtggtctgtgttcaggcagcagtgacacgtagcccaagtagggaaactgagaatccttccctgagttgcagcgaagaatacggtagggggaaaaggcactctctttctgcagaagttgctaagcagggacagctggtggttatgtgcctcctaggagacgaaagcctctgggaagtactcaaaattaactagcagtcagagaagcacagataagcagagatgagcaaacagtgattgctgcagctcttcccctatttctgtgaggcatctcagtgcccttcgtatctctggaagaaatgtctcatttgtctacactaatcggaattatgtttctgttctctgcaaccaaacaagttcagatttagacactggttctgtcatgaaggacagaggggargaaggtctgaggattacataagggtggaggtggctcgcaccacctcagctcccatctagaacctccactcttggccacatcttccagactgggaacgaacaaaacagaatccctacccaaaaccccag

SEQ ID NO: 899470 - DNA, 627 bp, Homo sapiens
tggggtctgtgcaaactctgggtagttagtatcagaattgaatggaatcattggacacccagttggtgtcagaaaatcatagaattgcttggtgtcaggaaaagctgcacaactgtcatacctggtattatgcaaaccaggacagtgctcagctagagaatacctttggggtcactggtgcctttccctccttggcacccagtctgcacgcacagcccttcataccctattccaggctcagccaaggcaccacttgatgaaaagtgatagagttgacagtatcacctccaccatgggcatatgctctttatagggaactatttaagaaaaccattctatacgaccaaaggagacccttaagaaaatagtgaaagtttaggccgtacatattcagacttactctgactgctcaagactccaaggcctagagaaaaaagcctttgaaatctgacaccctactgtgtagaaagaacagcagctctctttccccagraaagaatttttcaacctgtaaagagctaataaagggtcccaaacagggaacactccctctaaactatcaaaagctccaattagagcaggaagcatgagttacacaaccaacaactctacaataacctgcacagg

SEQ ID NO: 899471 - DNA, 602 bp, Homo sapiens
ccacatgcggagttggagaaggcagccattaggccaatgtgggagaagacagaggagaagatagagacgagtgagaacccacgccacctgcaggactgagcacagtcttggctcctgatccgccagttcaaatttctgtgactccactgtttcaggttccagtctttgtctatgcatgaccatactcaactcatactgacaaacactacctccctaccaaacctaaatgacttgagttactgtaagtagttttttcctcacttacaactgaagaagtcataactacataattgtcagagattaactatgcctacttcacaatgttgccagtgtctggtaatgaagaaagcaaaaatttgcttttctgataatatatataatatataattatatattaataatatattaatatataattatatattatatattaatacgtattatatataattatatattatatataactatatataatataatatattactatgtattatatataattatatattatatataactatatataatataatatattactatgtattatatataattatrtattatatataactatatataatatattactatgt

SEQ ID NO: 899472 - DNA, 616 bp, Homo sapiens
taatgccatgctctgactatccgctgacctgcaggtaagaattatgacaagtkagcaatgactctagaaggtcagtcaacggacccataacaattcagtgtattgcatgtgtgtcgggaatgggagtgaagagggtggaggaagggaggtagggagaagaatcaagaaaaatggaaaagtaaaagccaaaggagggcactagcaatgatgctgaagacaaggttcacatgccagttaacagtgatgccctgaaggcagagtggaccaggggagtggaggcagaaggtgaaaaggcttacagttgaagaaggcaaacagccacctgcatggccccagtgactccacactacaggcacaacacacatgtgcatacatgtgtttacatatgtgtgtgcacatgcatgtctccattcaaggaaggaagaaaatttttatgcaaaagaagcaaatgatcccaaaaacaaactgacatcaggaacataggcaaaaatgtcaattttccaattgtccacagcatcctcatctgcaccactgtgcaatacttgattatcctaatgatagctctcagcaataaaaagttaaaaatgtaattacatataagaggatttgaatttat

SEQ ID NO: 899473 - DNA, 681 bp, Homo sapiens
tccttcaagtcagtttctacttttcaccttaacccgctcaaccttagttcaggctatcacttattctagtctggagtaggactattacctcccagtaatacctcctggtctgtccctctaatatatgctccatactattgccagaaggagttgcctatagacgaaatctggtcatgtcactcctctcatgaacatgcttcaatggctcctcatcatttttaggagaaagttccacaaagtcattcattcaattatgaaatatttattaatcaattacactgtcccaagtgctgtgggagatgccatagttagagaaaacaaaacaacgcatgatttttactaaaaaagctcctagttatgcttatgtagaaataggtttcagattctttggagaaagttgtgaaacaatggaaactttattgaaattggcaacacaaatgctgtgattcaagctttcttcaccctttctaattctacagaaaaacagcatcaaatagatgatctgtggggtcccagtctgagttctttgcctattgaagccccacgcttacttttactcattctgttkgaactgtagtgaggatattctcagaaagattaaaggagaacctagcgcaaaagtgtctttagcatctcaaggagacttaaacaccattcctctggattcctatacctcaatgg

SEQ ID NO: 899474 - DNA, 652 bp, Homo sapiens
aaattagccaggcatggtggtgcacatctgtagtcccaaccactcgagaggctgaggcaggagaatcgcttgaacccaggaggcagaggttgcagtgagccaagattgcgccactgcactccagctaggtcgacaaagcaagactccatctcaaaaaaaaaaaaaagtaaaaagttacggatttgaagtgatagtatcatatatatattattcttcatggtaagacaaatatggatgagaaatcccagaaagattaagtgaacatgtcaacacaggttttccccagcactgaaagagaaattgcccatctaaacaaccagatgtatgaaaaaaataaataagtcttatttgtcactaaattgtctttggtaccaattgctttgaaacagatattccagaaggcggcagcagcagccgcaggcctggcacatccgtggtaagttctgcatctatgagtgtgctgcacagctcttccctgcgtgactacacccctgccagtcgctctgaaaaccaggactctcttcaggtagcctttctgarcagcctcattgcctgtgcttttactctttctctgctgagtgtggtttcctgttgttactttcatcgctttcctatttcttccttccattctaaaatctttgttttaaagatg

SEQ ID NO: 899475 - DNA, 688 bp, Homo sapiens
tttatttccagtttcaaaccagatatttctccccactaggctacaatgggaggagaggggggaacacataaaagttgcaggattccttctactgactactagcaccaattattgctgccacaaaaacataatgccactgttttcatcattgtctcactatggcattatccttacccagctatctcccaagagaaaatgctgatgtctttcttcaaacacatttcaactgctctttctgagccttcagaaacagctatcaaactgagcagcccagagtggtgggagtggtgagaagggggataaggtgagatgtccagagaaaaatggctgtgtcccataagaataatgaggacaggatgcaagaggcagaaatgagatgcctaatcaataaaggcatctcaatcacggatgtgaataaaactcagagataaatatcaggaaatgtataatttagcctccctacagaaatgttgcacattgaatttaatatgcttccatctgaccccaggacagagagcactgctcagacttcatgtggaaatggaaagctgagcagtcgcctgggttgaaagaacagaatgttcttcactgcaytgtcattcagcttccaggaatgctgcatttcagtggtaagtagtcattctgtgaaaaagttcatcacgatcacaatagagggactgtccaagta

SEQ ID NO: 899476 - DNA, 651 bp, Homo sapiens
atgaacaacaggccatctgaattcattatggagtactctcttaatgaggctcatttctgcgttttctcaaattagtgtaagaaattaagcatatgtagaaagatgatgaattcaaatatgaagtgagatttcaattcaacaaacactgagctatgagtaggatgctgtgctaaatactgtggtttcacagatgaaacaaatcccttgctccaaatgcaaggtaagtccacaagcaaagatatgccatgtgatgaaacaggtgccataatagaaacagaaatcagagcacagtatgggtatgcgtaggctcatgatcaatgattagggagagctcaaagaaagtatgggttccaaagagagtacaaataataattttcctgctcagcagtacttgtaggcaggagatgctttcttcttgttttgttccttactgattagcaataatgaaactctgcagctttagatataaaatatttattgagagtcagtacatggaatagcacagatgtcatgaattaaatacattattgagaacacaaagtatcagaaagctagaaggctagccacccagcccagactgtctgtctcagtaaggttagattagtttcagtamagatataacaagtcctctgattttgactgaggagcccc

SEQ ID NO: 899477 - DNA, 681 bp, Homo sapiens
tgtgctaataaaaacatacccgacattgggtgatttatacaggaaaggggtttaattaattcacagttycacgtggctggggaggcctcataatcatggcagcaggcaagagagaaaatgagaaccaagtgaaaggggaaaccctttataaaaacatcagatcttgtgagacttaatcactaccaggagaacagtatgggggaaaccgcccccatgattcagttatctcccacggggtctgtcccacaacacgtgggaattatgggagctataattcaagatgagatttaggtggggatacagccaaaccatatcaccatccaattctaccaatgttgtacttttcagagaatccagggtcagtgttttgcctgagcagagttaacccaaagaaatcaggattgagagacaaggagcgtgagactgagttctgattgacatcatttaagcccctatttctagccaaacctaaaagctagacttagtcctgtaatttttcagttacatgagccaatatatctcttaggaggtattctgtcacttgcaaccaaaaattcccctaagccattgaatgccagactattgtaacaacaacaaaaccaccaataacaacaaaatgttcacttgctaacatccaccagcctaatacacttttactacttttctcactaccactaattt

SEQ ID NO: 899478 - DNA, 607 bp, Homo sapiens
cacctcggctcttgtgaacactagtgttcctgccgaagcacgcctacttaccccgctgagcagagcctgagcctgcaacctccagagacstggggaaagccacatgctccgcttcccgcccccggcaagggcgtgtcagctacaaggggcgtgtcatctctaggccccgccccgcgctgcgtgcccacgttgcgccggcctcgcgccagtccgctgggctgcagggactgcggcgcctgagggagtcgctgacgggcacgctgactggaggctggcggacaggcgacagcgacctgcggcaggtgagctgtccgcgccctcccggggccttccttccgcccggcttctcggaccgcgctgcgtccttcgcgggccctgcctcggtccaggccttcggacctgggcttggccgggccacagccctttgggtcccctgcgccggtctgaggggagacccggccgggggcggccggaagctgggtgaggccgggcagaaggacgaagaagggcgtggaggggctgtcaggggagggcgaaaccgcggacgccgctctccagaagtcgtctccccgggggcgcggggaggcctgaatggctctctttggcg

SEQ ID NO: 899479 - DNA, 644 bp, Homo sapiens
aaatatccagttttccaaagggtgtagaggtacccagcattcttaggtttctatgctcttatctgtccaatctccgtgtcaattaattactgtttaaacattaaacactaaagmaaccctttactgctttgaagtacacacacacacacacacacacacacacacagggagagagagagagagagagagaatcccttcaattgtaacatcagtactgcacctagatatctgacaggagaagtgtaaaggattaagtttgacccctgggacatcaaaagtccaccctgggaaaggaaagggatgaggctattggaggttctttcctcagaggtaagccaaggagctccacaaaggtgaccagaagctgacatggctcttcctgaaatctcgagttagaattatgctattagcaaaaataatagcagcacctattcactcattcctcctccagggagctgagagtttcttacgaatgggatctcatcatccccaaagtataagcaaggaaaagtagggatcattccttcggtttgggagaaaaaagactcagaggtcactggacatctcaaagacagagactgaccaggcctgcccttctccagccagctctgggggctgctgaaatgccatgtgacagtgaacag

SEQ ID NO: 899480 - DNA, 618 bp, Homo sapiens
agcaatcatctcaggggaactcctgagcaatcaaatgtgatgtcccctctcaacatcttcttctgacaaacggcaatcacgccccttccaggtgctattttcggccccaaagaaatggagaccggtttactgggaatctttcagaacacagcagcagatccagaggccttaaagggctactgagtacatctgctgggtgctcactgcatgctaacacttcagtggccatatgcattacttcatcatttaatctttgaaacaactccaaacggtgggcattctgttcctctttttataggtaagaaaactaaggcccagcgtcaacacggttcagtataaacccaagtctgaagcctggtcctaagctctatgcacccctcaaattgggagatcacatagggaaaaaggagtgaagtaatgcaattaagtcttaaaaaaaaagggggggggccataaaaactaaaacaggagttcctaacctggggccatrggtgccctgaaattggaatgacggatgtaagagcatttatctaaggagagagacacaagagatttggtggattcccaaaagtgtcttgttactcactccttgagggttaaaaatcatcaacctatgat

SEQ ID NO: 899481 - DNA, 527 bp, Homo sapiens
aggtggagcttaatttcagagttccttttaagccagatcttcggctgggcatggtggctcacgcctgtaatcccagcacttggggaggccagggtgggtggatcacttgargccaggagttcaagacctgcctggccaatatggtgaaaccctgtctctactaaaaaggcaaaaaattagccgagaatggtggtgcatgcctgtagttccagctactcgggaggctgagacatgagaatcgcttgaacccaggaggcggagattgcagtgagccgagatcatgccactgcactccagcctgagtgacagagcaagactctgtctccaaaaaaaaagaataaaaaagaataagccagattttcgtatattttaagtgaatgagagcccagcagcaacatgtcttgtttagctttgaatctcctctaataaatgtatatttagttgaattagcacacacacaaagcaaatagaaatgatttttatataggttcttgctaccaataagtagaattcaaatttagggatcc

SEQ ID NO: 899482 - DNA, 646 bp, Homo sapiens
tttcctaagcagttgcaccactttacrtttctaccagcaatgaacatgtttccaatttctagatatcttcactaacacttgttattttctgtgtggttttttaaaatcttttaagagtagccacttcatggaactagaaaaagcaatcttaaaattcacatggaaccaaaaagaccccatataaccaaagcaagaccaagcaaaaacaaaaacaaaaaccccccaaaacaaaaccaaatctggaggcaccacattaccagacttcaaactacactacaaggctatggttacccaaacaacatggtactgtatcaaaataggcacatagaccaatggaacagaatagagaacccagaaataaggccaaatacatacagccaactgatctccgaaaaagcaaacaaaaacataaagtgggaaaagacaccctatttaacaaatggtgctgggataactggcaaatgaataataacatgaatgggataacatgtcacatgtagaagaatgaaactggatcctcatctctcaccttatacaaaaatcaactcaagatggatcaaagacttaaatctaagacatgaaaccacaaaagtcttagaagataacatcagtaaaactcttctagacattggcttaggcagagttt

SEQ ID NO: 899483 - DNA, 543 bp, Homo sapiens
tttttaagatttcataaatcagggttatgtggccaggattaaagtttgaaggyaaaattgattttagcaaagcatcctgtgagcatttaggcacagcttggtgagctgaattaatgcctctcttttgtttaactccagccgcatcatcatggtgcccacataaataatgcaattaagaagctgagagaacgggtcttatagaagctgctattatatagctgggtgaccttgaacaactcacctgcttcctctgggtttcatccacaaatgaagggtttgggatagatggcctctaatccctgtctgtttaaaaaatttagtatgcggagactgatttctattatgtgggtagtggagcgatagtcttattcaacatattctttctcttctaattctgcacaccccgttaagtctggtctttgccagggccccttaggtgaccaaacaaggtgggattggctggcaagtagggttgtgcagtcagggctcttacaggtgtgcaaacaacagaaactgattctttcaaacttcagaaaagtgacg

SEQ ID NO: 899484 - DNA, 616 bp, Homo sapiens
ttagaccatttatatttaatgtgatatgtgatgtgatwaggtttatatgctaattttgtgggagggttttgtcccatctcttctttttttttttctcttttcctgcctgattttagattaaatgaataatttttacaatttctttttgtgtcctttgttggcttataagttataatttttgttttgttattttaattgttactttaggacttatagtacatacatttagtttatcacagtttaccttcaagtgattttatgctcacatatagtgtaataatcttggaatagtatattttgatttttcccctcccaatcttttttgaaattattggaaaacatttaacctctacagattttataaactctacattatgttattatttttatttaaatagttaattgtgttttaaagagatttttaagttagaagtaaaacatgcacacacatatgtgtatatatatatgtatatgtgtatacatacacataagtacacacacacccatttccaatactcttcatcctttgtagagattcctgttaccatctggtgttattttcataacccttaaaggactttttttaaattttgtggtgaaatctgccagtgatgaa

SEQ ID NO: 899485 - DNA, 605 bp, Homo sapiens
cctgtggccacttcatgtctgaagtttcagagtacacccagaggaaaagcatcttcctttctggtccgtgtgattcctggggtattggcagatgtcctataaaaccatagcctgcctggcctcctcttgctatgcccacatagatgcctggtttatgttaaaaaaaaaattgggatacagttgttgtaatgaagtttaacattttaactagtttaaactgtacaattcattggcatgtagtgttttgcagtcaccaccagtatctagttctagaattttttttttttttcgagacagggtctcactttgtcacccaggctgaagtgcagtggcgccatctcggctcactgcaacctctgcctcccaggttcaagtgatccttccacctcagcctcccaagtagctgggactatagctgtgcgccaccatgcctggataatttttgtatatattttttttaatgtagagacagagtttcaccatggtacccaggctggtctcaaactccygacctcaagcaactcgcctgccttggcctcccaaagtactggaattacaggcatgagccactgcacccagcccagaacattgttatcaccctaaaa

SEQ ID NO: 899486 - DNA, 605 bp, Homo sapiens
gtagacataagactttacctttttaatttttttagaaacagagtcttatgctgtcaccgaggctggagtttagtgataacattcatagctcgttgcaacctckaactgctgggcagaagcgattctccaacctcagcttcctgagtagcttaggactacaggtgtatgccatcacgcctggctatgttgcctaggatgttttcaaactcctcagctcaagcgatcctcccgcctctgcctcccaaagcactgggattacaggtgtgagccactgcccctagccagactctaccattttttacagttgtgctagaagttaattaactatgacattaactctcagagaggagatcttagaattataataaattggctttttgatgcttattctttttaaaaagtcctttaagttcaagaccagcctggccaacatggtgaaactccatctctactaaaaatacaaaaattagccaggtgtgatggtgcatgcctgtagtcccagctcctcgggaggctgaggcacaagaatcgcttgaacctgggaggtggaggttacagtgagcccagatcatgtcactgcactccaaccagggcgacagagccag

SEQ ID NO: 899487 - DNA, 596 bp, Homo sapiens
agaaagcagagaagtgattgtcagaagttgggaatgggttgggggatgagattgcctacagtgggggcataagagaacttttaggagtgatgaaaatggtcttgattgtggtagaggttacacaattgtatacatctgtccaaattaatcaaatagtaaacttgacattggtgaattttattgtatgtaaaaatacctcaaaaattcaattaaaaaattatgtcaagattaacaaaaattgaagtgttctgactctactccccagactaggcccactgtatgctctctcatagtacctatctttattgtaattaattgtttaattttctattttgccaaatacattttaaattttggggagaagattcatgtctatcttatttaatgctatacaacatagcactatacctggcatatattagatattcaatgaatttctgatgcctgagggaaagtcaaactggcataatttgaagccacacatattgactcatmtatctatttacttggagatgtacagcaaatgtttgctcaaagattgccttaactgctgatttagggtgacttacccctttaaggagactccatggtgctgt

SEQ ID NO: 899488 - DNA, 602 bp, Homo sapiens
aaatgatgagatttttgttcttttatagcataatatcccattgtatgtgtgtatgtatgatatatacattgttataatgttatatatgtacatatatacaaataccatattttctttatccattcatctgttgatgaacagttaagttaaatcatggctattgtgaatagtgttgcaataaacatgggagagcagatatgtctgatatcctttcttttaaatatacacccaacagtggaattcctggatcatatagtagatttatttttgttttttcaaggaacttccatattgttctctataatggctgcactaatttacatgctgtagattatactagcattttcctttctccatatcctcaccagcatctgtatttttgtctttttggtaatagccattttcactgaggtgaggtatctcattgtggttttgatttgcatttgtcttataatttgtaatattgaaawtttttcatatacctgttggctatttgcatgtctttgtttgataaatgtctatttagatcatttgaccatttttaaattggattatttatttgctataaagttaagtttcttatatattctgattattaattc

SEQ ID NO: 899489 - DNA, 602 bp, Homo sapiens
gacctactattgtacatgtgctattgttaatgtagattagaagaagaatttaacaaatccctctgttacaagagcagagaataagaattttacaggtataagtttactataattcatgttacttgcaactatgtgtttattgtggacatctagattatcatgagtcaataaaaattaaataaaatatttagaaaggaagtgaaatattttaagttcttaattactataaagaagcaatattaaaggttttatatataagcttgtgtgtgtcttctctcttttaaggtatagagaatacaagatgaacatgcataaaagtataaaacatccacataagatgcaagatgtcattgatacaggtgaattttaggtgtcattaataacacttaaatgtattttgattattttgtttgataacaccttaatttacatttgaaaaatttaatttaaattagaagaatcacatgaaaaatcagattttgtatttaaaatggaagggacatttaaaaakaaaaattacagatatatccaaatttagaatagtttagtttttgtttcttgctcacaatgaaccagagtctggatcctttaaaaaaataagg

SEQ ID NO: 899490 - DNA, 610 bp, Homo sapiens
ctgcccaatcattcttcctgctccctctcatttcacaagagtcagaactcctttgttgccaaaggctttccttgcctgcctctgatttttccccctttatcytttataggcacttttctcagtgaatctcttgtttgtttgattccatcttggtgtctacttgtaggaagacccaaattaaaagacaacattttgcctggaatcataatagtatttttaaattattattacttgagttttagctttttcctgatctcaatcttggcatagatccctctgtgcatatagtcttcaaatctctctggagcttctatcacaaggattcttggtctgaagtatatagacctatatagttggcagcactatttagggccttttttcaggaaccaaatctttacataatctgccttttcctcacttctcccctcagtcctaaaaatctttcagaaacagtgttaatcagagtaggctagggaaatctccaaatcccagtagcttaaaaaattattttcttttcttgtcttaatatccacaagcataggtaagggacaatttccacaaagtcactcaaggagtcagaaaaaaaaaaccaattctcataaatgacaac

SEQ ID NO: 899491 - DNA, 604 bp, Homo sapiens
actgcatttgttgttaaaacagtacatgtttatgtttgatttttaagatggagcattacaacagcctcctggaaatattcacttacaaagaatgatacytaaatgcatatgattacaaatgcaattataataattaatattagcataatattgtcctggttggagaattttaatcaactatctgtaattttgtgtaagttatgagcctatctagtcattgcggttgcattctagaagcttataatttctgtaatcaaatgtattcatgaaagaagtaacacaaaggcgacatatttcaattgtaaagtttcagaaataaatgattaacaactgttttcatcaagattactgaaaaaagaaaatatataacacaattattaatgagtttcacaagaagattttactctattcatatattaacatttgatttaatttagtattcatattttgctatattaacactaaagtgttttatacacacacatatgtgtgtatgtatatatatgtatatgttatctgcagattacatatacatattatcagcacacattaagccttgtgttcattttttattaccagaaatatttaatgtagcttttttttg

SEQ ID NO: 899492 - DNA, 591 bp, Homo sapiens
tatacatatttaaacagtaactaggaagataacgtttccactttcaytttaaataccccctattttattagagaggtagggaagagagaaaactaatctagtgtagcagcccaatattgacaagttccaaaatcacacacacacacatgctgttctttctcttcttttcattatcttatctatgtcactcctcttttttcctcttattataacgttattagttttgtcgtggaacaaatagcctttgtgtcttttttctttttggcccagaattaggtaatttcattttttatgtgtgctcaagtattcatccccctcaagcaattacttcacaagtgctatgtcagcacaaagtaattacatacttttacagattacttgataattatttctgacatcactaagtactttcaaatataaatgtgcaatgttgctagaattcaggatgacaaaccatttaaataggtatctgaaagagaataaacccacattggaaagcatttgtattctattttcttaatttgcacgtgaaaagggaataagtgcatgtgtagctaataggatttattgaacataaaatgattgttcaca

SEQ ID NO: 899493 - DNA, 651 bp, Homo sapiens
aacactctttttgtagaatctgaaagtggatatttgcagctctttgaggcctatggtggaaaaggaaatatcttcacataaaaactagacagaagcattcagagaaacttctttgtgatgtgtgcattcatctcacagagtttaacctttcttttgattgagcagttttgaaacactctttttgtagaatctgaaagtggatatttcgagcgctttgaggagtatggtggaaaaggaaatatcttcacataaaaactagacagaagcattctgagaaacttctttctgatgtgtgaattcaactcacagagttgaaaatttatttttattgagctgtttggaaacactctttttgtagtatctgtaggggatatttggagtactttgaggcctatagctgaaaaggaaatatgctcaaataaaaaccagacaaaagcattacgagaaacttatttgtgatgtgtgcattcatctcacagagttgaacctttttctgatagagcagttttgaaacactcttttgtactatcagtaggggacatttggagtgctttgaggcctatggttgaaaaggaaatatcttcatataaaaamaagacagaaggattctcagaaacttctttgggatgtgtgcattcaaatgccagagtt

SEQ ID NO: 899494 - DNA, 584 bp, Homo sapiens
gaaatatcttcacataaaaactacacagaagcattctcagaagcttctttgtgaagtgtgcattcaattcacagagttgcacctttcttttgattgagcaattyggaaacactctttttgtaatatctgcaaacggatatttggagcacattgcgacctatggtgtaaaaggaaatatcttcacataaaaactacacagaagcattctgagaaacttttttgtggtgtgtgcattcgtctcacagagttgaacctttcttttgattaagcagttttgaaacactctttttgtagattctgcaattggatatttggagctctttgtggcctatggtgaaaaaggaaatatcttcacataaaaactagaaagaagcattctcagaaacttctttatgatgtgtgaattcaactcacagaattggacttttcttttgatagagcagtttggaaacactctttttgtagtaactgcaaatggatatttggagggcttggaggcctatggtcaaaaggaaatatcttcacataaagctagacagaagtattctgagaaacttctttgtgatgtttctattcaactcaca

SEQ ID NO: 899495 - DNA, 565 bp, Homo sapiens
gctgtctgatcgttcttctggaacttttgtctcagaggagtacccggccgagtgaggtgtcagtctgcccctactgcgtggtgyctcccagttaggctgcttggggttcaggggtcagacaccaacttgaggaggcagcctgcccgttctcagatctctagctgaatgctgggagaacgactgctctcttcaaatctgtcagacagggacacttaagtctgcagaagtcactgctgtctttctgtttgtgtgcgccctgcccccagaggtggagcctacagaggaaggcaggagtccttgtgctgtggtggtctccacccagttggagcttcctggctgctttgtctacctaagcaagcctgggcaatggcatgcgtccctcccccagcctcgctgctgccttgaagtttgatctcagacttctgtgctagaaatcagtgagactccatgggcgtaggaccctcagagccagatgtgggatagaatctcctggtgccaagtattttaagtgcatcagaaaagcgcagtattagggtgagagtgacccaattttccaggtgccgtc

SEQ ID NO: 899496 - DNA, 565 bp, Homo sapiens
gctgtctgatcgttcttctggaacttttgtctcagaggagtacccggccgagtgaggtgtcagtctgcccctactgcgtggtgcctcccagttaggctgcttggggttcaggggtcagacaccaacttgaggaggcagcctgcccgttctcagatctctagctgaatgctgggagaacgactgctctcttcaaatctgtcagacagggacacttaagtctgcagaagtcactgctgtctttctgtttgtgtgcgccctgcccccagaggtggagcctacagaggaaggcaggagtccttgtgctgtggtggtctccacccagttggagcttcctggctgctttgtctacctaagcaagcctgggcaatggcatgcgtccctcccccagcctcgctgctgccttgaagtttgatctcagacttctgtgctagaaatcagtgagactccatgggcgtaggaccctcwgagccagatgtgggatagaatctcctggtgccaagtattttaagtgcatcagaaaagcgcagtattagggtgagagtgacccaattttccaggtgccgtc

SEQ ID NO: 899497 - DNA, 643 bp, Homo sapiens
aaaactgctcaatcaaaagagaggttcaactccatgagttgaattcacacatcacaaagaagtttctgagaatgcttctgtgtagtttttatgtgaagatatttccttttccaccatargcctcaaagcgctccaagtattcaactgcagattctacaaaaacagtgtttcaaaactgctcaatcaaaagaaaggatcctcagtgagatgaatgcacacatcacaaagaagtttctcacaatgcttctgtctagcttttagtgaagatatttccttttcaggtatatgccaagaaacgttccaaatatccatttgtagttactagaaaaagagtgtttccaaactgctcaatcaaaagaaaggttcaactctgtgagttgaatgcacacatcacaaagaagtttctgagaatgcttttgtctagtttctatgtgaagatatttccttttccaccacaggattcaaaacgctccaaatatctgcttgcagatactacaaaaagagttttgcaaaactactcaatgaaaagaaaggttcaactctgttgtgaatgagcacatcccaaaaaatttctgagaatgcttctgtctagtttttatgtgaagatatttccttctccaccgtaagcctcaaagtgctccaa

SEQ ID NO: 899498 - DNA, 680 bp, Homo sapiens
cttctgtctagtttttatgtgaagatatttccctttcagctataggtctcttaagcactccaaatatccatttacagttactgcaaaaagagtgtttccaaactattcaatcaaaagaaagtttcaactctgtgagttgaatgcacacatcacaaagaatattatgagaatgcttctgtctagttttcatgtgaaggtatttcttttttttaaacaattcattttgtttattgttgtgaagattacaatagataacacatgtaagtcttgcatatgttatgtgctcattatatagtgttcctcattctttttattttattattatactttaagttttagggtacatgtgcacaataggcaggttagttacatttgtatatatgtgcaatgcttgtgtgctgcaaccgttaactcgtcctttagctttacatatatctcctatagatatccctcccccctccacccccaccacaaatgtccccagaatgtgatattccccctcatgtgtccatgtgttctcattgttcaattcccacctatgagtgagaatatgcggtgtttggttttttgttcttgctrtagtttactgagaatgatgatttccaatttcatccatgtccctacaaaggacatgaactcatcattttttatggctgcgtagtattccatggtgtatatgt

SEQ ID NO: 899499 - DNA, 637 bp, Homo sapiens
ttctgtctagtttttacgtgaagttatttccttttccaccttaggccacaaagcrctccaaatatccacttgcagaatctacaaaaagagggtttcaaaacttctcaatcaactgaaagtttcaactgtgtgagacgaatgcacacatcccaaagaagtttcttagaatgcttctctctagtttttatgtgaagatatttacttttcagctttggcctcaaagggcttcaaatatccatttgcagttcctacaaaaagagtgtttccaaactgctcaatcaaaagaaaggtttaaatctgtgaactgaatgcactcatcacaagaagcttttgagaatgcttctgtctagtttctatgtgaagatatttccttttaaaacacagacttcaaagcactccaaatatccacttgcagattctacaaaaagagtgtttcaaaacggctcagtcaaaagaaactttcaactcggtgagatcaatgtgcacataaaaaataagtttctcagaatgcttatgtctagtttttatgtgaagatatttccttgtccaccataggcatcaaagtgctccaaatattcacttgcagattctacaaaaagagtgtttacaaactgcacaatcaaaagaaaggttcaat

SEQ ID NO: 899500 - DNA, 573 bp, Homo sapiens
aagaaaggttcaactctgtgagatgaatgcacacatcacagggaagtttctcagaattcttctgtctgttttttatgtgaagatatttcattttacaccttaggcctcaaggctctcaaaatgtccacttgcagattctacaaaaagagtatttaaaaactagtccatcaaaagaaacgttcaactctgcgagatgaatgcacacatcaaaaagaagtttctcccaatgtttctatctggtttttatgtgaagatatttcctttttccaccataggcctcaaagcactccaggtgtccaattgcagattctacaaaaagagagtttcaaaactgctcaatcaaaagaaatgtttaacactgtgaaatgaatgcacacatcaaaaagaagtttctcagattgcttctgtcttgattttatgtgaagatattatttccttttctaccataggctgcaaagcgctccaaatgtccagtagcagattctccaaaaagagtgtttccaaacggctcaatcaaaagaaaggctcaattctgtgagagaamgcacgcatcacagaggagtttctcagaat

SEQ ID NO: 899501 - DNA, 653 bp, Homo sapiens
aatcaaaagacaggttcaactctgtgagttgaatacacacatcacaaagaagtttctcagaatgttactgagtagtctttatgtgaagatatttccttttcctcaatatgactcaaagagctccaattatccagttgcagattctacaaaaagagtgtttccaaactgttcaatgaaaaaaaggctcaactctgtgagatgaatgcacacatcacaaagtagtttcacagaatgcttctgtctagtttttatgtgaggatagttccttttccaccatagggcccaaagagccccaaatatccacttgcagattctacaaaaagagtgtttcaaaactgctctatcaaaagaaaggttcaactctgtgtgttgaacgcactcatcacaaagaagtttctgagaatgcttctgtctagtttttatgtgaagatatttcattttctgccacaggccccaaagcactcaaatatacacttgcagattctagaaaaagagagtttcaaaactgctctatcaatagaaaggttcaactctgtgagttgaatgcacacatcacaaagttgttctgggaatgcttctgtctartttttaagtgaagatacttcctcttccaccaaaggtcacagagcactacaaagatccacttgcagatt

SEQ ID NO: 899502 - DNA, 542 bp, Homo sapiens
ggtttccagattcatccatgtccctacaaaggatgaaaactagaaagaagctatctgagacaccggtttctgatgtgtgcattcatctcagagagttaaacttttttttttttttctattyagcagtttggaaacactgtttttgtagaatctgtgaagggatattctgtagctaattgaggccaaaggcaaaaaaagctaatatccaatgattataaactagagggaagctatctgagaaactactttgtgatgtgtgcattctactcacagagttaaaactttctcttcattcagtggtttggaaacactctttttgtagaatctgcaaagggttatttgggagtgcattgaggcctatggtgaaaaaggaaatatcttcatttgaaaactagaaagaaactttctgagacgctgctttatgatgtatgcattcatctcacagagttaaaccattctttggattcagcagtttggaaacactgctgttgtaaatcagcgaagggatatttgggagctcattgatgacaaatgcaaaaagc

SEQ ID NO: 899503 - DNA, 592 bp, Homo sapiens
aatgcacacatcacaagcactttatcagaaagcttctttccagtttttatctgaagacgttttctttttcactgcagkcctcaaagcactcccaaatatcccatagcagatactacaaaaacagtgtttccaaactgttgaatgaaaaaggtttaactcgtgatttgaatgaacacatcgcaaagtagtttatcagataaattccttctaattttcatcctgggatattcacagtttcacaactggcctcaatgacttccaaaattttccatttgcagagtggaaaaaacagtgtttccacactgctgaatccaataatggtttaaatctgtgagatgaatgctcacatcacaaagcagtttttcagaaagtttctttctaatttttattttaagatatttcctttttcactgtaggcctctatgagctctgaaatatccctttgcagattctacaataacagtgtttaaaactgctgaatgaaaagaaaggttagactttgtgagatgaatgcacacatcacagagtggtttctgagataactttcttctagtttttatcttggatatttgttttttcacctatggcctca

SEQ ID NO: 899504 - DNA, 592 bp, Homo sapiens
gacagaagctttctgagaaactgcattgtgatgtatgcattcatctcacagagtgaacccatgcctttcattaaccagtttggaaccactctttttgtagracatgcaaaaagatatttgggatcaccttgaggcctatggtgaaaaaggaaatatcttcacatgagagctagacagaagctttctgagaaacttctctgtgatctgtgcattcatctcacagagttgaaccacacttttgattgagcagtgtgcaaacaatattttgtaaaacctgtataggcatatttgggagcgctttgaggcctatcatggaaaagatatatcttcacattaaaactagaaagaagctttctgagaaagtgatttgtgatgtgtgcattcatctcacagagttgaaccattcttttgattgagcagtttggaaacagtctttttgtagaatctgcaaagggatatttgggagcactttgaggcctatggtgaaaaaggaaatatcttcacataaaaactagaaagaagcattctgataaatttctttgtgatgcatgcattcatctgacagagttgaaccattattttcattgagcag

SEQ ID NO: 899505 - DNA, 673 bp, Homo sapiens
tcttagaaactgctttgtgatgtgtgcattcatctcacagaatagaaccattcttttgatkgcactgattggaacagtatttttctagaatctgcaaagggttatttgggagtgctttgaggcctctggtgaaaaaggaaatatcttcacataaaaactatacagaagctttctacaaaactgctttgtgatgtgtgcattcagctcacagtgttgaaccattgtttgattgagcagtttggaaaaagtctttttgtagaatctgccaagggatatgtgggagtgctttgaggctcatggtgaaaaaagaaacatcttcacataaaaactagaaagaaactttctgagaaacttctttgtgatgtgtgcattcatctcacacgggtcaacatttcttttcattgaacactttggaaattctattcttctagaatctagaaagttatatttccatgctctttgaggcctatggtgataaaggaaatatcttcaggtaaaaactagacagaagctttctgagaaagttctttgggaggtgtgtattcatctcttagagttgaacaatcctttttatggaaaattttgaaaacacagtgtttgtagaatctgtgaaggggtattttcattcacatagatgcctgaggtggaaaagaaataacttccaacagaaact

SEQ ID NO: 899506 - DNA, 632 bp, Homo sapiens
aatcgatatttggagtgctttgaggcctattgctgaaaaggaaatatcttcacataaawaaaactagacagaatcattctgagaaacttcctttggatgggtgcattcatctcatggagttgaagctttcttttgcttgagaagttttgaaacactcattttgtagtatctgcaagtggatatttggaaagctttgaggcctacggtggaaaaggaaatatctttacatagaaactagagagaagcattctcagaaactactttgtgttgagtgcattcaactcacaaatttgaacctttcttttgattgagcagtttcgaaaaacactctttttgtagaatctgcaagtggatattcagagcactttgaggcctatggtggaaaacgaaatatcttcccatatatactagacagaagccttctgagaaacttctttgtgatgtgtgcgttcatctcacagagttgaacttttcttttgattgagaagctttgtaacactctttttgtagcatcccaagtggatatttggagcactttgaggcctatggtggaaaaggaaatgtcatcacatatagactagacaaaaacattctcagaaacttctttgtgatgtgtgcattcaacacacagt

SEQ ID NO: 899507 - DNA, 587 bp, Homo sapiens
aagactctttccaaactgctcaaacaaaagaaatattcagctctgtgagatgaatgcacacatcacgaagatgtttctaagaatgcttctgtctagtttttttgtgaagataatttgttttcagctataggcctgaaagcactccaaatatccattggcagatactataaaaagactgtttccaaactgctcaatcaaatgaaaggttcaactctgtgagttgaatgcaaaaatcgcaaagaagtttctgagaattcttctgtctagtttttatgtgaagatatttccttttccaccataggcctcaaagcactccaaatatccactctcagattccacaaaaagaatgtttcaaaactgctcaatcaaaagaaaggttcaactcagggagatgaactaacacatcacaaagaaatttctatgaatgcttctgtctagtttttatgtgaagatatttccttttcagctgtaggcctcaaagcgctccaaatatccacytgcagttactacaaaaagagtgtttccaaactgctcaatcaagagaaaggttcaactctgtgagttaaatgcacacatctcaaagaagt

SEQ ID NO: 899508 - DNA, 611 bp, Homo sapiens
actacaaaagagtgtttccaaactgttcaatcagaagaaagtttcaaatatgagagttgaatgcacacataccaaagaagtttttgagaattcttctgtatagtttctatgtgaaratatttccttttccaccataggccttaaagcgctccaaatatccacttgcagattcttcaaaaagagagtttcaaaactgcttaattaaaagaaaggtgcaactctacgagataaatgcatctatcactaagacgtttctcagaatgcttctgtctagttttatgtgaagatacttccttttcagctatatgcctcaaatcactccaaatatccatttgcagatacaacaaaaagaatgtttccaaactgctcaatcaaaagaaagtttcaacactgtgagttgaatgcacacatcacaaagtagtttctcagaatgttctatctagtttttatgtgaagatatttacttttccaccataggcttccaagcaaacaaaatatccactttcagattaaaaaaaagagtgattcaaaactgttcagtcgaaagaaaggttcaactctatgagaggaatatgcacatcaaaaagaagtttctcagaatgcttttattt

SEQ ID NO: 899509 - DNA, 654 bp, Homo sapiens
aagaagtttctcagaattcttctttccagtttttatgtgaagatatctccttttcagctctaggcctcgaagtgctccaaatatccaccttcagwttctacaaaaagagtgtttccaagctgctcaatgaaaagaaatgttcaacactgtgaagagaatgcacacattacaaacaaatttctctgagtgcttctctctagtttttatgtgaagacattttctcctcagctataggcctgaaagcactcttatatccatttgcagatactaaaaaagagtgtttccaatctgctcaatcaaaagaaaagttcaacactgtcagttgaacacacacatcccaaagaagtttctgagaatgcttcagtctagtttttaggtgaagatatttccttttccaccatagacctcaaagctgtccaaatatccacttgcagaagattcaaaaagattgtttcaacactgctcaatcaaaagaaacgttctagtctgtgaggtgaatgcacacatcacaaagaaatttctctgaatgcttctgtctagtttttatgagaagatatttccttttcagctatgggcctcaaagtgctccaaatatccatttgcggatactacaaaaagtgtgtttccaactgttgaatcaaaagaaaggttcaa

SEQ ID NO: 899510 - DNA, 616 bp, Homo sapiens
actgccttaccttagaataacatattagaataacaggaaggtaggtggaccaagtggatgcttacattttggaatttaaggaaacactgtgagatattaactctaccttcttatctgcactacactttcatcactagaattattctgtcttccagtaaaaatgaaaaggtttcaggactgttactacggcagtccaaaacaactttgaaattttctttagtcttgtccgaatactatagtctacattctcagattaaccttttctgacctttaaacatactgtataccagaaatggttctgtaataagaggaattagaccattaccttgagcacgaaaaggtcaagtcctactctaggctaacagcctcagtctaacttaataattcaagaattatttgcattcaaagattgtttaccctcttcatacagtattttaatgttaagggtggatgtagtagttgggatggcaaatttactgagtttattaagctgggcattgtcagatatttatttaaaaaaattagaaagtcttacatagtatgcaaaatataaaacatggggaacattgcttctctgcaagaatagttacygcacgtttcttactagatagagagt

SEQ ID NO: 899511 - DNA, 626 bp, Homo sapiens
tgctaatttaattggtattaaaaaacagctctggtcattcactccaagattgagttcttaattttaggcttaaagactctggaaagaaacaagaaccaaggacagtcacatgatccagaaaggaaaacattgcttatgggccatatgcttttctaagcctcaggactttattgtggctaaagcaagaacacatcaatatgtgggataagaaacctctgaaagtgcatttcattatctgaaagaatcaaaacagtgaagaagagtgaatttatctacatattgaaagagattcagtgagtaatttgtccagtctctttcttatctaatttaatccaaacaccacccattgatggggagtttcaattttcagtattttagcctaatgctcaggaaggaatgccagtgaacatggacttgtggctttaagtgactaatcatagcaactgctatacaaacatgtaaggaaaagccaacagactatgatgaatgagaaacttccttatatttcattcctttggtgctttttttccttcttcctttctcttctctaaacattttttcttttttttttttttgacagagtctaattctgtcrcacaggctggagtgcagtggagcaatctggc

SEQ ID NO: 899512 - DNA, 655 bp, Homo sapiens
ttgaggagagtgacacacactggggtctttcggagagtggagggtgggaggaaggagaagttcaggtaaaataacaaacrgtactaggcttctgtacaacaaaccctcatgacgcaagtttacctatgtaacaaacctgcacttgtacccctgaacttaataaaagtttaaaaaccaaaccaaaacaaaacaaaagcaaaacaaacaaacaaacaaacaaaagactggcttttactctgagtgaagtgtgaaatcattttgagggttttgagacgagaagaggcgtaatctgttttagaaacatcctaccagttgcagtattgagatcagactctaggggagagtaagatgaagcaaggagagaaacttggaggtagagtcgactgaaataatccaagaaaatattatataaatactgtttacagagagtagaaaatgctgacagcatatactgacaaattcgatatggggtgtgagaaagggagggattaagaaagacatgaaggtatttgaaggatgtagttttgatttggctgagatggtgagacggtaggacgctactggagaaatctcagtaattctgttaggtagacatccaaacggaggtctgggattcagtggtgcaccctgggctgaaaatgtaaaaatgtgctca

SEQ ID NO: 899513 - DNA, 524 bp, Homo sapiens
tgtgacaatatatgctagaagcctttaaaaagatayacttttagatgccattaacctaagatattcattaacctgacagttgtgcttctaagacttaacttgaaggaaaagtttaaaatgtgtccagagtttcagctattaagatgttcatcttggtgttgcctaatgtagcacacaccaaaaaaggaaaaatactaaatgttcaataacataggattgagtagataaattatggcacatccttacatggggtatataaaatcatagaaatgtattgacatgagaaatggtcatggggtattattaagtgtttgaaatggctaagaaatacttgtaggatcttatatttgctttttttaaaagtaatgggtcaatataccgatacttgagggaaaagtctagaagccaacgtactccaaaatattaactaattctatctgatgaatgggattatgaattttctttattttcttctttttgcctgtttgcattttccacgaagaaaatttataaacacagtggta

SEQ ID NO: 899514 - DNA, 527 bp, Homo sapiens
tctcactctgtcacccaggctggagtgcagtggcacgatcgcagctcactgcaacctctgcctcccaggttcaagcgattctcgtgcctcagcctcctgagtagcacagatgcgcaccaccacatccggctaccaaccagctgttttattcaaaggtgtgtccccaccgtattattacacaaatatttgttaatgtaaagttgctgatttaaaaagaagcttaggcttatctctgactcccctttcattttcacatgcacatctaatccaacatgtcctgctggttctgcctttaaaatatatccagaatccaaccacttctcacccattttctgcctggacaacaactggaggtctccctacgcactgtgttccccaccctccttctgttctcacgcagcagccagtgtgatgctttgaaaacatcaatcracttctgtcaccccagtgagcaaaaccctccagtggttccccatcacgcttggaataaaatctaaagttcttaacatggccctctaggtctgtat

SEQ ID NO: 899515 - DNA, 625 bp, Homo sapiens
agttgtacccagggcctagaacaatggctcatagtaggcactcgatgaagacttcatgaatctttcatgagcaagaccartgagtagaagctccagggagacacttttcagttcattaggaggaaagactttctgtcagcgaagcctgaagatggaaagaactggctctggatgggataaatcccctgtcatggagaggtttaattcacagaaaagctggacaacaacaatctcatgggtgcgcatatggatttagagcagctgggggctgggcgagatgggctatggttccccttaaggcttcagctgtattcagtttcatgtacctgcctgtgatcctcaggaatccctggtgggaagccttgagcttggctgtaggaggctggatgccaaaaaaaagtcacagttaagagtttttcaatacaaaatgtagtttttcagtttttcaaggaaatagttgatcattcaaaaaaattcagaaaagagaaggaaaaaacgcacgcatgcacacacacccacaatcctatcactcactgttaatattttgggacatattattcctgtctttttaatggattttttcccattttatattgtcatattatagttgtatattaattatcta

SEQ ID NO: 899516 - DNA, 625 bp, Homo sapiens
tctggatggatgaagataaagctgggctgaaggcgtggtgtgagggggaggggatggcaggggacatctgcggaaagacaggactctggcacctctacctaacttggaagatattggaagasagacagcctgtttttctagtacttgtccctgtgtctcgaagacaggggcatcagcaggaaggtatttaggttatttcatatcttctctttttggatttggcagttttaactaaagaaagcatgctccaaaattatttctcaatcctttcctattggtatggtaattaatagcagttctccctagaatttaacatgtggtctttgcttatatttttaaaaatatcagtacttgctttttgtttgtcagtttatttgtatttacatgagttttacaccagcatttctggggaaaagagggacatatcaggcatcataacaccaatttaaagcagaagtccttcctctaaattttaaattccattgaattttaattttaacttttctggctcaatggccattgtaaatatacaaaattgtacagggctctaacaaagtgattgtttttaggccattaaagtacaaaagacaatgtccctacactaaattctcccaacctattgctc

SEQ ID NO: 899517 - DNA, 476 bp, Homo sapiens
agtccttaggtacatctgtggtttttcagctcttcagcacttaggcactttcctcctgagccaagggcctcctgggaacaatgcagcatctgtgtgttgatagtaacagcctatgggccagagtcactcagccaagctctcctttcaccacacaggagctggatcacacaccttacctgcaataatccaaggcttagtcagcctcagcccgtcccactgccagtgccctgcttctcctatctgctccccaacctttcacctaatttgcttcctagctcagttgccacatttgttccaatcctcatgcaggatggtctctattttccacccatcccacccacagagtgaacaawaacatgttagtggcttatggtctgacactaaacagtgggcactgcagagggaggaacatgctgcttagttgggcagctgggtatttacaaaaggtttggcctgcaaagagatgccagcctttc

SEQ ID NO: 899518 - DNA, 590 bp, Homo sapiens
attttcccccttactatgcaattatctgtaaatactgtatgtgcttggctaaaatgctaggaagtctacaattacattaatgtagctccttaattgcatataatgagattttcaggctactgcaacctatcacatttatcatattcttaataaaattattcagtttttgtctaaggcctttttatttactcttcatttaatttagaggaactctaaaaaataattcaattcttgagaaattaaatcattttggatgaaggaggaaaatatgaaatccaggttaagaactgaatctacttatgaagcagttaccaaaaactccaagtctcaatgatgaaacattttgtgccccaggtggcaaacattaacaagtgagtcatgctagggctctttgcttgtaagattcccagctgtcctttggggcaaaatatgaatgtttgtaacccctttgatgtctaaaacaggtatcccttggtatataaagtagatatgttatcctccaaaagttagttamctttaaggcaaatatcttctcattagtcccatttgcactgatggccattaagaaatccaactcatatttcaggacc

SEQ ID NO: 899519 - DNA, 659 bp, Homo sapiens
tttctctgggaattcccatgttgagaaagtagttgatgctgtcaggatacttacaatttcatcacggtaaggagacatgcaaatataaacatcatacaccaggtaatgtgtgattagttccayagaggaaaaacagaagtggccagagaaccagtatttgaatgtctacagtttgttcggctctcacaggtgcaggtcagtgaaaagaagacagagaccttcagttgtccctggacaagtttgatccttgcatcatttacccatggttagaatttctgatcttctgaccgaatcctttcctagtgtttctcagtgtcttggcccagcttattgatggtactttccgtgtggtgtacctggacttacagaactgccttcaccctctttgctttagttgtcttttctggacataacctcatgttttcctaacttagaacccttaccactattattatttttttctgagccactgtactgacataggctcacattcttgctttgttttgctgaacaagatccaagaagacaggctctctccttggtattaggcacattctttatttggcctgtggaagatgctacaggggcagaaaatgtattcataaaactgttctctgacctcttaggcttatgttctaaactcaaacattgtccagcga

SEQ ID NO: 899520 - DNA, 596 bp, Homo sapiens
gtgctcagagtactcatgttcttttgttctgactggtcaccacaaccagacaccactgctgctcctactggcgtcttgcctstttggtggacatactgatgtttgtaccgtgggtcttttaagaattatctattctatgctgtgatcattaattttaggtgtcaacttagctagattatggtgctcggttgtttggtcaaacactagtctagatgttgctgtggaaggatttcgtaaatgtggttaacctttacaattagttgaatataagtaaaccctccacaatgtgggaagctctcagccagtctgttgaaaatcttaagagcaaaaactgaggttccccagagaagaaagaattctgcctcaagaccgtaacatgaaaatacgaagtttctgagtttccagttgctggcctcccctgtggacttcagacttgccagtcaccaacaactgcatgagccaattttttaaaataaatctctttctgtatatgtgtctcctaatagttctgtctccttggagaacttggacaaacacagatatttatgtcaatggtactctgatactctgagccttctcaattcttgacgttccaa

SEQ ID NO: 899521 - DNA, 630 bp, Homo sapiens
gggtattgctgccatcaatagtgattgctctgttggaaataggtaaatcgaaaactttctggaaagtattcactattctagatgccattaagaacattcatgattctaggaggccaaggcgggtggatcacgaggtcaggagatcgagaccatcctggctaacatggtgaaaccccgtctctactgaaaataccaaaaatgagccgggtatggtggtgggcgcctgtagtcccagctacttgggaggctgaggcaggagaatggcgtgaacccaggaggtggagcttgcagtgagccaagattgcatcactgcactccagcctgggcgacagagcgagactccatctcaaaacaaacaaacaaacaaaaaaacagaattcatgattcatagaaggaggtcaaaatatcaacattaatgagagtttggaagttgattccaaccctcatggatgactttgaggggctcaagatttcagtggaggaagtaactgtagatatggtataaatagtaagagaatgaagttagatgtggagcctgaagatgtaactgaatcactgcaatctcatgataaacttgaatggatgaggagttgcttcttacrgataagcaaaaaatgtggtttcatgaga

SEQ ID NO: 899522 - DNA, 658 bp, Homo sapiens
gcataaaaaaagagtagatataaatatatcaatgtgccaagtgaytttctacagtatggcattagcgttgaattttattttctttagagatatatgtatgaggaatattttaaaattctattttgatgaggaaaaaaagaatatttgaaaagcaaaatcaggatacattgcaaattcccagtaataaagcctcttcaaacgatgtcagccatgttctaaacataaaaacagaaacaatctaccagtcatatatgtaactgattgtaactctgtgaccacagtgcctctgcccacaccatctactcttgtgccccaaagaaagtaaacacaatcaaccagaggcgaaatgtcagagagtttgcctttgtccccagtgaatctgtcagaacagggaagatgtattaactggattacagtttcattgaataaatcattttcgtttcagcagatgatttctcagatgggtgggaaggagggagagagagagacagagaagagagagagatttgaggagaaaagaagtccggtaagctaagaaacacttagggtaatgcaataacattgaaaacaaatgactgccagaaagtaagctatgtgttttgtatacattacaacaatgacaagtgtatgtatttctccttttatgagtaaagaaact

SEQ ID NO: 899523 - DNA, 576 bp, Homo sapiens
ataagatagggctgtttgtctttctgagtgtatgcatgtatggatgtattatatgtatgtgactgtgtttcagggatgttcttcaatgactttcctttatttttcttttggttttgagacagggtttccctctgtcacccgggctggagtgcagtggtgcgaccacagctcaccacacccttgatctcctggccccaagcaatcctcccacctcaacctcctgagtagctgggactacaggtgcacagcaacatgtccagataatttttgtattttttatacagatggggtttctccatatggctcaggctggtcttgaactcctgagctcaagcaatccacctgcctcagcctctcaaagtgctgggattataggcatgagccactgcacctggccttcaatggctttttgaggggaggcttattctcttgcaaatgaaaacataatgtagtagaaagaaaaggctatggaygtagaagacttggcatcaagttctgactataatttattccctgtatgactttggatgagcagagtaaccattctgagttctacatttctaatataaaataaga

SEQ ID NO: 899524 - DNA, 650 bp, Homo sapiens
tacctcagtaaagatgggcagggagtacctccatctcagcggtccccaacatttttggcatcagggactggtttcatgaagacaatttttccacagagtagggacagggtggtttcaggatgattcaagtgcattacatttattgtacactttatttgtattattattacattgtaatatataatggaataattatacaactcagcataatgtagaatcagtgggagccctgagcttgttttctgcaactagacagtcccatctgggggtgatgagagacagtgacagatcatcaggcattagattctcataaggagcccacaacctagatccctcacatgcacagctcacaatagggttcacgctcctatgagaatcaaatgccgccgctgatctgacaggaggtggagctcaggcagtaatgtgagtgataaggagcggttgtaaatacagagaaagctttgctcacttgcttgccactcacctcctgctgtgtggcctggttcctcacaggccaaggaccagtactggtctgtggcccaggttttggggacccccgctctatcttaataaagaggatacaaataaatttgaagactamcttgcagaagatgcaaataaatttgaagaattctaaaacaacaactact

SEQ ID NO: 899525 - DNA, 644 bp, Homo sapiens
actatttatcaactgtgtgcttggtattccagtgtctggaactctgaacactttagaytttttaaatataggatattgttgccttgagcaaagttactttgcaaatctggaatcctcttatacatgtagatgtaagcctttccatgcactagaatgttggaaaggcatattctaaaatactgtttgaaaataatattgaggttatgtgtaaagctacatatgtatgaagcaaaatgtggaaaggaatgtgcaaaatgaaacatttcattaaggtagtaaataagggaatatttcattttcttctctaaggttattatgataacatttttatagtaaagaaaatccatttttggctcagagggtacgaaagcatacatttgcaaccaggcagaagagctttaaatgcttaaaagatagaaagtaactttgatttttattttaagttttcatttgagccaggtaatagaaaccaccataagacagaatgctggtaatctgaattaataggtatcactttacagaagtctaagagatttcaagagggggtacaggattaaatgaacaccaagctgttcaacagttaattgacttctttaaaatattcagtaagtattaaggactgttataaagttgttctgtatgga

SEQ ID NO: 899526 - DNA, 644 bp, Homo sapiens
actatttatcaactgtgtgcttggtattccagtgtctggaactctgaacactttagattttttaaatataggatattgttgccttgagcaaagttactttgcaaatctggaatcctcttatacatgtaratgtaagcctttccatgcactagaatgttggaaaggcatattctaaaatactgtttgaaaataatattgaggttatgtgtaaagctacatatgtatgaagcaaaatgtggaaaggaatgtgcaaaatgaaacatttcattaaggtagtaaataagggaatatttcattttcttctctaaggttattatgataacatttttatagtaaagaaaatccatttttggctcagagggtacgaaagcatacatttgcaaccaggcagaagagctttaaatgcttaaaagatagaaagtaactttgatttttattttaagttttcatttgagccaggtaatagaaaccaccataagacagaatgctggtaatctgaattaataggtatcactttacagaagtctaagagatttcaagagggggtacaggattaaatgaacaccaagctgttcaacagttaattgacttctttaaaatattcagtaagtattaaggactgttataaagttgttctgtatgga

SEQ ID NO: 899527 - DNA, 644 bp, Homo sapiens
actatttatcaactgtgtgcttggtattccagtgtctggaactctgaacactttagattttttaaatataggatattgttgccttgagcaaagttactttgcaaatctggaatcctcttatacatgtagrtgtaagcctttccatgcactagaatgttggaaaggcatattctaaaatactgtttgaaaataatattgaggttatgtgtaaagctacatatgtatgaagcaaaatgtggaaaggaatgtgcaaaatgaaacatttcattaaggtagtaaataagggaatatttcattttcttctctaaggttattatgataacatttttatagtaaagaaaatccatttttggctcagagggtacgaaagcatacatttgcaaccaggcagaagagctttaaatgcttaaaagatagaaagtaactttgatttttattttaagttttcatttgagccaggtaatagaaaccaccataagacagaatgctggtaatctgaattaataggtatcactttacagaagtctaagagatttcaagagggggtacaggattaaatgaacaccaagctgttcaacagttaattgacttctttaaaatattcagtaagtattaaggactgttataaagttgttctgtatgga

SEQ ID NO: 899528 - DNA, 656 bp, Homo sapiens
taatgaaatagctgaaaaagcaatcaagaaggcaatctcatttataatagttataaaaaatacctggaagtaaattttacaaaggagatgaaagatttgtacaaagaaaactacaaaaccgtaataaaggaaattgaagaggatacaaacaaatggaaagatatcccatgcccacggattgaaagaattaatatcattaacatgaccatactactgaaagcaatctatagattcaatacaatccctttcaaaatatcagtcatttttcacaaaagtagaaaaaaatcctgaaattcatatggaataaaaaaagagccagaaaagccaaagcaatcctgggcaaaaagaacaaaactgaaagtcatcacattacctgacttgaaaatatattatgggttacagtaaccaaaacagcatgccactagtataaaaatagacatgtagaccagtggaacagaatagaaaacccataaaaggattcatatatttacagctgactgatcttcataaaagctgtcaaggacatacattggagaaaggacgccctcttcaataaatggggctgggaaaactggttaaccatatgcagaagaatgaaactagaccgctatctctcaccatawacaaaatcaactcaagatggattaaatacttaa

SEQ ID NO: 899529 - DNA, 560 bp, Homo sapiens
ttggatatctggacccatcttggctcagacaatgagattattagtggtgcctattatgactgaaaattagagacacttattccttttgtgaagcattatcagggttcrcttcattctcgagcagccttaaggaaggattcagttctccagtgagttcatgtgaataaatttttctccatcttagcaggaaagtggcttttatttggatttcatttaattaaaaataaataaaggccaggtgtggtggctcatgcctgtaatcccagcactttgggaggctgaggtgagtggatcaccagaagtcaagaagttagagagcagcctggtcaatatggtgaaacctgtctctactaaaaataaaaaattagctgggtgtggtggtgcatgcctgtaatcccagctacttgggaggctgaggcaggagaatcgcttgaacccgggtggtaggggttgcagtgagctgagattgcgccattgcactccaggctggtcaacaaaagcacaactccatatcaaaaaataaataaaaataaaaataaataaataagtgtaacatctct

SEQ ID NO: 899530 - DNA, 658 bp, Homo sapiens
tatttacaagtatttcctaaggttccattttgatagagataatcacactttttataaaagttaaatctattcattttctttgtatgtgctcacatgatagttaatttagcatcatggayggagtgagtttaaatagagaatatctgccagtttgtaaccacaaccaggatggtgtgtgccacaaaataaaaagtaacaagttactttgaaaaggattttcttaacataatataaaatatttcacctttcaagtcacttcacctatatgttaattattctctaaaaaatacaacaaatatttataagacttcacataatcatacaaaaattttctaatgtgaaaagaaatctaaattacttttcagactttgtgatacttttgtggatgctgataaaaatgcctcatatctatgaatataagtttctctccttaatactgtttccattgtaagatatttaataaaatgggatcgcttattgtcaaagaaatttaattattttttagcatatcatgcaatttactagcttgtgaacatcagacaaggccaaatagtatatgaaagtgctgaggaatttgattataagttgttgaatattgaaaaagaatgtcctggaaaacaaaaaaatacagttatcacattgtcccttctcagcctaa

SEQ ID NO: 899531 - DNA, 477 bp, Homo sapiens
tgactttgcagcatttatatgtcttattgataaggcactgatgattagggttgctttatgacctagttrtattttagaaagagataacattattaaaagaaaagaaaaaaatgatcaaaggtcagggttttgggtgtgggtgaatgtggtagattaattctcaagcaattaccctaattcatttcacacttattatactgaaaatatattgaataagtacttttagaacatccatgacatacttcagtatccctgaaactacaaatggtgaaaaactttcagatcactcatggttttgttatttaagctttgtgaaactcaaagatttataaaaatgtcgttaatggatttcttttcatcagaattacatgtctaatattgtattctaaattacagttctccattacaatgaggttttagctctaagtgctatttcataattatgagttgtttttcatgaactcctatgtaaatttt

SEQ ID NO: 899532 - DNA, 597 bp, Homo sapiens
actggagtagtctgggaggggcctttgacttctctgcccctaaaagtgagttctcataaaatayggtgcgcccaggctaacgctggtacttattatggcaaatcctttagcttcaggtccctgctctttttgtcctccacttctgatatgacaaatgcccaacagtggaggcaggaagacagcccaccttctgtcagagcctactccccagctcatgtttctctgtccctccgttgtatagcaaactcttgccaagccttttggaatgactttttaacaagaaaagccccatactttaatgggccaattcaaacaactgacatctgttaaagaagcacacaaatatcctttaagtccttaacctttaattaaaaagtcatgcaaatgtacatttcctaaagggatacttttcccctcactgtgattagagaggagtgagactctaggtcaatccaaaacatgcaatcatataggcacattgctctattaaaacaaaaatgatttaatattaaaacattcattatttaataaaatgtcacatcattagtttaggggagaaaaacgtggtcatctggagacagactagaaattgattca

SEQ ID NO: 899533 - DNA, 606 bp, Homo sapiens
ctaacattaaccagttttcccatttcctccactaccaccctagtccatcatcacatctggtcatacaaaggttmctctactgcctctcttgtgcatctgtaagctattctctctatgacgaatgaaacagaatcatattcctatttttcagatacttttcaaatacaaatgattttctgttgaatttagaataaaataggaagttcatgttgtggtctgtcaagttctataaaatctggccttcaattaccgtgcccatctatctctcaatctctgctttgctcagtgtgttcaactactccaggctcccactggggttttcaagcacacctccacttcaggcctgtttcactcacatggagtattctcgctcagagctgcatgtttctttgttgtgtttgctcaaatgtcagcttctcagaagactgaatgtgttcaccctcgctgaaatagtaaccgcccttatccattctctatgtccttatcctgcttaaattttctttatagagcttgccattttctgaacatcaattacattatacataacactcctattgatttctttattatctgccttcccacctgaatatatccatacaaacaggg

SEQ ID NO: 899534 - DNA, 692 bp, Homo sapiens
tgaatttctaaagactgaattaggttacattgcctaacatttcaaaatcaacctcctaacatttaagtagattttcagttacacatatactttaaataaaatgtggtggtattttatcactaacatcacacatggacaaaccacatttaaaaccatcgttacatttgtttttccaacatttcctctggtttaattcaaaaagtatataataacttcatttatgaaattcctactatttttcaggtattttccatgcattatctctcgtttaaaatattgctttcagtattttatttaaagaaaataagtttcaaagaatttgtgtaacagcccaggtgacatagctggtgtacggctgagctagagtttaaaccatgtttatcaggcttcagtgcagttttctccccatgttacccagacagaaccagcaaaccataaaaagttttataagcacctgatctcagataaaaattgagcgccaagttaaagacgaacccacaggtgcccacagtatttttattgtcaccatcagtagtgttctcaattcctgagaaataataattttggggatctggaaacaagaaaytgaaattcatagcatttcttagaaattccttcaaccataaattattatgtacctttaataatattttgttttaagataacaatgagtgaccataatcataaattgt

SEQ ID NO: 899535 - DNA, 610 bp, Homo sapiens
agtggttctccaggcattgatgattcagggtggagctggagggcagaagtgcatgcttccgacatttcagggaccttgccatggtgtgggagggcagcctggggttcctaagccccttcagcctctgctgaaccaggttgcctagcatacatccatcatgtggctgccggctgggccgctgcttccaggaaatcaattgcaaaaacctgcgattgtcagtggctcacacactggaggccatccagggagtagattaaattgtatgaaaaaatagtacagggctcaagaccgctcgtaatggagacccctcggtgacctttctgcagaagttaaaagaacacaggcagacatactctcacccttgctcaccaacgtgctagcccgcctgccaggagcatagcccctctgcccttggaggagccgcgcctcattagcaggaagtgggaggcctggtccagggcccagtctgcctgtgcatggcaagaaggccagcaggrgcacctgcttccctgcagggtggacccaagttgaccatcaggccttagatgcttaaggtcactgagccccccttctccatgccagccctcttctgcttcccatgcaggcacca

SEQ ID NO: 899536 - DNA, 648 bp, Homo sapiens
gaaaaatagttgctgttattataataatcatactgtataataatcatactgtgttcctgatttggagcaaagcagggagggtagcagagtgctccctcctctagtgagagtggcagartgagactcagccctctgaggggcgccaggtgggccagaggcagggtgatgggtgggaccagcctgaggcctgactcctgcccttcttgccccccagccacactccctgggcaggagcagctggcttgagcagaatcttgggacctgaggctctcaggggacctcccattgggggatggagggcaatggtggtggtgcccaggaggtcttctacttagatgtctattggatctctaaatgaggctgcatgcataatcacacacaaacatccactgagaaggtgacacaccacgtcagcatgggtccctctgccggaccacaccactcctagtgactatgaggtgacatccaggcacgttgcactattggctcctgtcggtgagtgcagtgcctgacaacagtgagctacatttatttgtaaaaatgaacgccatcagagtagaccacaattgtactaactctaatttgctttgtgttcattttttcagtttccagaagtggcttaatgtttcctagggtcaaaggcagtca

SEQ ID NO: 899537 - DNA, 594 bp, Homo sapiens
cttgcaggacacacagacgttctaaacgggggacaaaaatactggatttgagtttgcaaaacgttacttgagttgcattgtgaaaaatgaaatgtaaagggcaagagaaaagttgaaaaacaggaggatatttcagcagctcacacagcattgctgttgccttggagaaagaggtggtggagggtgaggacagtgtgtggatgtcagacttttggcaggtctagttcagtggatttcagggcaggtgacgtgcacagcaggggattccccaagggaaggagaagaaggtgccagggctgacactttggtttcttattggaacaacaggatggatgtattagtccattttcatactgctatgaagaaatacccaagactgggtaatttatttaaaaaaagagatgtaaggaactcacagttctgcatggctggggagtcctcacaatcatggcggaaggagagaaaggaacaaaggcatgtgttagacggcagccggtaagagagtgtgtgcagcggagctgtyctttataaatctcgtgagagttattcactagcatgagaacagcatgagaaaaacctgcctccagaattcaa

SEQ ID NO: 899538 - DNA, 625 bp, Homo sapiens
cttattacatcaaaaatcccttgaagaattcttaaacattaattgggaaaattagatctagagaccaaaataagtcacatatctccaaggaatgtaagtagtttaatagtctagaatcagcaaaatktcctttatagcacagcacgtctttatttgcctgttttctggtcagcatactgatttcttcatattttaagacttccttgccacgaacatatggtttcacagctattaatatttatttgcaaactaaaagaatgtagttatagtttccaaaataaatctcatagagttgaattctaattgctttacaatagtctttgtgtataattttctgtttagtctaagcagtttgtaaatatttcttatttgcaagtagataatagttcaacattctcactttatgtaactaagtgtgtcagttcacgattggtttcctctaatatatatctattctactttttaattatcagaggttttgtggaaatatatctcttcaaaaagtttatatattataatctaagcagtttctgaaatgttaagaacaagaatttgtgaagcaaattaaatgacaaacttatgcaaagatagttttctcaagaattttgaaattatctactggttg

SEQ ID NO: 899539 - DNA, 700 bp, Homo sapiens
caacataactattcctttctctctccctgtgttggagacttccttaaatcaaacaaaaccacagtttaggtgtgccagactataaaaatcatwgctgcttaatgttagttgtgctttatataacaagccttatctgcttctcacaaaagttaccacccagaggaaggtttatttgcaagaatactatacaattttgcagcagaatattagagaatgttctgggtgttacttcaataagaatttccagcaaatcattttctcctaatactgttctagttcaaatccacctactgctcagtggggaatgggaggctaaattcttaaggccattcagtctacttggggcgtgagggggtgtgtagaaagccaacaatcaaacgaacaccctctcaaggcctgggtgcttctctgagagccaatgattgcaaaatgaacaatcttattaagatccctaattagcccgaattcaaaagcaaggtaggcatgctccttagctgagctaaggataaaactttccaggaaaaattgaggagaagaaggtggcagggatgatgggggctgggagactgcaaggccacaggcttggtggctggaagatgacaactatcctaaaacattcaaatgccaaggggtggaagagaaacgatgccaagtacatgaataaccggcagctgacccagctgagtaccaaactcaacac

SEQ ID NO: 899540 - DNA, 537 bp, Homo sapiens
gaaagatgtggaggaataaggggtctttgggtttttkttttttttttagcattttgtgattttgtcagtctgccactcaaaagaggtgatggcagattatagccagctagaaacagctgcaaaacgtgtattgtgagctgtgcctcacttctgtagtgtgtcacaatgctttatagtcctcaagaaacttgacagtcaaatgcaatgcatgttccttgcttaggggatagatccaaaaaaattgataaagggcagtttgggacaagaggaaatttgaaaatgggctgtatcttaggtcatattgtatcaatatgaaatttattgcatgtgataatagtactgtgattatgtaagagaatatccacaggagatacaagctgaagactgtagagtgagacatcatgatgtctgcaacttaccttcaaatggttcagcaaaaaaaaatgtgtgtgcatgtatgtatgtctgtatgtgtctgtgcagctccgtctaggtggtagggccctcatgcatgtgttattcctattcctaaaatat

SEQ ID NO: 899541 - DNA, 646 bp, Homo sapiens
agtcactgcacccagcctgtctgcatttctgtctggtggtgagctatgtgctgcaggtagtgtgtttaatgtgtttctctcatgtttccgtgtatctggtggaagatgtgtgtctgcaggatgagtgtctcttttgtcggtgtatcatggattgtgtgtttgtgtgtgttgcagggaatgtgtttgtctcagtatctgagtgtgtcgggtcgtgtgcaggtgtgtgtttttttgtgtgtttgtttgtttgaaacagagtctcactctgtcgccaggctggagtgcagtggtgtgatctcagctcacctgcaacctccgcctcccgggttcaatcgattcttctgcctcagcctcctgagtggctgggattacaggcgtctgccaccacacccagctaattttttgtatttttagtggagacagggtttcaccatgttggccaggctagtcttgaactcctgatctcaagtgaaccgcctgcctcgtcctcccaaagtgctagaattacaggcgtgagccaccgtrcccggccgcacgtgtattttgtatgatatatatctgcttctgactttggtgaagtgtgtgtgtcgcagggttgtgtctatcttgtggtttctatgtggcctatggtgtgtgtgctgcaatg

SEQ ID NO: 899542 - DNA, 587 bp, Homo sapiens
tacaatctttaagcagaaaagagaaactagtcacatccaagaaatagtcagtaagactaactgctgaattgtcatcaataactacgcagtgcagaaattagtgggaaagcatgttcaaactgctgaaattgaagatcctcaacaaagaattttatgaactacaaaactatctttcagaaatgaagattagttaagccattctcagataaacattaactgaaataaataattgctagcagacatgccttacaaaaaattcttcagttttaaatgaaagaacatgaggcagtaattcaaattcagtcagaataatagagatcactggcatgtgtaactacatagctaaatgtaaaagacaatgtaagtgtgtatttctttgtaatgctttcctaaacttatctatttttaaaatagttgtataatgcaataatgatgatgtattggtgactttataatacataaaggacggagaagaaaaakaattatatagaacaatgttctgtatacctttaaaattaagtattattttttacttttaaactgatttatttttcccaagaaatttatttatttatttacctataaac

SEQ ID NO: 899543 - DNA, 600 bp, Homo sapiens
caatagaatgagataaaaatattaataaatgttaaaatttgaaaaactaacaaatatgtatgaattaacaaatacatttstaaatcaccactgagttaaataaaaaattacaagaaaatcctgaaaatatttttatatgattaaaataaaaaatgtaacatataaaaatatatgagatgcaaaaaaaggagtacttagagtaatatttatagttgtaagtgcctacattaaaatttaaaataaactcaaatcaaaagcctaactttccaccttaaaaaaatagcatactaattccaaagcaagtagaaagcagaaaaatattatatccagagcagaaataaatgaagtaggcatagaaaaatggagaaaatcagtgtaacaagatattagttctttgaaataattaacaaaattggtaaccattagctagagtgaacaaggagaaaaaaaatgagaaggttcacattattaaagccaagaatgaaagaagagccattagttttaacaatacagaaccaaaaaagagttataaaagaatgctgtgagtaatagtatgccaacaaattagataacctagatcaaatggagaaattcctataa

SEQ ID NO: 899544 - DNA, 644 bp, Homo sapiens
ttcttcaaacaaaacaagtaggataaatggagcctggatggggtaccaggagctagagaaacagagtgggaagaagtgtcraatccatgcatatgtaaatgctactcagggaaaaatgtctgattgtgacccagagtgacctagaagaggtcagaggaggagacagatataactgtaaaaatcaattccaagagcaaatgaaaacatgacttacctaaaaactaaacagatattctggtctatctgggcaatttaagcagaggataaagtgattggagaaaacctatgaaataaaatgaagctggaccttgtagatcattataaaacatttcaacaagtatgaatttgacttgaaggttaaagaaaatcattaaagtgtcttaaaactaacctgctcatgttttgattcgagagagatcacactggatgcatggtgaactgtggcagatggagaaatggttggaagccatgggacgaatgcctagagttttgaaggaatgtaggtaagatatagtaggacctgttcctaaggaagagctgaggggagcaaataaagtgaagggagataagcatttttaagatgcataaatttcagggcatgttggtgcttgtgaaaaatagaagggaagaattaaagacagtaa

SEQ ID NO: 899545 - DNA, 620 bp, Homo sapiens
atatcaccagacctttcgggtactggtttctctatctgataaagataataacaggaagtatctttaaaaaagtcattgacagaataaatatatataaatgtacatataatatagtaatatacaatatataatactatataatatactattataacatataatatagtaaatatatacatactttcatatatatgtacagtaaatatgtgtgtatagtaaatatatattatatatacagtaaatatattatacatagtaaatatacattatatatagtaaatatatatataaaatatagatacttataaatttcctcccctctgcccacaggcagggctcatggctcttgctccattagtgaccctagtacaccaagaacagtgcctcatgctttctggatacttaataaatatttactgactgcaaaaaagtaagaaaacactcacatttctctaaatgagagagctggtctatcagtcagggacctgggcaagaagagatggcacactccatctgggttactgaaggcaagttaatgaaggacctattcacagcaagtgtaggcaaggytgacaaaatcaaaaagggacagtgcagtatctcaggtctagtcaccacaa

SEQ ID NO: 899546 - DNA, 613 bp, Homo sapiens
actttatttttctaaagttaattaaaaaaaaaaaacgggaatttagaattaacacacagactttgcagtggcattttcyaagatgatcttcctaaaagcaaagcgggatagggagaaactcctgtagtcttcaaaagggtggttaataattagagtccaaaaattttgctcaagaaaaccaagttaaacatatacacaaagatctaaatcaggggtgtccaatcttttggcttccctggaaaacactggaagcagaagaattgtcttgggccacatgtaatatacactaactactaatgatcactaatcagctaaaaaaaaaaaaaaacgcaaaaaaactcatagtgttttaaaaaagtttactaatttgtgttaggccacattcaaaggcaacctggggctgcaggttggacaagcttgatctagattataaaatttacatacaaatgtcagagttttcaaaattgcagttaagagataactgtatacaaatgatgaaagagtagtttttaatgaaatgctatttcacaatcttaaagtctttttctgggattaaaagccttgaattccaggttcccatcattagcacaaacatagtatattcataccagga

SEQ ID NO: 899547 - DNA, 629 bp, Homo sapiens
agtgacaacttttaactagcaaatcttaaaagsagtataactccagagcaatataacagggtattacctgaatagccataattatacaactggaattatttatgctacagggagacaaagtcagattattgaagacacaggcccacacttttgttttaaatcaggtttcacagttctctctcacccacaacacagtaaattgtatccattcttcttttgctctgagaaacttaaagactaaaacccttgcagcttccccaatatcatcacactgcaaaagcatagaagtcttgtatgcatatgcaggagcagggaggagggggagtaacagcagatattgccagagtcagggcatcataatctactgtctgggtaattcctggataatttgagatccctgtgaaatgaatgtcaccaacactcccaaaaatctactgagccaaccaactgatttatctgtgctaataaagagtttatgctttcaggacacatcacaccctgatcctgtctccttccaggcatagcactgagaaaataagacccagccaattcagaacaattccttttggcttgagattctgggagcaaaggagcatgctgcacagctttattccgtgtcctccccatgg

SEQ ID NO: 899548 - DNA, 618 bp, Homo sapiens
ggtaggacaatttaatatgcatcctcccgcgctaagtgcctttaggctttcttccctaagggctaaacagaaaccagccctttcagaagacttgctgcaccgctgatttcacccagccccctgactgctgcctctcccttttgcaattttgacacaacaacccaccagcattccttcctggtaagagaccactgaccactgagtggtctggccagtctacagaggctgcacacagagggatttggcctctgcttcacttttcgacatcagagggccaaaatctccacccactgatcatgccaatgccattttttgaacacatgacccatctggaagcatgaagctcaattgcacttgggtctgtttctcctttcacaagtattcatgacccctgctacagcttattaaatacgtgtattcagccaccctgcccagcataaattcctgtttcttttacctctccctcggagtgcctgtttctggcttctggcaggaagctacccyttccagcctgccaggatggccacctgcaggccacaactctttatgagaaataaaagtcttccttccaaatctatgagccttgtcattcttcagttgacagaacaaacattccac

SEQ ID NO: 899549 - DNA, 588 bp, Homo sapiens
ttacacataagtttggtcacaaaagaaagtagtttggcttacgatttacgttttaactgatcaagtgccagaaacactcagttgcatagtcaacagcagcagaaaaaaaaaaaaaaagaaaaacagcatctgctttagaaaaaagttgaataaactgaaatagcctgaagagcagacttttctaatgaaaatacaaattcttgtctggtgaaatctacaggaaaaagaatccacccactacaaaaatgaatggttttcaagaatacattttaaaaagaattttgctcttaaaatttgtcagaatcacagggaagtaaactttactgagattaaatacagtcttcattaggcacagggatcccatattaaattttaaaagtgattgggtaataactactattttaatcattttattttcttagaaatacttcttcacctttgacttctgaacacaaggrtttctaaagaacactcccctttcaaaagcaactacaacctcaatacaaacagtttcatagagattagtaaagtatactctatattcacttcaaggatgccttattggtaagcctttcaaaagctatcttt

SEQ ID NO: 899550 - DNA, 421 bp, Homo sapiens
ttcaatgtcacctccttggagataagtctaccctttctcaagaagactgctgtcactctattctttttctagcacgctgytctttttatgcataggaagaaattaaacacttacttgtttgcttcctggattaatgtgtgtcacaatgatcataatcttgatcataatcactccaagaggtcaaggcttgtgtgtccattttatttgcctctccacattcagcacctgtcaaatgtaagcattcaaaacatatttttatgaatgagtgatcttccattcattcccaaataatatttcttctttggcccaacaatcaggctctatcctattatccagtcctaattgtatgcctcattccaggtaaactgagataatcatcattttgcaaatatacactgtacttttttacttctgaactttc

SEQ ID NO: 899551 - DNA, 661 bp, Homo sapiens
aaaatttttagttattgaatggttttcattagcttttacccctttctcagaataaaaggtgctaaaatttgcctattgaaattactcaggatgcatcccctctcagtatttctagaayaaagaaaaagccaccaatactcagttacaaaattccaaagctgcagatctagtccatcccaagagccttctgcttgtgctaggaactcagatttccaaactgtggcagaaatgtaagagatattttaaaggtgtgactagcatggccattaaattccttaatcctatgaagcggatgggaagagtaggagggctggggaatggttgccattactacatttgggagacctaaagatgaagatgtaacaaaacacaaggaagagatgaaattcataataccaaggttcacaacaccaaatgtaatgaagctaaaacgcaggaattgggaaaatacaatttaaaagttcatttgcaaagaatcatgcagttttagttgaaaggaggtttaaaaggaaaaaaaaaatatgacatagttgctaaaaaagccttttagaaagtgactaaatgcttactaagtgctggacattgtggtaagtgctttcagtcttagttatctgggacaggtatccaccctctcatccattcaaaatatattcagtgagta

SEQ ID NO: 899552 - DNA, 606 bp, Homo sapiens
ttttttctaatttgctacaatgtatacctattactattggcaaaaytaaaaggttattttttatttaaaaaaattagagaactacaaaacttattctttcttttacatatatagttctgctttaaaatattggagattacagtgtccagtttcttttaaactcttctttctcataaataaaaagaggatatttagcactgtttatctgcagtcacaaggtatgatagatttgctgaaattacttaagagcattttcactgaggaaaattttatgttgctgtagtttattcttatttcctgttgtttttgttttggtttctgagcatgatttttcacacaagatgttgtatcagacaaggtaccatatgtcgccaaacctcagcaggagcaactcagagtctgtaaaaccaattcaatgatgcttttccataaactgacttccctatgatcattaaaatatgcacatattttaagaaaccaataatcaggcaaacctaattaagaaagagataattatgactaacaaaaaagctggcaaatcacattcagagatgtatatttgaatgtttgccatgattttcatgtacaattaatataataactaca

SEQ ID NO: 899553 - DNA, 549 bp, Homo sapiens
caaatctgaactcttcgtaaaacaagattgtggatcacaatagctgcagtaccaccttgccacccaaaccattctgaacctgtatttataaggtgtgagataatacagattaatttgaggtattgacctaacactctaatagcaggcaaaaggggtccaaggactaagtgagcttgaaattgtaaaattctggacacactgaaagcttgtttaagtgcatatttcttcttttataaataatagtgaccaaggtgatccatttgaaagctgtcagagctgacacaaaagtatggagccctaaccaagactagagtcagttgagagctcttcacttctcgtttctttgattctgggatattatatctcctctacacatagttaataataattaccttgcatatgagctttattcacttctaagttgctgagatttcartgcaaaaatagggagccaagagataaatgagatggctatctaattgtcaaacaaatataaattaggcagactattatttcctctttggagggagtaagggacctaacacttat

SEQ ID NO: 899554 - DNA, 561 bp, Homo sapiens
aaatgaataagaccctcagccaggcctgaaaggctgtcccttgcctttccacctttagttgccagctaattatgagctatgattacgtctgtgcattccaactagaaaatatcatcttctaccccatatgaacctaagaggagagattcctctgagaagtttcccccggcacagaaaagtacccatgaatgaatgaatgaagtaactttcccactcactgtttaaggcctgtatcacactctagctagaacaatcactagacatcaattttttctcctttctaatgtggacatcttagcttctggagagcagggtctattccaaaagtctttctttgaatatgcaacatatctggcatggtgccttgcatacagtggacactcaatatgtgtttatggactgatcaaccatataaagctccaggcctctggccaaaacaggctacagctatagctactgagaagaatttcttaytgttttcagcaagcactagctatgtcagagcctacagtagtaagaaaataaactatcccttgatactgatgctttacaggaaatcag

SEQ ID NO: 899555 - DNA, 530 bp, Homo sapiens
aatgggaggagaggcaaatggcaaaaacgggggttgggsaaaggggcagcttaagaaaatccaaatggtctgaaaagggcgaaaagaggcgtcagggcactgctcttatggggctacccatccccaccccccactctcgccccacccctaggcctttgtgttttctaaaaatccactactctatgaagaagcttcgggagaaggtactggatcttttaaatttttatttgaaaaatatcaaagcctttaggcgaaaataaaataccttcatctcctgcttcctgaaacctggattttaaggtcagcacagtcacctcccctcggagcaaagcaagccccctcaggcaagctgaaatgccagccaaggagatttccattttcttctatgccgcaggctgccaggcgtttactgggtcggcttttttatgatggttatttctggaaggaggaagtctgagtccctggcttctatctttgggctatcctcttgtaaagttgggtggaatcgtctctgggctgaaaacatgctt

SEQ ID NO: 899556 - DNA, 655 bp, Homo sapiens
cctttgggggcatctcagcacctttctgtggagtgaagctacatttcttagcagagcatgtaagatggacacagtctgatgcttgcttactttttcagctccamctcctaccatactttgcctgcctcatatttcatactttttcagttctaaactgccttgtagctccctgtcagcattcaatatacctccgtaccacactgatgctcttttctcatgcatgaaatgccttccttgccttatccttctgaataacttccaaccagatccttcaaaaggcatcatcttatccagagtgctggcatcagcccacatttccctggcagaggcaaaggtgagtgtccctctccactcccataacctccagtgcatacccctagtgcagtacctaaaatagaatgctgaattacaggaaaatataagcagaggctcaaactaatccagtccaatcccaacaaaagggtttagctccggccaggatttaatattatctcttttctgctttctccaaaccatacaaatttttgtcatgctctacaaaactccttggtgccattagggatgttactgaggacattgctcacgacatcccataataccttataaaaactgcacctaatccctgtggttctttgggggaactacataattttca

SEQ ID NO: 899557 - DNA, 645 bp, Homo sapiens
tgtgtcaggcactgttctagggttaggatgaagataaagccagttattgcaaaccttaataactttctcagaacacacattccctattagattacaggcattccagaaggtcctgttaattgttccaggytcttagcccctgttgcaattattacttaacaattaatggatactcaaacaaaaatacactcttcctgggggtaaaacacaggaagaatatctgatctacatgtataaataagagtactcaggctgttttgtttcattcagaaagaaactgattacaccatcctttaatgggagtggagtagaaaaatatttttctggaatatactgtgagatcagcactgggtccccaagcccctataggaaaagccattaaaaaaaaaatccaatctcccaactgtgacatgagaaaaaaagaagaaatatttgtttcgttaaacccttgggattttgaggtttgttacttaccataggtcagctgagcctgactagtagtgcataaccaataattaaattttttaaaatgtaagctatattttaaataaaatagaataaaataaagtataagaaactcaacactttcttaaaaaaagtcacatccaaatccacatctcagtcatagctaatcattaggaaaaa

SEQ ID NO: 899558 - DNA, 568 bp, Homo sapiens
ttgtttttaatttaattttattttaattctgggatacatgtgcagaacgtggagcttatataggtatacaggtgccatggtggtttgctgcacctatcaacccatcatacaggatttaagccttgcatgcrttaggtattcccattaagtaacttcttatcactcatcccctctcccaccctcctatcctccccagtctccaatgtttattattattccacactctgtccatgtgtacacattacttagctcccacttctaagtgggaacatgtagtatttccctttctgtttctgagttatttcatcaagataatggcctccagttccatccatgttgctgcaaaagacatgatttcattctttttttaaggctgaacagtattctattgtgtctatacatataccacatttcctttattcaatcatccactgatagacacttaggttgattccatatctatgctattgtgaaatgtgctactataaatatacaagtgcaggtacctttttgatatgatgatcacttttcctttggggagataccaagtagtgggagtactagatca

SEQ ID NO: 899559 - DNA, 695 bp, Homo sapiens
ataccagataatgcagacaattcaatgactttagttcatgctatcatgtatttagtcctcagaattgccaaaatcactgtcataattattactacttactaataccaccaacccatcctgggtatttcagggagctagctattagaggtaccggccttagtagttaccatgtactactttgcacccaaagccctcttcaaagcaccaagacttatagtgacttaagagttttaaatgtgatattttctggcagttctcctctgcaatccagcaacccagaaacattatcactttttcatacataaatctctaagttctgatgctgtttaggcaaagtgttttatctgtcattgtcagtcagtccctacataatcatagaggaaatgactgataaaagatgtgaatcaaattgtcaactctgaatagagttatacgcttgagatggacaaggaaataaactaattccaagaagccattcctagatcaaggtcagtgagtgcataacactggccttaaccattcctacagaatgaataaaaatgccatgacttggaaatctgatttttwaaaaattttatttaagttatggtatacatgtgcaggacgcgcaggtttgttacataggtaaatgtgtgccatggtggtttgccacatctatcaacccaccacctaggtattaagcccagcgtgtaata

SEQ ID NO: 899560 - DNA, 606 bp, Homo sapiens
aactataggcaactttgacacatctggcaaaggggcatctgaaggatagcytttcttcttttctctggcttgtccttcccctttcaatgccttttcatttttccctcttcctattccttgtctcaggcttgggaatgccaggagcatccatgagcaaagtctagcatcacaggtcatgaagtcacatagtggcaagtgctatggagaaaaataaaggaaggtaaggggcagaggtaacctggaggggtgggggctgttgttactgtgttattttacacaggcaagtccaagtaggtctccttaaaagtgtgacattttgccagagacctgaattacataaagtcctgaatcatgcaagtacctgcaggcaaaaggcagaaggaaaagcacatgcaagggcctacttcgtgtgactaaagaagagaaatgcaaagatggcctggagaggaatgagtgaggtggagcatgctgggaggtgaggcagaaagaaggcagaggcctgatcacagagggcctgtcttttaagtcctacaagaaattctgcatttagactgtaagaaggtgaagtcaattggaagggctgtaaatagaagagtgacataatga

SEQ ID NO: 899561 - DNA, 638 bp, Homo sapiens
tgtccccacccaaatctcatgttgaattgtaatgtccaatgttagaggaggggcttggtgggaggtgataggatcatgggggtggatttcccttttgctattcttgtgacagtgagtgagttctcatgagatctcattgtttaaaagtgtttagcacctcccccttcaccctcttcctccttctctagccatacaagctgtgcccaattctccttcaccttcagccaggattgtaagtttcctgaggcctctccagccacgcattgtgtacagcctgtggaactttgagtctattaaacctcttttctttagaaacaaaccagtctctggtagttctttacggcaatgcaagactgaactaatacttgaagaatgcaccagagtatcttaatgcagaattaagcaagcagaagaaggatttcgtgagcttgaaaacaggttatttgaaaatatacagtcagaggatacaaaagaaaaaagaattttttaaaaataaagcacacctacaagatctagcaaatagttagaaaacagcaaatccaagagttattgggcttaaagaggrtgtagagagagacatcagagtaaaaagtttatttgaagggataataacagagaacttcccaaacctagagaaa

SEQ ID NO: 899562 - DNA, 516 bp, Homo sapiens
cctgaatgaccctaacactcccattgtgtgagaagtaaattatagattacttactctgtggtaagtactcayagaaatcataaaagaatatgaagaagtatgaatcactgagtctctttaagtttcgctataactgtactagtcaatagtttttattccttgaaaactctggaaacttctatagaggtaatagtgtagggtttttcagaaaacgaagtatttcaaaaatttgtgaggaggaaagaagagtgaaaatcaagtactgaaaagaagaaaaagggggaaatgggaaatccgaactgtacttctcactcaccaggcatctcagcgaacttcagacacacataaaggttcctcttgaatgatgaacagaaaaagtccccaagaactatttgttggaaacctcagtaataaagtatgaagtgacctatgttttaagctaagaagaataagtcagcctgacttgaagacttttaccttgctgactttgaaaggcataaagatgggcaaatgaat

SEQ ID NO: 899563 - DNA, 581 bp, Homo sapiens
agttttgacacccttagagaatgtgctccctgctctagaaggactattcctcacacatatcacaatgtactaactgcagatcccaatcattaatcataaaagcgagggtactatcctactttgtgatcatgtctgaatgtaaaacaagaacagcagcaacaacaacaatagctaacgtgctgaatcttggtgggcgctggagggaggctaagtgatacacacacagtctggcatccaatgctcacaacgattcttcaagggaggccctatcatgatccccatttttcaaattttgaagcttagacccagagagctacttgtccaaagtcattaccaagtaaacaattgaagtaaggttttaatctactctgctacaaataagctgccctatagtggagtttacctttccttcatggtgctctatgaagtgtaattctatatttatttgtttgtyagatgaaggtctggttcaaaacaagctataagctcgggaggcaggatcctctggtagggctcttgtcggtcagcatctgcctgacaaagaataagtgctcgatgagatgaattcttatcattgaatg

SEQ ID NO: 899564 - DNA, 581 bp, Homo sapiens
agttttgacacccttagagaatgtgctccctgctctagaaggactattcctcacacatatcacaatgtactaactgcagatcccaatcattaatcataaaagcgagggtactatcctactttgtgatcatgtctgaatgtaaaacaagaacagcagcaacaacaacaatagctaacgtgctgaatcttggtgggcgctggagggaggctaagtgatacacacacagtctggcatccaatgctcacaacgattcttcaagggaggccctatcatgatccccatttttcaaattttgaagcttagacccagagagctacttgtccaaagtcattaccaagtaaacaattgaagtaaggttttaatctactctgctacaaataagctgccctatagtggagtttacctttccttcatggtgctctatgaagtgtaattctatatttatttgtttgttagatgaaggtctggttcaaaacaagctataagctcgggaggcaggatcctctggtagggctcttgtcggtcagcatctgcctgacaaagaayaagtgctcgatgagatgaattcttatcattgaatg

SEQ ID NO: 899565 - DNA, 621 bp, Homo sapiens
gcaacccggaaatgtcaaaagatgcagaaaacaaaactcccacgaaagcctgttctctgtaaccaaagaaccaagataggggcagcctaacaagacaaaaaattatagctaataactgctccactccagccaaacactacaaaaaaaaaaaaaaaactgcaagtcccctcacccatgccaccaaaggccgagtggagagcatggacttccaccctccaaagcacctcagccaccaaacaataacagaatgcacaatcttttcaagtactcacaaaacatataccaatataaaccatattctgggctatgaaacaacctcaacaaatttaggagagttgaaatcgtagagtgttctctcaccgtaattaaatcaaactagatatctatgataaaaagtaacaggaaaacctcaaaacacttgaaaaataaacaacatgctcataagtaatctatggatcaaagaggaaatctaaagggacattaaaaataaaaattaaattgactgaaaatgaaaatacaacataaactttgtgagatacagccaaagcagtactgagggggawatttatagcactaaaatgcatgcattagctgtgagaaaaagcctatatcaatactcta

SEQ ID NO: 899566 - DNA, 577 bp, Homo sapiens
cccaacttcaataattatcaacattttgccagtattgttttatttattccccgctccctgctttttctttttttttgttattagagggaaaggagctggagtaattggaaaaaatttctatattatttcactcaaattcttaatattcatctctaaaataagtctatatcaggacattattactcactatgaaattaatgattactccataatattatttaacacccaaattattttcaaatttcccaaattttaacacaatgcctttctacagcctttgattgctatatttttcctgtctcttgtattctgtaacagattctttccttttttcttttttacaattatttgataaactcgataatttgtcctagagagtattacacattttgcattcagttcacagcttcctcaatattctttattaaccaatatctagattaagagtttccattagattccagttcaagtttttaggcagccctagctcagrgtggtgtgttctatcacatcacattataattagtaggttcacatattgctagcttgatccatgcactacccagttccacatcag

SEQ ID NO: 899567 - DNA, 588 bp, Homo sapiens
gcttggcatggacaggcagcccaagcaggcagtcagagccactgggcttcagctcttagaccaccgttaggagcgggagccrgttttccctgaggctcctggctgaggaccactgagggatgcctgaggagcagacagcatgaaggagggcagaaccgtcgtgggatcctggtgacactgttcgcatctgcatctggccatcccaagccacaaatcctggactttcccattgatgtaaaccaataaaatctccttgcctgagctacaggaggttctgtttctttcaaatgcagacaaaatattttgacaaattacctctccaggcaattgcttctggtgttttttttttccactctaaattcaactttctaggctacctaagtcctgctgccccatagcagatctcctaacgtctccattatctgacctgttaccaggacatctgggtctccttctgtaggacttgttccccagcctgagacttgatgcctgtctccccatgttaagcccagtgcccgtcatagcaggtgcacaaaagtggtttaaacttgtgcctcctaaacctgcaccccccacctcaacatctaa

SEQ ID NO: 899568 - DNA, 671 bp, Homo sapiens
atgattatgatgaatagaggagcctggatcctgagatccacaaacaaccatcattatcttcttgagtgacctgaggtgagtaacttaacctctgtgaacctcggtttatttgtctgtaaagcaagaatgatgcacctgccccacccttctgaactaacagaatgaccgaggctctgagcagccaggggtgctgtgagatgatttatgagccttgaccttgggctgctactggaaaatcaaggctccaccactgcagtggggctcttactaacaaggcttggtagcctattttggagtctgtcccaaaagactgaaataaattaacttcatgagggattttttcccccaaaatagctataatctataccatcagtcatgacagagcacaaaaattcaactgcctacagggctcagtggtcccataagttatggaaaaaggcaaggtataaagcaatagggaagggtgaagactgtggcaaactgttgaatccatgcccttgccccatcttaggggccaccaagctctactagcaggctgtcgcatggggctaagackcaagattgacagaaattcccatttttttagtagaaaccagaagggttgatttttacatgaaatctcctctggttaatttttttttaatttgacgactcaatgttaaaacttttgt

SEQ ID NO: 899569 - DNA, 442 bp, Homo sapiens
ggaatagatctctgcaatgatcggtggatttgacaatgcgtctggaagattttagggtgagatttcctcatcccggggccacttctcagggaactgaaaagctgcctttgttttgtagacaaaacttccttcactatttcaattaaatgtgtcttagagcacgaactgcagaaaaatccctgtccagtgcaatgtgggaggcagagggagtttgtcatccttagagtccatgaatacctactaaacacctactgtgtgccaggtggtgcaggggcagcctcctagctgtggggagcttgtgtcccaacccagggaggcaaagacagcaggagaggcaggcaggcccccaggagagtgatgctagctcagccaggctgcagatgatgcccaaagagaaccaggtcaayagccaacacctctatgcaggttttttcacagattg

SEQ ID NO: 899570 - DNA, 593 bp, Homo sapiens
attgtcatgcataaaagcacatattctctgtcccttcacacagcctttcaagatagttctagagtttatttctctttatttggcattttacaaacaaaagatattacaggctgggtgtgctggctcatgcctgtaatcccagcactttgggaggtcaaggcaggtggatcactgagtcaggagttcgtgaccagcctggccaacatggcaaaaccccatctctactaaaaatacaaaaagtagccagacgtggtggcaggcgcctgtaatcccagctactcaggaggctgagacaggagaatctcttgaacccaggaggcagaggttgcggtaagttgagatggtgccattgcactccagcctggacgacagagtgagactctgtctctaaataaataaataaataaataaataaaagatgttacagtggtaagtttgaaaatttcactgacgacttttcttcttcsccaacaaataaaccccttcctttcaattagacaacttcaattacaagaaagaagggacattttcactgtgacccttttgaaactcatgctcccaggaccagccactccccttagcctctgacttta

SEQ ID NO: 899571 - DNA, 583 bp, Homo sapiens
gaccagccacagcaagaccctgtttctacaaaaaaaaattaaaatattagctgagcatagtggcgtatacctgtagtctcagcacactgggaggctgagatgggtggatcacttgagcccaagagttcaaggctgcaatgagctatgattgcaccactgcactccagcctgggcaacagtgtaagagaccctgtctcaaaaaagtatagttttataaatactataatatttacaatattatagtaatactgtaataatataatcggagaataattccatgacctctggtagacaaacatctcttagagaaaatacaaaaggcactcactttacaagaaaaaatgattaacaaattgaacctcgtgaaagttaagaatttctactcatcaaaaattgctgttaagaaaatgggaagacaagccacagactggggaaaaatattcacaatttgtgtatctgacaaagcacttgtatccaaaatacataaagaacttaaataaatcaaaaataaaagatttgagcagacttttccagaaaagatrtttaaatggccaaaaagcacatgaaaggtgctcaacatcat

SEQ ID NO: 899572 - DNA, 674 bp, Homo sapiens
ttgtttatgtgttcaaaccagactcaggtcaccccaaatcttgtaggacatccatctgcttttttccatctaagccctcaaggcagttgacctggaaactaaccttggtcccaggccaggaaagtggggggttttaaaccaacatccttatctccttggggttctgagaccgaagtaactgacttagtaacagttggagagtctgtagaaaaattcagtctcaggctttttagccaagttataagaagccttgggtttctacattggctttctttgggttgccaaagtagcttctttgcattgggaagaaatcattttttatacagatacaggttgggtgttattggttaacatagaaattgtgctgctttggacattccaaagcctggatctagcaatggccatatttacaggccactctaggagtccagcaatcacactgttagggtgttcacttctttccccatgtcatgtgtatgactttgccttggtagacttgaataattgagtcccaaatggctctgtcatcaggagcatccagcarttccaccaaggaagcaaagcagaatcgtgacaggtggtgtcatgatcagtgtgctcttttgtcatgtggtttcgttttggtttaagactttttttggccaatggatgggttgggataggaaggagcagtt

SEQ ID NO: 899573 - DNA, 585 bp, Homo sapiens
tcaatgtacgccaggatgacaatgggctcaaagttcagttagtaacaatgctatagcaaattattattatatatggtacatggtgcacacaagacatctgggaacacagagaatgcagcaatacctggcgtggggaaaagtcaagaaaggctttacgaagaggtaacctttgagttgcaacttaaagaacaaatagaaatatgccaggcaaagatggggaagagaaagctacatttcaggaaaggaacacgggaagaaaggaaagcacaaaggaagaaaggggcattccacactaaggggcaagcctgaatactggccccatttttattttcaagcctgtcagacctgccagtccttcctggctcccttgagcctcttccaaatttaggcaaccagtccaagcacatcatgtccctctgggtcacatcccattaaaacaaggctccaaatgrggtcccactaataaaaccccataaccctgctaatcaaaactgcttattttacaagccccagcaacccacaatatatgggaatagtgtttgctgtttcctggaaaagaccacgcactgctgctgcagatagcca

SEQ ID NO: 899574 - DNA, 618 bp, Homo sapiens
ctaaagcttagaaaaaatggtaaaagacttgttaaagctatgttcaaaagaaagtgatccaggaagtgatagaaacagttttgtgtgatgatggaaggttacacratgacaaagagaaggcagaggtattcaacttttatcttgctttttatatcttccacaaaggaaaatgatcttcaaactgcaaagggtaaggcaaacatggtttaagataaaactgaaaccctatatgggaaaaggaatagttaaaaagtagtcagtcacttaaacatacacatcaggtactgtcccaggacaatgacaataacttaacaacaatggctagtgtttactgagttcttaagagatgccaggcattgtgctaaatacttaataagcattaactaatttagtccccacaacaatattatgtagtatgtattatgatttttcccattttatggatgaataactaaaatattaagaaacatgttcaaattcccagttagtaagtatagagctaggtcctgaattcagtgtgtctagcacataagtcttgcttttatagatacttaaataacctgaagatttgttcaagaatcattatcaataatccttaagaaattatgcagaataaaa

SEQ ID NO: 899575 - DNA, 589 bp, Homo sapiens
gccttcgggctgaagggaaacaacacaagatgaaaacccagatctacaagaagaaataagatgtactgaaaatggaaaataaatgacyaaatataaaaggttatgttatcattctttctataatttacagaagataacactgtttattaagacaaaaatgattataaggtgaggtttatagtatacatagaagtaaaagataggacaacaatcatactaaagacaaggtggacagtcatatgaaattatcctcctgcgaagttattacacttctgaagtgggaagtgagaatcaagaaacaggaaataaaaattgggaggtgatgggtaggaagtgagaaacaggaagtatgcaatgtcataccttacgtgtgaagagatacaatgttgactctaaatagactaacataattaagaatgcattttttagccctagagcaaccactaaaaagatactaagtagaggtataagtaagaagacaacagaggaaataaaatagaaaatatgaaatatattttatttaccccaaagaaggcgggaaagaagaaacagagaagcaatgaaaatcagaaatcacaaatgaaatcca

SEQ ID NO: 899576 - DNA, 589 bp, Homo sapiens
gccttcgggctgaagggaaacaacacaagatgaaaacccagatctacaagaagaaataagatgtactgaaaatggaaaataaatgactaaatataaaaggttatgttatcattctttytataatttacagaagataacactgtttattaagacaaaaatgattataaggtgaggtttatagtatacatagaagtaaaagataggacaacaatcatactaaagacaaggtggacagtcatatgaaattatcctcctgcgaagttattacacttctgaagtgggaagtgagaatcaagaaacaggaaataaaaattgggaggtgatgggtaggaagtgagaaacaggaagtatgcaatgtcataccttacgtgtgaagagatacaatgttgactctaaatagactaacataattaagaatgcattttttagccctagagcaaccactaaaaagatactaagtagaggtataagtaagaagacaacagaggaaataaaatagaaaatatgaaatatattttatttaccccaaagaaggcgggaaagaagaaacagagaagcaatgaaaatcagaaatcacaaatgaaatcca

SEQ ID NO: 899577 - DNA, 589 bp, Homo sapiens
gccttcgggctgaagggaaacaacacaagatgaaaacccagatctacaagaagaaataagatgtactgaaaatggaaaataaatgactaaatataaaaggttatgttatcattctttctataatttacagaagataacactgtttattaagacaaaaatgattataaggtgaggtttatagtatacatagaagtaaaagataggacaacaatcatactaaagacaaggtggacagtcatatgaaattatcctcctgcgaagttattacacttctgaagtgggaagtgagaatcaagaaacaggaaataaaaattgggaggtgatgggtaggaagtgagaaacaggaagtatgcaatgtcataccttacgtgtgaagagatacaatgttgactctaaatagactaacataattaagaatgcattttttagccctagagcaaccactaaaaagatactaagtagaggtataagtaagaagacaacagaggaaataaaatagamaatatgaaatatattttatttaccccaaagaaggcgggaaagaagaaacagagaagcaatgaaaatcagaaatcacaaatgaaatcca

SEQ ID NO: 899578 - DNA, 650 bp, Homo sapiens
agcgcactatgtggaatgtattgtgcaaatgttacaaacatacattggctgtgtaaaacactctgccacatgttcagatcacagtttgtgacccctatataaaaaactgatcaatgatttattatctagtgtcaattccctttcttccattttttcatccctatatctttctctacaactattaggagctcaaaagataagaatttcaaagaaagagagcaagaagtcaagagagtacatctaggaggtacaacaccacaggcccagaacagagaaggacagagaaacttgtactgtcccagtggggcctgtagaaatggctttaccatctaatatgaaaacaaagtcttggccaaacaaaaatgaccttctcaataagaaatacagcaaggacccttgattgatactccaaagaattccttccgggtgaggtgatcaatgaggaaatcagacataacgatcctaaggtgtcactcaggaaaaatcttgacagaaccaaagaaaagcagccctgtgtcaaggagctgtccagcattcagccttcatctgaacttttggagaccactcagctcatttctgtcttcatttactcrctgtcttacatgtcatccatctcttgttggactaagcacttcagtctgttccctggg

SEQ ID NO: 899579 - DNA, 633 bp, Homo sapiens
ttaaaaaatccatttaaattctaatttgagtaatatagtctgccacttaaaattactcaaagtgccatgacagggcaagactccatctcaaaaaaaaaaaattactcacagtgccttgtaaattataacactttatataaacataaggtccatcacaatgttactgtttattttcctgcaaatctcattagattgcttagccatttcgtcttgaaattttgcttggtgttaatgaacagggtgcaagttctttaatgtttttgagaatgctttatgaaaaaaaggtggttggattagacgatttctatggtgaccttctgcccaaacctgccacggctgtatgagtctaagtgacaaccgtgctgtgattctcctgatggaaatatttcaggactgtgagtagtcgctgtgtggacaattgcataaagtccttcacaccacttcatataagagggcctagaaaaattcccatgactttgtgcactagctcactcgttcacatttcacttcacataatgcccttctccttctcacctccctgcatctctctgaccrcattcaccttgcctcccctcttctagtaccagtaagtaagctttcctaggcaaaggcagaatctcaccacagcgaaat

SEQ ID NO: 899580 - DNA, 639 bp, Homo sapiens
cacttacatacttaagaaagcagacctgccattggccgtggtgatcagggtccggaggctaggggctgagaaaggcctggtgaaccaggaatataccagatttttcccacaggtatcagggctgaggggaaaaaaaaaaggaaaagaaaaaatccctgattgaattgaaacccaggtgaaccatgtaagcttggaaatagctcttttacaaactcaaaggggaagaaagggaaactgacacagcttgttttgccgctgtgcctgttgtccactccctttctttgtccatgcaggctgcgctgcaggtgggggctgggagggagcaggtaaaagggcccgttcaagagtgcctagtcctcccggtttgagactctgcacaaaggagggacaataaatacaggcttcaaaggagaaaaaaaaaaagtatgtagcacgatccacctcctccaaggaacctttgatagacagttcttacctgctgctttctgttcagcttctacctcccaaaaccacaattcatctaagaaatatcttttwaaaattgttttttcttaaggcctattaaaataggcataactgttaactagatgaaatgcaggatcatgtctaacctaggctaggagaagtggccactgaata

SEQ ID NO: 899581 - DNA, 614 bp, Homo sapiens
tttatttatttatattttattttaagttccaggatacatgtgcagaatgtgtaggcttgctrcactggggaaaaaaaaaaaaaaaacactgctttttaaaaacaataatatcaacactgggcccaggaaaaccacctcaaaaacaccattttggcttttcttatgttctcctgaatccccatacacatcacacacacacacactcgcacagacacacacacaaatactcactttccaaattttggttgacatctgattgctgattactatgagtgtgatcttccagacaactgtgtctgcatcaagtacccctaggggtcattcccatttgattctgtgttaatatttttataatttttgtatttttataatattttcacaaaatttcataatttttccatgaggccaaatcagaagcttcttcaaagtaaagattaaatatacctttttttcttaaaatgtctgcaccttcaggctttcacaggatattaaatcagtgtgacagcacttttaggagcgtaggtaagctactagaagattagcacaatttaattctaagaacagctggtagttgataaatattaaacagtcagaagacaatttagggctagaag

SEQ ID NO: 899582 - DNA, 627 bp, Homo sapiens
aaaaatcccattgcattccatcttttcatcagggcagcaataaatatcatgactaaaacacatctgtcatagagtgtgtgaaatacatctgagatgagacccagactgctggtcaacacatcatagaatgattctacagaggcaaaaagcgttccgtcctctcttagagggagatgaaaagacgttggtagacaaaatgaagacctagtactcactatcactcctccagacaggatgtgttctgcactttcctggtatgccattttgttcatagcctgaagtcagactgttgttggatgtattcagaaatttccaaagcactaataaaaacaggaaaggatcaatcatggggacatttggaaacttccattttgactgaacaaatggaatccacgtagatatccaggattacgacaaagaagataagcattgtggaagccataaagggagaaatccaagatttatctttaacctcagttgtcacaggaaagacaatgacccatgggcacaagagaagcaggaaataagatgggataaagcttgaagacttttggctccactgatgtctatagagagctttctgggagctgtatgaaaaccarctttacaccacaaagccaagactag

SEQ ID NO: 899583 - DNA, 557 bp, Homo sapiens
acccatcttaactagaatatttccattcaacattgtggccacaaattttccaatcttttgaaatgaggtcaaagctcttcatttgaatttgcttattagtgtttacctatattgaaaaaaaactacatcattaattgcatccttcagttctggtccttataagtggaaagagagctttagagatacttggaaagatcagaatgtagaatcatagatatttacactttgttctcaatattttacagctgaatggtaaaaatttaatttgacagcaaaaagttttgtgagagctcagtttaatttttttttttgacgaagtcttactcattctgttgcccaggctggagtgcagtggcatgatcttggctcactgcaggctccacctgctgggtttaagtgattctcccgcctcagcctcccgagtagctaggattacaggtgcccaccaccrtgcccagctaatttttgtatttttagtagagacagggtttcaccatgttggccaggctgatctcaaactcctgacctcaagtgattggcctgcctcagccttccaa

SEQ ID NO: 899584 - DNA, 593 bp, Homo sapiens
atgttctcacattttaaaaccaatcataccttccccacagtcccccaaattcttaactcatttcagcataaacttaaaagtccatagtccaaagtctcatttaagacaaggtgagttccttccacctaggagcctgtaaaatcaaaagcaacttagttacttcccagatacaatgggggtacaggtatcgggtaaatacacccattccaaatgtgacagactggccaagatggaggggctacaggccccatgcaagttagaaatccagcagggcagccaaatcttaaagctctgaaattatctccatggacaccatttctcacatccaagttatgctgcaagaggtgggttcccatggtcttgggcagctctgcctctgtgtctttgtggctgctttcactcctggtgttgagtgtctatggctcttccaggtgcacagtgtaagctgttggtggatctaccattctggggtctggaggacgctggccctctcctcacagccccactaggmggtgcctcagtggggactctgtgtggggtttcaagcccacatttcccttcttcattgccctagcaaaggttctccatgaggg

SEQ ID NO: 899585 - DNA, 444 bp, Homo sapiens
ggggaatagatctctgcaatgatcggtggatttgacaatgcgtctggaagattttagggtgagatttcctcatcccggggccacttctcagggaactgaaaagctgcctttgttttgtagacaaaacttccttcactatttcaattaaatgtgtcttagagcacgaactgcagaaaaatccctgtccagtgcaatgtgggaggcagagggagtttgtcatccttagagtccatgaatacctactaaacacctactgtgtgccaggtggtgcaggggcagcctcctagctgtggggagcttgtgtcccaacccagggaggcaaagacagcaggagaggcaggcaggcccccaggagagtgatgctagctcagccaggctgcagatgatgcccaaagagaaccaggtcaayagccaacacctctatgcaggttttttcacagattg

SEQ ID NO: 899586 - DNA, 596 bp, Homo sapiens
gaatatattttctttttcactgtaggtctcaatgcgctcccaaatatcccatcccagattctgaaaaaacagtgtttccaaacagctcaatcaaaagaaagctttaactctgtgagatgaatgcacaaaccacaaagctgtttctcagatatctttctaggtctatctgaagacatttaattattcaccataggcctgaatatattcttaaatatctctccacagattctacaaaaacactgtttccaaacttctgaatcaaaagaaagttttaactgtgtgagatgaatgtgcacatcacaaagcaccttctcagaaacttctttttagttttttgtgaagatatttcctttttcaccataggcctcgatgtgctcccaaatatccctttgcagattcaacaaaaacagtgtttccaagatgctcaatcaaaaaaataatttatctttgtgggatgaatgcacacatcacaaagcagtttctccaaaagcttctttctggttttcattcgaagatatttcatttttcaccatagrcctcaatgcactccaaaacatccctttagggattatataaaatcggtgtttccaaactgg

SEQ ID NO: 899587 - DNA, 635 bp, Homo sapiens
gagcctgggtgctgccgtccaccttataaagataatatcagtgccaatcttaccaggctatttacatatagtacttaacaccatggctggcaaagatgacagtcagcaagtggtagttaccaatggtggatcrcaacaacgctgacttgattaattgaggtctagctttgtttctgcatctctgttcgatagtttcctcatctggtccacactcagcttccctaggaaaatttaaggtctagcatcttctaaaattctctagcacctcatttgcataaaccaagtttaagaattatttgggcaatgggggaagacacaaaacgcttccttatatttctaccttagtagaactgatgatgacaaacaggaaaacaaccttacttatttattaatgcagaacaaataatcaaaacattgaaaaccaaccttacaggaagtttacaaatgtagaaaagaaataaagagtactctggaaacataggaggtgatgtccttgttcctttgtctgaaacaaaaatgtgctgcctgtctgcaattccctattagcaaaccatgtggagagagatgaccaggtgagttctgactattgacttcctcccattccattgaaaagaaaaacatttaggtttttttgt

SEQ ID NO: 899588 - DNA, 636 bp, Homo sapiens
aaattagaagagccagtcttcaacatcgtcctgggctccataatccccttgcatccatgttggaagttcccactgggagcacacggggaagggtgccctgaatgtgcctttctgccacctgctctggggactgtccccattgccagggaactttgggttctttacccctccataggcaaaggagaaccttacacagaaatcagccttctgtcctcacacagtagcctcatcacagggcttccaggggccctcaggcaggtgggtgctgaagtttccccctagatgatcagcagcctgcttccacccgaaatccagtccccctggctgcctgtgacaagagagcccttcatgctgagtgctgctctcatcgcacctttttctctccgtgtttagacagagagagtggattcatgtttgattaaacagtgtgggcccaggaaaatcaattagcaagcaaagtgatccacagtaatcaggatcagtgccatctactaagctcccacgatgtgcgaggtcccatataagggcctcactgtatcatctcccttmatcttaatgagatgagatagatagtattatctttctcactttaccaatgagtgagagggcagagagaggttaatgcagaattgctaa

SEQ ID NO: 899589 - DNA, 636 bp, Homo sapiens
aaattagaagagccagtcttcaacatcgtcctgggctccataatccccttgcatccatgttggaagttcccactgggagcacacggggaagggtgccctgaatgtgcctttctgccacctgctctggggactgtccccattgccagggaactttgggttctttacccctccataggcaaaggagaaccttacacagaaatcagccttctgtcctcacacagtagcctcatcacagggcttccaggggccctcaggcaggtgggtgctgaagtttccccctagatgatcagcagcctgcttccacccgaaatccagtccccctggctgcctgtgacaagagagcccttcatgctgagtgctgctctcatcgcacctttttctctccgtgtttagacagagagagtggattcatgtttgattaaacagtgtgggcccaggaaaatcaattagcaagcaaagtgatccacagtaatcaggatcagtgccatctactaagctcccacgatgtgcgaggtcccatataagggcctcactgtatcatctcccttaatcttaatgagatgagatagataktattatctttctcactttaccaatgagtgagagggcagagagaggttaatgcagaattgctaa

SEQ ID NO: 899590 - DNA, 637 bp, Homo sapiens
tcatggcttttattaatcatagagcttcaagaaaacagattagaaaggctgcttagctccataagctgcaaatgttagaacagaggtaagatgagaaagaagtttccagaatgtgccaaaggtawatatgcttcttcaacgttgtctggattttcccaagaagaaaaaggaggagaatggtgatgagaagaagatggagaaggagaaaatcctttaagatatgacttacagaggcattataaactgaaaggatcagcgtctagaatgtgtgcgtgtgtgcgtgaacacagaaaaccataaacaaataagaaaaagacaaacacctaatagaaagacaggtcaaggctaagacttcttagagaaaagccaatgatcaataaataaaagctgctcgatttcaccagtggtccatgctgtgtgaactaaaacagcattctatggctccaaattggcaaaacttttgaatctgacagtataaaggattgggaggatgtgagaactgggtaggggtgcacacaactcacaagcccttaggacagcaagttggcaacctctagcacagctataaacgtgccaatcttctgctgttccagcatttccacactaggtgtgtactctcagaaaacgacagtcaatg

SEQ ID NO: 899591 - DNA, 551 bp, Homo sapiens
aataagagaaatattgcagtgtcttaagaagatagttttaagccatgagagttcgtgtctagtgaaattaaccctttgagtagttcagagaaatacagctacccacggaatcattgagtcctaagaaggatcgtcactatcttatggctcacatatgctcacactcacacaagcatgaacacacacaggatttttttgcagtaacaaaaatgaatgcatacatcgtaaactctattttcaaaggtatatgacaaagagcataaattatattataagtaggtcttatgtaaaaaaaaaaaaaaagagtactgtgatcagacgaactggtgcaacataccaattaacacaaacaagatagggtgcctgcctccagagtagcacactccacaaatggactgaagagtttggcagaaatgttttkcttgagtactttttttccccagcaggaacagaaggttaagctctcatactcctcagtcattagaatctgattaccactgtttgttacatggtccctttcttgttttgtatattgatcccactttatcctc

SEQ ID NO: 899592 - DNA, 670 bp, Homo sapiens
tgctgaggccctgattctcactgaggcggttgcatcaatataatgattctgatcctcacagcatctcaggggaggctccctgccctccagaggttggcctctgatggccatttcacagatgaagagactgaggatccgagagaataagcaacctaactgaggacacagaaagggagaaaaatggccaagtggccagggtgtggaagccaggcctggggattctctgccatgaaacattggctgtcatgactgagctcctagcctgtgaggacttgcatgtatgcacggcctggttgtgcatagaagggagagaaaggccggccgttagtctttctggacttctcaggctttggcctcctccgagaccctggggggctgccctttctgccttgtattcccccaaagtctctgcttcctaacaacagagtttgccttcttgcttaagacccagtgagcaggcttctgttcttgcagccaaaggagctttggtcccagcagtggtggtggctggggcagcgcagcctcctgcatgggcttggtggagtcccggggcccctgtgtgcaaggtccatgctcctccagctyccagaggcccagcaggggccagggctgggtcttgctgaccctgaggttaaagctaccactatcgctagggagagctctctgtggg

SEQ ID NO: 899593 - DNA, 662 bp, Homo sapiens
taatttttcctgatttgctgagrtatctccattcatccttgctcacctactaatacctagaggatccctgcagccacctagagctgagcccatcttcataattctctcttgtggcatcagactcttgtctgtgatttcattttatgaatacgaataaagaacaaggctggaagagaaagatttaatagcatattttgctgaaaatgtgagcaattaaaatgggctgacccgaatgtcaaagatttagaatgtggattgctgtggagagaagttctacctaataagtgcagttgacaaaatgaggaatttttttaggacaaagggtaagtttaggaaaaacaacatctgttgtgagtatctgaaaataatgagcaaaggaagagagaaaaggacaaatctacatcaagtcctactaaaccgagatgtgcatctgacccgtgcatgtggggaaatcaataaaattagagcaaagtcatttctcaattttcatagatgagtgtattctttcaaaaattattaggtcctgtaagaaaatcaattttctgcatttttctacaggaaattatacttgattcaatgtaaaaaggaaactacaggaagaaaatgaatatgacagtattgagatcatgtgagaaaaagagaaggaaatgcgtgtgtggggt

SEQ ID NO: 899594 - DNA, 594 bp, Homo sapiens
ggggcggtaaaaatgttctggacctagatagcagtgacgtggcacaatctcgtgaatatactaaaaaccactggattgcatacttaaaaatggtaaatkttatggtttgtgaattatatttcaattaaaattaataaatgtatgaaaacaatgaatcacaaacttaaatgtaagatgtacaactatgaaacttttttttttttgagacggagttttgctctttctgcccaggctggagtgcaatggcatggtcttggcccactgcaacttctgcctcccaggttcaagtgattctcctgcctcagcctcccaagtagctgggattacaggtgcacgccaccacgtccggctaatttttgtattattagtagagacggggtttggccatgttggccaggctggtgtcgaactactgacctcatgtgatccgcccacctcggccttcaaaagtgctgggataatagatgtgagccaccgcgcccggccaccacttaaaaaaaaaaaaaataggctatagcctttgggatctggggatgttcaacatcatcagccattagaaaaattacaatgagatatcactacacatctctcaga

SEQ ID NO: 899595 - DNA, 594 bp, Homo sapiens
ggggcggtaaaaatgttctggacctagatagcagtgacgtggcacaatctcgtgaatatactaaaaaccactggattgcatacttaaaaatggtaaattttatggtttgtgaattatatttcaattaaaattaataaatgtatgaaaacaatgaatcacaaacttaaatgtaagatgtacaactatgaaacttttttttttttgagacggagttttgctctttctgcccaggctggagtgcaatggcatggtcttggcccactgcaacttctgcctcccaggttcaagtgattctcctgcctcagcctcccaagtagctgggattacaggtgcacgccaccacgtccggctaatttttgtattattagtagagacggggtttggccatgttggccaggctggtgtcgaactactgacctcatgtgatccgcccacctcggccttcaaaagtgctgggataatagatgtgagccacygcgcccggccaccacttaaaaaaaaaaaaaataggctatagcctttgggatctggggatgttcaacatcatcagccattagaaaaattacaatgagatatcactacacatctctcaga

SEQ ID NO: 899596 - DNA, 718 bp, Homo sapiens
ataaacagaatatacattcttctcagcacatcacacttattctaaaattgaccgcatagttggaagtaaagcactcctcagcaaatgtaaaagaacagaaatcacaacaaactgcctatcagatcacagtgcaatcaaattagacctcaggattaagaaattcactcaaaaccgcacaactacatggaatctgaacaacttgctcctgaatgactcctgggtaaacaacgaaatgaatgcagaaataaagatgttctttgaaaccaatgagaacaaagaaacaatgtaccagaatctctgtgacatatttaaaacagtgtgtagatggaaatttatgcactaaatgcccacaaaagaaagcaggaaagatctaaaattgacaccctagcatcacaattaaaagaactagagaagcaagagcaaacaattcaaaagctagcagaaggcaagaaataactaagatcagagcagaacagaaggagatagacatacaaaaaacccttcaaaaaatcaatgaatccaggagctgtttttctgaaaagatcaacaaaattggtagaccactaacaagactaataaagaggaaaagagagaagaatcaaatagatgcaataaaaaatgataaaggggttatcaccrctgatcccacagaaatacaatctaccatcagagaatactagaaacacctcacacaaataaactagaaaatctagaagaa

SEQ ID NO: 899597 - DNA, 605 bp, Homo sapiens
acctctctcttggtgcttcggtgaggcgggcagcttctcctcatcttccgacaccctcagctccagctctgcttccccctcagctgggcacggcaaacgcagctctctgtcagcatccgacgggctgtcagaccagtgctgatctggcagagggaaggggcagaagtgggtgcacaccctaagtgaggccaactccttttccacctgagagcagccgcgccacttgctcatttgcaacacagctgctcaggtgcaggcctggaggcccttcttacgcagggacagacctgcctaccagaccacccccgctcctgaggggcccggccaagagcaccctcctgcctttgcaacgcggggccgcatcaaagcctgtggggctctgtttcttttaaaatacagcaacagtcacacatgatgggctgcgacagacaaagacagggtgtgcctgtggagggcaggcctggcctcacgggcccacttctatgcacctcctcctctcagtagccctgactgccaccccaactccacagctgargcctgcgccccctcgcaagcttgggttcttctcattcttcccagcctcgtccctgaccccctcagccccc

SEQ ID NO: 899598 - DNA, 578 bp, Homo sapiens
catgtaatactcattaagccactttycttgtgtgagattcatttttttatcagcaagatgaaggtgctatctagataatctctgaattccttcaggttctaaaatcttacagtcctttttcatttgccagtcggtttcaggttctgagatgaagaatgtgttggagacatgccgtgactacatgatattgccagctgacctcaggagacatctttcctgttctttgtcctgtgatcttgagtgaatagctagaactttctgatctcttgacaaacagatagtgaggggggttttcacgggtgtgtctatggtgcaataaatagattccaaatttttctacttgtggcctccatgggagaataggcggagtcaagaggacacgaggcactttctaaattcaaacctcctggctctgctgaaccactaagtgaattatcatttatgatcttagacaattgtttataatctttgaaatatcatgaaaaatggattaaatattggatatggccaaatgttttagtttccaaaacaggagagaaagatgactttgggatactatagattaaatggaatattct

SEQ ID NO: 899599 - DNA, 553 bp, Homo sapiens
acctagtttattgagagtttttatcatgaggggtgttgaattttatcaaaggccttttatgcatctrttgagataatcatgtggtttttgtcattggttatgtttatgtgatggattatgtttatagatttgcatatgttgaatcagacttgcatcccagggaagaagccgacttgatcgtggtggataagctttttaatgtactgctggattcagtttgccagtattttactgaggattttcacattgatgttcatcagggatattggcctgaaattttctttttttaatgtgtctttttcaggttttggtattaggatgatgctggcctcgtaaaatgagttagggaggagtccctctttttccattgtttggaatagtttcagaaggaatggtatgagctcctctttgtacctctggtagaattcagctgtgaatccgtctggtcctgggctttttttgattggtaggctattaattactgcctcaatttcagaacttgttattggcctattcagggatttgacttctccctggtttagtctttggaggg

SEQ ID NO: 899600 - DNA, 553 bp, Homo sapiens
acctagtttattgagagtttttatcatgaggggtgttgaattttatcaaaggccttttatgcatctgttgagataatcatgtggtttttgtcattggttatgtttatgtgatggattaygtttatagatttgcatatgttgaatcagacttgcatcccagggaagaagccgacttgatcgtggtggataagctttttaatgtactgctggattcagtttgccagtattttactgaggattttcacattgatgttcatcagggatattggcctgaaattttctttttttaatgtgtctttttcaggttttggtattaggatgatgctggcctcgtaaaatgagttagggaggagtccctctttttccattgtttggaatagtttcagaaggaatggtatgagctcctctttgtacctctggtagaattcagctgtgaatccgtctggtcctgggctttttttgattggtaggctattaattactgcctcaatttcagaacttgttattggcctattcagggatttgacttctccctggtttagtctttggaggg

SEQ ID NO: 899601 - DNA, 599 bp, Homo sapiens
tttttaccttgcttcatccttgcatctacctactcagcatcctacatcttgatttctatggctctgcttctagacctaggataaaccctgatcttagttactcccttgctcaggaatagatttcttatattcttgatggtggacttgggtgagatggtggatccaggattataattaaaaagagtagggaaggaacctagggcctttgtaaaaagaaatcagatgtcttagcatctggcgaattggaaactgctgccccagaatgcagaggatgatttgctcatgaactatactgtgtctggtgtaggggttatattttagaaagttctagcaggagggtaagtttgttttgaatagttttgttgaataacaatcccctcatgtataagaaagcctttttctgtaacagagcatgcagcctggagcaattaggaaaaggagaacccacctagtcactagagtaactgaatcaattttggagatwccctggggtgataggtggcagtacctcaacatgcccactatgtttgcaacactatgggttgcaaaaagaaagagaaaaagcttaaatatcaccctcaatgaacaaatgaaattgt

SEQ ID NO: 899602 - DNA, 599 bp, Homo sapiens
tttttaccttgcttcatccttgcatctacctactcagcatcctacatcttgatttctatggctctgcttctagacctaggataaaccctgatcttagttactcccttgctcaggaatagatttcttatattcttgatggtggacttgggtgagatggtggatccaggattataattaaaaagagtagggaaggaacctagggcctttgtaaaaagaaatcagatgtcttagcatctggcgaattggaaactgctgccccagaatgcagaggatgatttgctcatgaactatactgtgtctggtgtaggggttatattttagaaagttctagcaggagggtaagtttgttttgaatagttttgttgaataacaatcccctcatgtataagaaagcctttttctgtaacagagcatgcagcctggagcaattaggaaaaggagaacccacctagtcactagagtaactgaatcaattttggagattccctggggtgataggtggcagtacctcaacatgcccactatgtttgcaacactatgggytgcaaaaagaaagagaaaaagcttaaatatcaccctcaatgaacaaatgaaattgt

SEQ ID NO: 899603 - DNA, 500 bp, Homo sapiens
taatctaaccttaattacctcccaaaaggcccttctccaaatatcatcacactgggggtgagggctgacacatgtaacttggggcaagaggacacaagcatttgatctctaacactggcctgataggattcttgctaaagacaggccaaggatttagacaccaagggtgagggatgaagaacttgatcagatgtcaagcgtgatcagtagggggacgacttagcaggactctttgctaagaatgggtggggcaggtacaagacaagaccttggggttgagggctggttgaaaagagagctcagaggagcctgatcagtgtttgttcaaggagagaatctttgttgtagtccagattcttactattatgtgcaaaaaggacttctctccttcactgtccctggcctggagtgaaagaactgtccactctctgatacaggaggcatctctyttttactcactcaccttcttctctccctgacttcgccctctttcttttccc

SEQ ID NO: 899604 - DNA, 599 bp, Homo sapiens
tatatttcacatttcgaggaacttccaaactgttttccaaagtggctgcatcattttacgttcccattaacaatgaagaagcgatctaatttctccatgtcacctataacggttgttttatgtgtctttttgattataaccatcgtagtgggcgtgaagtggttacatacaaatgttttcaatcaacacaattccaattccaagcctctttccctatgcattaggataaaattcaaattttgtaattcttgggggcccatcttctacaggcttgtatcaacatggaaagaatcagaggaggagatgaccaggaaagaacagtaaagaaatgttagggtgggctagacaggaagtctcaggaattaatttttgattccaggtcatcatgccccagatcaatttgcttaataatcaaattgctgaacttagctatttaccaaaaagtatgtttatttcaactcttacttacagcagtttttattgagtgggattgttttaacagatttggaagattctataaaactaattagttgatggttttttgctgtcttyatagcagtattttaagtcacgttctgtaagtaaattgctaatggtca

SEQ ID NO: 899605 - DNA, 547 bp, Homo sapiens
aggcaaaggggacctgacatttgacggggaaggaaggtcttacagctgatggaaggccacccctccctgtccatacctccttttccccccarttccacccctccacccagagctgtcattagtatcttccactagaagctccatgacagcaggggcctcatcttgttcatggacatgtccctgtacacagaacagtgcctgatacatagcagacacgcacatttggttaatgaatagactctagaggttaatagtttagaaaaactggtcaatgaaaatggaacttctcagctggaaaagaatgctagaatcagcatggaggtcaagagggatagagagagaatgttacaccttgtagaaaaatggaattagctgattttggcaaggaagaatttgtgcataagcagaaaactctccattcacttcagccagtggtatcttacctacccaggggacatacagtgctttcagagactcatcctatttcctggaaggggaagaacacaatataaaacaagcaagtcatcaatatggcttatggtaatag

SEQ ID NO: 899606 - DNA, 530 bp, Homo sapiens
tccctctttctggtgctttgggatatagtttyttgatggaataagtggggatgggagaggcatccaagtcactccccttcttcagcttggccctgctatgattccataattagcccacaagagaccatggaagagccagaaggatttgcacatgcagtgaccaattctgtcccagtagcatctaggactgtgaggcagaccctgttttttttggcctgctttaaaggcaaccaagaatattgtttttttccaccaatcaaaaccctgattttttcatggtgaaagaaagattgcatagtctcagtaagcacaggtttctatcccaggccagaggatgaatcctagttggtcaaaacaaatcaggataaaataatcttcttccccttgaccactgatggtttaagattgggcaagtgacaatgttctggttaatgagattggagactaagactgatagggagtattttccttcttatataagaagacaaaacctcaagaggcaaagactttttccacttgactattccctc

SEQ ID NO: 899607 - DNA, 664 bp, Homo sapiens
atacaccctttatttccagaaacatcatcttttgacagaaacattaaaccaatggccaagggacagtcagtattgcctaaagtcattaytggtgatgccggcatttccaatgtaaatgtgattatgtttctttttgtctaggtctctttcatctttgaatttctctcccttgccctttttctttggccagtgtttgcatattgtggcagttaagagtaaagaggtggcttgttcctatattatagttgaagtcattcagcattggcaaacatgagtagtaggtactaaaagttagttgtgggtgtaaaatgctctgaagagttacaagtgccaaggaagatagaattggagatgttactcttttaaagaagacagttttgtacttgaagccaattcctcattacatttttaaaataagctttttattttagaattgctttagatttacagaaaaattgggaagacagtacagagttcccaaatatctcacactcgattttccctactattaaaatcttacattaatatggtatatttatcacaattaatgaaccaataatggtatatttttattaaataaaattcatactttattcatgtttcatattttattcatttttttagttttaatattaactaaaggttctttttcggttccaggatg

SEQ ID NO: 899608 - DNA, 587 bp, Homo sapiens
taaataaagtttgattggaacaygtgctcattcatttacttattttctatggcccctttcacactagagtgacagagttgagtgattgtgagagactctctaggccacaaagtctaaaatattcacaacagagttcttcatataaattgttttctgactcctcctgtatagaaatcttataataggatactaaatgtcctcatttgtatcttctgatcacagatatagatataaagttagatgtacacaaatatgtgtatacataatgtatacagataagtatgtatatgtgtgatacttatgatccttatgtttgataaaaaatccttcttgatccagaatagatattattatctctatcaaattttactttaaggatctaaatactacttacaagtcttgacaaataggttataattttcaaaatacaaagtccatgtttcagtgtagtctcagatattttttcatcaattttcaaaatactgattatatggaatctttaaaatgtgttgtgaataggtttttgattctgtttaaaatatctagtgattaaaaattttactgttattaaatttaagctaatttag

SEQ ID NO: 899609 - DNA, 619 bp, Homo sapiens
aataaatgttaagtgttctcatcacacaaaaaaaatgtaaactaatgcttatgttaattagttttattcagccattccccagtgtacacatatttcaaaacatcatgttgcacatgataaatacatccaatttttatttgtcatttaaaataaacaaatacaaggaaacaaaagtaagaactactactaacttttcatcagaaataattctaaccagaagacaatggaaaaacctcatttaagtgctgaaagaaaaataagtacaattaacttagaattccatatcctatgaaaatattctttacaaaatgaaagtactataggttttagacaaaatctgagagaatttgtgctaacagacctatacttcaagaaatgttaaaggagcccagacatggtaatatatggaaaaatttaaaagaatttgatttcttggttttaaacattttttaaaaagatagttgactgcataaagtaaaaatagcaaccatatattaggaagcttatagcatatrtagaaataaaatttatggcaacaagagcacaaaggatgatagaagagaaatggaaagttttatattatacatgatgcaatatttcaatgtaggcaatgatcagt

SEQ ID NO: 899610 - DNA, 473 bp, Homo sapiens
cccaccattgtcactcttacaagcagatagaactctaaatgtgcrtgaattcctcaatgcaaaaaacaaagtaatgctctgagtcttcattcttttctgatgctttcccacaaaagacaattatattttcagttaagaccttactttacacaaggagagtggatgttgtgttctcaccacaaaaatggtaatgatgtgagggaatgcatttgttaattagctagttttcaccattctaccatgtgtgtatgtgtatatacatatatatgtgtgtgtatatatacaatgtgtgtatgtgtatatacatatatatgtatgtgtgtaatatatatatccatatctatctatctatctatctatctatctatctatagagagagagagggaaggagggagggagagagagacagagagagagagagagaggcagtcctcattttattgtgctttgcagatactgagttttttacaaa

SEQ ID NO: 899611 - DNA, 578 bp, Homo sapiens
gacgactgaccatagaggaaatgtgtattaaacaataatcaggaggtatgcttatctgtccaatatacaagttgactttgyaatatattgaatcttttattctcaattgtaatatattgaatcttttattctcagagcgccactttatcgttgtaatttcaaagcataatagctcagaagtttttattaagaacaagaataagaataaacagaaggactttttctctccttcataaacagtatcgcaatctgtggatgcagtgtaaacgtggctgcaaaaagagaagagacatgaaactttcaagacagctctcaataactgcatacctggagtgactattgattgtgtttccatttattctcagcttcaatcactccgtctcgcagttggacaacacctctcattcaaaataaaccttcagttgttgattgttccatatcaggtagctgccatttcctgccatttcttgatcagaatacattgctttgagtttttcctctttaaatccttgatacaaatgcataagcacagggatgacacactttggaacactatgaagcaccttccagaacttacc

SEQ ID NO: 899612 - DNA, 632 bp, Homo sapiens
atagcagcactattaaaattgctaaaggagtggaaataacccacactcataccaaatgatgaaagataaaatgttwtatatatatatatatatatatatatatatatatatacacacacacaaacacacacatactataatgtcattaagccataaaattagaattaaacattaattgatgctccaacatggatgaatttggaaacattatgctaagtgaaggaagccagacacaaagggccacatattgtatgactccatttacatgaaatcaaaataagcaaatacatagaaacataaagaagattaatgttcaccagggatcgagggaggggtgtgaagggtgactactgatggctatgggattttttagggggtgataaaaatattccggaattagtagtgatggtcacctaactttgtgaatgtaccaaaatccactaactgtatacttaacaagagtaaatgttacggtgtgtgaatgataccttaatacgtgtatatatgcatacaatttatttatttttatttattactctttcttttctaacagttagtaaaaaataacatactacaggaaaagggaattacaaaatttggaagaaaagtagaatgttccctatggtgttgga

SEQ ID NO: 899613 - DNA, 579 bp, Homo sapiens
cccagaaaccccagttaagctgtttaaagtataatccaattcaatttactkaaaataatagtaacaaaatttaaatcccttgcttctagttagcccttttcaactgcattttcagcaattaccaccaaaagaactgcattaggacaaagattctagagcgggtataatggtcaaatgccatttgaaggcaaaaacagtctaccaggaacaaaacattaaagttcccaaccttgccaaactccctgttctgcgtattctgcctctctcagttcaccttccagctgcctggaagaggcaagtggaaaatgttagttttctggagagatgagaatggaatttaggggttggtagggggtgatgggctcactcacggaccgcaaggcacaagagaagtggcgaacgtctcccaggcaaatgaggcatgaagaatgagggctggagtcaagggggagatggagcaagtataaaaaggcagaggacgcgcaggggccgcgaataggggaagggcacgacgcgcaatccctcccgctccagcccggggagaggggcgggggatgccgcgcgggtcaatttgcctag

SEQ ID NO: 899614 - DNA, 636 bp, Homo sapiens
tggggtcctcacataaactgttgaaaacctttaagccatttcctaccatatagccacataatcttttcaaaatatatatcatcactttacactttgacttaaaattctttcacttaaaattctttcactaagactggttaagtaaattctaggatatctccctaaaatgaaatatgctacagtcattaaaaagaatgaggtagatttctttacatgaatgtagagcaatctcaaagaattattaagtcaaaaaacaagatacagaacaatgtgtattaaagtgtagggaatagatacagtagaatctcatcatatattcatttcagttactcaaaattaactaactcatgtaggtaaaagaaaggaaattatatattattaaacagggcaggggactgcattggccttttctccactttgtctaagtatgtagtctatcttattagtctgtgaaatagtgtgtaattttaagggttttactgaccatttataaggaagagttatacataatgcaggaggccaggcactggaacggtagtggttttcctaactatcgtgcagcacagcttgtcttaagacagggtcttacacacygaatgatttttggtatgtctggccctcagccattaaatgtca

SEQ ID NO: 899615 - DNA, 581 bp, Homo sapiens
ttgaattattcattttctgaccctgtaccaggtactttttactgctrtagtctctttgggggcagagtagtcacacatgtgtctcagccatcttttaaacacatgctttgtcttttagttttaagcaaagggttgcgaacataggactttggtgccaacagcagcctgggagatgccttttaggagcacccaaatgtggtacagctgagaggagggagggagcagccacttagcacttccatcccatttacgctaagtgattgggcaggaggagaggaaagattaaaagcaagaagtgagaaaagcatctaagggtttggaggagggcaggaaggaggaggaagtttcatagaagaggcgtgatttggtttccttaagtcatcagagctctttctttgtctttaaatgacatttccaattggaaattcatctgaacaagagaaaaagagacaaagctctattgatttaaagaggcagggaacatcatagaaagattctagtacatattaagagaaatcagaactgtggaccttggctaggttgttcttgtatattagaggctatttctcgcctctcatccc

SEQ ID NO: 899616 - DNA, 581 bp, Homo sapiens
aaatgacatagaatcactgtgttacctatcacatcaagggttctaaattgctaatcagtttatcccaaatgaaaagaaaaggaartgtctccaatgagtgttttaaacttccctgcatcatttaaaatggttacgtgagcctttgaaaatattgccttgaggcattatggttgacttaatttcttctttgtgttttaaggattatctgttatgagcatgtattacttctatagtcaaaaaggagactattttaacaaaagtgaaattattgcataaatgttttaaatatgaaaataccacccagtgcgttatttttataaatgactgagataaagaaagcagcttcttaaagttgaactatgtaagaatgtagataaactgtcatatgcccaagaattattttctgatataaaagatggattaaagatagacttaaatttttcttcactacatggttagtattatatcccaaactgaataactcttctttcgtatatctctcagcccaaatagagaaaagaaaattttctatctgtacctgtggtttgcaagttagaagcgatttttgtaattagtcatat

SEQ ID NO: 899617 - DNA, 631 bp, Homo sapiens
tgttggtaggaagtacctgggtgtttcatttgcatgatatgttggtaatcttagaattatcatatcttgcaagtcatttttaagtatgttgtaatgtagtcagaagctttttaaatatgaaatttaattcttgctggtgtcaattacatttaaaaaaatacaaaatagctatataagattctaggatctttcagaattttataatgtttataatggaaagttggttaaataaaaattgtaccctacacaattttgttgttggcttaaaatagcatttaatttattagtgctcagataatagttatcccctcaatagcatttttactttcatatgttgatatcaaacagtgaagtgagacagcaaatcagtacaacgtggtgattatcaaacatcataaatccatgaaggatagcgttgatcttactgagaagagtttaattttaaaatgcatacctggaaaaggcaagttagattaacatttcaaactcatatagcattatctgattgattatagttatgaytgatcattttatgtttggaccatcactttgaatccaattgggataattataaattaaggatttattatttgctttgaattttagattaaaaaatttaaaaccataaaaa

SEQ ID NO: 899618 - DNA, 542 bp, Homo sapiens
gtgacatggaccttgacacaccatctctcagcttcagcaatgacgagccttctgccattcttgtcccccwcatacctctggttactgcctgcctcactccacagttatcattatttacagctctttttaaagtgacacttacacacattgaaatgcacacattttaactctacagttgtgacagatttatccatctgtgtcatcacctgatgcaatattgaatatttcagtctcttccctcccagtgaattcctgcaccacccccatccctgcccaagtcaccacccttttggcttccatcttggattcgttttgcctgttctagaacttgccgtaaatgatatcacatagtgtgtgtgctttcgtgtctggctttactcactcagtagtgtatctgtgagatttatccacatcacagggttcagtagctcatttttgtctactgtttctcagtattctataccacagattgtcgattctctcggtgatagacaatgggtgtttccagctttcattcattgtgaataaagttgccgtgaata

SEQ ID NO: 899619 - DNA, 584 bp, Homo sapiens
taaatataaagacagaaaagaataaacgatgcaggcaaagagaacctgcaattttccctatttcccattaatcctattagtctaggaatctgtatataaacattctttttgtaatcagcacagccaatatttacaggctccctgctactttcccaaagtcttcctgcatctgtttacctgttacggccttaatagggtcctagattcccctctaaagtcaatactcagaggaaatcaactttatctgctttctattctactgtatacttatttcctgcttagcattggccctaacaggatgagatgagctatatgagtgagattttcaaaattgggtggctgatcttcacatctaaagaaagcttgagatgatcagaaaatgttcagaattgctgtttgctagagaggtcataggaatacacgacactcaagaaagacagacattaaaccctacccttttccacaagatgagtgtgttcaagaaaaaaaaagaaaccctaccttttaactctaccttggaggaaaagggtttctgtggtctctcttaaatctrggtcaaaatattctccttcattataaacttg

SEQ ID NO: 899620 - DNA, 481 bp, Homo sapiens
atcagcctgacacggtggtgcacgtctgtagtcccaactactcgggaggctgaggcactagaatcrcttgaacttgggaggcggaggttaccgtgagctgagatcacataactgcactccagcctgggtgacacagactccatctcaaaaaaaaaaaaatgtgtaaggtcccatagcaagtccgtggctcccacttcccttacacattagtgttggaagcaggagctccactattaggcgtcctggtttcaaattctggttttgttacttcttagcactttgttcttgagcaagttatttaacttctctgtgatcctgtttcctgatttatgaagataacaacacctgctttataggattgcagtgagaattaaacgagatagcatacattgctgatacatattgaatgaatcaatgttaggtggttttgttgtattatcatcgttatcatagaaaccagcacttaactgtataatttcct

SEQ ID NO: 899621 - DNA, 621 bp, Homo sapiens
agttatatttgttttcataactacctttataataccctttagactgaaatccttttttkataccttttatgtctatctatccatccatttatctcctgtctctttatcatcatcatcatcatcatcatcaccagccccatcatcttatccttttctctatgagcaataataaaattagtttatgtattagtcagggttctctagagagacagaactaataggatatatgtgtgtatgaaagggagtttattaaggggaattgactcatgcaatcacaaggcaaagtcccgtgataggctgtctgcaagctgaggagccaggaagccagtagtggctcaacatccccaaacctcaaaagtagggatgccaacggtgtgcagccttcagtctgtggccaaaggcccaggagtccctggcaaatcaccggtgtaagtccaagactccaaaagccaaatagcctagagtctgacatttgggggcaggaaacatccagcacgggagaaagattaaggctggaagacttagcaagtcagctcattccaccttcttctacctgagttttctagccactctggcagccaattggatggtgcccacccagactgaaggtgaatctgcctc

SEQ ID NO: 899622 - DNA, 483 bp, Homo sapiens
atatgcatttatttgctaacatcttctcaaccagttgccattattcaactaatccctacaccaatcagactaataattacatatttactatgaatacatgtccagtactatactttgtgctatagtgaattagaaaagtataacagtgctctgggttttgatggactctttactgtaatcagctcttacctgaccaatgagttgactctgttaatcctgcctatgatattggaaatacaccattattggagctgttcacattcctaaagtatgtactatgagaaataagaacgtgacagaaaaactaagcatttgggcttcatagctgtttaagtttcaaggttttaatatgttcaaaatattcccattataattgaatttatctttattattcatcaatatatgcttataaatggtagcaaacatrcaggctgcacatttgttgaaataaatattttttagcttaaataatgtaaagtctta

SEQ ID NO: 899623 - DNA, 581 bp, Homo sapiens
gtcacatcttacatggtagcaggcaagagagagtatgtgcaggagaagtcccctttataaaaaccatcagatgtcatgagactcattcactatcctgagaacagcacaggaaaggacccccctccccactgccacccatgattcaagtatccctcacagggtccctcccacaacacatgggaattattggagctacaattcaagatgagatttgggtgtggacacggccaaaccacatcatagtggtagatgggctttttgttgtgctgctggttttggtttactagtattttgctgagtattttggagtctaagttcatcaggaatattggcctgaagttttctttttttcttttgtctctgccaggttttggtatcagaaagattctggtctcatagaatgacttaggaggagtccctcttcctcaattttttggaataattttagtaggattggaaccagttcttctttgtacctctggtagaattcagctgtgaatcygtctggtcctgggcttcttatggttagaaagttttttattattactgattcaattttggaactctttattggtctattc

SEQ ID NO: 899624 - DNA, 669 bp, Homo sapiens
taaagccctctcccatatttatttctagaaaaaaaactagccagaaaacaacaattatgtgttaattcagatttatttctgggaggcttgaacagttattgtggcagagcagcatgcctgtttgctagttttcagttctgtcttggataaggtcctttctgtcttctggaaggttgtcaaatatcattagggggtctctcagtgatgcttcattgtgcattctgtatcttttatttctctagtaaaattttggttgcctataaagtgactatgatgcttcctgtttttctcataacaggtagaaagatctgtagctttgtatagtatgaaatgacaaagaaagacctgttattgaaatacaattgaattttaattagccataccatctaaagcctccattatggtgaagctagtagaataaagactgggtattttgttacttttccagggtatgaggaggcaaagattgtatgtagttacttggtagaatactactgtctgccatcttaaaaatacttttaataagaagatccctattatattttactctggctgaattccctgtgaaaagcattgaagggttggagtagaggaaggactaagtcataagctctctctctctctcttctattaataagtmcttcatccctagatagtgctagtctttct

SEQ ID NO: 899625 - DNA, 705 bp, Homo sapiens
gctgtgtcacaattgtcattgctattgctagtattttatgtctatgratctcttcaatttatatcattcaagcttctgggaatatctttttagcctgaagcttgaaagaagggtctccatagtggttgaatgtggcttcaaatgcccctgatttgaatagttttctccccagtaaggcactccttataacaccaccaatcttctctactcactcccacccatgtctttgttcatgctatgcctccctgccaacctgatacatccttttctttttttccttatgttcaaattctgctagttcttaggtccagcctcaatcatactacctccctgaagcttcctctaaacattgtttatctatgcagtatctttccaaagccttatattttagttactctatggtttccattgtgtatgtcaattgtgtaggtcttgcctcctctacttgatccctgaaggaagagagatgaatccttcctcataactgcaaaatggcagtaagggctccagacctcacatcctctcagcctcatgttcaaaggaaagagaactttgagcttcattggcctgatttgggttaaattttatctatgaaccaatcatggtatccaggaaatgggcagtatgactaacttagaccagggattggcatatttttcttaaagggccagataatattttaggctgtgaaccatgtgatctcta

SEQ ID NO: 899626 - DNA, 705 bp, Homo sapiens
gctgtgtcacaattgtcattgctattgctagtattttatgtctatgaatctcttcaatttmtatcattcaagcttctgggaatatctttttagcctgaagcttgaaagaagggtctccatagtggttgaatgtggcttcaaatgcccctgatttgaatagttttctccccagtaaggcactccttataacaccaccaatcttctctactcactcccacccatgtctttgttcatgctatgcctccctgccaacctgatacatccttttctttttttccttatgttcaaattctgctagttcttaggtccagcctcaatcatactacctccctgaagcttcctctaaacattgtttatctatgcagtatctttccaaagccttatattttagttactctatggtttccattgtgtatgtcaattgtgtaggtcttgcctcctctacttgatccctgaaggaagagagatgaatccttcctcataactgcaaaatggcagtaagggctccagacctcacatcctctcagcctcatgttcaaaggaaagagaactttgagcttcattggcctgatttgggttaaattttatctatgaaccaatcatggtatccaggaaatgggcagtatgactaacttagaccagggattggcatatttttcttaaagggccagataatattttaggctgtgaaccatgtgatctcta

SEQ ID NO: 899627 - DNA, 451 bp, Homo sapiens
gagacagaaagttaacaaggatatccaggaatttaactcagctctgcaccaagtggacctaatagacatctacagaactttccaccccaaatcaacagaatatacattctcagcaccacatcgcacttatctcaaatttgacgacacagttggaagtaaagcactcctcagaaaatgtaaaagaacagaaattataacaaactgtctctcagaccacagtgcaatccaactagaactcaggaataagaagctcattcaaaaccactcaactacatggaaactgaacaacctgcttctgaatgactacagggtacataacgaaatgaarccagaaataaagatgttctttgaaaccaatgagaacaaagacacaacataccagaatgtctgggacacattcaaaggagtgtgtagagggaaatttatagcactaaatgcccacaagagaaag

SEQ ID NO: 899628 - DNA, 507 bp, Homo sapiens
tagggaaactactgtacttcatttacacttaagctagagagtttaggatcttaatttatttaaagccatagattcagtttagctttaacctagacagaaagtgaaaagcattttacaagtagaagaggcaatgagaaataaggcaacagataatacgtcaaagctggaacaagggcagaaatcagaacgtgtctggctatcagctttgtttttgactactaaggccaacctttttattcctctggatggtctgcagaccaagttcctagagaggtatggagaagaaagaaacttgtggttagaatttttgaactgaatatcaatgtattaaatatcaagtcattattaaagatgtcagtaatagtatctcctagggctgatgtgaggattgatgaagatgataaatgtagagcatctaataaaatgmttagcgcaagtgctcaacaatgttagttattttatcccatgagagttccccttacccaatctattgatgtagcaggttga

SEQ ID NO: 899629 - DNA, 573 bp, Homo sapiens
acacacacacacacggcaatactgtcaaagccagcagtgcatcaggatttgggggagcactagacagctcacctctcccccaaacctctccaccttcatgtttgatgtttctttgctcactttcactcactctctttttcatttctccccccagtttcaccgcaaatgtgaattatcaacgttgtgtgacggtggggaactcagagaccacatcttactgcccacctccatatgccccatcacccgggtaagtgctcctgccccggcgagggctgtagcttctccgggttctggtttcagatgtaggcagctttcagacattcacatccttcccagggcttccctgacaactctttgggtttgtgttttcttttctttctttttttactgttattttaggttagagagtacatgggagggtttgttacacaggcagacacgtcttgcgggagtttgttgtgcagattatyttatcacctgggtttttagcccagtgcccagttgttaatcttttctgctcctctctgttgggtttgtgctttcagtatgtgcttgaaagaggtcagcgctgca

SEQ ID NO: 899630 - DNA, 580 bp, Homo sapiens
tatatactattttttctgctttttcacttaatattgcctcctaagaatatttccatattgctataaaccctcgattaatgtgataattaatggctgccttgtatttagaagttaatgctaacttatttctctagaaaaggatatttacagttatttctaatattctaatatcatatgactgctataaatatctttgtttataaaagtttttttccacatttggaatatttttccctaggttatattcccagatatggaaccaacagataactttcaaagtcaaggataatccaaaacagcctgatctatcttggaagatactgagtttctcatccctgcagctgatagtgaaaaggtggtatgatatttgctaagggtgtggtaaaaagataataagttagactaggtgacttttgaggccccagaaacccatgagattgtggttctccaaatttcaatttacaaacgtgagcctattctttgtcccaaatcactttcttacttgctataaaagttatctaytgctgtgtgataaaccactccaacacttagcagctaaaacaatatccattttgtttgc

SEQ ID NO: 899631 - DNA, 617 bp, Homo sapiens
gcacccgtggggatggtggaggatgaagatcccaattggaactctagggtgaaaagatttcagggatggggcgttcttgctgcactgattcagcaaagattttgctaaaactgagttttacaaggaagtgcacagatgagttgaggagacgtttcagaagcctgactaaaatttggctaagcaaagaatctttgttaatagctgcaaggtcccttgaggcctaaatttggaaatagtatactgcttttaacgcatcgtatacttgttgtcagaccaagttaggccaatcaatgagcagtgaagttacattgcagaattatctgtgtgcagaaatggaagaaagtattgtgaataatttttgcaaacaatgtattattatctatcttagggacaaaataattcttgtcctttgcatatgtgaaatgtgcttttgccccttctctcaaagttttatcccattagccgttcaggcttgaactccaggacctcatgatctaaatcatgtctagaattagatgacacacaaaggtatagctcttgaagtatatctcttcttgatctagagatctctgaacccaaaaraaaagttatttgctctccacatgctcaatatctcc

SEQ ID NO: 899632 - DNA, 638 bp, Homo sapiens
gactacagaaagctgtaatagaccatacaataaaagccattgtgatttgtggagcagagggcaaattttctgcaggtaactcaagtctaaccctctcccaccatctctggaatccagccacagactgagaccaatactgcattagctgtgcttgttggtaataacttagtgtaggtaatggatatggcagacttgagtgagaatgagtaacactgtggagaaagggacaggaattacaagagagacccagagaagggcttagtctcttttattgtggattgggcttttagagtatatttagttccagacttgatggctgttatacacctgctgatatatacctgcattgcatgtatctccaccatatgtgggcttgggcaaatctctttaacttcctgaacctcaatttctctatctataaagtgggaacaataatatctattttaaggggtttttgtgacattaagcgagataacatatctgaaagcctctactacagtacctacacaaagaagatggtcaataaatgttattgtttaattcacacagagtcttataatagaattcatttttcttcygatagtcacccatctcagtgaccatggcactgctttattgggttattgtgtgaagatgca

SEQ ID NO: 899633 - DNA, 570 bp, Homo sapiens
tacacagttttttattttgtttacttacaatagattattcaattatgtttactatacgatataccactttcttccatagtctgagcaaagtcttatagagcttcaagtatcttcttaggcactttkgatcatcaacagttatgcacatcatcctagtgacctgtccttcctcaaaccaaggcttatgaccttgacctctttaatacctcagaaccaatacgtattttttaggcatatgaaataataccagggttctatttgcactcccactctggttaaactcagacatgtccccccgcccccgccataactgactctcttatccttggaaatgaaaaacgtttcacagaaatccacaactagtttttaacagatacttgacacctgaactatagtccacaatgcactaagtgctcataccgacctctgtagcttagaaattctacaatctctttttaatgtctctaattgtactgtttggtatgtaacagggaattattttgagcatgtctcattaacaaaagatttatctcctactaagcatcttcccttcttaggaagtctgcaaag

SEQ ID NO: 899634 - DNA, 597 bp, Homo sapiens
gctttcaacttcttctctattacttacatatatatacttttctcataccaagaatcctgattcttaaggatacaagatgatagaatatttaataattactcattgttttatctactgtygtacacgcaacagtgtcataatgacagtacttatactattatcaatatcatttactggaaagattttctaaaaattttgtgtatgttcttcccattcttccccattttaaaaaataattaaaataattatactataactatattgttaccgcatgtagccttatgctctgtacactctcccttttaattcattggtaattgtatatttacttctcatcaccagtctttattttggtatctttctaaacattttgattgtctgaaatatatcctattatagatcataggaataatatcccttcagttactgaatgttaataacagtttagctatgtcctttatacttgaaaggtggttttgcaagatataaaatctttggctcacaatttatttttttggggcatcttaaatgttacttcattttcttctatcacaaagtattgttgtagaaagtctgatgagaatgtatgattttttt

SEQ ID NO: 899635 - DNA, 612 bp, Homo sapiens
aaaccaatcatgccttcccaatggtcccccaactcagttcagcattagttcaaaattccacagtccaaagtgtgagctgagacaagtcaagtccctyctgcctatgagcctgtaaaatcaaaagcaagttagttacttcctagagacaatgcgggtacaggcattgggtaaatacacccattccaaatgggagaaatgggccaaaacaaaggggctacaggccgcatgcaagcccaaaatccagtgaggcagcaaaatcttaaagctctgaaatgatctcctttgactccatgtctcacatccaggtcatgctaatgcaagaggcgggctcccacagccttaggcagctccactcctgtggctttgctggatacagcctccctcctggctgctttcacaggctggcattgagtgtctgtggcttttccaggtgcacggtgcaagctgtgggtggatctaccattctggggtctgaaagacagtggtccccccctcacagctccaataggcagtgcccagtggggactctgtgtgggggctccaaccccacatttctttttggcactgccctagcagagggcagcaggcttctgcctggacatctaggtgttt

SEQ ID NO: 899636 - DNA, 619 bp, Homo sapiens
ctacaaaattctttcacagcaatacctacatcattggctaaaataactggggactctagcttcaaatattttgcagctctgttgttggtgcatacacgtttaggactgttatgtcttcttggtggactgaccrttttatcagtaggtaatgttctgtctgactctgttaatttcctttgcttcaaagtttactttatctgagattaatgaagccactcctgctttctcttgattaatgtttaggatatctttttccattcttttactttcaacctgcatatattattatattcgaagtgagtttcttgttgacaacatacagttggatcatgttcttttaccttttagctaatttttatcttttaattgatgaacgaagaccatttatatttactatagccaactgacctgttagggcttatgtctgccattttgttttcttgttttatatttgtttcctttgtttatctttcttctgttttcttttttgtgccttcctgtgagcttcctgaacacattttgaaattctatttttatttatccatagtgttttttagtgtatctcttcatatagttttttttagtggttgttctattacaatgcatatacataacttac

SEQ ID NO: 899637 - DNA, 582 bp, Homo sapiens
cctaccttttcaatttggatgccctttatttctttctcttgtctaattgctccagacattacttccactactatattgaaaaacagcagtaaaagtgggcattcttgtcttgttccagtctttaaagcaaaggccttcaatttttccctattcattatgctgctagtcataggtttgtcacagttggcctttattatcttgaggtatgttccttctatacccattttgatgagttttcattaaggatactgaattttatcaaatgcctttttggcatctattgaaataatcatatggtttttgttcttgattctgttaatattgtataacatgtttattgatctgcatatgttgagccatccttgcatccctgagatgaatcccacctgataatggtgaatgatctttttaatgtgttgttacatttagtttgttagtattttgttgaagatttttgcatctatattcatcagtgagcgtasgctgtagttttcttttccttttttttttttttttttttttgccttgctttgttttggtatcagggtaataatgctggccttgtagaatgagtttggaagt

SEQ ID NO: 899638 - DNA, 582 bp, Homo sapiens
cctaccttttcaatttggatgccctttatttctttctcttgtctaattgctccagacattacttccactactatattgaaaaacagcagtaaaagtgggcattcttgtcttgttccagtctttaaagcaaaggccttcaatttttccctattcattatgctgctagtcataggtttgtcacagttggcctttattatcttgaggtatgttccttctatacccattttgatgagttttcattaaggatactgaattttatcaaatgcctttttggcatctattgaaataatcatatggtttttgttcttgattctgttaatattgtataacatgtttattgatctgcatatgttgagccatccttgcatccctgagatgaatcccacctgataatggtgaatgatctttttaatgtgttgttacatttagtttgttagtattttgttgaagatttttgcatctatattcatcagtgagcgtacsctgtagttttcttttccttttttttttttttttttttttgccttgctttgttttggtatcagggtaataatgctggccttgtagaatgagtttggaagt

SEQ ID NO: 899639 - DNA, 622 bp, Homo sapiens
tgctgggataactggctagccatatgctgaaaattgaaactggactccttccttacacaaaaattaactcaagatggattaaagacttaamtgtaaaaacctaaactataaaaaccttgaagaaaacctaggcaatatcattcaggacatgggcacgggcaaagatttcatgatgaagacaccaaaagcaattgcgacaaaagcaaaaattgacaaatgggatctaattaaactaaagagcttctgcacagcaaaaagaaactatcaatggagtaaacagacaacctacagaaaaggagaacatttctgcaaactaagcatctcacaaaggtctaatatccaacatctataaggaacttaaacaaatttgcaagaaaaaaaccaaaccaccccattaaaaagtgggcaaagaacatgaacacatacttttcaaaagaaggcatatatgtggccagtaatcatgcaaaaaactcaacatcactgataattagagaaatgcaactcaaaaccatgatgagataactatctcatacccatcagaatgactattactaaaaaggcaaaaaattactgatgctggctattcttaaaaaggcaaaaaaaatatggattatggttgcag

SEQ ID NO: 899640 - DNA, 622 bp, Homo sapiens
tgctgggataactggctagccatatgctgaaaattgaaactggactccttccttacacaaaaattaactcaagatggattaaagacttaactgtaaaaacctaaactataaaaaccttgaagaaaacctaggcaatatcattcaggacatgggcacgggcaaagatttcatgatgaagacaccaaaagcaattgcgacaaaagcaaaaattgacaaatgggatctaattaaactaaagagcttctgcacagcaaaaagaaactatcaatggagtaaacagacaacctacagaaaaggagaacatttctgcaaactaagcatctcacaaaggtctaatatccaacatctataaggaacttaaacaaatttgcaagaaaaaaaccaaaccaccccattaaaaagtgggcaaagaacatgaacacatacttttcaaaagaaggcatatatgtggccagtaatcatgcaaaaaactcaacatcactgataattagagaaatgcaactcaaaaccatgatgagataactatctcatacccatcagaatgactattactaaaaaggcaaaaaattactgatgctggctattyttaaaaaggcaaaaaaaatatggattatggttgcag

SEQ ID NO: 899641 - DNA, 637 bp, Homo sapiens
ggtggggggcattgtggctattctttggaggaaaggggagaaataatggtttggagaggcttgagtacttgggacaatatttcaaagtggaggctttgctattgtttcatataggtmgctgactattctgaaccccaaacacatatggtactatgtaataaatacaatgaacaaacaaataaaataacacttaagtttgggaagattagaaatgttatggctgtttaaaattcagaaattgtttctgtagaaacttaaatgttattttatgtttctacatttctctgctatggtcacaagttttcagatgtctgtgctaatttcttcttgaatagaacatctacaccctccagcagatattgatgttcaactttagatggtaaaagcatcaatgcaatactgttcccaactgctaggcttattcgagaaacattttctctgtcttagtacagttcgtaatatctcctttttgtaaaattgctttttccatcatttattccttcatttgaactatgtagaaaaaaatgataaaactcgaaatgtttaacagtattttatttcaacgagtgaacataaacatatatatgtgtatatatacacgcacatatatagtagagctgattatatatatatggta

SEQ ID NO: 899642 - DNA, 618 bp, Homo sapiens
ataaaagagcgaaaatgattctcaaatttgaatgttatgaagttatttgcaaagtatattaagtcagatcttctatgtratgaagtgtctttacagtttaagagactttctaggagctgacatttctatcataaagaacgaggctcttgtggattcattatgacttcttgaaacaatctgaactatagaccttgctgtctgcccgctgcggacacatctacacattaactgggtctaggagcagctcagtgcacaaaggcctcaaaggtttatttccaactggcatgaaccttaaaatctctgggcaggtgataccctggttgcaaagcttccttgataatacctgatttcttttttctcttcacactcacctaaagaattgcatttaaaaaaaaaagaaatcaaattgcatgatagaaggtcattagatatatgaatgtcattatgaaaccaatcaatgcatcactttccctcctttgatcagcttgaatcccttcctgggaagccccataactccttcagaagtggtctcctgtgcgtgattactttgacacaatctagatgatgctgtattagggaggtgagaaagagcaagtatcaaaaccaaaattactatgt

SEQ ID NO: 899643 - DNA, 461 bp, Homo sapiens
agtggctctgctctctgcaagttgtccgaggcagcaggctcctggtttgtgtagtagggttaaaggtgaggaagagtgaggtaagccccaacgcagccctctcagagaagtgggagctcaagatctgcctccacctccctcatctccagacacctgcactccaggctgggagccctcagccctggaggaaccatctctgaagttaggggatgcctcctgctgatggtgcaggtcagagggatcctaacccatttccaaattctttagcctcaagactgttactaggagcctagaaggtctcttcttccatattctcgccatcctcatttccaacaacacacatgtgcatgcrcacatgcacacactcacacaaagtcaacacacacgcatgcacacacacgcacacatgcacagtcaacagacgtgtgcatgcacgcacacacatacagtcaacatgtgtg

SEQ ID NO: 899644 - DNA, 461 bp, Homo sapiens
agtggctctgctctctgcaagttgtccgaggcagcaggctcctggtttgtgtagtagggttaaaggtgaggaagagtgaggtaagccccaacgcagccctctcagagaagtgggagctcaagatctgcctccacctccctcatctccagacacctgcactccaggctgggagccctcagccctggaggaaccatctctgaagttaggggatgcctcctgctgatggtgcaggtcagagggatcctaacccatttccaaattctttagcctcaagactgttactaggagcctagaaggtctcttcttccatattctcgccatcctcatttccaacaacacacatgtgcatgcacacatgcacacactcacacaaagtcaacacacaygcatgcacacacacgcacacatgcacagtcaacagacgtgtgcatgcacgcacacacatacagtcaacatgtgtg

SEQ ID NO: 899645 - DNA, 705 bp, Homo sapiens
actaatgatagagagtgcaaacaatgtcttagaaaaccttaaaaagaatcaatcatgccctgcctaagcagtttctgtccaggaatatgagtgggctcgtggctgggatttcatgctgcatataaacaacacactcaaattagctatccatcctaactgatcctgatttcatatgatggaatgaactatcagtatctcatgatcttcaaccaagagcactatgattttcaggggctctgccacttgggcagattcacaaatcacttagaggtgaaggagtgtagtggtaactagcagtaactctaaaagcctaccagcctggctctgagggctggatctacctcttacacttagctgtgtgaccctgggcaagttccctgacctctttgtatgtcagttccctctcctgtaactgggaatgatggcaacctccatatgattgtaataagtatcagatgagtatagtgcttagcgtagtgcctggcacatgagctgtacaagcagtcactggtatcaccatcatcaccaccatcctcattctgtggtgagggaaatgcctttgaggatcacagaaaaccgtagtaaagatgctttcaaattcctccacaagggggaatggatctgkagcatggcattgacttgtgatccaaattcatggctgcccaaaagctcttagagacgccatgaaatgagaaggggacacat

SEQ ID NO: 899646 - DNA, 648 bp, Homo sapiens
ggttttcttcctggtggtgaggggcaaaagtagatgctttatattattgtccacttgaagcamaaacataatgaaagagctacaattcatttattgcacaggcatttgtcaggcacctttaatatgctggctgatatgtgctgggagttgagccttgggcaaacttataactcacacaggaatcagatgagttgtgactccaggagagctgttttttgccctgacaaatactgacatctggttactgacaatgctggaccttagatagtgactgtagtcaagaagagacctgggaaaaagtcctggaaatgctgggcctccctatgtggcttctataaactaaatgtgagtgttattagtacagagtgttattagtacattgtgtgccttgagggggttctaaaggaagcagaggttttaacaattttacacaccctgattcttcatttctgcctgttttttaaacctcttcaagcttaggcctgaaatcagcttcctgctgggatctgcctccctcaatttgcacaggggtctttgtaatgattgccatgagtagtgatctgggagaatgcctgatgttgttgtgtgcatgagtgtccatgaaggatgaatctaacaataaagatgataatatttatatattattat

SEQ ID NO: 899647 - DNA, 661 bp, Homo sapiens
ctagtatcccttcatatcaacttgaaggactccctttattgtttctttttttttttttgagatgaagtctcgctccgttgcccagactggagtgcagtggtgtgatctcagctcactgcaacctctacctcccgggtacaagtgattctcctgcctcagcctcctgagtagctaggattacaggtgcgtgccaccacacccagctaatttttgtatttttattagagatggggtttcgccatgttggtcaagctggtcttgaacacctgacctcaggtgatccacctgcctcggctcccgaaagtgctgggattacagacatgagccactgtgcccggcccctttattatttcttattggtcaggtctagtggtaataaactccttcagcttttatttatctgggaatgtcttaatttctccttcacttttgaaggacagttttgtcaaatatagtattctcagttggcaggctttactctttcagtactttcaatgtatcatcccaccaccttctggcctgcagggtttctgctgaaatatccactgataatcttctagaggctcccttgcacatgagaagtcacttttctcttgctgcttttaagrttctctctatacttactaccactaaattctacacttaaaaatggtataatctg

SEQ ID NO: 899648 - DNA, 617 bp, Homo sapiens
ccactaaaacaaaaggtgggcatatttgcaagcatctcttctctaagaatgggcatttcttaagctctgtttattaagctgttacacaagccctctgctgatgtggcatyagcatcatctaagccactccccaaagagacttgggggtagaaaaccaatgtgaatgtgaagctcacactgcctacagtgccataaggaatgaagtcctttgtctctgaaataggattctcatgtcttctgccaacatcaaggaaattgtggctggctaacttgttagcttagaaataggggaaaatattagatccttgttagttctcgatcataggattcttgactttgggcagtatgcacacggaaacagctcctcttcacttccaaagaacatacagtgatggttgcacctcaagagagcctcttatatctgacattgcagaggggatagtggaagattatggctttggtgagagcaataactcatgagcatgagtcagagatgatttagccaccccttctcccaacacacacgtaattcaaagtgaaacttataattcataaaatatatgaagtataataaagccagcaagtctttttccccattgtgataattttaatgcttt

SEQ ID NO: 899649 - DNA, 591 bp, Homo sapiens
accaaataccacatgttcacatgttctcacttacaagtgtgagctcaatgatgagaacacatagacacacagagaaaaacaacacacactttggcctattgaagggtggaggatgggaggagggagaggatcaagaaaaagaaaaataatgggtactaggcttaattttgattgatgaaataatatgtacaacaaacccccatgacacaagtttacctatataacaaacccagacatgtaccctttaacttaaaataaaattttaaaaagtcattctttttaaggtggacatgtaaacaaccaatggatattttgtaacttgtgttatttaccagctatctgccttaaatcaattgactatatagcccgtgtgatctttcatatattaatccaaaagagtaacaattgaggtagtagcatgggcaattggggtaaatctgaacacataagaggagtgacttcaaatttttttaccagtaaatatcactaccaatatattccaccccgtgaaatttatatagtaatgrtgtcagtgttataatcattctagctagggagaataaagaagaactcaaaaaatgtttgttagat

SEQ ID NO: 899650 - DNA, 640 bp, Homo sapiens
aatttgtataagtaaagaggagctaaatgtttaatagccaagacaatggggaacatgcctccaaggcatttcagagaccttcatggcagccccttccatcacaggcccagaggcctargaagaaggaatggttttgagggacaggtccagtgccctgctactctgtgcagcctcaggacagggcaccctgcatctcagctgctccagctccagccatggctaaaggactccaaatatatctcagactgctgctctagagagtgcatgctggaagctgccaaggcttccagatggtgttaagcctgcagttgtgcaagggcaagagttgaggcttggaagcctctacctagatttcacaggttgtttgaaaatgcctggatattcagacagaagtctgctgcaggggcagagcccccatagagaacctctaatagagaagtgccaaagggaaatgtgaggttggagcccccacacagagtctccagtgggtcactgcctaatggagcagagagaagaaggccaccattctgtagacccaagcatggtagatccactgacaacttgcactgtgcatctggaaaagctgcaggcactcaatgcctcagcccattactcagttcctaagttgctttggcatttt

SEQ ID NO: 899651 - DNA, 634 bp, Homo sapiens
taaattacaaatggacttgatttmttttgacttctaggtaagagttagactagagttgaaggtacaagtctcttaaaactctcaaagagtttctttagttaaagattatcagcaattaatttttttggctgataaatgcctaaatttcatgtttggtctatcaaaatgcattttttctcacttcattattcaattaacataaacagagctgaataaatttctgcctccagcaacatttcggagactcagtattgttcaactttaggttgctctctgttcagccaggttaatagagacagaaaaagacaaaatctggatgatgcatatgtcacttctgctcatataacattaaacgcaacttcaacacacagtctcagccagatacaggaggctgtgaaatgtcctctgggtgaggccagaagaggaggacacagtcattgagtatcttgctgtctctgacatgatgctagacacttgcttttattacaatgacaactatttacatttcttaagaacatcatttttttacatcgtaataatctttttaatttaaaatagatttacagaaaagttacaaagatagtagtgttttcaatatctcacatctaatttcttttattattgacatcttgca

SEQ ID NO: 899652 - DNA, 610 bp, Homo sapiens
tactaggtcacatgataaaattatgtttaacgttgtaatatactgtcaaactctcttcctaagtggctgtatcattttgcctttccacacgcaataaacaagagttcctgttactcyacatccttgccagaatttgattatgtctatattttagacattagccattgtgatagttatgtactggtattttgttttaatctgcacttcccaaaaagcataagatgttaaacagctttccatatacttattttatatctgtattgcttttttggcaaggtatcttttgcacattctttattgggttgttattttccttatacttgatttttatcatttctttgtgtattttggatacaagtcacttatcagatgtatgttttgcaaatattttccctcattctctggcttgtcttttaattctcttacctgtgtctttcacacagcagaatattttaatacaatcaaatttataaatttttttccttagtgatgctgaaacacattacctcacccaaagtcatataaatttttttcttatgatttcttctggcagtggtatagttttcaattttacgcttatgtctatggtccattttaaaataattttgca

SEQ ID NO: 899653 - DNA, 549 bp, Homo sapiens
cagaagcaaacttcctttgtggtgaaagtgtaagggagagaacagtggtgcccacaggcaaagcttcactaaagtccttcactcctatcgctcctatggtacaaaacaaaaagctggtccaggaaggcttgcaaagctgttcttcccatggaaaatctatggcagttgtggtaagggaagactgagggagggagtcagagagaggaagaaaataaggaagaagtctacttttggagaaagacaagaagcatccagattgttagacattcttctggccagacctactgagaaaagggtactgcacctacttaagactgtggtgaaccaaacatttcttggaagaaaacagctttttcccatctctagtacttttcatttcaacaagaatttcatagaaaagcatccttttgaaagtatgttcctggcgcaactggcaatatatcatctctatattcaakatataattcaagataaaatcaaatataggtcaggatgattatttttgaaatgtataccaatcaatgtattggaataaagacataacttcta

SEQ ID NO: 899654 - DNA, 549 bp, Homo sapiens
cagaagcaaacttcctttgtggtgaaagtgtaagggagagaacagtggtgcccacaggcaaagcttcactaaagtccttcactcctatcgctcctatggtacaaaacaaaaagctggtccaggaaggcttgcaaagctgttcttcccatggaaaatctatggcagttgtggtaagggaagactgagggagggagtcagagagaggaagaaaataaggaagaagtctacttttggagaaagacaagaagcatccagattgttagacattcttctggccagacctactgagaaaagggtactgcacctacttaagactgtggtgaaccaaacatttcttggaagaaaacagctttttcccatctctagtacttttcatttcaacaagaatttcatagaaaagcatccttttgaaagtatgttcctggcgcaactggcaatatatcatctctatattcaatatataattcaagataaaatcaaatataggtcaggatgattatttttgaaaygtataccaatcaatgtattggaataaagacataacttcta

SEQ ID NO: 899655 - DNA, 596 bp, Homo sapiens
atttttatataaatataatgagataataaacagtttgtagttctatgtatgtgtgggaaaggttgaacaaagtacttgtcctctttataagctgctgaaggaatcaacttttatactgtgagatttggggacgttcatatgcacgtttattcccactataccattaatgttattatttttagtcaggcttcacagagcaagtcattcaaattattttgatggtaatcctcaaacattgagtctaaaacaagggtcaatgcactatggttgacaggccaaatctggccagccaaacacctgtttttgtttataattgctttcacactgccatgacagagttgggtacttgtgacacaagactagatggcccacaaaacctaaaatgtttactatcttgacttttatttctgtcaatccctggcctaagaataaaaatgccccagtgctatgctttctgtgcttagtatataaaggataaatgtaatgtgaaacagtgtttcactgattagagactgagctagccctgtttttaattgacagataaaattgtgtatgtttattgtgtaccacatratgtttttaaatatctgtacatt

SEQ ID NO: 899656 - DNA, 584 bp, Homo sapiens
tgtcagtgaatattctagcaattatgacatagacagatattttaaggtttaatctgctaaaccaagtaatctacaaaccgcaaagttgcctatacttcccacatcagggaaacaagacagtgacaatttgaactgaagagttttaagaatattatgaaaagcacttactgcaaatccatagctcagttattttttaattgccctttttaaaaaagggatagagaggcctcttgcaccagattatttattgatgatagatgtgtgactctatatatacgatacaccgtgatccttggctatataaactgttcatatcaaggaagctgttcatatacacaaaagagaagcactgacctgaagttccatttcatctctagtaagtgtcatatcataatttctttaatctccttttaaattcgattaaacaaagagcaaatatgttactgctgtgcmagggtgacacattcattaatcataatgcaatttataattatgagctacatttgtttattacactaaaataatagctgccatatgagtaactaatctgatgataatctactaaaagagttcaacactacctt

SEQ ID NO: 899657 - DNA, 581 bp, Homo sapiens
gtcatgatttccctgctatgaactgcttgccttcccctgacattatattaattaccataacatattataattactaagtcatctgctgtcaccttccctagattgtgagactcctaaaggtaggtacaatactataatatgtttacacttttaaagccttgcacagactttatgaatgagatctgaaatagtagccagataagaaacaacttcagtcaaattgcctgacatccagatatatggaacaaattttttatttattttcaaagattttggcctcaaaagacacacactaattgaaatgggacctcggatagcaacaacagatattttgtagagttaaaaactcaaattcaatgcccaaaggactgctatccccatttccatttcattttataacctgttaaaagccttccaggtatacttcatcctatgcagtagttgttttcaaactgggtttctaaaatcccaaggatygttggaattgctacaatggtccttgtagaggagaggaagaagctgataaaccccagataggagaatggaggtgcttagcccaggcactgacaccatcagtgttc

SEQ ID NO: 899658 - DNA, 569 bp, Homo sapiens
gtgaccttgacggagtttgaacaagagaacaacacaatctggcttcagtatcactttggctgctacatacaataaggaaggggctggaaggataatggcagggcagagaggcctcgctgcccagaactgtcaaacagaacttttgaacctgctttctctaatgaagtttctcagcatctgtttcctcatgtgataaaagcataagtgtacctgtcacatcttccaaagggaaactcctctactaataccaaggcaacttaatgtatgttaagagtcactctatcagtgcagccaaagctccctctggacctaaatgctttgagagggcttcttaattgcatctaattaaagagcatgtaaacagtcttaatttgagatgtctatgtgaggatgaagtttaatcacatgatattaaatttaaaaacccttctctataagtggattttttccccatcatatgaaaagctgatatagctacattctctggactagacatatggtgtgctggctttataaccaagaaaatataaacaayttaactctgacacatgcttagaattctatcatat

SEQ ID NO: 899659 - DNA, 599 bp, Homo sapiens
tttctcttcagtaaattaatgaaattattttgtcaatgtatcttgtctttatgaaactatccacacrgtggtattactttcttgatttcttctaaaagcacacctttgtttttgatgggttttattcatttgacaaatatttattgactactctatttttcaggcactgttcttgtttctggagatacaatagtaagtacatagaacaggtctccagtttttgacagatttcattccagtagctggagaataatgtaaatgaaacagtatcaattcatccatgcctcatagaatctgagctgaaatctatcacaagtccctaaaatttggccattcactcttttgttaaaccaacatttttagcatcagaaaataattataaaagtatacaactctggttttgtctggcacagtactggataaattaaagccctggggggcttttaccccattatttttagtgaatcttattgaaatataatttaaaatacacttaaaaataatatttaaaattcagtgcaaaagtcattgaattattgtgggggaaaagccaatgagtttgtcacacatgaatgttaagtagaagtctggtaatagct

SEQ ID NO: 899660 - DNA, 657 bp, Homo sapiens
taattttaaagaaaattgcaggcatcgtaattctttgcaatggaatactacagcatgcttctcctaaaaataatgatacccgctacataattatgatgtcattttcaaagtctagtaaattatcagagataacaatataacttgacatgctgctcatattcaacttcccccaataattccaaaaatccttttataatttttaataaattaggatataataaaagtttacatggtatacttaattatgttcttttaatctataatagtttccttttttgtttttaataacattgctattgatccagttacagtgtataattactaaattctggactagagtaattgttcattcatgtagatgcttactttgttcctttgtctttcttatttcttaaaatactgtcatctctctatttatacatcaaaaatccacatatgattttattatatgaagtttcatgcttactatattttctgaaattctttgatgatgatgttataaaaatatttacttggggaaaaatgatgtcatatcaatatattaaatccctgmcagttattaaaagtaattgatatttcacccaaagcaattagataccatgcacatttatcacaatttcagaacatgttttgggaatcccttgtactgtgatgttc

SEQ ID NO: 899661 - DNA, 608 bp, Homo sapiens
tggccattcactcttttgttaaaccaacatttttagcatcagaaaataattataaaagtatacarctctggttttgtctggcacagtactggataaattaaagccctggggggcttttaccccattatttttagtgaatcttattgaaatataatttaaaatacacttaaaaataatatttaaaattcagtgcaaaagtcattgaattattgtgggggaaaagccaatgagtttgtcacacatgaatgttaagtagaagtctggtaatagcttataataatcaaatacaactggtaaatttcaggttaagtagaaaataagtctttcctattaggctgcattggcactaaaggtggattgtttattaaaagataaatgggtgggaaaaagagcaaaacttgttagaaaaactacttgaaataatgacaggcagtagaaagatttttcagtctccaaccctaggattctagagccaaagcagaagagacgaagagttaggttctgtgaaggtccagcagggctgtgaaagatcctatgagaacaggaaccttagaaaattggaacaggatttaagttggtagaacagaggacagactactgcaagtcag

SEQ ID NO: 899662 - DNA, 649 bp, Homo sapiens
tactgcaagtcagaaaatcagtcatgaaatgagaaatgaatcaatgaktttgtcaattaaaatataggtaaactaaaattttaaaaatgaagatgaggttagaagagatggaaagcctagatggaatgcagagaattatacttggtaggaatgaatgtgttatagaagaagcatccaggatattgcttcagacagctgtgtgtttgtgagccacttacacttggctggggtatggttttaatgacagtttctagctggattaggaaagggaaagaaagtactgttgaagtctgttcagtaattaacaggtgtttatatacacatcattttattccatctatgtcttttattttaaatggagaatcaagatttacaaaggttgggatgaacagaagtctcagcaagtttgtaatagagactaaaatgatctgactcccagactagtgtagttttatacactactctgtaggccacttagctctgactgagaaggattccaccattccctattttcttttttcaatgagaccatgaactacttctattccgttttatttcactttattttattttgacaagtcatgcgtagaaaaaaatacacaagtcatccatatccggtgtgtagttgtatttataaaaaactgatatt

SEQ ID NO: 899663 - DNA, 683 bp, Homo sapiens
taataagtgaaggagaaataaaatactttacaggcaagcaaatgctgagggattttmtcaccgccaggtctgccttacaagagctcctgaaggaagcacaaaacatggaatggaaaaaacagtaccagccactgcaaaaacacaccaaaatataaagaccaatgacactatgaagaaactgctccaactaatgtgtaaaatgactagctagcattatgattacaggatcaaattcacacataacaatattaaccttaaatgtaaatgggctaagcaccacagttgaaagacacagactggtgaattggataaagattcaagacccactcgtgtgctgaattcaggagactcatctcatgtgcagactcacatagacttaaaacaaagggatggacaaatattcaccaagcaaacagaaagaaaaaaaaaagcaggggtttgcaatcctagtctccgataaagccaacttttaaaccaacaaagatcaaaaatttcaaagaagggcattacataatggtaaagggatcagtgcaacaagaagagcaaacgatcctaattatatatgcacccaatacccagattcatgaaacaagttcttagagaactaaaaagagacttagactcccacacaataataacgggagactttaacacccaactgtcaatgttagacagatcaatga

SEQ ID NO: 899664 - DNA, 616 bp, Homo sapiens
gtgcagactcacatagacttaaaacaaagggatggacaaatattcaccaagcaaacagaaagaaaaaaaaaagcaggggtttgcaatcctagtctccgataaagscaacttttaaaccaacaaagatcaaaaatttcaaagaagggcattacataatggtaaagggatcagtgcaacaagaagagcaaacgatcctaattatatatgcacccaatacccagattcatgaaacaagttcttagagaactaaaaagagacttagactcccacacaataataacgggagactttaacacccaactgtcaatgttagacagatcaatgaggcagaaaattaacaaggatatgcaggacttgaatttatctctggaccaagcagacctaatagatatctgtagaactctccacccaaaatcaacagaattcacattcttctcagtaccacatagcacttattctaaaatcaaccacataattggaagtaaaacattcctcagcaaatgcaaagaacggaaatcataacaaacagtctctcagacaacagtgcaatcaaattagaactcaggattaagaaactcactcaaaattgcacaactacatggaaatcaaacaacct

SEQ ID NO: 899665 - DNA, 631 bp, Homo sapiens
tggacacatagaagggaacagcagacactggggcctgctggaggctggagggtaggaggaaggagacggtcataaaaaataactaaagggtactaggcttaatgcctgggtgatgaaataatctatacaacaaacccccataacaaaagtttgcctatgtaacaaacttgcacttatatccctacacttagaataaaaccttaaaaaaaaagagccttctttggccgtccttccatgtttcctatggacacatcccacagcaatgatgggcctctaaaaccctattgcaattttgttttcatttttcttcactttttttctctttcttgacatctactatgaagtctcatttcccctgcttattgccatagattgcttgtctataatgaagctctgccttagaaatgccaaatataatgaaaaaaggtggagaaaacatagcaaagttggccactgaaatttgtgagggtcacacatttataaagcacacaggttttgcaaattcatcarctaaactttgaaataagtgtacgatcctttgctcttttctcggggcaactttaagttttctactctttactacattgagatcatatcactgtaaaatgtaaaaatgaacatttggagagtt

SEQ ID NO: 899666 - DNA, 671 bp, Homo sapiens
tcatttttccccaaatttattatttctgtatttttaaagttgagtacattgtatgtaaatttctcttcaaatttactgattctatcctctcatctccactctattaytgtaccaaaccagatttggttattgcattttactttggttattatttttttaggttctataaattcagtttggttcttttttaaaaaataaagcttgtgttttagagtggatttatatttacaagaaaaatatgaaaatagcacagagagattccatatatcacacacccatttttccatattaatatcaaacattggtgtggtccattttaaaaaatagactaatattgctacagtgttattaactaattccataccttactgaaattttattagttttcatttaatttccattttctgttccagaatcctgtctagggtactgctttgttgctcaattgcatttttggttgcgcatttggaactcttattagttgtttcctgtgtcccatcgacatactgctatcaccatagggttatctggaatactttattgttttgtgataattagctctgtgcttagacctgccagacatcacctagcaggtggctccatgcttggcatacatcacttagcaagtcactccatgcttggccctagtgaaatcatggcagagtgtatac

SEQ ID NO: 899667 - DNA, 671 bp, Homo sapiens
tcatttttccccaaatttattatttctgtatttttaaagttgagtacattgtatgtaaatttctcttcaaatttactgattctatcctctcatctccactctattactgtaccaaaccagatttggttattgcattttactttggttattatttttttaggttctataaattcagtttggttcttttttaaaaaataaagcttgtgttttagagtggatttatatttacaagaaaaatatgaaaatagcacagagagattccatatatcacacacccatttttccatattaatatcaaacattggtgtggtccattttaaaaaatagactaatattgctacagtgttattaactaattccataccttactgaaattttattagttttcatttaatttccattttctgttccagaatcctgtctagggtactgctttgttgctcaattgcatttttggttgcgcatttggaactcttattagttgtttcctgtgtcccatcgacatactgctatcaccatagggttatctggaatactttattgttttgtgataattagctctgtgcttagacctgccagacwtcacctagcaggtggctccatgcttggcatacatcacttagcaagtcactccatgcttggccctagtgaaatcatggcagagtgtatac

SEQ ID NO: 899668 - DNA, 594 bp, Homo sapiens
tactatccacctctccaagaagattagtcaagttgtcattttctactcatcttattctagagctttctcacaatctcaaccttctgcccccactgccagatgtatggagaagagctgacaccatacmtaatgaaattattacaaacaatcaaggtggaaagagtcatccctaattcattctataaggacagcatcatccttatatcaaaaccttgcagagacatgcaacaaaaaaaggtaacttcaggccaatacacttgatgaaaataatgcaaaaatcctcaacaaaataactaacaaactaaatccagcagcacatcaaaaagctaatccaccatgatagagtacgctttatccctgagatataaggttggttcaacatatgcaaatcaataaatgtgattcatcacataaaaataattaaataccaataccacatgaccatgtcaatacacacagaaaaggattttaataaattcaacatgcttcatgttaaaaactttcaacaaactaggtattgaaggaacatacctcaaaatagtaagagccatctatgacaaatccacagccaactgaaaggtcaaaatctggaag

SEQ ID NO: 899669 - DNA, 624 bp, Homo sapiens
tggccttttctatctcctagaagttgcttcagtctggtaagggcttgcagcagtggagtggggagttgtgagcaataatggctgccggcctctgtgtttgcccttccataatcaaaagtagcaatcaacaaccagaacgcagatgctaacacttggaggacagagtgcttattgcccatgattgttcccacaagcttggtacaagctgcttcaggaacacatgcaaagcttcttgccgtgaagctggggcatggggattgggtagccactgctgagctaagagctgaaattgaccaaaattaagtaaaaattatagtttaagccttcatttggaggttacaagcctcctttgatagagtctagagttccaaaatagttatatcaggcagattctgccagtgtgattattttctaggtggggagatgaattcccagtgcttcctactccactttcttcccagaaccctctcttgtaatagttttttacttaaaayctattttgtctatacttttttttccatatatttactttttattgaatttgttaacgttacagagttcttgcactgccaaaccatgcctgagaattcaaacaaatggtacaatggacagcctcatccaccc

SEQ ID NO: 899670 - DNA, 662 bp, Homo sapiens
tctagtatcccttcatatcaacttgaaggactccctttattgtttctttttttttttttgagatgaagtctcgctccgttgcccagactggagtgcagtggtgtgatctcagctcactgcaacctctacctcccgggtacaagtgattctcctgcctcagcctcctgagtagctaggattacaggtgcgtgccaccacacccagctaatttttgtatttttattagagatggggtttcgccatgttggtcaagctggtcttgaacacctgacctcaggtgatccacctgcctcggctcccgaaagtgctgggattacagacatgagccactgtgcccggcccctttattatttcttattggtcaggtctagtggtaataaactccttcagcttttatttatctgggaatgtcttaatttctccttcacttttgaaggacagttttgtcaaatatagtattctcagttggcaggctttactctttcagtactttcaatgtatcatcccaccaccttctggcctgcagggtttctgctgaaatatccactgataatcttctagaggctcccttgcacatgagaagtcacttttctcttgctgcttttaagrttctctctatacttactaccactaaattctacacttaaaaatggtataatctg

SEQ ID NO: 899671 - DNA, 603 bp, Homo sapiens
attatttggggctacaatgacatttaasttaattggattcaaactaagaggatgtgaatgttgcttaagatcagggcatttaagcactcattattgatgagaccaaggctagggaatgggtatggagatcctgagtggacactgaggatgacaatagttttaaaaagaaaagaaagtgtggcttttcctctcctggaagggggaagatggatggtggccacatagacacaggaagggccagtgttagtctggtcaacttctcactgccttcagttcatcccatgctcataatacttactcagggctcctgtgtcttccctcaatggcagatagtcctttacacctaatataacttcatccccatctctgagggttcttctgggtttaggagaccattccctcgactccttatttctcccatctctgaatcacagggaaccctatggtctgaacatccccctacccttaactgtagattgtcccatattgttctctctctaaagcatgaaccctcagaggcagacaccatattttcccttcctttgcttgattcatggccagccacaaagccggtccttaagaaatacttgttccaagactgat

SEQ ID NO: 899672 - DNA, 648 bp, Homo sapiens
caccacctgcaccaggacagacacttgtatccacagctgagagactcatagaaggttcacatcatrggactctgtgcagacaacccccagtaccagcctggatctgggtagactcaccaggtggctagatccagcagacagacaacaatcactgtgattcagctgacaggaagccacatccataagaaaagggggaaagtactacatcaagggaacacctcgtgggacaaaagaatctgaacaacagccttcagccctagaccctccctctgacagagcctacccaaatgagacggaaccagaaaaccaaacctggtaatatgacaaaacaaggctcttcaccactccacaaaaatcacattagttcaccaccaatggctccaaaccaagaagaaatccctgatttacctgacaacgaattcaggaggttagttattaagctaatcaaggagggaccagagaaaggcaaagccccgtgcaaggaaatacaaaaaatgatacaagaagtgaagggagaaatattcaaggaattagatagcttaaagaaaaaacaatcaaaaattcagaaaaccttggatgcacttttagaaatgtgaaatgctctggaaagtctcagcaatagaattgaacaagtagaagaaagaaatt

SEQ ID NO: 899673 - DNA, 560 bp, Homo sapiens
gactttttgcatcaggttccaacagattagtggttaatgtttgagttataaaatactcasaaacccagggcgggttcataaagtgtacggatctcaaaactttaatcatacagtcttctgcctagctccacctcagcccttccattctgtttttaaaaataaagctaccagtttataaacaactttcagaccaaaggcgtgaccccctgggtggtaagtgacaaaagaggagtactaatggacattttaagtgttccacatccgcagacttagcctgcctcaaactggcttggggttatcagtgtaatcttttaaaaattactttctaaacaaacttaacaactaaaatgattggtataagggaaggaaagttaaagccaaaaatatttcaaatgtagctttgaaaagaataatggcacatacatcaccgatcaatttctgagctctggacattttcctgttttctttgtaaagcagaagagttttcctctgctcttgtgcctttgacctcctgccacacatcataaattaaaaaaatttgtgactgtcataagcattat

SEQ ID NO: 899674 - DNA, 603 bp, Homo sapiens
atcccacttggtaggattaccaacatattagacattgcagaagaaaaaaaaaawatatatatatatatattttaattatactttaagttctagggtacatgttcacaacatgcaggtttgttacatatgtatacctgtgccatgtttttgtgctgcacccattaactcgtcatttacattaggtatgtctcttaatgctttccttcccccttccccctaccccatgacaggccccggtgtgtgatgttccccttcctgtgtgcaagtgttctcattgttcaattcccacctatgagtgagaacatgtggtgtttggtttttttgtccttgtgacagttggctgagaatgatggtttccagcttcatccatgtccctacaaaggacatgaactcatcattttttatggctgcatagtattccatggtgtatatgtgccacattttcttaatccagtctatcattgatggactggatttgggttggttccaagtctttgctattgtgaatagtgccgcaataaatatatgtgtgcatgtgtctttatagcagcatgatttataatctttgggtatataaccagtaatgggatggctgggtcaaat

SEQ ID NO: 899675 - DNA, 603 bp, Homo sapiens
atcccacttggtaggattaccaacatattagacattgcagaagaaaaaaaaaatatatatatatatatattttaattatactttaagttctagggtacatgttcacaacrtgcaggtttgttacatatgtatacctgtgccatgtttttgtgctgcacccattaactcgtcatttacattaggtatgtctcttaatgctttccttcccccttccccctaccccatgacaggccccggtgtgtgatgttccccttcctgtgtgcaagtgttctcattgttcaattcccacctatgagtgagaacatgtggtgtttggtttttttgtccttgtgacagttggctgagaatgatggtttccagcttcatccatgtccctacaaaggacatgaactcatcattttttatggctgcatagtattccatggtgtatatgtgccacattttcttaatccagtctatcattgatggactggatttgggttggttccaagtctttgctattgtgaatagtgccgcaataaatatatgtgtgcatgtgtctttatagcagcatgatttataatctttgggtatataaccagtaatgggatggctgggtcaaat

SEQ ID NO: 899676 - DNA, 705 bp, Homo sapiens
cagcaacggaacaaagctggatggagaatgactttgacaagttgatagaagtaggcttcagaaggtcggtaataacaaacttctccaagctgaaggaggatgttygaacccatcgcaaagaagctaaaaaccttgaaaaaagattagactaatggctaactacaataaacagtgtagagaagaccttaaatgacctgatggagctgaaaaccatggcatgagaactacgcgacgcatgcacaagcttcagtagccgattcgatcaagcagaagaaagggtatcagtaattgaagatcaaatgaatgaaatgaagtgagaagagaagtttagagaaaaaagtaaaatgaaacgatcaaagcctccaagaaatatgggactatgtgaaaagaccaaatctatgtttgattggtgtacctgaaagtgatggggagaatggaaccaagctggaaaacactcttcatgatatccaggagaatttccccagcctagcaaggcaggccagcattcaaattcaggaaatacagagaacaccacaaagatactcctcaagaagagcaactccaagatatataatggtcagatttaccaaagttgaaatgaaggaaaaaatgttaagggcagccagagagaaaggttgggttacccacaaagggaagcccatcagactgactgacagaagatctcttggcagaaactctacaagc

SEQ ID NO: 899677 - DNA, 577 bp, Homo sapiens
ctgggattacaggtgtgaaccactgtgcctggcctgagttgttattttggcattaaccctgtgtccttgaaacagtcacctccttttgaagacctgagatttccctaagatgagatgatgggacaagatcagtgttcttaacttttttctttttctttttttttttttttgagatggagtctccctctgttgcccaggctggagggcagtggtgggatctcggctcactgcaaccttcacctcccaggttcaagtgattctcctgcctcagcctcccaagtagctgggattacaggcacctgctatcatgcccagctaatttttgtatttttgtagagactgggtttcaccatgttggccaggctgtcctgacctcaggtgatccacctgccttggcctcccaaagtgctgggattacaggcatgagccaccacacctggcctgttcttaattttattggtcctgagtcacttagaatctggtgacagcagtgagccctcatcgtagacatatrcatccatgcacaaaaggtatattctactctaggggatcatggattcccgtagtgcacgcagga

SEQ ID NO: 899678 - DNA, 675 bp, Homo sapiens
ccacattaagaagtgggcaaaggatatgaacagacactgctcaaaagaagacataccaacaaacatatgaaaaaatgctcaacatcactaatcatcagagaaatgcaaatcaaaaacacaatgagatgctatctcatgccagtcagaatggctattattaaaaagtcataaaaaaaaaaaacagatgctggtgagactgtggagaaaagggaatgcttatacagtgctggtgtgaatgccaattagatcagtaactgtagaaagcagtttggagatttctcaaagaacttaaaacaattagcattcaaccagcaatctcattactgagaatatatcccaacacaaataaattattctaccaaaaagacatatgtccatcacatatgatgactcacatgttcattgcagcactattcacaatagcaaagacatagaatcaacctaggtgctcatcagcggtggactggataaagaaaatgtggcacatatacaccatagaatcctacacagcaataaaagagaatgaaatcctgtcctttgcagcaayatgaatgcagcttgaggccattaaactaactaaactagtgcaggaacagaaaaccaaatatcttatgttctcacttataagtgtgagctagacactggatactcatggacatgaagatggcaacaata

SEQ ID NO: 899679 - DNA, 592 bp, Homo sapiens
aaaatcaacagtagcccactaactcatgcctactgttgtgatcacagatataattgctgctaacgattctcatagcttgcttgtactgtcagagacrtaattatcagtgcctgtaagccactccgcaggtagcacaggcacagatagaaaacagcagctcgggtttagaaagtcccttgtggattgcaaagcactttcattcacatatggcacttcatttaagtgtcataagaacctcatgagggagattcaccaggggaagcagaaaagcatcctgattaggaatgtgtctctggacccagactgcctaggttcaaatcccagatccaccactcactaatcttgtgatcttgagcaatttacttcatctctcttggcctcagtttcttcatatgttctagggataataggtctcataaagcgcttttatggattgacaataataatcacaataatttgagtgctgactatgttctgggcttggttctaagtattttaaacgaaataactcatttaagcctcataacatctatgaggtagatactcctattcccctctgctttttgtaagataatgaaatcaaagttaattt

SEQ ID NO: 899680 - DNA, 612 bp, Homo sapiens
atggtccaagagacaattatgcagctatttcacaartggatcgattcccatccagcctgaaaatatatgcagatgcaaagaagagaaaatggaatgcttacagcccttgctgcttattctcagaagcaagaagcagagtggaaagaaaaagcgataaatgagctagaagaatggcgtgcaagacaagacgagcagctacagaaaagaaaggcaaactacagggcagaagattttgtaaatgacattgacgagtcatccccctgcactgggtggtaacaggtggcccggttgtttgactgtaaccccaagtcagcaagcagggcaaagaggtctcctgtatgcactcagtcctcaactccctcaagcaggcgacccctggtgcactgacaaaccgctcctggaaacactacatctgcagtatcttaatcctacctagtgaaattctacaaagtaactggattaattacgctgagttcttttggaccaaacttttttgtgtttagagctgatcattgtttgtgattgcacgtttccttcaactgtgtcctccctggcatacagagaggagaggagaaggaggaaatggaagggagggaaatctcctaacagcag

SEQ ID NO: 899681 - DNA, 603 bp, Homo sapiens
ccctttcagagaaaatcaggaattcaaagattctgatgaactgggcaactaagaatatcaaccttaaatgggtaggcaaagctgargcacacttgggcatggaccccaccccaggtactgcacaatacagttggaaaggaattcctaacatacagctgttccctgaggggaggagagtttgggccacacatacagtgtcctaactcaaaggttccccatggtttggctcttgattcatcaacttggaacaaaggggactaggcatacacaagagtctctagaccacagaaaaaaaagtgcagttttgtatggacacacaaacacttgcaggggcttcattcctgggaatagggcagagaaaactcaaatattcccagttgttctggaaggcacttgccagcatactctgccgcctgttgctgctgaccattagcttctgactagtctgcatcagagagctaatgtggccaactagccttagacttccagcagcccgagtaggacctgggcactttctcatccctcttccctggctcaccccagcaataacttcaggtctactgtttcctcctggaagaagtttgtgtgggcaatgagcacccc

SEQ ID NO: 899682 - DNA, 626 bp, Homo sapiens
caagcagcagaaatgggggaataaactaggcagcagaaataagcagtgagtcctgataaaatgaaaacagagggaaaccaagagggaagtttaagagacaamgttagagaagtagagagctctgatggaaggtggcaaggtgtcatgtgccagataatatcaggagggaaagtaactcccaaaagtaaaggcagaggggaagaagtatataatgaccagagagggggaaaatctacaatattttccagaaagagagatacagaaggctactgtcatcccaactgccttctagagttcggttatgaacttatgaaatcttcctaagattctgttaacacagcactgatctatataaatctaagacttctttatatttctgactttctcttttctgcaagttataacaagaagctttgaaagctgcttataaatatacaggaatgtggtccttctggaaaagccacagggaagggactgagtatgcctaatatttatgtaaattttaaccacataatgggcaactcaagaaataatgatgtgactgctgggaccaatcccttgaactgcaaaagcttttgattcacaaggaacagtggtgatgattgccccttgctctgtcaagagtg

SEQ ID NO: 899683 - DNA, 642 bp, Homo sapiens
gcaagtctgtaatctgaacctcaaaccagcctctttcacaatgtttctcttcaatgtgttgacttcagctcttcagtgaatatgtgtttcctgtgcattgttttatctgaattmaaaaacttttaaaatagtttacagtaaatatgtctatgtgtctgtcacttttgcaaataaaataaaattttctcttactaaaggaaccaagaagtatttttttaaggttgttgggaaggtgggcaggaagttaatggaaaaactgaatggtataataattattaagatagaagctttggtgttgagtggagagcaattttgtacagatttatttctattagtatttcctgataccaatattaggaaacgccaggtctgaattgtggttaactgattttttttttttttttttagagaattttcgacactgacctcatgaggctttgaaattaatataagcaagatgccttcatcaagaaatgagactgtgattcctcagtgctatcacattgtgccacttacgggaagagaaccaacatcatgctccacctcccacaggaaaaaatgacaaggaaagctcagcagcaccatatacaggcagtaagctaggcaagcccttgggcaggcacactcatgtaaggggaattt

SEQ ID NO: 899684 - DNA, 631 bp, Homo sapiens
ccaatcttcatagatgcaacccctcaacttatggcaggatgcaggatgtgggttgttasagtgatagagttggggagggctatgaaaacaggttatatggtagatagggatgaatctatgacatgctgctaattacttatgccttggagttgggctggagatactgcatcacctcctccaatgatgctgaggggcatcattggatcagcaaagtaacaaccccaagccagactgtgctctgtctctactatgttctcctggggaatccagagaggtcccagctactaaagggaaggggatgtgtaatggtccccagtaccttaaagcttacaacttatctgtcattatgtttagcagatgtcatcaggactcacctgaatatgacaccttttattaagccttttctcattgactcatgcaactacaccatagttctgtattttggctcccaccaccttccaaatactgtgtgcttgtctcatgcaatttctcaaactctattttgtgttacaattattcatgtatgtgtcttatcttcatatcagaataaaacattcttgaaagcagaacctgtcttacatagttctgtttgttctggtgtatcaaagttggctccatcctcttaacaaat

SEQ ID NO: 899685 - DNA, 668 bp, Homo sapiens
gagtgtgatcttctcattgagatcattcagcaaagacgacagattattggaaccaagatcaaagaagggaaggtatgatttctagggcagaagatttcatattctctacctggagaaaataaatcctaatacactccagggactttggaaatgttgagaaccctctttttctatacattctataattccctcttaagtctttaagacttagttaaaaggcctttgcttggcagttttttctccatccttttctttgtactatggtctcctgtgaagacctgtgatacaagggctgctccattgcccagcgccaggaggtagcataaaggtcttgtctatcatggccattgttttctatctcacttgtctatgagaaggtgggttctgtggaggcagagtttattttgtattcattgtgatatcctagaaactagcatagcattacataaattaaaaatgaatctgactttatttatagaaattatgaagtactttcccatgtttttgaggaaatgtatacaggtataacttcatggtcccaaaacccctggggtttcactatatcatatactcctttgtggatatagtaatartacttcttttctaatgttctaatgtttctatgttttaatttcctattgttttacagcaaactatatttttaagat

SEQ ID NO: 899686 - DNA, 571 bp, Homo sapiens
attgaagaatcctgctttaaaccactatatgtgattcaatgctaagcaccttgaattaccactctttgtgtgcatttcagccccagcaacaasagtttaagcagtctgaggtcaggaacttgtaacctgctatattcctcactgctacaaaatttgtcaggtgtgcaatacatgctaatgaaataaaatagaaaacatttctatcagaagaggtcagaaattcaaatgactacagaaaccaggcaggtagcataattatatgaagtaagctgggtttcatagaaatcttgatgtcagggacatgatggggttgggagaatgttggcagggattatagtcatctgaatattcattgctgtgtaaagagacaaccactatgccaccctagccaaattattacataggaatagaggcccgggttgccaaattttccaaaattttgagagaaactggatatttggatctttatgtgaattaaactgattttcatatattgatttaactcatataaattttgtgtggactaagcaaagcaagtcagtggccttgctgcagcctaaaagttgcctaa

SEQ ID NO: 899687 - DNA, 612 bp, Homo sapiens
ctctgcacatgagatgggtctcctgaatacagcacctcgatgggtcttgcctctttatccaatttgccagtctgtgtcttttaattggggaatttagctcctttacatttaaggttagtattgttatgtgtgaatttgatcctgtcatcatgatgctatctggttattttgcacattagttgatgctgtttcttcatagtgtcattggtctttatattttggtgtatgtttgcagtggctggtactggtttttcctttcgatatttactgcatctttcaggaactcctccaaggcaggcctggtggtaaaaatccctcagcatttgcttgcctggaaaggattttatttctccttcacttatgaagcttagtttgggtggatatgaaattctgggttaaaaattcttttctttaagaatgttgaatattggtccccagtctcttctggcttatagagtttctgcttgagatatctgctgttagcctgatgggcttccctttgtaggttgcctggcctttctytctggctgcccttaacattttttccttcattttgatcttggaaaatctgatgattatgtgtcttggggttgatattctcatgtagtacct

SEQ ID NO: 899688 - DNA, 539 bp, Homo sapiens
tttattccttccctatctccttagaagtccagcccactgtgatggggctggagggarggtagacggagaagaggctacattagatctgctcaagcctttaggaaagaagccttcaatctttcatttatttaaatatatgtattcatctcctcctttggcaattggaaaggttaaaccccaagggtgaggagtagaatagaagcttggaggaaagaggttgagaagctgccttctgtctgtctttggtcagcatttcaaattagttgtgaggcccttagcattcacacgctacccagcagagctcaccaggctagaagttctgctcatgacaaaggcagcacgctcgcctgtgacatctactgtacatcttctcgccttcaggaatccacggcaaccaacgttaatccaggaatcaggcactcaggtttctcagccgaaactctctgagcaacaattcttggtctcctttgcaggttcctcttcctccatcctattcttaaatgttgctatttctcatcctgggtcctcctttgttagtc

SEQ ID NO: 899689 - DNA, 539 bp, Homo sapiens
tttattccttccctatctccttagaagtccagcccactgtgatggggctggagggaaggtagasggagaagaggctacattagatctgctcaagcctttaggaaagaagccttcaatctttcatttatttaaatatatgtattcatctcctcctttggcaattggaaaggttaaaccccaagggtgaggagtagaatagaagcttggaggaaagaggttgagaagctgccttctgtctgtctttggtcagcatttcaaattagttgtgaggcccttagcattcacacgctacccagcagagctcaccaggctagaagttctgctcatgacaaaggcagcacgctcgcctgtgacatctactgtacatcttctcgccttcaggaatccacggcaaccaacgttaatccaggaatcaggcactcaggtttctcagccgaaactctctgagcaacaattcttggtctcctttgcaggttcctcttcctccatcctattcttaaatgttgctatttctcatcctgggtcctcctttgttagtc

SEQ ID NO: 899690 - DNA, 539 bp, Homo sapiens
tttattccttccctatctccttagaagtccagcccactgtgatggggctggagggaaggtagacggagaagaggctacattagmtctgctcaagcctttaggaaagaagccttcaatctttcatttatttaaatatatgtattcatctcctcctttggcaattggaaaggttaaaccccaagggtgaggagtagaatagaagcttggaggaaagaggttgagaagctgccttctgtctgtctttggtcagcatttcaaattagttgtgaggcccttagcattcacacgctacccagcagagctcaccaggctagaagttctgctcatgacaaaggcagcacgctcgcctgtgacatctactgtacatcttctcgccttcaggaatccacggcaaccaacgttaatccaggaatcaggcactcaggtttctcagccgaaactctctgagcaacaattcttggtctcctttgcaggttcctcttcctccatcctattcttaaatgttgctatttctcatcctgggtcctcctttgttagtc

SEQ ID NO: 899691 - DNA, 599 bp, Homo sapiens
gtgttttccactgttgctggcagactgttctatatatatatcaattagaacttggttgattgtgttgtttatatcttctatatctttgctaattttctatctagtagttctattagtttctgaaacgtgggtgttgatgtcctcaactaaatgcagatgtatctacttctcctttctactctatcagtttttgcttcatgtgttttgaagcctgttgcttggtgtgtgcacacttaggcttatctcttcctgattaattgaccctttattcttatgttcatgataggaacaatggacacctcttgtctgtagtaattttattttctctaaagcctgttttaccatatattaatatagatactccttctttatattattaatttttgtatgtatatctatttccatccttttattttcaaccaactatgtcattgaactagaagtaaatttcttataagtggcatatagttgggtcatggtttttattcactctccaatctctgttgatgggtatattcaaaccactarcttataaggtaattattgatatattagtgcttaggccaaccattttattatttgttttctttggttcttgt

SEQ ID NO: 899692 - DNA, 567 bp, Homo sapiens
tgaactcatgacacaccctatccacctcttactttgcaagtgacctacccatggttcttttaaagttttagattgtgtttaaagtttaagtaaaccctcaatgagtagaatgaaaattaatagaccatgcagttatggggaaatactaataatacactttatataatcaacctcctattcctctgaagatacctttcaatgttcagctgatactcgtagtatcagagagcttctggcaggtaaaatctatcttcctcttttcctgatggtggagctaatacctaagtccaaatcctgggtccacaccaaggtatatgacttgacttttataggggtcagtttcctcatctatcagaaaaagcagcttgactaaatgacctataaggtggctcccaatgtcagttaggaggaagagacagtgagcagctcaatcaccagagcctckcagggataaagggaatccatgagcctgagaaagaacggggatctggatgacccagcactggttccctgtccatcatttaatgaggcgtgagtttgggttgaccaaattgaagcctttctgaa

SEQ ID NO: 899693 - DNA, 635 bp, Homo sapiens
aaattaaggccatctgtttaggctgaaaaggcaatttcatttctagaatgacaaaccagatagtctctggaaatagtttaagaataactttgtaaaggattttaaaaattggattagtgaacattatgaaactcattctgaaaaggaaactgaggaaagcaaatggtgtgatattgttttcctcagcagcctataattctacattatgatctgcaattagtgcttattcaatattgtcaaaactggtccaattagtaggcttacgaataagctttttatggtatatacatagtgccagaggacttaatttgtttcacagtgttaaacagaataaataagtatgagatataggctcattttcagagaatagtcacagtttgttttttagtcacttgttaaaaaggtgcattcaagtcaataagctgagttagagtgagttagaggcagtcctatatgtccagggcctctgaatgtgaaagcagtctcctggctcccagaaagattaacatttggcctaatgatatgagatcacagaaagtttatggsaataataggtagaacggttggagtaaatgcaaaagcttcttcctctttctgaataaggaataggaaaattccaaacagaactgaaggtg

SEQ ID NO: 899694 - DNA, 589 bp, Homo sapiens
aatcttatttgccatatacatcttcagataagtgaatctcgtcattttcacagataaacccagagttgggattattgtccacattatatagctaatatgtagagaaataaaataytatagattgtattctacatggtgatgagcttctggatcttcacaaagagaaagatgaatacagtggttagtattcatttactgagacctctctgtgtctcagtaagtcatgaagccttgactagagctcctttcatgcctctgcatgtaactctgagacactgtgtcattggttatcccagaagcaacagctgttattgctggcctctgttcctaagtctagtagagtttggaataatgaggtttctagtcatctttaaaatgagatgttgcctttaggtcctagggaagtaaaatgtcaataacactttccagttccctgagaaatctttgaatgacctgaaagctggttccagccatcagttacaatctgtgggaaaacagtattattcaggagcaatgaggaaagaatatgtttacatctttttgctgagacaagtctttggtcatctaaggattctggttatcttgaaag

SEQ ID NO: 899695 - DNA, 643 bp, Homo sapiens
gtggtcctgggattcgaacccagccttggtggctccccatacagtcgttccttatgaccaccccacatcgcttcctcactgcttggcactagccttatgattggttgtgtgttccaggtgggagttaaccagaatgaaaaatttctaacagctcgggttatcatttatttatttactgaaaggcatcatggaattgtgggaagtcaggcacacctgagctcaaatcccaggtttgaatggtctttgaaatcagtcacacctgagctcagatcctagcgttgtcatttatgaactatcagcccttgggaaggttgcttttccttcctgacccttggtttccttttccgtacaaaggaatgttaacatgttttttggatatcactgtaaggcttaaatgagttaacgaatacacatctcatattacaaatgcctagtacatagtagattctcactaaatgacaactgtttttattattggcagttcctacaattttgcctgaactccttgcatccaggagagaaaccatgtggaacatgtcagtacagaataccaacagacacatgtttagtgctatcaaytctcacatcatcatgcatcttccctaacatgtcttttttccttttttttccacttccatataga

SEQ ID NO: 899696 - DNA, 243 bp, Homo sapiens
caaaaaaaaattattaaagtgaaaattcatgtaacataaaatgaaccatgtgaagtgaacaattcagtggcatttagtacaatgacaatgtggggattgttattttaatggggttgttagagaggcctcctaaagtgacatttgagacaagacctaaaagaggtgaggggagagctatgatgcagctctctgaggaacaacattagagcaraagaaatagcaaagccatagaccatgatgtga

SEQ ID NO: 899697 - DNA, 481 bp, Homo sapiens
tgattgtttcctttgctgtgcagaagctttttaactcgatgtgatcccatttgtccattttcactttggtcgcctatgcttgtgaggtattactcaagaaattgttgcccagattaatgtcctggagagtttcccagatgttttcttgtagtagtttcatagcttgaggtctcagatttaagtctctaatccattttgatttgatttttgtatatggtgacataggggtctgggtttcattcttctgcatatggatatccagtttcccagcaccatttattgaagaaactgttttttctataaatgggtttttttaaaaaatgaagaatattaaagaaagatgcattgtttcagctaaaggcaggcttaccaccgtaattgtaccctgaacactgtttcaggaaggacctcaaaggtatccaygtgctcaacaaggggtacggcatatgcttctctagtcctagcagggtcagcctgctgc

SEQ ID NO: 899698 - DNA, 563 bp, Homo sapiens
ctatttgaatcgtcaccttttattcgtcttccttggtgccttttggttgtgcttatttcggctttatgtaagcagcatctctggatgcataaatgaggcagataaaattccccagggtgactgatctgcccttcatctattttgagcactgcagagaagttaccatggcccacagcataactcaatcactgtaagccagtgagcacattctgagtttttttttttttaaataacctttcctggaggcatttggcataagctaagcttaaaggcacatgattcaatcattgattattcaagacatgtcatacttaggcttttctaataaccatattgtcactgtcaactagatattgagctctggtttctaattttgcactggaagctgtacaaagtctattgtgttctgtgtgtgtgtgtgtgtggctctggcaatgcagaaatggcaacaaggaagtatctagcacccatgaaaagactgawgaacaccaatttgctttctctcagtcaagccatctttcttaagacaacccttgtcctgtagcttgaactgtttaatcctt

SEQ ID NO: 899699 - DNA, 622 bp, Homo sapiens
aaaagaggaactcctccctaactcattttatgaggccagcatcatcctgataccaaaacctggcaaagacatagtaaaaaaagaaactcagggcaatatccctgattaacatcaatgygaaaatactcagtaaaatactgggaaacgcatccagcagtacatcaaaaagcttatccgccatgatcaagttggcatcatccctgggatgcaaggctggttcaacatatgaaaatcaataaaaataatccaccacataaacagaaccaatgacaaaaatcacatgattatctcaatagatacagaaaaggccttcaataaaattcaaaaccccttcatgataaaaactctcaataaactaggtatcaatggaacatatctcaaaataataagagctatttatgacaaacccacagccaatatcatactgaatgggcaaaagctgaaagcattccctttgaaaaccggcacagacaagaatgccctctctcactactcctattcaacatagtgttggatgttctggctagggcaatcaggcgagagaaataaataaagggtattcaaataggatgagaggaagtcaaattgtctctgcttgcagatgacatgattgtatgtttag

SEQ ID NO: 899700 - DNA, 574 bp, Homo sapiens
ggttcagtggcacaatctcagctccctgcagcctcaaactcttgagttcaagcaatcctcccacctcagcctyccaagtagctgggattacaagtgtgtgccaccacgtctggctaatttttgtatttttagtagagacggggtttcaccatgttgggaaggctggtctcaaactcctgacctcaagtgatctgcccgccccagcctcccaaagtgctgggaatactggcgtgagccaccgcgcccggccatggaactgccatactgtttttcataaagtttatacccttttacgttcccatcagtacacaagggttctaattttttcacatcctccccaatacttgttattgaataaccttttaattttaagacccatgtaataaggttgtagtttggaatattaatccaattatttttgatcctggtaatccctacttctaaattgtcctatgactcctcttggatactatttgtagtctcttctgtggttaaaaaaaaaaaaaagggcaatcctttcaccagttatgaggctattgtccccaggaggacatatgtaagataatatgtagag

SEQ ID NO: 899701 - DNA, 655 bp, Homo sapiens
ttaaatttaaaaaagtcatctatagtstctttccaagtaatagtatttgtgaaatcaccagattcatgtgtatgtgtggtttttctaacccaggtgaaaatgtacaataactgtacaatatttttaaaagttcattcatatgctttctaataccagttgaaaatattaccaatggaatgggcaccacactgtgggtagcattgtactagacactgaaggcccttttcagctttaatagtctatgaataaataagtctatgtatatttgtgtctgtgtcttgaataatttgacaaatacatgactgaaatatttctacccacttccatcacttctatccagagtagaatctgcattggctagctacatgttccagtggaaaaatgtttagagataagagattgtatttttttaaaaagttttaaaatattaatttttttaaaaaaattttttgaaatggagtcttgctctgtctcccaggctagagtgcagtggtgtgatctcagctcactgcaacctccatttcctgggttcaagcaattttcctgtctcatcctcccaagtagctgggattacaggcacttgccaccacgcctggctaatttttgcattttttatagagatggggttttgccatgtaggccaggctagtctcga

SEQ ID NO: 899702 - DNA, 633 bp, Homo sapiens
gaccgtctattcagatcatttgcccattttaaaatcagattatctcgtttctttgcgattgagttcttgtacattctggttattaattctttcttaaatggataktttgcaaccattttcttccattctgtaggtggcctcttcagtctgttgactgctgtgcagaagcttttcagcttgacgcaatcccatttgtctatatttgcttttgctgtctgtgcttttgagattttacccaaaaaatctttgtccagaccaatgtcctgaagcatgtccccagtgttttcatctagcagtttcatagttcaggccttacatttaagtctttaatccattttgatttgattcttgtatgtgataagaaataagaggtctattttcattcttttgcatgtgactattcggttttcacagcattatgtattgaagagactatcctttccccaatgtatgctttgggcatcagcgttaaaaatccacgcattggctgggcatggtggtggttcatgcctgtaacgcactttgggaggctgaggcgggtggatcacttgaggccaggaggttgagaccaccctgggtgtaatggcaaaaccctgtctctaaaataacacaaaaattagccaggcgtggtgg

SEQ ID NO: 899703 - DNA, 571 bp, Homo sapiens
gtgggaccatcagaagagaaggaagtttacaaaaccacattttgtgtggagatggaggctggaggcccggccctgggacttggtctggggtttcttgaggaagatctgagggtccaagrgaggaaggatgccctggccttctggccttctctggctgatcctgccttcttgctgcctaggacaggagagtaatgtcctagaagggtccctgggaggccagttaggaaaccctttgctgcttctgtctctagctcttgtcaataaagacggtgacacctgataacagctgtggcctgggccaatttctccgccagacactgtgtcctgatgggtgtgaatgtgtaggtgtgtgtgggctccgtgcaccctggcctgttcgggtgtgacctcccagagtccaggtccttcagggaacatggaagatacccttgatggggctgagcccacatccttatagaccttgatccaaaagcagtagatgtcctttctccctattatccaaatagcagatttcagggaagaaagtggattggctccaactaggtcacatgatggtcccttgggccaatca

SEQ ID NO: 899704 - DNA, 571 bp, Homo sapiens
gtgggaccatcagaagagaaggaagtttacaaaaccacattttgtgtggagatggaggctggaggcccggccctgggacttggtctggggtttcttgaggaagatctgagggtccaaggraggaaggatgccctggccttctggccttctctggctgatcctgccttcttgctgcctaggacaggagagtaatgtcctagaagggtccctgggaggccagttaggaaaccctttgctgcttctgtctctagctcttgtcaataaagacggtgacacctgataacagctgtggcctgggccaatttctccgccagacactgtgtcctgatgggtgtgaatgtgtaggtgtgtgtgggctccgtgcaccctggcctgttcgggtgtgacctcccagagtccaggtccttcagggaacatggaagatacccttgatggggctgagcccacatccttatagaccttgatccaaaagcagtagatgtcctttctccctattatccaaatagcagatttcagggaagaaagtggattggctccaactaggtcacatgatggtcccttgggccaatca

SEQ ID NO: 899705 - DNA, 632 bp, Homo sapiens
ttttgatactgccttcttccaaaatagttttgagaaatgcttttaagcttcgttttctaaatgtatagcaccaattttgtattatcctcagtaataaaaaatcttcatactttgaaaaatccttgattttttaaaaaaactaaaaacactaggaggtatttggttttcttaaggatcaactggaattattttcatttttattcagtagaaataatatatagttcaggctaggtgtcgtggctcacacctgtaatcccagcactttgggaggctgaggccggcagaccgcttgaggccaggagttcaagaccagcctggccaacatggcaaaacctcatctctacagaaatacgaaaaattagccaggtgtggtggcatgtacctgtaatcccagctacttgggaggctgaggtacgaaaatcccttgaacccaggaggtagaagttgcagtgagctaagatagtgccactgtactccagcctgggtgacagagtgatactgtcaaaaaaaaaaaaaaagaaagaaagaaatatatagttcagaaarttttaaaaattaaaataaaatgtttcaaactcacaactataactcaattgctttagcatattcaatttttttctttaatgcatatg

SEQ ID NO: 899706 - DNA, 701 bp, Homo sapiens
aatcgactcacagctccgcaggcttgacaggaagcatggatggctaggaggcctcaggaaacacaatcacggcagaaggcaaaggggaagcaggcaccttcttcacaaggtgagagaagggagkgtgagagtgcagggaaaaaaaactttcacttttaaaactatcagaactcatgagaatttactcactatcccaagaacagcatgggggaaccgcccccatgatctaatcacctccctccctcaacacatggggattacaattggagatgagatttgggtggggacacagaaccaaaccatatcagaaggcttctgtgaccaggcatgtgttgggtttaccacataccaagcaattctccagcagacaccaactgggtatcctataacttcattcaattcttctgctatctacctggggatagcatcagactctgcaggctaaggtcacagtcccacaagactgcctcccacttcagatgccaatggcaagccccaggttgtgatctgtgcttctgactgaccagctaaaaacctgggttcccatatccccctcctcatgttcaattaatttgctagagaggcttacagaactcgaggaaacactttacttgtgttacccatgtattataaaggatattacaatggatacagatgaacagccagacggaagagatgcacaggaaaaggtatgaggaaag

SEQ ID NO: 899707 - DNA, 598 bp, Homo sapiens
ggcttgtttccaaagccacaggtttactttaacatatacagcttttatagcackaacattgtgttctatgtgtccgtcattaagttgggtattttacacacattatcttaatatataaaacaattatatgcagcagatgttattaccatgatactgcaaataagaaaactgagaaatagaacattcaagggatttgctcacagccaaataatagtaattggcagtgttaggatttagactgatttctgtgtgatctgtagtccattctgttcaacactacatgtacctgccttcccgtggtatcattgccccagttctgaaacctaggtctaggtcgcaggagaactagcttgataaggatgggctttagagccaaaatttaagccatgctttgtcttatctgcataattttatgttcccagtcaggtaaaaccttacccatttatctttatttcctatcaaatgcagacttccctatgagctgttgcttggtaagttccaacccaatatgatgtcaccactgggtggacctctatggcacctgtctcactctgccttggttccagttatttttgtatatgcttcattgattatttct

SEQ ID NO: 899708 - DNA, 664 bp, Homo sapiens
aacattgtgttctatgtgtccgtcattaarttgggtattttacacacattatcttaatatataaaacaattatatgcagcagatgttattaccatgatactgcaaataagaaaactgagaaatagaacattcaagggatttgctcacagccaaataatagtaattggcagtgttaggatttagactgatttctgtgtgatctgtagtccattctgttcaacactacatgtacctgccttcccgtggtatcattgccccagttctgaaacctaggtctaggtcgcaggagaactagcttgataaggatgggctttagagccaaaatttaagccatgctttgtcttatctgcataattttatgttcccagtcaggtaaaaccttacccatttatctttatttcctatcaaatgcagacttccctatgagctgttgcttggtaagttccaacccaatatgatgtcaccactgggtggacctctatggcacctgtctcactctgccttggttccagttatttttgtatatgcttcattgattatttctactcacttcccggaaatgttccctttccctgagaaatggagttgtatctccctcattgatgcatcctctgtaacatctagctgtttaatgtgtcactcagaataagtgctcaataaatat

SEQ ID NO: 899709 - DNA, 420 bp, Homo sapiens
tttctttttctgtgatgcatgtattttaggtattatttccttagctgatacatatacaatatattcatagtagtttctggatgtcaacagagtagcattttacttgaaagtgaagagtagacgctgtcatttaaaaatatctaactgtaatcaagaaattcattctctctctcctttccttcctccctcccccactctcgtttcccatctgaaaagtaaacatacttgatacttggggggatggggacagagccaggaggaaccagggtctgatcgctgggggctttcaraaacttaggccttccttccattagaacaccaaattccatcctaatacaccacttaattcatgttgagtagaggccacgctgaaaactaatttttcaattcacagaacattgtgagctatttgcaaaagtt

SEQ ID NO: 899710 - DNA, 636 bp, Homo sapiens
gcctaagataaatgttgtgatgtacacactgtagctgtgatgaactagacatggtgagaaatgcaacayactgagaaaaagacgaaaactgtgataaaagtgtcatgatgcaaattgttttacattaacaatattacactacaaagaaagaaagacaaatactttaatgcagcaagagaaaaataaaacaaaagcttcccctgcaactgcaagataagtgtgccatttcaaatgcgcacttcccctgctcactgggagaagcctccagagggacctctctgtgagagggagagaggcagctgagagacatacacccactttaaggctctcaggctacacagaacatttttttccccagaaaaaggcagctgtgtcaccttgcctctggaaccattgatcattccctactcaactgtgcaccctggcttctcaattaacaccctttacagtccagtgtatggcacactttaagctgtaaagataacatacaaagccagaaaaagaaataacaggcatgaatttaaggtatgattaatgattagaaaaaaaattaattgtgctattttaacctaccaaaagaggataatccctctttgcctatccatggaaacagaaataaaaaaggaaatggatgac

SEQ ID NO: 899711 - DNA, 615 bp, Homo sapiens
cttgtatttgacatttaattgatgggaaagagatacatacttctctcactctgctaatatgtgaaacccaagaatcaaatcagagtaaagataargaatgatttatctgtagaaatgtagcatggggctattttgaaattcggaaaacagaatttgttgataaaaaatcaaacgtgtaataaaatataccacccagccttgcaaaatagcagaataaatgagatcatcttattataggtatccaaaaagaacctctaagatgaatcagcctattattcgctgtaaaaacactgaaactcagaaaggaatggctttgttactggcattttgaggtcaacactccgtatctctttgtacctggcagcaattacataccatagtactcccaccgggatacaggcgccacggctattccacacttgaacacgccacttcccgatcccaggaccattgaggttacgtaccctccatatgactaaggaatggaaacagttatttttatggaggtaaaagaataaggacatatggtaagcgagtcgcagtttccacatttctcacatctttatatactgtgcctctttagagataaaaagcatggtataggaggcttaaatt

SEQ ID NO: 899712 - DNA, 636 bp, Homo sapiens
ccccgatttctgtctttcagaattttcaattcaacttaggtatttgcccttctccttccatgtgctagcaaaagaagatactttccaacctgagaaaggtgagtcttgagtagtctggttcaatcacggcaattcattctccttgccggtgattggtttggatatggacaagtgacacaaatgtcgccagtaagatctgaaagtttgcatctggtcagaggacttatggaaatggttttcctccctgatacagcagaacatgaatgaggaagagcatcctcttctgccctgtgaatgagctgtatgagcaagtgctgggttgagctgcagaagccatgctcaaccatgagatgacatactggagatcaaaagacaaaactccaaggatggcagagctgaaaggtggaaaggccccatgttcttgatgtgttcaggccattacattaacaaacccaagaaccactttacttctgcacttccaattataaaagatgctaatgacaatacagtaataaaacgctatcattcaaataacttttggccaggtattgggttccttgaagcccaaaacatcctgatacaatcctcayacagcatcagggggctgtaagtcagtgaggatggacacggaggtgc

SEQ ID NO: 899713 - DNA, 669 bp, Homo sapiens
agaatgtactaagttatttaattaaaaggcaaaaattgcctgactgattaaaaaascaagaagcaactataagttgagcatgccctatctgaaatgctggggccagaagtgtttcggatttctgattttttccgatttggggatatttgcactatttaccagttgagcgtcccaaatgaaaaattagaaataaaaaatactccaatgagcatttcctttaagcatcatgtttgcactcaaatagtttcagattttagagcattatggatttcagattttcacatttgggatgctcaacctgtatttactatctataagacagataccacacattcaaagacatacataggttgataacaaaaggataagaaaagatgaaccactattacaaacagtatatataagacagctgagtggctatattattatcagacaaaataaatttttaagaaatattatggataaaatggtgaaagcatacaatttataataaatgtttacacacctaacaatagaatctcaatatatatgaagcaaaatctgaaaaaccaaaagaaaaatgacaacaataatagttagaaattgtcatatcccattctccatagttcatagaacaaatggaaattcattaagtctataggagacttagacaatactatttacacactt

SEQ ID NO: 899714 - DNA, 647 bp, Homo sapiens
ttattctgtcatattgccatatttaaacacatcctttgttgttataatgtctttataattgatatttttaacatttaaataatacttgttcatgtggatatgccataatttttaagtcatttccataatattgaacatttcagcagtcttcagatttttttctattagaacttttactgcagtgaatatctttgaatatacagcgttttgcttctcttatttggttaaggtaaactttctgtatttgaattactggggaaaaaaagtatgaacatctttgtgcctctcattaaataatatcatattttcttttcaaaaagatatataaatttatcagcaatgaataagtgtaccagctacactacaaccataattatattacaatcatttaaagttgtgctaaaaggtacaaaattgcatctcaagtttgctttaatttaaatttctttgattcctaatgagattgtatgggcttttttaatgtataattattgtttctacttttgtgaattatctcctyctatattttgtgattatcctagttttagttgcacttttcttataaatttggatgtaaaattacagattagaaatattaacctttagaaatattagcctttgattaaaatgtttttccagtcagttgt

SEQ ID NO: 899715 - DNA, 582 bp, Homo sapiens
attcaaattctccttggcatcttgtatttttatttgctaaatctggcaatgatacctaaaaagtacgttttaatgcctcacctaacattaaaaatgctgatggtgccagcktagtggtccccaattcaggcaacacattagaattacctgcggttgcctaggcccaccctttacagcagctaaatcagtttggggaatagcacccaggcattattttaagctccccagggggttctaatggacatctaggactcagaaccatgttgctggtagatataatgaccctctcagagaggcatatcaaagatgtctcaggatctagtgacagggaaatatatgtatgtttaaaagcatattcaacattttaatataaatttatatttgaaaaataaaatgtgtttatgttataatctacaaacaaataagagtaaccaagttattcaaatgtggacagctaaaagagataataaagcacatagtccagaacctggggcaagtccccatggggcagagcacctgggaatagagaacaggggtcacaaggcaaggggcaggcaggatttaatgggtgcacaggtgccc

SEQ ID NO: 899716 - DNA, 565 bp, Homo sapiens
gaaccccagaggcagaggttgcagtgagccgagatcgtgccactgcactacagcctgggtgacagagtgaggctccatctcaataaataaatamataaataaataaataaatattttgggatgaaaagtcagatttagctggcagcaacttaccatgtttgggccctagaatattgaatatgaaggattttggcaaatgagtagattaatagacaattttaggacctacatatttaagaatatgtctgtaaatcacacaatcaaatcagtactcaaaataaatgcattgttttttagccttcaagtcaactacatatagtttcaaaactttaattggggaaaataagaattttagaaacctggcatgaagcttttttcacaaagaaggaaagaagtagcccagagaacactcgaaaatcagattgtaaaataatgaccactgtggccattataatgttagtgtgcccctaaagtttgcatgttgaaattctaacccccaaactgagggtatcaggaggtgggtcctttgggaaatgattgggtcttgagaggagagctctcatga

SEQ ID NO: 899717 - DNA, 595 bp, Homo sapiens
gtatgctgtaggtccaatcccctaacttcaccaagggaagactatatataggacatatctgggtagtatacattacagcttttgtttattcttatccaccataatttgatctcttcttgcctaccacaaattaactggattaacatgatttacaataaatgcttctcagcaagtgtagctatttatttatttatttttcaagataggatctccctctgccacccaggctgcagtgcaatggtacgatcatggctcactgcagccccaaccttcctggctcaagtggactcacatacacctcaggctcttgagtagctggtactacaggtgcacaccacctcgccagctaattttgtttatttactttttggtagagacagggtctcgctatggtgcccaagctggtctcaaatccctggccccaagcaatcctcctacctccacctcccaaagcactgggattacaggcatgagccatagtrtcctacctcttctgacctttagaagattttttactaaaagaaatctctacccattacccaagtaaaatatcatgactgtatctctttgtgacattatagatctcattgtgccc

SEQ ID NO: 899718 - DNA, 613 bp, Homo sapiens
cccatgccaatgaccctcatctccagacctgggagaataaaaagtgtgtctttttgacatcccagctatctggtattttctggacatcaaggtgtaaactataactktgaaagttacagctatttggtttttggtgtggcttatccaaaaaatttcaggtaagggaaactaaactgatctctggcaagtgaaaatatatgtcaaaactcttttcattacactcagaaggatgttgtctctgatgtttggataacatctgatgtttgcagatgccaacttgccaaatagatgaattcagacttttctaagatccaggttatagttcctatcaaaatgggggctgtcatttgaagtttctcctagtcagtcaaattgacataagaaatgaactataacagcccataacccagtagtcatttagatacaggtaattaggctatttctcctatttttaaccagcaggaaagaaacagatgagctttttactggttgggccaaagaattgcaggaaaaattatggttctaggattggtaggcagttggcaatataagtatcagggaagacaagaagagagtgaaatggttgagagtaacaattgcagatccctattga

SEQ ID NO: 899719 - DNA, 648 bp, Homo sapiens
aaatgcagcagcttatcctttatcttagaaggaatatctcaacaggtcccacatcactggacctgtagaaattttactgagatggaagttccctgaatttcagtcacatttatttcccattctctggcactcaaatgtctcaccaagtccagtgcgtttgctactccttggtccactggatccaatcagcataatgtcatcaatgtagtgggccagtgtgatatcttgcagaagcaaaaagcaatcaagttctctccgaataagattatgacacaaagccacaaagttgatatatccttgaagtaggacagtaaaagcctattgctggccttgccagctgaaggcaaatttcttctgttgggccttgtggacacgaatagagaaaaaggcatttgtcaagtcaatggctgcataccaggtaccatgagatgtgttaatatgctcaagcaatgaaaccacatctggtacagcagctgcaactggagtcaccacttggttaagcttacgataatccactgtcattctccaagatccacctgtcttctgcacaggcckaataggagagttgaatggagatgtggtgggaatcaccacccctgtgtctttcaaatcctggatgctggcactaatttccataatcctattttt

SEQ ID NO: 899720 - DNA, 606 bp, Homo sapiens
atcagcctgccactgtgaccttattctgagcaatattttccaatctttggaagacttatcagtatcttgtgacattctgcctgatatcttggcacttagcatgctcctyacatgcaggcttaataaatcacattttattttaaaaatgtgccaattgtgttagttcctgaaaaataattaagaattagacgtaaggaaatggtgcattccaagtagaaaaaattacgattataatgcacttgatagcaattaactcaccccttcttccattctagttcaatggctggaaacagataagtgctatgatgtttacaaagagataataacttacaagttaagataggtatagtctgaagggaaaatgtgggcttcttttggaatttattagacttaacaatgtgtaaaacaaaggcaaaccaaaaagaaaacaagagtcatgagttacatagtgtattataatatctgccactggtgattattgtgttttttcacaggaaagaggaggagaaacctttaagcttagcaaatatctgtcttgagtggttctgtgaaaagctggaatatccttcctgctattagccagtagaactgctttagtagaaacca

SEQ ID NO: 899721 - DNA, 664 bp, Homo sapiens
caggaagattgcttgcatccaggagttcaagccgagtctgggcaacacagtgagaccctgtatcttcaaaacataaaatgttagccaggtgtggtggtgcatgcatgtggtcccagctacttgggaggctgaggtggaaggattgcttgaacccatgaagttgaggctgcaatgagccgtgattacaccactgcactccagcctgggtgacagagcaagcccctgtctctaaaatgattaaagtaacagaatggatgaccaatactaatgccagggagctgatggttataatactcttacatagagaatattagtgacaaatcagcatgaaaaaatggtcaacctcatcattatgcaaaggatttgaaaaaattactttttttcaccctaataacaaagtaaagataacttgatgcaatatactccgtgctgtggagcagttgatgaaatatctgctctcatattctatttgtgaaatagtagttggcataatctttcttaaaatcaagttggcacaacctattaattatcataaaatacaatctcaaacttcrggtaatccatcttaagaaactataatatttacatgcagaattatagataaaagataagaattttagtgttacttttgttagtataagaaagaaaacaacctaatgcccaa

SEQ ID NO: 899722 - DNA, 623 bp, Homo sapiens
tttgcagagttgtccactttggggtttgagcatgggaagtaaattcagagatgcaagtatstgggagagggcatgaactcgtgagaaagtcctcatattctgagctcctatgacagttttgcctttagaagctatctcgtctcttagcagctttgttttgggcagaatgaatagcagaggggcaggaaagacccagaatcttgatgcccagcctccctgcttttactctgctgcttgatactgcctctaatgaaggagccgttcttatagagcagttactttgaggcctgagaaacccagaaaaatttatcatgactgctagacctgggcacaggtggattttagattagacttggcagggacaacaggcatcttggaaactccctaaggaagggtccagatcaacaacactgcaaacaccatattcccttcaggcaggcatccctattttgctgtaccaggccttaatactctctgggttgtagcctccagtggtccatttgacttctgagatgtattaacaagaagactaatattaccaatggtaaccgctcacttaacaaaaacaaaacaatataccccaacatttattgttgccttgcaactctgcctttttggcctct

SEQ ID NO: 899723 - DNA, 583 bp, Homo sapiens
ctctagttccatttgcagcttagggtccataagaattctggttctggtctttctgagattgaagtcttcctagtcgcagtaggggagggatccccaaaaagtttccaaagaagttagagccctcattcccaaattagtgccctgggctggaaattttagcttaaattgtctctcaaatccatttgagctttgaatttcagtgacagaaggcctcaccttgagttctctaacacatacttgtctccaagtgaagtgtcttctcatcacccctcaccttcttcccggtccccttccatgtggatcgctgcagtcacttctagttgaaatctctgctaccacctgacttctttccagtcctgtagcacaactagtctgtaaaacataaattttccaagtcacctttagggaactgcccaattgcaattggtgcagatggacacaaaaggtggttcaaaagttggrttaacccgcatgctgataggagttaatggtgatgcagaatatttgtttacatttagtacaacttttacagtgtgttagagatggtttttgtaagaatagaagtatacattcataaaagcaa

SEQ ID NO: 899724 - DNA, 598 bp, Homo sapiens
agctgtctaataaataacagtcagtactaaggtttaacagatgtcagggaattctgagtactgaatcaccctgaattcttccaaattctcattctcacttccagaaggaaaaaaaaaaactgtggagaaaccccacattccttggggcttcagaagtagggagaaggaaagaccaactaaaacttggagagtcggcccctcctctgttccctttcatgagcctcataccctcaatagggcctctctccttgaggtaatcacagatgctaactcacaggcagtaaaacttgcccacctcattctgactacaccctgacaactaagaaatttttcattcaccctcctccaacgccaaaactctattgtttgttctccttctaaaatgagttatcttattataaaaaattcaaacaatacattgaaagtccataatcctatcccttagagagagctattttgtgattatttcttcagctttgttttctctttaattattgacagagtctgttccttaatcrggaaaaaagaacattaattttctaaagataatagttttattttagaaacataaaaaatattcaaaatctaattcacagcc

SEQ ID NO: 899725 - DNA, 620 bp, Homo sapiens
catagtcaaaaggaaggcaaaaaaaaaaaaaaaaacccacatgatttattcagtgtccccatgagaataaagaccctcccctcctggcctcctttggctgtattgcatctttttcatgtatgcccaaattcccccatggaagcaccctcacaaagcataataaaatgacagtgtgcaggcctgatacaccaatgtcaagtttcccacaatgcctcacatgtggccaagacctatgtgcattacttattcttttgttgttctattctttgtggtgtaaagatattgttgataatgtcaaaaaggcctgcagatacccctgcgggtcatagtaataagaaaaagaggaagcacttatatttttctatagcacaggaattcaagttgttggagaaactgggaagcagtgcaagtgtgaaatgtcttacagcagagtatggtgttagagtgaccgccatatgtaacctaaagaaagagaaagataaatcattgaagttcygtactgaaggtaaagaacagaagttaatgaaaaataaaaaaaaaaacactgcataaagctaaaattaaggtctcaatcatgtattgaaacagtggatcttagtgtcacagtgaacacatgccac

SEQ ID NO: 899726 - DNA, 586 bp, Homo sapiens
tgtatttatttatttttgagacagagtctcagtttgtcacccaggccagagtgcaatggtgcaatctcggctcactgcaacctccccctctcaggttcaagtgattcttgtgcctcagcctctcgagtagctgggatcacaggcctgactaatttttgtatttttagtatatacagggttttgccctgttggccaggctggtctcgaactcctggcctcaagccatccacctgccttggcctctcaaagtgctgggattacagtcatgagccactctgcccggctgataatttctaatcttttagactactatatcccagggaaaaacctctcatccagccttccttgttttaaaacagtttcctgagcctatttcatcacacacacacacacacacacacacacacacacacacacacacacacttctctttactcatgcttttccattgttaataaacatgcttattaaaaaacacctgttttccccctacccctccttttcttcaatggtcaaattgtcacctttmaacacctatatcaagccttatcttggcataaaactcatctccatcacataatccctt

SEQ ID NO: 899727 - DNA, 598 bp, Homo sapiens
gtgatcacttctagctgttaggaacaattttgttatctttgattatgtagtatataatggttagaatagaaaactgaaagttttttctatactccatagccagaaatcattttactaacgtgaaagtcattattatgtcccctatactttaaaattcagtttttggagatggagtctcactcttttgcccaagctagagtgcagtggtgtaatcatagctcattgcagccttgaactcttgtatatcccttattttaaacaaaaatttgaatattaaatttacagttctctggacaatatgggcatggcttcaactctatttttatcagagctttaaaaaacttgagatgtatttcatgtactgcaaaatttacccttttaaagtgtacaggtcagtgatttttaatatatttcacaagtttgggttaccataaccactatccaatttcagaacatcttcaccccgcaaaaagaaaccccrcatttcttagccttctctctccaatcccgcatcctccttagttctatgcaactactaagccactttctgcctctatagagctacctttcctataaattttctataactgaaatcata

SEQ ID NO: 899728 - DNA, 546 bp, Homo sapiens
atgagtgagacatgacccaagtctagtagggtcaccataccctcaaaaacagggcaacattcagaacaccatagtaagtagtccctttacatggacacattctagaaatgaagcagctaatagaaaaattcctattttagagttataaatcaaaagtgggtagagacagagttgtttaagctttaggatatatataagacacttgcatttgtaatcaaattcctacactggatgagcaaatgttccaagcaaaatcagactaaatataaatgcctaaagcaaacttgccttatgggatgcactgttcagcgttaagaaagtttgggttcacgtagatgtacagaattgctgaagtccctttttgtacttttgggagggcaaaattttatgcccagtaaataaaattttgcccaatttcaacttggcggggggakttggtgaaatcacagattcgttctcacaatggactaaggttgcagatgtccctgtatctcaggtggatgccaaagccacccgtttgtccactgagactcaactccttttctg

SEQ ID NO: 899729 - DNA, 448 bp, Homo sapiens
ctggttctgtgaagccctggggaactagagagggggtcccgtaggcagaggctaccctctgtacgtcaaccagggctgckctaattagattgcttcatattttgggcttccaggtaagaaattgtttggaaaaaaacttcttaagatagagagatggctcactcctgtcatccagcattttgggaggccaaggtggatggatcaccttaggttgggagtttgagaccagcctgaccaatatggagaaacctcatctctactaaaaatacaaaattagctgggcgtggtggtgcatgcctgtaaccctagctactagggaggctgaggcaggagaatcacttgaacctggcaggtggaggttgcagtgagctgagattgcgccattgcactccagattgggcaacaagagcaaaactccatctcaaaaaaaaaaaaaaaaaaaaagaca

SEQ ID NO: 899730 - DNA, 577 bp, Homo sapiens
cccctcccccatgtccatcatgaaaagatccagtgatgggtgagacagcgggttctctaagtgggttctcaaactggaacagtcggtcccacagtctcctgaggccccctgacccatctcctttggatgaggtttatggcaatccactcttcttcattcctatttttccccttgtggttatgactgtgtgctgtcctggatactgaaaagcttgttccttctttcctctttgcactaaaatgtgccagcactattgttagaggaagagtcaaagaggtgagggtgtgtagctgggatgaagccacggatatctgaatggcaagcccgcaagcctgcagaggcagggagcactgactacctgggccagaatagaacctggaagttccggtaatgcgttatcaaggatgaagcttctctcttcccccttctcacttgggtgagtcaggttttgcttcataaaggccacgttgtcacaggttgcttatgtaatgctcacccaatgaaargaaacattcaaagggtgactttgccatttggttgccaaattaatgccttagagaaaaatgggtagagttag

SEQ ID NO: 899731 - DNA, 689 bp, Homo sapiens
atttccgtgtaagctgtgtctgattctgaagtatgcttttaatcatattgtgattcttaatttcagagagttagcctctggttaaagatgacagattgaacttatatgtttacctgttctctctcctgaaatgtaaaataacagtaatgggatatttaaaaatgcttaatccacaggtggtggcaggatggtagaggtaaaataacaacaaaattttggaaactagaaagcagacggacaaatctacttaatgactaaataataccaaggaaactaagttctaagccaagaaacaacccaatttacattgcagaatttcccaaaggctcaggacattaccaaattagatatctctagaagcgaggataatattgggatgagaaaaggaaatattggtcaaaactctttagattcatgttaaacctttctttatgccacacatcttaagtacctgaacaccactctcccctggcctacagtataaaactggttagaaggtgaagaaatttaagggaaggcttacatatggaagagtaaaacattttacattcgttttgctttcagtgcccaatactggcagccaagtttatacccttcagaaagacaggtgagaaatccttctttggkagtatctaagcagtcctagaaggcttctccacaccagttccttctccacaaccagggccaac

SEQ ID NO: 899732 - DNA, 534 bp, Homo sapiens
tggatgtaaaattaatttaccgaaatcaattacaaactcattaaatttccasaaaaatattagtgtattttctaacaacttttataaatatagcatttgtaatagcaatgaaatcataagtgatctaagaataaacaacatacatgcatgggcatgttaaaggagaaaaataaaactttatgaaagtttcactaactagaaaattaactatgtttatagataagaaaacattaaaaatatcaaaattctcctcaaattgataaagaattaaattccagtgtaaatcatatcaagattctttgtgaaacttgacatgctaattctacattttacacagatgagacaaaaacaagaaaaaactgattattcctgaaaaagattggctaggaggagagggagcttgccttagcagatcttaagcctcataataaaactaaagtaatgatgacagtgtaatatcggtacataccagcagaatagaattagagaatccaacaacagacccatgtgtataagtagaaaatacacaaagtt

SEQ ID NO: 899733 - DNA, 662 bp, Homo sapiens
ctgttctccctgggaagtttcctcactcagcattcaggagcattcaggtcaaggtgaggtctgcctgttccaggacacctgacctctgagaagacctcaggaatcatcaggctgatccaggttttggtataggtctatggggtcctatgcaccagtgccagggtgcctgggggtggctgtggaacaggctccatagcctacagctgacccggttatgggcctggatttcccattctctaaccatctgtcaggagtcatcattaaggaagtggaaggaggagactcatcagatcaaatgaccactcacacagttttgtggttcagaatttataaatgtctcttcttagttttcttcaactttattttaataggaggattggaacctatggcatgctattaattttattacatatttttggtggttttcatttgtcaaatattcctgatgttcagtcttgggtttggagatgaactgtatacatgctaggacaattacactcttatatggctttatgtcctccattagtaaagaggatatctctagcccattcctacaaaccttttaacctgcatagccatattttctgtgtattcatttagtaagaaattataaagaatcacctattattttartcttatttaataaactgtttctaatactt

SEQ ID NO: 899734 - DNA, 607 bp, Homo sapiens
gggcatgtgttggtaagttttataaaacatggtattcccttgccaaatttatggcactactayaggcattaatttacactaaggattatttcaacagggtcttttagacttaactgtatcatgcattgatcttgcaattcattagaaacccttaaagaaaaaaaatagatttaggtagcctatattaatcaaaaactgtttcatgtgtaaatcttggagaacatttattaacttttttataaattatttttactactgtttgctacttaaaaagaattgttaaatgggtaacttttagctttttataatcaatgctatactttttaaatgtcaatttttatattattaaatttgaaccattgtaaaaataaggaaaataatggaatagtgagaatgaaaatcaacaagaagtgatcaatgttaacaccatgatgtattttctttttgttgtcttttactgtctttgtgtatgtctactatatagttttaaaaacaatttagatcatactatcatacagtattgaatcctgcattttagtcccttaaaaatgctttcaaaatattttaattgcatggtatgccatcctatgggtaacacataagttat

SEQ ID NO: 899735 - DNA, 658 bp, Homo sapiens
tttccatatagcaatgcaagaacagactaatataaccagtatatatactatatacgttaacattcccattttaaaaagagtaagactaaatgtacttagaaactgagattatctaattctctccttattgaaagtctaaacaaccaattcagcaattctttaatagttaccaaatgatatcgattgatatttacccaagcttcaagtttgtttcacataatgaaataagtcactaatacttacctgattgtaatcatctttctttctttatcaggtgagtagcattttttcatttttatgatattagcaggatattggaaatattcagagttgataaaaaagaggggctgaggaattctggaatatacttcatcacccagtggaaacatccatgcatccagggcaataccacatctgtagatatttgttgacaatgatgaaattaaactggttacatactagccaacattgaggacatcctaataatgctaggattggtggacacgcaccataccagtttattatgggttatctsattggaataaagaggtatcatacttcaatgtgggaaagggatatgattaactttgtaaagtagcagacctggaattttatataatcattttctttatatgcctttaggaattgcaaccatttg

SEQ ID NO: 899736 - DNA, 679 bp, Homo sapiens
gtatcttttcatgtatgtaatgtgcatctcttcttaggagtaagaccagaacttttctgctctgcagttttctccctgtgagggatggtgaaacttggtggctaagagcatggtttatacagacagacttcttaggtttatattctggctctcctctgtacttgctgtatcagctagggctgatgtcttcacttttttatgattccatttctacctctgtacaataaggcaaatatgaatacttacctcagagtgttgttgtgaagatggaatgaattaatggccataaagcacttacagctgtgtctggtacatagtgaccactcactaatggtcacttataattccttcacaacctgtaagggtcctttccacccaggtgatgtccctatgtctcaactgaatgactggttagggatatctttccatgggctactgtggctgcagataattgcattcttatttgagagttatgttaactagtgtgggcttttatttgcttctctctttctatcaatgagtcctgctgcttcaaccctgggttaactgaaatttgaaacctttttctactcaaattcctttgatgctgaaattcctctgsggtcacagctaagcactttgtgtggtaaccttctcttctgtcctcaggcctgctgagatcatctgctcagcagcatgt

SEQ ID NO: 899737 - DNA, 651 bp, Homo sapiens
tgggatcaatgatgatatcccctttatcattttttatttatkgtgtctatttgattcttctctcttttcttcttcattgatctggctagtggtctgttttgttaatcgtttcaaaaaaccagctcctggattcattgattttttcaaagggttttttctgtctctgtctccttcaattctgctctgatcttagttatttcttgccttctgctggcttttgaatgtgtttgcccttgcttctctagttcttttaattgtgatgttagggtgtcaattttagatctttcctgctttctcttgtgtgcatttagtgctataaatttccctctaaacactgctttagctgtgtcccagagattctggtacattgtatgtttgttcttattagtttcaaagaacttatttatttctgcctttgtttcgttattcacccagtagtcattcaggagcaggttttttgattttccatgtagttgtgctgttttgagttagttcttaatcctgagttctaacttgattgcactgtggtctgagagactgtttgttatgatttctggttttttgcatttgctgaggagtgttttatttccaattatgtggtcaattttagaataagtgcaatgtggtgctgagaagaatgtatattctgtt

SEQ ID NO: 899738 - DNA, 642 bp, Homo sapiens
accaacactgcaaacacaaacaagccagacagcaaaaagaactacccataaatcaaccattcactcacacaaatatagratcattggtaccctttctaggtttgatgtgttgacagtgacaaatctttcaagatgttggcagttctaaagtgaagccaggccagctgatcatgaagaggtcttaaagctttccctgaaagacactagggcactatagaaacttcagagtgtgatctattattgctctttgatttgtcaggaagcatcattgcatgttatttcctgactatgacttttctctcttccaactccctgaccccagtttacttcagaaaggtcaggcaaactctgctcacacaggctgtcattccttcctctgtataatccatcatttgtcctctttcactgcttctgtcaaaaccctagtctggtttttcaatcctactatgccaataagatcccactgcttactctactcctggcactgctaccagataccagatatgatcatgtcattctcctgatccaatttctataattaattaattatagaaaataataagattctatataaattctataattaattctccaacccagttctccagaattgagtccacagttcttctctggtttttatgc

SEQ ID NO: 899739 - DNA, 680 bp, Homo sapiens
acgtgtggttaagagtgggagttctggaatgggatcaaagtacaaggcctgacttgcaggaagtgttatcttgagcaagaaactttcctccacgagcctcagtttcctccagtaaaatggggatagataacagggcttccttcacagggtcgtggcgaggattcaatgagataacgtttgcaaggcaatgggcaggcagtaagcactcaaatccgacaggagctactgtcacgaaaagcgggtttgcagccttggcggctttatcgccgccgaggactagggaggcgggccaggacatggggacccgaggacctgaaagactggaagatgcccgctgcccacccccgggcccacctgctcctccagtctctcaatctccagctggtttttctcctcctcttcgtcatattcccactcgtactccccgggggagctctccgcggaggaagccatggcgtactcatccccatcgctctcgctcacgccttcctcctgctgatcccacgctggccccatggtcttgtatgtcgcagcggccacagcccgcgataacaccttyctccttgtcctagccgccttaacctcatcctcctctccgtcagccttgggcccagccttggactcagcctcgggttctgaagccgaggtttcggccgcagtcgccatcttgcgcttctaat

SEQ ID NO: 899740 - DNA, 609 bp, Homo sapiens
cctcgaactcctgaactcaagccattctcccaccttggcctccctagcagatgagacgacaggcacacaccaccatgccgttaatttttaaatcttttttagagatagrtcttgacatgttgcccagtctggtcttgaactcctggcctcaagcaatcctcctgccttggcctcccaaagtgctgggattacaggcatgagccaccacaacaggcctgatattttattcttgaaaggaagatttcacactagtagcagtcacctcataaaaaagataatttttttttctggcctggcctatttcacctccttatggacaattttcctagccagaaagaaagagatttaaaaggtggattttttttttctaagcatcctgaacagaagccagagacctggacttctctcagctctggtcacaaggagaggagagcagggatggaagccacattgagagtcctggggtacctgtgtggttgccaatcccagttgggccaattactatctgtgtgtaacttcaatggtcctcagtttccccacttgtaaaatgaggatacaaataaagttgtctgaggattgaatgagagtgaaggcaaagtgcctcacatg

SEQ ID NO: 899741 - DNA, 622 bp, Homo sapiens
gggattacaggtgcccaccactacacccagctaatttttgtatttctaatagagacaggttttcaccaggttggcaaggctggtcgcaaacagatcctttttgtacactgctaatcacaacagctacacaattctgctaatcataactgttatgcaacagtgtattcatatttgtttttaaaacattttaaatatacataattatatatacatattatgatgctcagaataaattcagagcactggttctcaaagtaagatccacgtacccctgaggatctcccagagcctctcaggggccctgcaaagtcaaaactccttttataataataccaagacattactggactttttcactgtgttgacatcttcaagacagtgcacaagtaatggtggcccttagcacaaatcaaggcagtagaaatctttttaatgcactgtgtgatgaaatactaagtacacttaaagcccttctgcatactgaagtacaatggttattgccaaaaaaaaaaaaaaaagcrtattactgtttgagttgcaagctaatcaagtcatttttttcaaggacaccatttttacttgaaaggaaacttgagtgacaaaccacggtcagttactcaga

SEQ ID NO: 899742 - DNA, 600 bp, Homo sapiens
acattctaggtgagcagagtttactcaaattcaaacatatcacatttcataaacrtacaaattacaaaaaccaaaagccaggaaaattatccaaaagacgtttttagaagggtataaagtgttacacaaatgtggtaatattatcatgaatgttatttcatgattaaaatcattcagcagttgttaagtttgcctttgaagcgctacactctttgataaacatcatttaggtattaacagtgtagaactcaagtagctatttttaagaattattataaaagtcttaattttactattgggtaagcactagaacatattcatgcaaaatatgttgattgattcattcaataaacatgtaatgagtacttactatgtgctaagagttgtgcttaacgtggaggcaaagttaactaaaacacagtccctgacatctagcagtccaccctcccaacaaacccacaatattacttctaccaatgagaaaaacatgctgtaggttaaaggtggcgtgattcccccaggaacctctactagttcaatgactcctgtgagagtagagaccatttattttgtgccattcttccctaaggcacctagcat

SEQ ID NO: 899743 - DNA, 463 bp, Homo sapiens
cctttctgataatctccttccaattccttaacctcactgaagaaaagatgatgcagcaatactgraaaaaaaaaattgtactgggaacatttttattgtctgccttaaatcctccctactgcaattttaccatattactcttgggaaggtaaagggtaatcaatgaatggtattagtcatagttttcttagtaagctataatcccctggtggcagattctattaccatgaatactttcattttaaccttgcttgattatttaaagggaacttaagtggtatggattcaacttgtctaaagcgttaatttttcccatgaaaaagctggtataagccataaaagagctgtgagtgggccaaagacaattttccaaggaaattattcattgacttaatttactttaaattgcaaaactctacttctaaagttcatttattttctggctcaggcaaacttatgagtt

SEQ ID NO: 899744 - DNA, 585 bp, Homo sapiens
acagctttcaacgaacgctaagtattattattcatatggtttaaaactggggtccagatatgtaaattagcagtttcagggttgatttragtgccctaacagaagtaaacacagggtgctgtgaaaatataccagaggggcacctaatcgtagctggggaggctaaggaaacactctacaggaggtgagctctgaactcagtgttgatttggactaaatagtgggggtgggaaagacacaggcaacttagggaaagaggttagagagcatggtgttaatcaggggacttcagtagtttagattgactactttcagcaaagctagaatacaaatggccttggatgccatcctaagtaactaagaatgtgtcatgaaggtaatggggaatgatcgaaaagattctgcacaattaaactttcaactttggaaagtctctctggcagtggtgtagacaaagaaggcaggagaaaggtgggaaaaccagttagaatgttattactatgttcctactgacaactgtcctaaattagggcagtgatgtaggagagcaggagactgattcaagagagaattaagacttaatga

SEQ ID NO: 899745 - DNA, 583 bp, Homo sapiens
gaataaaggtgatgacattagttcatagggaaaatgcatggaggagagggtgccagtaagttcagttatagacatgttgagyttcaggaaggctaggcactttaatattcagatcaggagcctagaactggcccaaagctgcagatttgggatttgttgacaggttttagttgaagccatcatgcttatcgtgtatagaggacggtctgcattaagggatgatcaaatcactgttatataaaacttataggagacattgttttggactagcctcctacactgcgccccagtagaccagaccaaactataatggagtcaatcatgctaggtgccacataatcaaactgaactctaaaacaggccagtttttcaaaataaataaataaataaaaagtaaaaataaaaaacaggaaattcatagcaaccaatcaaaacgggcctggtttacttgatttgccatgctaaagaagttccctctattttaaccctataagaaaagtaactttgaaacaaccaatctgctttttgttctctgtttctgctttcttcagcctgtttctgtctataaagccaattcctctgc

SEQ ID NO: 899746 - DNA, 583 bp, Homo sapiens
gaataaaggtgatgacattagttcatagggaaaatgcatggaggagagggtgccagtaagttcagttatagacatgttgagcttcaggaaggctaggcactttaatattcagatcaggagcctagaactggcccaaagctgcagatttgggatttgttgacaggttttagttgaagccatcatgcttatcgtgtatagaggacggtctgcattaagggatgatcaaatcactgttatataaaacttataggagacattgttttggactagcctcctacactgcgccccagtagaccagaccaaactataatggagtcaatcatgctaggtgccacataatcaaactgaactctaaaacaggccagtttttcaaaataaataaataaataaaaagtaaaaataaaaaacaggaaattcatagcaaccaatcaaaacgggcctggtttacttgakttgccatgctaaagaagttccctctattttaaccctataagaaaagtaactttgaaacaaccaatctgctttttgttctctgtttctgctttcttcagcctgtttctgtctataaagccaattcctctgc

SEQ ID NO: 899747 - DNA, 583 bp, Homo sapiens
gaataaaggtgatgacattagttcatagggaaaatgcatggaggagagggtgccagtaagttcagttatagacatgttgagcttcaggaaggctaggcactttaatattcagatcaggagcctagaactggcccaaagctgcagatttgggatttgttgacaggttttagttgaagccatcatgcttatcgtgtatagaggacggtctgcattaagggatgatcaaatcactgttatataaaacttataggagacattgttttggactagcctcctacactgcgccccagtagaccagaccaaactataatggagtcaatcatgctaggtgccacataatcaaactgaactctaaaacaggccagtttttcaaaataaataaataaataaaaagtaaaaataaaaaacaggaaattcatagcaaccaatcaaaacgggcctggtttacttgatttgscatgctaaagaagttccctctattttaaccctataagaaaagtaactttgaaacaaccaatctgctttttgttctctgtttctgctttcttcagcctgtttctgtctataaagccaattcctctgc

SEQ ID NO: 899748 - DNA, 583 bp, Homo sapiens
gaataaaggtgatgacattagttcatagggaaaatgcatggaggagagggtgccagtaagttcagttatagacatgttgagcttcaggaaggctaggcactttaatattcagatcaggagcctagaactggcccaaagctgcagatttgggatttgttgacaggttttagttgaagccatcatgcttatcgtgtatagaggacggtctgcattaagggatgatcaaatcactgttatataaaacttataggagacattgttttggactagcctcctacactgcgccccagtagaccagaccaaactataatggagtcaatcatgctaggtgccacataatcaaactgaactctaaaacaggccagtttttcaaaataaataaataaataaaaagtaaaaataaaaaacaggaaattcatagcaaccaatcaaaacgggcctggtttacttgatttgccatgctaaagaagttccctctattttaaccctrtaagaaaagtaactttgaaacaaccaatctgctttttgttctctgtttctgctttcttcagcctgtttctgtctataaagccaattcctctgc

SEQ ID NO: 899749 - DNA, 584 bp, Homo sapiens
gcattcacagctactcaggaagctgaggcacaagaattgcttgaacctgggagacggaggttgcagtgagctgagatcgcaccacygcatcactgcactacagcctgagtgacagagcaaggcaaaagaaaaaaaagaatatattggcaaatagccagagaaaaaatcaccctcaaaagagcaacaattagactaacagcagacttttcaactgcagcaatagaaaccagaagatagtgaaggatctccaaaatattaatactaacagaaaataacttccaacttagaattctgtacccagcaaaaccatctttcaaaaatgatagtgaaataaaaatgtttccagacaaacaaaaatattataatttgaaagttctaagcataacaaaagcaacaaggaaaatagctatttccttgcatgccttctttatgtatggtcaagagaataattgaaattttaacaattaaactgacctttttgaatagctgaaagtccttattttaaggaagtcaaaattaagttgtaatagtaccagctagaaagttaggaactattgtgtcttctaaaaatcacagtgaaaatg

SEQ ID NO: 899750 - DNA, 515 bp, Homo sapiens
gaattctaacaataaccatgtgagtgagcatggaagtggatcctttcccagtcgagccttggaatgactacagccccacaggacacattgattgcagcttgtgaaagactctgaagcagagtacctagctaaattgtgtccaaattcctgactcacagaaactgtgattttgttcttttaagccactaaatttcggggcaatttgttatgcaacaagaaataatacattttttttgttatcagtatcataataatcattattattagcaatataacatagagttaagaatatgaccttattctagaatcaaatggcctgagtttgaatcccagctcttccacttactagctgtttgaccttatgtcaattattttcctcaacagcaagatggagctaataatakttgtgaagagtaaatgaattaatacatgtaaaaactcaggcacttagtaggtgctgtatctgctggatgctgctattatttaatgaagtggaaaccagtacacagaccctg

SEQ ID NO: 899751 - DNA, 663 bp, Homo sapiens
aaaggccaccctggagagcccattcaggcctctgctttctgacttagccgagaaggcccctctgacctgccagggccacaaggaggttccctcaggggcagtcaaggcatttcacccctggcagaggctcccagaggcatttgcagcctctcaactcccaccttccagggtttgagtgtgtttactctgctcacaaagtggcttcctgtttcgaagaggaatgagttttttatagggttataaatgtgattcaaaaggctttttggacatcaaatggctcataaaaaatgaaacgttacaatgatttcagcataaatgaatgaaaaacacatggtgtatgcctcctactcttttgttgcaacaaaaggttctggtaaacgaaagaagtggcaagtgatttggacctcaatgtacctgagacttgagtttccaaagcccaaactggagcttctattgcaggccagggaatatctgagcagaaaggttgcttcacatggaacaagctaaaacacaagggaaaacatttccatagagctttatttatttatttatttatttatttatttatttatttatttatttattttgagatggtggctctgttgccmaggctggagtgcagtggcgcaatcatggctcactgcaacctctgcttcccaagtc

SEQ ID NO: 899752 - DNA, 584 bp, Homo sapiens
tagtaatgtctactatcttatgtgtgattaatgaaatctgctaatataaacagtgagaggacaggcactctgattctgccaatggctaccaattaaggaggtgctgctcattttcaggatgaaaagggaactgctctgtcttagctgtctgtaataatttatcaagaagtgaaattttaaggacatgacccagaaagaacatgagaatttaaaaatctctctttcccttataataataatattaaaaatcatagcaatagtactataatgtactagatgcttctatttcccaggtacaaattaagtactttgcaggcatatcccggtttaatccactcagcagccctctctagtaaatatctatgctgtgttcaactttcagatgaggtaagtagtgttatagcaaacaagggatggagtaggaaaatggcactaaccatgacctagttaaagaagcaagtttgggatttggagaaaggaacatctgtggaattgtccacattttgtgacatgtgtatacggggcactatgcgagtaagggtggcagggaaacckaaaaacacacatgttcccagacacgtgtg

SEQ ID NO: 899753 - DNA, 714 bp, Homo sapiens
ttgtatcttcattgcctctcttggtgaatgcatgaaggaaggaaggcagggatgatgaattgacttgtcccaawtcacagacctagagttgcaaagataggactgagaactacagttcgatacctttttactactttgcagctgttaagtactacacaacacactcaaatctttgcagctgttaaataccacacaacacatccaaatcatagatcaggattagccattatttagttactctttggtgattcacaagtcatataatcttacagtgccttaagctttaactttttgtaggccagttatcaccctgtagctaagggaaatgccagttgaaaaaacgttaaattctggaagagtgagacttatcttgcagtaaacctcaatacattgcttttgcaggagatgctatttaatccaacaaggtaaaattattttatacagacattttgcctaagcataggaatgaaaaagatgttatcaaggtatctatactgcttattttggtggtaaaccttacccccagtatgaaatattgtgtactgttatgttgagcacttcaaatctttttttattttttattctcagcatttgaatgaaaatcctagatagctaaaggatttttttctcacaggtgaagaagaagcacattatcagcagcagaaatggtttctgggaatttattatcagtcatctttgttttaatcagtgcca

SEQ ID NO: 899754 - DNA, 590 bp, Homo sapiens
gagaaggtggtagacttccagatagatagatagatagatagawagatagatagataggagaaataaatagatgggagaaaacactcttattaaagggaataacaagtgtgatatccccaggtcagaacaagctggcagcacttgaagtgcagacagcaagaagacccatgaggccagagcatggcataaaatgaggtctgaagaagccagcaagggccagaacatgagaaccttgcaggagtttagatttattctagaaaatgatgagtagcaatgggagggatttatttttttaaaaaaggtcccgctagctgaatggattgaagaaagaaccaaaatgaaagcagaaagaaccattaaaaggttacggaagttttccaaacacgaggtggcatgtggatgaagatagagaaaagtggctgtgtttatatgcagtgctctgtaggaaaacccacaaggcttgctaatggattaaacgtgggaaatgaaggaaaggggaatgaagactgactcctagttttttggcttgataactggaaggatgatggtataagagcagatttaggcatgaaaataaagagttccatcat

SEQ ID NO: 899755 - DNA, 617 bp, Homo sapiens
aaaaagcctgccaggattttaatctctagtgtgttgaatcaatttgaggagaatgacatattaataagatcaagtgttctaatccatgaatgcagcgtatctctccatttactgagagttctttttctcttatcagtgtattttagcttttagcatataggtcttgcaatattttgttagatttatacctaagtatcttattatttttggtgttattatatagggttctgtttatttaatttcaattcctagttgtttattaccagtattcagaaataagattgatttttttaagtattaactttgtacgcttcagatttgttaagctcactccttattttcagtagcatttttgcagattccttggggtttcctatgtgaataatcacatactttgagatgagaaagtttgatttctgctatatgcctcacagtttttttctttgctttattgcactggctaggacttccagtaggaggaaaaggaatgrttagagcagacattttcacccttgttttgctcccaatctgacaggctaagaattcagtctttcaccattgaatataatgttagctgtttttttttttttttttccctgtagatgccctttattagg

SEQ ID NO: 899756 - DNA, 518 bp, Homo sapiens
gtctgaatggctttctctctctctctctctctctctmtatatatatatatatatatatatatattatatatattttttttttaattgaagtgttttctgtcttccctttgctaaggcaatccaaaaagctattcatatatgaacattttattttaatgatttgatgagttaactactgaagagtgatggttaaaactgagctggaatagattaaccaagacttcagtgtgacatttgcttctatcctgcttgacacttgctgcagtttgaatcagatgcaaggtgtgtgccaaaccacctgatgctacatcatttgtagcatattcagcgtgaagcatcagttaaattctgcagactttgggtaaataaaaatgttggcaatgaaaaaccactcctccctttagatcattaaaattaggaaacagaagaatccttactacattagacttagaattttcttcagagcaagcagcaccaggtttgtacttcaaaatattgccatccctctaatcacatgg

SEQ ID NO: 899757 - DNA, 562 bp, Homo sapiens
gccaaagatggtcaaatcccacttcccagatgtcttctcagatcttcccagtcaaaattgatctctccctttctcaatcccaattgactgtctttatatcacttctctggattctttctcacctagamggttgcaagagctgctgattggcctctgcatgtctaatctgctcttgaatttgtccttctcagccttaccacagtgagctttcaaaatgcaaattatattatgacccttggagtgaatctcctcactgactgtcagacccttgaaaaagtcccacatccaccttcgtgctctgtcgcctgaacacttctcctgtctcatcttccatcttatatttactgtctgttaatagttcactctttcctgttctctcttctaggaatgttctcggcacccaaggctgactgatatgcttttatttaccttcttaaattcagttgtcacctcttccaggaagtctttattgaactctgctgcttccctgccccaccttctcatttctgtgactgtaatactgctactgtgcgttattttaatttcttatgtttacatgtct

SEQ ID NO: 899758 - DNA, 635 bp, Homo sapiens
agcatccctggcttctacccactaaatgccagtagcatcctctttcttccgcaccgcccgctgtgatgaccaaaaatgtctccaaacattgccaaatgtcccctcaggggcgaagtcacccaaattgagaaccacagctctatgatattgttctccaatgatactactggagaatgatttctcccattccttaatactggaatggaatctagactatctcctgaaaggcagaattggaagcagaacatttgaatgcagtttatagattgtaggtctcaaaacagtgaggttgtgctgaaaggcagggagggaaaatgattaaataaagcccatttttcagataaagagaatgagacaggaaatacacaatttgcgtcaggcactaagatgagtcaaagagaaaccagtaagagacacatgaacttagtatttgactttttgaaagaagaaaaacaattttatcaccaaccctccccaacttcaatcctggatctttgtgagaacaaggaagggaattgttactctccctagaagctgacraaacatcaggaattggaagttacatttagaaatgttgcttttcagtgaaggacaaaagtagaggatggcaggagctagagctgctgactgaagga

SEQ ID NO: 899759 - DNA, 534 bp, Homo sapiens
aaaacaaaaaacgcagaattccctttctgcaactgaaaatgatttttaatctgataaatacatttgtcctacttttacattatgtgaattgtgatttgtacaggctctctccagtagcatccattatactattacaccaaaaatttattctgctttttaatatctctccttttgttgttgttgttttgagacagagtcttgccctgtctccaaggctggagggcagtgatgagatctcagctcacagcaacttctgcttcctgggttcaagtgattcttgtgcctcagcctctctggtagctggaattacaggcgcccgccaccacgcccagctaatgtttgcattttctgtagagacagggtttcaccatgttggccaggctgctctggaacttcgacctcaagtgatccacctgccttggcctcccaaagtgctgggattacaggcctgggccatcgcacctggccagtgtatctcctacctagacaaagacctaktccttttagagaaaacttaattaaaactctgcaaag

SEQ ID NO: 899760 - DNA, 455 bp, Homo sapiens
agttaatataggctgagttttaaagaagaataaagtgaatattatctaaggattaaacgattgccaaaataaagactggtaaacactgcctggtcagaagctgaagagcataaattgaaaaatcaagcataatacaaacaacaatcttgaaagaaagcaaacaggtccaagacttttctttgctaaatttattgaaatatatactctggccggctgcagtggctcatgcctctaatcccagtgctttgtgaggctgaggcaggtggatcacttgagcccaggagtttgagaccagcctggcaacatgaagaaaccccatctctacaaaaaaacaaacaaacaaaaaatatatatatatatatatatatatatgcgccatatatataaaaattasccgtgtgtgtgtgtgtgtgtgtgtgtgtgtgtgtgtgtatataaattagccaggcatggta

SEQ ID NO: 899761 - DNA, 619 bp, Homo sapiens
ataataataataataataataataacaataatttgaaaagagatactttgaaactacataagcatcttgtttttcatcaaactgtccatttatctttgtatttatatctaatggactcatggactctcattttatgatttataatctgtattatttattttgatgttcagattgctctagaattggaaaggggaacaattgaagctgatttctggcatttttgtttttgacataccttcatcattcttcaagcatgttcttgcgttcttgctcgttttacactttaactactgtggcctcaaaaagagccattcctctaaagagcttctatagggaaaaatggtatttagaactcattgtctgagtaatagctgttctcatggctattctgatattatgctcctaagttctttcactctttaagtagggacacaaaatgtatgtatttatgtttctgtgtctctgcatatttgtacacatacaattacatcaatgtttgttaactacacacacatgcacatatacatagatatacatgtacaaatatatatatattttttccatatatatatatggaaaaatakaagttcattctgatgccttcaattttaatgtatcc

SEQ ID NO: 899762 - DNA, 736 bp, Homo sapiens
aagtaaagttagaaataaatggagagaaaaaaatgaaaagactaactaatagagcaaatataattgttgagatccagtggacccagccaaaattaaatcaagccaatctatgttttctgagatccaatcatgtgcaaagtctcaagtatattcaaatgttttaaagattgtgtttttaggtcctcatgaaaaacacaaatacacctaagagtgaggttagggaacagtatatgaggttgtgattgacacaaagtagaatagcatattttaacattttatccacaaagacatactgattccaatagatgatgcatgctttctttcatgaggtaagtgaaagaataaaatttcatttacaaaacttaatttatcaaacttttcaagactatgcctattgtaatcatactgaaagctacctctatatattactttaaatctattatagtttgtacaactgaaaatgtattttaagcaagtattttggaggcaagaatagcagatgaaataactacatactactaggagtaatgatgacacttaagaggctgaaattttatataaatacagctagaatttttaatttaagaaacattaaaaatgaatagtggagcagktttactaaaatgttggaaaagaataatttattataatcatacaaaaataaatgattctatacaaatggtatatgtgtttataattatctatttatatgtggtatatatattattgtatacac

SEQ ID NO: 899763 - DNA, 590 bp, Homo sapiens
gtgacttatagcttgcccagtccagtcatgacccttaatttttcatagtattcccaaatttttaattatgttaacaacagtgaattatgctattcagtatacatttagcacctattaattctaactatttggatagtatttttgtatacattttttcatcccacagacaccttctaaggtgatattttcatttcttttttaaagataaagacaatgaagctaagaaggttttttttaaaatttgctttaagacataggactgaaaagggctgaaaatggggcaccaggatttggttgaagtcggcctggctctaaaacttctacacgtttccataccacacagctcgcactgcttccaggccacaattttatttttttttaaagaaaataaaatcctttttcctgccatgactggagtctcttaagcctcagaaaatatgatcatagcttgatttctttgcctttttccagaatggagtcccatggcacgccctacyttaatgtaaatttcatgcaaatagtatatggtatttctacttaacaaactttgaccatgtattcccaaagtgccagacagttttctggatact

SEQ ID NO: 899764 - DNA, 633 bp, Homo sapiens
cataaggaaaccagtgatattacactctccattccagagcctaacacgctctcagctcacagaatttgtgacttttgttgttttaaataagagatttaattttcattgtttctcatcaagtaaacttctaacatcattattagcttgaaaacttgtagagtaaaaaagaacaagataaatattaagagcagaatctgataataaaagctggaaaaactattagcacataataagagatctgaaatggcacaatttataatgccacaataacaacaaataaacagccggttaagcactttgtttcaacaaagcaaaatcatactaaaaatatatatattaagatgcaaagagcatgtatgatgttctggctaggtatgtccattatgcatacctactggacttggttactacaggttagaaaccttttaaaaagcatctttttcaaaccaataaatcattaatatctgtagctactaatatttctatcaaaaacaaattatacttcagtgtttttagtaaaagctcaacaatggaaagcaattattgccattcttgtacatcaaataagttgacagctgaatccttattgccaaaatctttaatttgcrttttgatatgaaaagtaaacatcaa

SEQ ID NO: 899765 - DNA, 602 bp, Homo sapiens
cttaagtatacactctgtttctttttcatgaggcttgatactggaattggctgcagtcatttaaaatgttctctttttagtctgagggatagaatttttttctaaggaatagctggttttcaatttttacagactgaaatacaaagttatgaaataaatcaagtcattacattatgaattgcttttctatcatgttatgttttgtatacctaaaatggtaaaaacagacttttttggatgtgtgaggttgtaacttcgccctctccagggtattatggatacaattccatatcttcaaagaaatatgattgttttactagtgaaaaaaaatgtagaatttctaagaaaaaataaggctagcaaacagaaggacagtctgttagaaataattcttaaaaaggctctacattttagttaaatatatatagctccaccctgtaatctgtttttataaatcaaattatagattttggatattttatcaagtcacttcaatatgaagtacaggaagaaagatatggcacctttcctcacccatcttaaggatcatagccaaaagtcctgtaacaaaagacaggttwacaagggaaaagtataacaaa

SEQ ID NO: 899766 - DNA, 643 bp, Homo sapiens
tcagggtgtcgtgttctgagctccaacagtggcaacagccaggcctggtttatggtcatcaacatgaatcttggtawtgtaaacattatgatgacacaaccctattcatatattatcaactttatgtatataatggaacttctctgaatttatgtgactgtacttatgcacatattaagagaaaataaatccattgcaggttatcccagcaatgttattgcagtgagcactatattaatcaataataattagctactttaaaagactcttgccaaattgaggaacaccttaggttactatcacaataaataaacagatcttacagattgtgtatctacatcatgtaatatcttctgcaatgatcaaacagcaaaagtacattgttgttaacaatagtaattaacacattgctctcatctttgctagatgatttgttttatttctctatggtgtataaaacatacatatatatttttaaaaggattatccccaagtacttaagaaatgattattttgaaattactagaaatctgaagttgtaaattttttgtagtaagttctctgtaagtgtttgtgaaactgaattcagtagataaaaatattttttcccacaagggaaaagaaatagatttgatggaatttt

SEQ ID NO: 899767 - DNA, 651 bp, Homo sapiens
aaagcataagaatcagcagtagaacagcaagaaacatcaaagacaacacgtatgaacgagggactctaatgaaaacactttatcagtctgaagraatatgatttcaacctgaccttcccatccctttgaccatttctttaaggaacataccataataaattttagttccatgtgtgtgagaaattactgtcataaggattttctcattgaataatgagaaatctgtgcttctgtacaagacaagtcctcaatgactcttcatttaaaaggttgaattatatcaaaaattgaagaaactggggaaaacaaacataaaatctaatgagagaatgaagaaagaggtgaaagtcacaaagttaagtgctagaaattatgttcatctcaagagagtaaagaagagtgcaaattaagagccaaacaaaattgaaataaggatggggcacataggtctcttctagttgcatttattcaggaaaaaaaatgatttaaagagaagtgtaacaaaattgtatcatgaaaatatgagaataaaataaaatctaatttagtaatctcaaaatacacattcatttgaatatacctttatttattcccagtggcaagccaatacaagcctatatgatgtaatctttttcaaaaaaagcaagaata

SEQ ID NO: 899768 - DNA, 574 bp, Homo sapiens
gtttgttggtggcatgactgtcttttttgggaagtgtctgttggacagtgagagcacatggacacagggaggggaataacacacactggggcctgtagaggggtggggttgatgggtagagagagcattaggaaaaatagctaacccacgctgggcttaatacctaggtgatgggttgataggtacagcaaaccaccatggcacacttttacctgtgtaacaaacctgcacattatgcacatgtactccagaacttaaaataaaaataactttaaaaataaatttaaaaaatttttaaaaaattaaagagtcaaaactattttgtttgtctttgtatttttttggaggagggattgctgaagaatatcaaccctgctgttaggtcacaaaaatattcttctcttctagcatctttctcttttagctttacgttggtagcttttacattttaggtctttaatccgaggtgcaagggagtgttatcagtccatttttcctgcaayaacaaagaaacccaggatcttcctgacttatagaagcatttgtttctcgttcccttatcagaaagcttcag

SEQ ID NO: 899769 - DNA, 659 bp, Homo sapiens
aaggaagtcataaagcaaggataaagatgtgagcaaatgccaggttgccaattcaagaataaagagagaattttagcatggaatcagaaggcctgggtttgatcccaacttctgaacttaccagctttctgaattttcttaggaagaatctcaacttcctagtgaattttaaagaccttcccaactttgagggtccacaactcataagcacaattatttttaaagcagacattgcagcaacagaagttagcagattattcagtgtttttatgtgttattcatgaagcattgattcaactgacattttgaaattatgctttgtatttgggactgtgctagatgctagacacatgaatataagcaaaaaactgtttagctatagagaagctctcaattcaccaggaaaagagaatatgtagggaagctatacattactatacattatgataaataaaactttgagtgaagaacaaagtgacacaaaataaaatcaggctacttttaggaagaaggtggcacctgaaattgggtttttgagacctttctttctaaacagactttgtttacattatcaatgaagtttataaaatattgaaatgactcaagtrtatgagtaagaagtattaacagtgtaaaaataacatttttaattttagaga

SEQ ID NO: 899770 - DNA, 652 bp, Homo sapiens
tacattccaaggaccccagtggatacctgaaactgtggatagcactgaacctgatacatactatgtttctttctatacatacatacctatggtattttaatttataaattagrcaccataagagattagcaaaaataactaataatatgggcaattagaataaaatgctataatagaaaagtatgtgaatgtggtctgtctcaaaatatcttactgtgctatactgtgggtaaccaaaacctgggaaagtaaaccatacataaagtggggggactactgtaagtaactggcttgcatttgtgtgtcacattacacttttattgtatagcacccctaaaatctccagagaaaaaggccattattaaccattatcctgagcacaaaacagaaaaccagataccatgtgttctcacttaaaagcgggaactaaacattgggtactcatggacataaagatggcaacaataaacaatggaaaccatgaacggggcaaggaagggaaggcaggaagggttgaaaaactaactattgggtactatgtgcactacctgggtgacaggattaactgtactccaaatctcagcatcatgcaatatacccatgtaacaaacctgcacacgtatcccctgaatctaaagttgcaattattaga

SEQ ID NO: 899771 - DNA, 652 bp, Homo sapiens
tacattccaaggaccccagtggatacctgaaactgtggatagcactgaacctgatacatactatgtttctttctatacatacatacctatggtattttaatttataaattaggcaccataagagattagcaaaaataactaataatatgggcaattagaataaaatgctataatagaaaagtatgtgaatgtggtctgtctcaaaatatcttactgtgctatactgtgggtaaccaaaacctgggaaagtaaaccatacataaagtggggggactactgtaagtaactggcttgcatttgtgtgtcacattacacttttattgtatagcacccctaaaatctccagagaaaaaggccattattaaccattatcctgagcacaaaacagaaaaccagataccatgtgttctcacttaaaagcgggaactaaacattgggtactcatggacataaagatggcaacaataaacaatggaaaccatgaacggggcaaggaagggaaggcaggaagggttgaaaaactaactattgggtactatgtgcactacctgggtgamaggattaactgtactccaaatctcagcatcatgcaatatacccatgtaacaaacctgcacacgtatcccctgaatctaaagttgcaattattaga

SEQ ID NO: 899772 - DNA, 567 bp, Homo sapiens
tgtagagcatgtaatggcaagtctagtattggaccacttgcttcttgccacggcacagggtaaatccaggaccatrtgattgctgagaaatcgtaggtcaggtgcaatatcctatgttggttgagtgcctgtgtgctagatcttataatcatttcatcgataacaagtctctgaattaggtattagcattccactttacagataaagaaattgagactcagagaggttaagctgcacacagctattcagttaaacatgcaggacatgaaccataaagcgtttgcttttttttcttttttactttttttctttttttctttttgatagagggtcttgctttgttgcctaggctggagtgcagtggtgcaatcatagctcactgcagccttgaactcctgacctcaaagaatcctctggagtagctgggattatagatatgcaccaccacacccggttgatttattttaattttttttttgtagacatgagtcttgccatattacccaagcttaaagcctttgctttcaactgctatgctgtctctgcccttgttgtcctcatcgtaac

SEQ ID NO: 899773 - DNA, 670 bp, Homo sapiens
aactgttaatccagtaaatttgtaaagtgctactatctaaaataaaaaaagttgcaataaaaatgacaaattaaaacaagctattattttgttggtgatgttttccacttgtcccatgtaaagtgtattagtcaagagaaatataaccaatagtatgtatgcacacatatatagaaagagagatttattttaaggaattgggcacccataattgtggaggcttggcaagtccaaaatctacaaggtgggctggaaagccggagaaccagagaagaattgtagtttcagtacaatggcagtctgttgcaagaattccctcttttttgggacaggttcatctttttctcttaagcattcaactggtttgaagaggcccacctacattatggatggtaatctgctttactcaaagcctatcaatttaaatgttcatcacatgtaaagagtacattcaaagaaacatctagaatgtttgatcaaatatctgaatactctggtctagccaagttgacatgtgaaatgaactatcacagagagttactatttagaatcaatagacagtaagttcattgaacataaaccgtgatttttttaatttyccccaacctatgtctatagcatcttgtatatgcacaaaaagtttcttgaatgaatgaatgaaaactagaaa

SEQ ID NO: 899774 - DNA, 612 bp, Homo sapiens
taaattcagcctggtccaactctatattccttccaccattaacccamacccttaatatccatttgcatgcctgctcttcagatttctgtttatataaattagagaacttaagcagttcttttcaggtatagggcacctcctcatgagtcatattctgaacctcacctctgggagcctgctggtactttagtctagttataggtctagaagcaaatgggggtgttggggatagttcctgaggagaatcaacattatcttgcctggcaactgcctcaggggaggacatcactgttgcctcaggcaatgcagggcttttctcctcagacaaacatggaaaggctgatggcagtgtaggtcagggaggagatgttgccactactggggatggggaagctgtttcttctggcaagaacggctcatcagagtttacaagctcaatgtccccagcttcaacagggtcctcccacatgtccccattccaagttgcagggtcccattcttttccaatcaatgccctcactttaacagtagacacctggcaaggctgtgcatgcacctttcattgcagatcagccacttgcatgatacaagcttgtatctgattttccacaa

SEQ ID NO: 899775 - DNA, 650 bp, Homo sapiens
cctgtacaattcaaatagcaatagcttatttttaaagcaagcacacttctgttttctttggttgtctagacttcttatgtattttggtatctccaaactctgatacatgtaaattttaaatggtaatatgacttttgttttcccccaaagatggaaataaaggcttaaacaaatataacccaagagatacttgaaatttagataaaaaccagcttttaaacctttcagagagactaaccccatggttgcacttattccacaggcaattaatttggctaaaacaaatattctttgatgaccatcaagaataaagcagagcaattttaatatgatagaattattattgactggggaatatcatgcaaaattggtataaccaagaaaagatcaaaaaggctctctgattataaaacatcaaaggtttcaggcaacttcttcctgagagacaagcttaaaatattggagaatccatttataccgttacattaaggaattattttaatgagggtcctcctgagatgatagactggggtaacatttcagaattgcattgcattcattccataaastgcttaattagagaaatggttccttcactaagcatctgtcactgaagcatgtacacacaatttttaaatgtgtggtgttgg

SEQ ID NO: 899776 - DNA, 540 bp, Homo sapiens
atgttacattgtatagtatttgctcttactagcgactttctctattctctttttatccccttgctggctttgaaaaagcaaactgccatgaaatgtaaaatcacagggaactgaatgttgccaacaactatgtgaggggggcagtggaccttcccctgggtgagcctccagatgagaaccaagctccagacaacacctgcattgcagcctgtcataccctaagcagaggacccagctaaactgcgcccagacttctgacctacaaaaactctaaattttcttgtttctagtcactaagtttatggtaatttgttatttatacaatatgatttcataatcaaaaagtagatttaaaatataaatgccccataagaaaaagtatgttagtctaaattgcttttatgagagcctttcctttaatggataagacagtgaaatggagactggaaatgatrtagaaagtactatggaaataagagaaacttgcattaattactcaagaggaagagtaatcatttaaaaatttaacaaacagatgaa

SEQ ID NO: 899777 - DNA, 631 bp, Homo sapiens
aacatgttttatacacacataaaagaaaaatatacttatattaagtaaaatatcagctggcctcattgtctttttatattttcacttctataatttttttctctcaaggtgttttacayagaatacatccacaccctcttcacacacctataaattagtcattttcaaccacattttacaaatgaggaggttagagaaatcgtcccagggcataaaataacattgtggagagctatggtttgaaaccaggtctttcttatgacttatgacagtaattcattccagcacaggccactgtttaatatagcatttactaacaaagcatatattaaatgtattttggtataatttcatgatgatcttgcaaatcttttatatttttaaatgttccatttacacattccctgaataaaatattctctaaaatgcagtcttatcattgtttccacaggacctaaagaggcttcttgtctatcaagacatcatgataaatctgaagagctagaaagatgactttttataattaattgcaagacaggaaagagaggaaggaggtagtattatactccaacaaatactttatttttatattaaaacaccaatacagtttttcccatctggtatttaattg

SEQ ID NO: 899778 - DNA, 577 bp, Homo sapiens
aaggaatgaagaaaatcaaaagtaatttgattcattcaaaaatcaaagtaatttataatattaacagaaaaaaggagcagattcgtgtgattatgtcaaagtcacagaaaaagtatgatacaattcaacacccattaatgatacaacttcttagtgaactaagaaaaaaggggatgtctttttctaacaaaggctatatttaaatatctagagctgatatcctaattcatatgtatcactttcccttatgttttggaacaatattaagatgtacacaatcaccactgctgttcaacattgtactggaggtcctagacagagagaaataaatgaaaagtgaatcccaacaaaattgcagcaagctattttgtaaaaattggcaagttgtttttaaaatttgtatagaaatgcaaaggctctagaataaccaagtcaacctagtataacaactaacattggataactcaaacygccaaatttcaaaacttattataaagccacaaaaatgaagaaaattgaggtatttgcataaagacagataaatacatcaatagaatggaagagaatgtttagaaat

SEQ ID NO: 899779 - DNA, 633 bp, Homo sapiens
aatagaattgaatctatcaattactttgggcagtgtggccattttcatggtattgattcttcctgtccacgagcatggaattgtattttctgtacagtcagggtttgctgtgttgcttargctggtctcaaacttctgggctcaagcaatccttcctcttttggctccagagttgctgggactacaggcgagccaccatgccttgctaaattaatgaactttaaacacatttgacatgttttaatccactgaagccattttttttctttttgatgcacacattatcccctttgaagtctttttaaattagcttctgtgtccttttgacatcataacagctgatattcataatggataaatcaccattattaagtttttcattaatctgtgacctaatgatttttgcagccatcgatggttgttgtctgcaagcatgttttcatcaggtgctgtatttcttttttttgtttttattattatactttaagttttagggtacatgtgcacaacgtgcaggtttgttacatacgtatacatgtgccatgttggtgtgctgcacccattaactcgtcatttagcattaggtatatctcctaatgctatccttcaccactccccccaccccacaacagt

SEQ ID NO: 899780 - DNA, 633 bp, Homo sapiens
aatagaattgaatctatcaattactttgggcagtgtggccattttcatggtattgattcttcctgtccacgagcatggaattgtattttctgtacagtcagggtttgctgtgttgcttaggctggtctcaaacttctgggctcaagcaatccttcctcttttggctccagagttgctgggactacaggcgagccaccatgccttgctaaattaatgaactttaaacacatttgacatgttttaatccactgaagccattttttttctttttgatgcacacattatcccctttgaagtctttttaaattagcttctgtgtccttttgacatcataacagctgatattcataatggataaatcaccattattaagtttttcattaatctgtgacctaatgatttttgcagccatcgatggttgttgtctgcaagcatgttttcatcaggtgctgtatttcttttttttgtttttattattatactttaagttttagggtacatgtgcacaacgtgcaggtttgttacataygtatacatgtgccatgttggtgtgctgcacccattaactcgtcatttagcattaggtatatctcctaatgctatccttcaccactccccccaccccacaacagt

SEQ ID NO: 899781 - DNA, 665 bp, Homo sapiens
ttcctctgccgtagggaacagggttgctgccagtggctcctacctcttcgcgggtacttgcagccagctgcagtggtggctgtgggcaggagatgtcagctttgctccagggttgtggagttgtaggggatgttgggccctagaccatgatgcagtctacttggggctgggcacacaaaatggcagcatgctgtagttgcttaggattggggggtgggtgtatgggacccaacatgagctccctgtatggagcaatatacttgtgtagtctctgggcagctctctgtgtctcagagcacatgaggatcaaaggtccctttcgtggctagaattgcaggagtttgcagtgagaatatgggccactggggtctctcatttaccccttctatgcattgaggagcctgtccaggctcccagccaagaaggctgcttctcttctttctccttccttcctttatgtgtttcctgtcacttctctgttgaagtcccatttctctcttagatgatctatttgaagtgtgattatctacttgctattttggctcttttctcagagggaggcaaataacagtggcctctagtgagtcatcttgaagcccctgtctgaaataatktaatctaacaaacacgtttttgtgtgttatatttattgtatactgtatctt

SEQ ID NO: 899782 - DNA, 208 bp, Homo sapiens
tttttgtgtggacgtcctttttgtttatgctgatgctattcctttctgtttgttagttttccttctaacagtcagtcccctctgctgcaggtttgctggagtttgctggaagtccattgcagaccctgtttgcctgggtatcaccagyggagactgcagaacagcaaagattgctacatgtcccttcctctggaagcttcatcccaga

SEQ ID NO: 899783 - DNA, 663 bp, Homo sapiens
ataatgtataaaattaaaaagatcgtaccaacggttgcttagatctgttgtacctagaactcatatatattgcccaggggaatgtaaagggaacaaccactttgaaaaacatttggcagtttgttaaaaggttgaacatattcctaccctatgacccagcaattccacttctagatatttagccaagagaaatgaaagcatatgtccacacaaagatttgtatgtaaatattgaaagaatttatgtgtaatagatgaaaactagaaacaactcaaagtccatcaacagatgaatggaaaaacagtctgctatgtatgtgtctatccattggaatactactcaggaataaaacgattgaactataaatataactcagtaagataggtgagtcttaaaataattctgccaagagaaagaagccagatgataaggtttggctgtgtctccacccaaatctcacattgaattgtaatccccatgtttcaagggtggggtcaggtggagataattgaatcatgggggtagtttcccccatgcagttctygtggaagtaagtctcacaagatctgatgatttcataaggggcattttcccttttgcttggcacttcttgctgcccccatgtgaagaagaatgtgtttacttccccttctgccatgattg

SEQ ID NO: 899784 - DNA, 597 bp, Homo sapiens
gcattatattttgctgtgttgtctaacaggagcaaagagacacggatttgctctgtgctttaatcctctgagatagatatttaggaccgtgaccaatttttattttggytgaaaaatcttatttgaagttgagctaaagaggaatatttacacagcccagtaaaccctggaataaaagcataaatcaattcctttatttcacacataaatattgattagacaataacccgtctggggaagggatatttctttcagtggaagtcggagcagtgaaaattcgtgcttgagaagaaaactatgacagaaaggacattatagtggatcactgtcagaagccatcaaattcttttcccttcatgactggtgtcaccttccatctagcaatttgacacccttgttggagaaggaggaggccagatgagtggtggccagaaacaaagggtagctatcgccagagccctcatccgaaatcccaagattctgcttttggacatggccacctcagctctggacaatgagagtgaagccatggtgcaagaagtgctgagtaaggtttgtggaagtcttagtccattttacaggtccatgtggaaatgc

SEQ ID NO: 899785 - DNA, 666 bp, Homo sapiens
atttgacttattctatttaaaaccttattgttttagttgataattttttttaatttttgtagatagataccaagtaggtgtatatatttatggggtacatgagaggttttgatacaagcatgcaatgtgaagtaagtgcattatgaagaatgaggtatccattccctcaagcacttatcctttgtgttacaaacaatccaattacactcttagttatttttaagtgtacaattaaattatttattatagtcattctattgtgctatcaaatagtatgtcttattaattctttctatttttttttttgcaccctttgttttaattcttataacttgatacattttagtatctggtaaggcaaatccctgcacactaatttttcctcttcgaaattctcttatctatttctggatgttaattattttaatacattttacactcattttaacttcttctaaaaatttatttttattctggtgaaattcatatgcacacatacatacacagtaggattgctattgtggggatactaaattttcctgagagacatacaaacaagactctagtttttagcaagattcatagtwatatgtcccactatcttgctcactttttctcatgtattttttccactattttgaatgagatctttttctcaattatatc

SEQ ID NO: 899786 - DNA, 637 bp, Homo sapiens
gagaacagtgtttggcacataaacattcaaaaagagccggtattttaattgggtgactgtagggaccacaaccctacctattttcagaccgtgaaccataaagaagacaagcttatagctgaagtgaattaagcacgatcaactcagtactcacactgcccagatgtgtctggccagcatgagggtgcagaggaagacaccctgaactctccagggccctggacagatggccactctgtcttcacttttctcatctataagatgaagttgttggatgatatatcaatatttacaatgttgtttctagctctaaaactctatgcttttatcttcccttggatcttcatggcaccagaaggaaagtcttaggacccttggacctgtgagcagatcagctatagtcctgagttgacaaatttctcttggcatttttaccctttgactgctgtcaataacttcagcacagcaaaggtagcaaaattctattgggaatcttttcccaatcaaagctacagccccatagctgtgttgcctttttggttttgtgtgaagcaaaatttttttcctgggtcctaattggtgccaaatccaatattactacatttgcrtcaactcagaagtcaacccattcagtttg

SEQ ID NO: 899787 - DNA, 553 bp, Homo sapiens
tggccagagactcaaattacacttacaattttcamatatagtatctggcattcaatcaagtaattaccagacatgccaaaagataggaccagttgaacaaaaccaaggaataaaacagacttgagaacagactcacagatgatacagattaattagagttatcaggcataactttaaaataactgtgattaatttgttcaagacaatactgggcacaatggagaatttcactacagaagaattatcaacaataaaaagaataaaatgtaaattctccacctgaaaaacacaaattgttgaaattaaaattttgctaaaattaaaaactgaatagacaatgaagaaaagaggattaactaaaggacaggtcattagaagatatccagagtgagcagagacttaaaaaggctggtttcaccagtatatgcaaatgttaaaactaatcaaatggcacactttcaacatatgcaatttattgtatatcagttattcctcaggcatgtattgttgctacaatggaacaagaatcatggtggcatcatatttcttttct

SEQ ID NO: 899788 - DNA, 626 bp, Homo sapiens
atagagtatgaactacctatgctgagtgatgtttaaactaagcgtacttgatagacagaaattactatcacagttccaaactggataatggggatggyaagataaattgctaatttcatctctaggttttacacttgatcttagccaaaaggccgagaagcgatcatctctaggttttgaaggtcaggagttggactgcaacagaagaaatttcccactaaatacttcacaaataccctcctcctgagagacaagcttagtcccaaaggaaacagacagaaaggtgaagtcactagcagggcatttatatttcacatgcagaaactggaccacatcaaagctggcaaaaaaaagtcctgtttacaggagaaattcaagatttttcaggtttgaacattgctgatgacattataaatcagtgtgttacttggtgatgtatttcaagagccacaaagacttttaagccctttggtagagtaattctacttctaggaatccatcataacgaaccactattagcactactataactaaaataagttacagttcaatcagttgatgaaacattatctagcttttaatgagaggggtatgcagaaacaaaaaaaatgtgtttacaatagaaa

SEQ ID NO: 899789 - DNA, 670 bp, Homo sapiens
aaagaacatggtgaacttactttaacccagtattcatattgaaggagcattataaactgtaattatacattctttcatgcacaaacatttaagtacacacacacacacacacacacacttagtattgtatatatttgtgtattatatattatatatttatttcttgatttattctactggagaccttaggatgttctatagacatcagtggagtgccagcacctctgattgagtagagaataagagatccttgctaagacctaatttcttggggggataaaagcccttttttgtaattttatttccattgactccttaaatgtacaaaaagatgtacaggtgagtgacctcttagtgaaacacaaatgccttcatgcaaagtagattatgaaattaaagataagatttatcttcaaataatagttttaaaattaagatgcaaaacaaacacatatgcacctctccctatatgttgctgttctgctcttagttttcaaaatcatcttttctagatcacagaatgtattgattttgcctttagaaaaacakaatttggtcatccatattttaggcagcattctgtaagtcttaagaaaatagcaatgaaatttctaacaggttattttgggaaaacctgcagcatttgcacatatgaaagcagtccatctag

SEQ ID NO: 899790 - DNA, 643 bp, Homo sapiens
aaaacatgtctgacacccatttgtacctgtggcagacatatttatacttggaagcctgtgtcacagtcattaatatgagataatgcaaatagtaagtaaatttaaatattaaaacaagatacaatgtawttagatcacaaaataagtagatgccagtaaaattcacaccagaattcacagtttgtctgagattacaggttaaatgtcttttgtaattatagtttgttgagatttcagcaactttaagacttgtattatattttgctattgtttgtgatttatcatgtcttttaatttatattctattatatctttaaaagttagacaatttatgtttatcttttttattttaaaaaaataaattttctctacccatatattttatatattatcatttatataaaattattatttcaatcaacaaattaacttcatctcctggcaaaccagatgcacaccaatttcatatttggattctttcacttcataatgtatttatattgaagctaacactattttgttgtggtggtggttcttttttgatacaggatcttactttgtcacccaagctagagtgcagtggtgctatcacagctcactgcagctttgacctcctaggctcaggtgtctctcccacctcaac

SEQ ID NO: 899791 - DNA, 552 bp, Homo sapiens
aggtcagtggggacattttggttcccatgtccaggtgtctcttttcagctcttaactatccagcctaatctaaatctttcttattattttgattattargcattattaatttttgttttttgagatgcagtttcactcttgttgcccaggctagagtgcaatggtgtgatctcggctcactgcagcccccgcctcccaggttcaagtgattctcctgcctcagcctccccagcagctgggattacaggtgcccgtaaccatgccgaactaattttttgtacttttagtagagatggcgtttcaccatgttggccaggctggtcttgaactcctgacctcaggtgatctgcccacctcggcctcccaaagtgctgggattacaggcgtgagccactgtgcctggctattaggcattattaatgctttattttcctacttcaaccatccagtttcttgccatctctgtattcatctcctaaatatttcccctccgcactcatgtacatgcataagcccatggttttgtcctcaggttttttcttctttttcttc

SEQ ID NO: 899792 - DNA, 613 bp, Homo sapiens
attgtttatcttttgtttaaatattggcccatatctcttcaggctgagaagcagacttttaccttgcttacataggcaaggagaaggtattgtcttaggagtagagaagagttgacatcaagctttagtgtttaagtgtattgatatgtgtgagataagtgtgtgtgataagctatgcaaactacttcgtgataccagtgtgatccaaatgtgcactgttagttgagattttctaatttaaaggtcggggattcaataatcaatcccctttctgagattttagccatgaacctgaaattttcaaatagtaaaggaaaactgatattggaacaacttatttgccaattattgttttgaatgccagttagaagaaagaaaataccgtgaggagtatctttatattttagaaatggacacaatttgaactatggatggctctaaattgcgatcactttactcaattcattctctgtggattgtgaaattttattcagttttaatgatttcaaatatagccataagaggaytcaatattttcttttaatgaacttccctccaaaacctggacatctacttgttagtgtcacttctgttaactctaagttgtttttaa

SEQ ID NO: 899793 - DNA, 625 bp, Homo sapiens
gcatgtttttaaaattcatccatgttgtgtttatcattaatttgttcrtgattattgctgagtatattctattttatgctcatatcagtttgctaatccattcttttgctaattgtcatttggactgtttccagtttgaagctattatgaatcaaggtaatatgaatgttcacgtacaagcctttttgtaaacatagattttcttttctgttagcaaatatgcaggagtgaaattgctaggtcacatagtaagtgtattttaactttataagaacatgcaaatctattttctaaagtggtggtactgtattacactcccaccagtagtatatgagagtctccttgctctacatccttgaaacacgcatattgtcagtctttattttaacaatctaatatgtgtgtatttgactctgattatagttttaattttcatttctctgataacaaatgattttgagcatgttttttatgctgatggacttagtatatctttttatggaagaatctgtctatgcatatttctctgtatatatgtgtacatactttttcttactattgaatttttttatatatttcagatgcaagccatttgtcagatatacatattgcatatattttctac

SEQ ID NO: 899794 - DNA, 578 bp, Homo sapiens
tctggctttataagttaagtgttaaattgaaatattatcttatcaatataagcacagttcaaaccttcacttaaataattcaagtggagattttttcttcctgcttgaattaatctactgtgttttatgatggagaggtcattgttaatgcccacagtgaggagaaacattagtaaatgaatgatttatcctgtctttgcatttgcgtaaacaagataactgtgaataaatctttcctattttaccttgaaaatgcaattctagaatttattaagccttaagctggaaactgaaaggactgagacaagtaaagtcaaccctttggaaaagcagaggctagaagaggggcaatcctggctccagaagtcaggtcaaagaggaggctttgcttgtcaggatcacactctgtgacttcacacagtggctccaggggagagaacaatgtttcttacaaacactagaagaatatttgtctgaagctcaagaagtcaaagactaattgaattctaaagcagaatgaaacccttaagattccatggtaaacttggtactrtatgcaaaaagcagaacagaggtgg

SEQ ID NO: 899795 - DNA, 617 bp, Homo sapiens
tgtaagtcttctagcaggctagatattaggcaatatatagccagaaacaacttttttatacattaaaaaaaaaaaaattcagattgggtgtggtggctcacacctgtaattccagcaatttgggaagccaaartgggaggattgcttgagcccaggaatttgagaacaacctggtcaacatactgcgagaccttgtctctatttaaaaaaaaaaaaaaaaaaattagcagggcatgatggtgcatacctgtagttccagttaccgagaggctgagatgggaggatcccgtgagcctgggatttcaaggctgcagtaaatcataatcatgctgctgcactccagtctgggcaacagagcaagacctcatcttaaaataaataaataaataaataaaatttcaatcagaaatatatttcacagaaacacatcagtatatgaaaaaagttgctaaaattaattcttccaatagttttctaaaatggcaagaacattgaaacaaaaaacatttaatgctctattgtaatatttacagtgttgtgttgtgattaaaagtaaattataaaatagtacagagttatttttataaaggtaagcactagttttttaattggatata

SEQ ID NO: 899796 - DNA, 618 bp, Homo sapiens
caaacagggctcacatgcccccctgcccccaaatacacccactcgccatgttgcaagcatgagaaggagagaagagagaaggagagaagagatgcggcccttcagggagcccagtcataggagctccctgagccagggctgtgataccctctgaggggttctgtggctcctggcgtttccaagcttctggttgccactgtgttccctagtgctcacagtggaagctgcttgcagtacacctggtccagctgcagcctcgcagggagccagcacccaagctggtgcctggagatgcctgccccacagcagccagcatgcctggctgtgtgaagtggccggaccctgtgcttgctcattcatgtacccctcaccactctgtacctggctcacccttggcaggtgtgggatctgtgctggtagtgcaagccaaaagcagcctgccaggctgagtgagtggagtgagcccaatgggcccaagcaaaactcaggcaaacgctccaccaaccacagaggatccagytggcaaagcgacgccccaaggatcctgtgacattgctaccattattagcaacagttcacatttattgaatacttattcttgccacttctaaaggcttt

SEQ ID NO: 899797 - DNA, 561 bp, Homo sapiens
acagagaagaatcttttaattctcatgattgtggaaatgatcctggtttctgtggttctggaattagaaggcagatggrtagggaagagatctatccttcagtatgcagattctcatttagttcttattcttggtatggcacatcaccattgcccttctctatgcctgatatctctatacttggtgcctctctggttcagtttcttctacagaataaacttcctgtctctcttaggagttggggagaggtagtttcttgtttacacaagacgagagcaggaatcttgtctctaaataatatttttaattaaacacgatttcagtccctccctattcatttcctctgaggtttctgatgctctgaattcccaaacttttctgggattctgtgggagcaaagtggtttgtgtcctgatagccttcttgccactctgcctggcatgcatttaaattttatcttccttctcctctactcaataacttatcatttttcttcaatctgcttttcaccttcacacttcatattgtgattcaagttacagaatgttgaatatagcttca

SEQ ID NO: 899798 - DNA, 561 bp, Homo sapiens
acagagaagaatcttttaattctcatgattgtggaaatgatcctggtttctgtggttctggaattagaaggcagatgggtagggaagagatctatccttcagtatgcagattctcatttagttcttattcttggtatggcacatcaccattgcccttctctatgcctgatatctctatacttggtgcctctctggttcagtttcttctacagaataaacttcctgtctctcttaggagttggggagaggtagtttcttgtttacacaagacgagagcaggaatcttgtctctaaataatatttttaattaaacacgatttcagtccctccctattcatttcctctgaggtttctgatgctctgaattcccaaacttttctgggattctgtgggagcaaagtggtttgtgtcctgatagccttcttgccactctgcstggcatgcatttaaattttatcttccttctcctctactcaataacttatcatttttcttcaatctgcttttcaccttcacacttcatattgtgattcaagttacagaatgttgaatatagcttca

SEQ ID NO: 899799 - DNA, 575 bp, Homo sapiens
aattgtgaggcctccccagccatgtataactgcaagtccattaaacctctttcctttgtaaattgcccagtctygggtatgtctttatcagcagtgtgaaatggactaatacaggtatttgtaaatttctatgtaagtacaataaaaggatttaataatcttccgtgaaagccatgtcaatgaagaattttcaccctccttttaccctacacccttaagtaggccctggtgtctactgttcccttctttgtgtctatgtgtactcaatgtttagctcccacttataagtaagaacaagcagatatacctctttcttattgtgctttagaaatactgtgttttttacaaaatgaagattttttttttttttttgcaacgctgtgttaagtctatcagtgctgttttcccaacagcatgtgttcactttatgtttctgtgtcacattttggtaattctcataatacaccaaactttttcattattatatctgttatggagatctgtgataagtgatctttgttgttactattgaaattattttggggagccacgaaccatgcccacttaagacaaca

SEQ ID NO: 899800 - DNA, 594 bp, Homo sapiens
gttaagtctatcagtgctgttttcccaacagcatgtgttcactttatgtttctgtgtcacattttggtaattctcataatacaccaaactttttcattattatatctgttatggagatctgtgataagtgatctttgttgttactattgaaattattttggggagccacgaaccatgcccacttaagacaacaaacttaatcaataaatgttgtgtgtgttctcactgctccaacaaccagctgttctcctgtctctctccctctccttgggcatccctatttcctaagacacaaaaatactggaattaggccaattaatagccctacaatgaccctaagtgttcaatgaaaacagtcacatgtctctcactttaaatcaaaggctagaactattaaggttagtgaggaaggcatgttgaaagctgagacagacctcttgcacgagctagccaagatatgaatgcaaagatgttcttgaaggaaattaaaaacgctccttyagtgaatacatgaatgataagaaagcaaaatgcctcattactgatattgggaagtgtttgtggtctgaatagatcaaaccagacaaaacattc

SEQ ID NO: 899801 - DNA, 635 bp, Homo sapiens
actgaattggtgcaatctcatgataaacctgtacagatgaggagtggcttcctatggatgagcaaaaaaagtggtttcttgagatggaatctactcctgatgaagatgctgtgaaaatattgttgaaatgacaacaaaggacttagaacactatataaacattgttgataaagtagcagcagggtttgagaggactgactccaattttagaagttctattgtgacctgcctggccaacatggtgaaaccctgtctctactaaaatacaaaaagtcagccaggtatggtggtgcacacctgtaattccagttacttgggagacaggagaatcgcttgagcccagcaggcggaggttgcagtgagccaagatcgcaccattgcattccagcctgggtgatagggcaagactctgtctcaaaaaaaaaaaaaaaaaaaaaaaaaaaaaaaagttctattgtgtgtaaaatgctatcaaacagcatcaaatactacagagaaatagtctgtgaaaggaagagtcaatccatgcagtaaacttcattgttgtcttattttaayaatttgccacaaacctcaaccttgagcaaccaccaccctggtcagtcagcagccatcaacatcaaggcaagaccctc

SEQ ID NO: 899802 - DNA, 639 bp, Homo sapiens
acacagatatttgcaaggtgatttttatcaacataaatttattaagtacactatccttgggcattaacctaggtgacaggaaaacactttaacagattcgacattggtcttaagaagctcaaatagggttgaaatacagaacacacgcacagagattaaaagattaaaagacatgtgtcatgttgtattttccttaaatgtttgcctctccatttttgaatccaataaatcattaagctcttgttggctgttttccatcttgaagtattagtgcttagccttacaaagtttgaggtagctgcttagtcatccctgctatgttcaagtgtctacataagcccctcctagggtccaccggaacccacagaattggaaatctagtggagattcattgttaacattacagaagacatgggactagcgatctcctttggggttccagttaggcttatactgcagctgccaccccactttctaccattcttcaggcaagtagtgagctatgagtgcrctcacattatgaagaatacgtcttgaaaaaggaaaaggattagtgttcagggtgattcgcactcgttatagttaagccagcaaggcctcacttaggatgagagaggagccaccccttgggaaaatcat

SEQ ID NO: 899803 - DNA, 585 bp, Homo sapiens
gcattttattttctgtttagtggttgctrtagttttcttgagtcttctccctactgctaatttaggctatttggcatattcagcctcatggttgcaaaactggggttttaatattaaaacttccattgttcatttagatttttccttctgaaaatttgtagaattattcaaggcaatcttttatatacactttctaccttcctttgcctcccaaatcaacaacctgaaggtaggccgaattaatacacactagttgtggtaataatgtagttaagttgacactgtgagctgtggtctaggcagagaatgttacgtgcagagcttctattgtcttctttctcccaaacacagtggtaggttattcacattcattccttgctacacgcatctagttaaaataacttagactttttcaggaaagacaaactgaggccaaaagctattgctcatctcattgctaaaactctggcaacattttctgaattccacagatccacagtttgagaagatgattgtttaacttgtggcatcatgagggcccaacagtttagaaaacagtgggacagcctgttgccctgcagccag

SEQ ID NO: 899804 - DNA, 546 bp, Homo sapiens
aaatttttagatcttatttataggagagtagccaatcactccctcaaaacaaattttcttttaatctagacacaattctaaaaagtcatgatagctaatatctttctattcaaggtgtgttgcaaagaccagcagcaaaggcatcacctggttgctgatagaaacacaaatttttagttcccattccagagctaccaaagcagaatctgaattttaagaagatccccagattaattgtagtacactaaagtacgagaagcatcggcctaaaatgctagtacaaggtaatttgcctgagctttggcacactgggaatgtcttgctttgtttggctaggagttgatggaagcaggaagactgactacaacgacagtagtaaaaaaggcaacccacatacagcatgccagtgagaaargacagagaaaaatttatgaacagctggctcaaaatgaaaaaacaaaaagcacctacactacttcgtgtaggcaagaagctccatacaccacagcaatccctaagggtctctgtgtatcgcagcgacgtaga

SEQ ID NO: 899805 - DNA, 627 bp, Homo sapiens
cttaaatatccctctactaacagtcactcaagatcatgatttaatcayttcatgtccaataaagtattgatttcattttcattggttatcttttatatgatcatttagccattttaggcattatatcttcaagaagaaggagatttgtaaatactacaaaggggttttcgttttgtgttgttgagatattactattaaagtttctttttttttttttggatacagctgtgtaaaataaccaagatctatttctcattctagcatgtggtctcagcattctgtacaaatgattttactggcttcgtaaactcccaagttaaagaatctctttaggaagaatcttaattgacctcttgaattgttggcctggtacccagagtaaaagaattgtgttttaataaggattacttttgtcgtggtttattatgctttagcaccacacgctaattgatgtagttgcaggaaataaggtaagacatgccatggtttggttaaaagcttcattacatgtatttatgaagagtcttatggatgaaataatttacaacatctattacatatattgaaatgtatgctactgcttccatttcttataatctgcggaacccaggtctgaaaccacttggt

SEQ ID NO: 899806 - DNA, 649 bp, Homo sapiens
ttttcagttatgattggaggaggtctaagcaagtgaaatatgacacattgcctttttcctgtcaaarcaaccccgtatcatatatgcatgatagtgtggttgctgctttaaaaaccaattctagaaggaaaaatgtcatgtttcctagagattataaataactagacacagataagcacaagtgtatttatatcagcctccaaatattctgataagaagaaagaaatacagtctgttgtttgactttcaaagggcaaattttaaaaatgtaacagaaatgcaacttttgactttgtattttaaatgcattatcttcggaagatatgatagaatgaggtatagacactgtaaagccacttctaacagtgataattactctgcagtatttgaatgactagcaagtttcttatatggcattttataatactgttttgttgcagaagcctttatcattttacgtcatttaatttggtaaaatgatataacattcctatgtatacagaaaacctcagttcctattaatgtattgagtcttgtttatagttcagttttcaggttcaggacaattttattcctaatgatatgaagaaaagctcacataagaaactacttctttttttgtttgtttgttttaataaagaaaagaggt

SEQ ID NO: 899807 - DNA, 661 bp, Homo sapiens
tttgaaaggcaaagtgaggaagattacataaagttgttctgaaataattatccttggttataagaaccaataacagggtaacatccrtccaggcttgactggcatttggtggtcagacctcctcacagaaatattatttgtttaagaatcgcgctggcctttgtgcaagatagtggtgctcagagtctttgtactagtttttataataggcatgtgtgtgtgagggccctttttatatgacctcccaactgtttttctttggagtgtgacacgagtgactccattttgactctgacagctttcacagaggtataaaagagcatctgtttaaaatgtgctaaagataatagtcagttgttaatgggtgaaagcaacggagaggatgccattcaataaaaaaaaaaggtggaaaaagaggtatgtagttgttcatggaaagctgacaaacacaggaactgtcaaaatgcatcctccacttgacacacctcttgtttcaggcagtgcctgttttgtggtcagtggggagtatgtaggatatgtatcagagaatgaaaaaaattaaaaagtttatggagtgggtgcaagacacatacagccctgatgcgtatctctgggccctatctaaagggtccctgaagtcttcagctcactttccttaagc

SEQ ID NO: 899808 - DNA, 528 bp, Homo sapiens
ttcacatgggacctgaaatcatgtgtctgaactcataaggatcaggctaacctaacrtgatcagtcataaacatagtgttttaatgaaaaatgtcagttgatttttgatcacttaattgccttataactttaatcccactgaaagtccttaaagtatctgtgcattattactagccatggaaaaaataagctgctaacttagtgacagaagtttaccttgttcctgaatctgaaccccaaaaaaactatatttactatagttccatgttgttgttcataaactgacctctttatctcacagagctgttgtgtagattaaattcaataatataaactgtcaagtacaataaacatgcaaagtactatagtcatcgtaatcattacagataataatagtaagcactccttgtactgtcaagtacaataagttcggtcaaattcattgctggatcctctttcattcaagatactttatgtgctggcctatttataggccacttgatagactaaatgtgactttttttaaaa

SEQ ID NO: 899809 - DNA, 615 bp, Homo sapiens
ccattgagctacagaattccagatatcgaaattctaaggaaatgttctgttttagaatcaaatcatgtactaggctgaarttaaatcaaataccatttactgagtattgttattaggataaacatctttccatactttggtgaaattggaaatactcttgcagaagtgttttcatctctcacccagaaaaagtaaataatgaccttccttcttccacttaatgtaaaatcctacatttacatatattgtgtcatcccttgttttgtgattatttgcttacagattttctctaggtgctctctaagcagagagaacagggtactggttaagattgtagatctaggggatcactgatctaggtcctattccaaatttgattcctcacctgctaagcttgcaagtgcaacttatttaaattctctgaaggttaaatgtttcatctaaatagggataataataaacacctatagcatagagttgtttgagattaaatgagataatacatgtaaaattatgtgcctggcatacagcaagattgttgttgttgatgatgatgatgatgatgatatttttctatccccagtgcacaactgcttgaatgtattagataatcaa

SEQ ID NO: 899810 - DNA, 632 bp, Homo sapiens
tcaattctctattatgaagcccaaaataaccaatagggcaagatagcatcttcctcagaacacaggtgagaggaaaagaccgagagaaccaagttagaattctccttaacagggaaaatctgggattttttgtctcattatgtgtatatatatctcatcatatatataatttataatgtattacataaatacacacacatatgctgttgacccttgaacagcatgggtttgaactgtgcaggtccacttatgcagattttcttccacctctgccatccctaagacagcaagaccaatgcctcctcttcctcctgctcctccccagcctagtcaacataaagaaaatgaggataaagaaccttatgatgatccatttccacttaatgaatagtaaatatattttctcttccttatgattttcttaataacattttcttttctctagctcactttattgttagaatgcagtatgtgatacatataacatacaaaatatatgttaatcaactgttattggcaagacttctggtcaacagtgggctattagttaagttttgggggagtcaaaagttacrtgtagattactgatcacacagaggaatggtgtccgtaacctccacattgttcagggg

SEQ ID NO: 899811 - DNA, 653 bp, Homo sapiens
aaaaacacaacagaaatccctcagagacagtaattgaattacattacttgaagaaattaaatttagcaacattttttactaacctaaaaaataccatattcatatacatyagtgacaagcattcaaaatgttattttaaaataatattgtataaatgtaaacaaatactataaggtaccaaagacattttgaaaacaatgaatagtaactttataaagtgataaattttactgagaacaaaatagattaaaataatacaacatataccatgttcatccacagaaatacctgataaaaatggtaaattctcctaaatttaattaaattacaataaaacataagtaagtttttcattaaaattagcacattaattcaaaaatttaaagaaaaaactaatggttaagaaaatccaatagaattttgaaaaccaaatgtagcataagctgtgagatattaggccttattataatatcatagcaattttgatattgttttattaacagagaaatagatcaatacaagcaaaaagagtgcccagaatgaggtctatgcatatgtggaaatgtgaaaaatttatatagattatagaaatgtacttatatgtcagagatagaattacacaatagctggtaatggcagatcattcaataaat

SEQ ID NO: 899812 - DNA, 545 bp, Homo sapiens
atagtactgaaaaaactggatatccatatgcagaagaataaaactagactcctccccgtcagtctatactaatatcaactcaaaatagatcagagacttatgtaagacctgaaacaaaaactactcaaagaaaacataaaggaaatgctttaggatagtggtctggaaacagattttataaataagatctcaaaaacatgggcaacaaagcaaaaataaataaatatgattatattaaactaaaaagtctctgcacagcaaaataattagtcaacagagtgaaaagacaacatacagaatgggagaaaatatttaccaactattcattcaacaaggaactaaacttctctacagcaaaaaaacagtcagattaaatgtttcccaaaagaagaaatacaaatggccaacaaatatatggaaaaatgttcaacaacactaatcatcagagaaataaaaattaaagctrcagtgatgcatcatcttaacccagttaggatgaataatatcaaaaaaacaaaaactaacaaatgttggcacggatgctg

SEQ ID NO: 899813 - DNA, 603 bp, Homo sapiens
ttctccggagaggcacaaacaataggaggtatattatatatacctgagaatccagggaatcactggtgtgagtccaacagcgggagaacctggggtttcaaagtccaaaggcaaaagaagggcatcccagttcyagaagcaggagaaagagagagagagagcagtaattggctctttctcctttttgttccatccaggtccccagccaattgcatggtgcacatccaccaagaaaagattgaaaacagagtcttccccactcagtccaacaactcacataccagtctcctccagaaacactctcacggacacacctgaaacagcccactaattctaatcagatgtcaaaccatcttgtttccctttcaacagaagagggatatgctcagtgtctactgaagcactgagaataatacaatgattgagaataatcctttaccagctatctgggtatcccttaattcagccaagttgacgcccaaaatcaactattacaagataccattataactctgtcccaaacattgagtgttaagtcagcagctaatgactgaggtattataataggagaagaaaaaaaatactctgatctcctattttaaa

SEQ ID NO: 899814 - DNA, 569 bp, Homo sapiens
gtcattctctgactcacttgctctgtgaaaagtcagctgccatgtcatgagcttcctcatggaaagagccacatggcaaggaactaatgtttctaggcaataaccattgaggacctggggcctgccaatagacacgtgagtgagctctagagtggatatgtctaggacttacaggtaggccttaaaatgactgtggccctggccaacaacttggatatggcattgcgaaaagtgtgagccaaaagcacccagctgaagcctaatcccagatccacagagactgagatagcaaatgcttgttgctttaaacctctatgttttggggtatttgttactctgttattatctgttgatagtaatgcaggcagattctttgtttatttaataagtctctcaacaatttatcatttgcacaaattctactctgttctgtcaatgattttatataaaccaaagatttagggaaaagactcactatcacattgttttmtggtaaccttttatttcctatttatgttccaaataatgtattatttaattacatagaagattagaatgtcaggtgatcc

SEQ ID NO: 899815 - DNA, 654 bp, Homo sapiens
aaaataactggctattactggataatttaacttaaactggatattgtccaacatgtattcaataattccattcattcaacacacgttttttgaacactgccatgtgtctagcaatattgtgaatactagagatgtggtgaaggtcgaaaggacacagtccccattctagtggaagaaaaggacatgttctatgtcagataacatcctagagggacaacaaatatatagtttcctgtcacattgtgtaagtgctataaagaagtgtaaattgatacgaggagacagagagtgacagtggggtgtaaataggcttttatctcaatcaaagtctagttgggaagaccaatgtctttgaagaattgcacataggtggaattcaacccttcctccacacagtcaagctttttacacctaaatcgagtccaaccatcagaaaactgaatcagaaaactgaatcttggaccgtattctcttgttcctttggcagaactgctttcactgagctgttatttcaccttacactctcaattaaatattgaagagccmtataagaaatatccctgttaaacctaatatgacatccactatgaggatattgttgagaacattatataccatatatcacttcgtgcaccatttacgaactcttaccca

SEQ ID NO: 899816 - DNA, 640 bp, Homo sapiens
cactgcaacgtctacctcccaggttcaagcagttcccgtgcctcagcctcctgagtagctgagattacaggcacccgccaccacacctggctaattttcgtatttttagtagagacgggatttcactgtctggtcttgaactcctgacttcaggtgatctgcccactgcagcttcccaaagtgttgggattacaggtgcgagccaccacaccaagccaggagtgaaatgtttaacacacttgtatgcctttcagtctttcctatcctcacccccttcaacacatggctttgttttaaataatatgaaaccactttacttgttgaaatttttccttaagagcaagagtggtggacacagcctagagtgacccctagggagtcacacccttgtgtaattccctccctttgagtgtgagcttccaaccaagagcaaatggcagttaagacattttgaagatgcaattaaggtccctaatcagttgactttgagttcctcccaggtgggcctggcctaaccaggtgagacctttaagagggtccaggctgggtgcagtggctcaygtctgcaatcccagcacttcgggaggccaagacaggtggatcacctgaggtcgggagttcaagaccagcctgaccaaca

SEQ ID NO: 899817 - DNA, 659 bp, Homo sapiens
tctatacctaaccatggaggcaagtatcagcaattgtctttctttcctctagctagtggtactccctctaagcccccatgggcagaccacaagcattcgtgaaccacctgccaagttattgtcacaaccacataatacctttcacattgtctagtcccaaacctcactgcctctcaccaggactccagcaatggtcgcccagcccctgtcttcactgccacacttgctttctttcaatccattctccacatacgaatagccaaagagatccttttaagatataattcatatcctattactccttacttaaaaccctccaatggcttcccaaaaggtttggaataaaacccaaacactttacccaggggctaaaagataccgcacggtgtggcccctgcaccctcatcttggcccagtcctgccaccgaccaccgtgctgcagccacccaggcctcactctattccgaatctcgccaagcttctgctcataggcatcagtattgttttcatgctgtggcctcaggaccagaaagaatcatgagagggatgcagkattcaacagaagcagttacagtcctgccctacaaagagaagtggggcacagatttaaaattgtcctgagatggagaaattactgaagaaagttagcaataaacttt

SEQ ID NO: 899818 - DNA, 643 bp, Homo sapiens
gcccaccctctttcattagttagctctaagctcagaagtcacttgctcagacctcaggctttttgcccttgtttattctaaaacttcgctcttatttctacttgaaacacacacacatacttgttacctccccacccagaaggtgacccatgggagtagggctgcatccctggaggcccctgttgtatccccagggcacctgtgtgctcatcactgtatacttctcattacctacaatgattttctttattggtttccttccgagaacataaactccctgagaatcaggactttctctgccttgtttggagagaaacctctggaccctccaaacttaaacatttcctggcacaattatttgttgaaggagcgaatccacttgcttaaagtttttgtcccaaaatcaaccatatctttcaacttaggtttagcctctccctaagcaataatatcgagaacggcctgggtaaaatgtgctagctgcttgttttcctaatgcacattaaaataaatgcagagctrctgaagtaaaaacattgttatctcaaatatctgccatcaaaaatcaccttgctgccatcatggtctgtacatctaacttgggaaacactgcaatgagcaactgtcctgctaaagggcccct

SEQ ID NO: 899819 - DNA, 643 bp, Homo sapiens
gcccaccctctttcattagttagctctaagctcagaagtcacttgctcagacctcaggctttttgcccttgtttattctaaaacttcgctcttatttctacttgaaacacacacacatacttgttacctccccacccagaaggtgacccatgggagtagggctgcatccctggaggcccctgttgtatccccagggcacctgtgtgctcatcactgtatacttctcattacctacaatgattttctttattggtttccttccgagaacataaactccctgagaatcaggactttctctgccttgtttggagagaaacctctggaccctccaaacttaaacatttcctggcacaattatttgttgaaggagcgaatccacttgcttaaagtttttgtcccaaaatcaaccatatctttcaacttaggtttagcctctccctaagcaataatatcgagaacggcctgggtaaaatgtgctagctgcttgttttcctaatgcacattaaaataaatgcagagctaytgaagtaaaaacattgttatctcaaatatctgccatcaaaaatcaccttgctgccatcatggtctgtacatctaacttgggaaacactgcaatgagcaactgtcctgctaaagggcccct

SEQ ID NO: 899820 - DNA, 589 bp, Homo sapiens
catcaacttaatcaagagctccaagttccgagtccaaagactaaagtctcatctggagataagttcctttcacctatgagcctgtgaaatcaaaaccaaattacttacttccaagatacaatggtggtacaggcattgggtaaacattcccattccaaaagggagaaactggcccaaagaaaaagttaacaggcccaacccaagtctgaaacgtaacagggtagtcattaaatcttaaagctccaaaataatctcctttgactccatgtctcacatccagggaacaccggagcaaggattagtgatatggtttggttctctatccctggccaaatctcatgttcagttgtaatccccagtcttagataagcctggtggaagatgactagatcatgggagtggatccctcatgaatactttagtaccatcctcttggcactgtcctcgtgatagtgagtaagttcttgtgagatctagtcatttaaaagtgtatgacacytctcccctctcttccttgcccttgctttttctagtgatgtgcctgctcctgcttcatcttctgccatgattgtaagcttcttgaggcccc

SEQ ID NO: 899821 - DNA, 625 bp, Homo sapiens
cttccacattttcaggtgtctttacagcaatgccctactcttcaatattaatgttctgtatcagtctgtttttgtgttgctataaataaatacttgaggctagataatttataaataaaggaggttaaattggctcacagttctgcaggtgtacaggaaacagggtgctgggatctgcttctggtgagggcctcaggaagcttgcaattatagtagaaggcaacagggagccagcatgtcacagggtgagagtgggagcaagacagagaggagggaggtgctcttttaaaacagtcagatctcctgtgaaccaactgagaactcacttatcaccaaggagatggtgctaagccattcatgagggatctgcccccatgatccaaacacctccccgtagggcccacctccaacattgagaaccacaaatgttcctttagtaacatttcccattctcatattcttgtgggggttactccacatgagatttggagtgaacaaacatccaaactatatcagctcccttcacctggtctccgggtctgcttctaggagagcccaacctatgacragctccgatcccttctcctttccttagtgaaagggatggagaagatgctagaaagca

SEQ ID NO: 899822 - DNA, 590 bp, Homo sapiens
ccatcaaaaaaatgggtgaaagatatgaacagacacttctcaaaagaagacatttatgtggccaacaaacatattaaaaaaaagctcatcgtcactggtcattagagaaatgcaaatrtaaaccacagtaagataccatctcacaccagttacaatgctgatcattaaaaagtcaggaaacaacagatgctggagaggatgtggagaaacaggaacacttttacactgttggcgggagtgtaaattagttcaactattgtggaagacagtgtggcgattccttaaggatctagaaccagaaataccttttgacccaggaatcccattattgggtatatactcaaaaagatttttctgtgctgtgacatccacaattttggtaaaaaaaaaaaaaagtagcagataaataatcctgtaacaccgtttgctcctggaaggcaaagactgtcatttctttctgtatctccagagcctagaagagtgctgaatacaagttatatggacaatagatagttcttgaatgaaggcatagttacaaggcctattgtattagtcttctttcatgctgctaataaagacatacccaagac

SEQ ID NO: 899823 - DNA, 718 bp, Homo sapiens
gtgctactaaccacagaggctgagggaaagtggaactaacctccaatatagagaaagcattgtggagaggacatttgagctgggtcttgaaggcaggaggtcatttcaccttgtaagagcatgagaaatggcccacaaggccatggagaggcatcccctgagagcgcagaggatctgcccttatgatctccatcttcagaaagtggggaaatgcggagcatccctcagattagtcactgaagactgaggtttgttcttcttgaacctaattctgcttccaccctctagaatgcaggaaaatgagtttctaaaagaattctccctgttgtcatgaggacaatatcttcccctttcttctgaactcactcccatctgatactgaatgaatattgacattggataaagaaatccatgtttctccatccatcggttaatcattatgttggtgtcactcttgcctaggtctcagtgcaaatcttaccccttcaataagctcacacctgcccctgccccaactcaaagtcagaggagatgaaaattctttttttaaaactatatgtttatttataatttatatctattactatatatgggttatttacatgcatttatatattactatattgtaatctatatttgtattttatgcaaatataagtctatacataasttatatatgtagtatcttgtataatatacacaaaaatagaaaatttaa

SEQ ID NO: 899824 - DNA, 662 bp, Homo sapiens
aggctgtggcagctggttcaaagttgaaaacacaatatggtgctttggctgaacatgtgactggcttccttttctaatgctgctagacattctccttgctgggtataaatgtttaaaatatgatgaaataagcctgttagcttatcaaacaacaggtttagataaatgatgaactggagagcctggagtttatttgaatttcatctaaaatacagaaaagaatcccataatgatatctctgaagaatgcttgaaataagaatgtaaaagcagtggggaaaaagacactcaaagtacaaaattaaggcaaagtgcattcatgcccatagtcagttggccataaaaggtggattaatcagatatcacctgaagctaaaccagttactttgacataattggttactgaaaagaggagacagaattatatgtttaaaaaaccattgactcacttgcattatgttttcaatctattttctaaattttaaacgtctctatgacataacattttttttcagtgtaacatgttcagattgaaattgggtggttgtaggrtgctgggagagattttataatgtttgtgtcagatgtgtccctaggaaagcataacagggaaatgtgtgggtgttgagtggtttttaaaggtggcattgcaaagagtacgtt

SEQ ID NO: 899825 - DNA, 650 bp, Homo sapiens
tcaaattaaaatgctttaccctttcacatctattataaagaataaaattcaaaaaactgacatcagcaaatgttggtacagatataaagtatcttgaaatctcagaaattacttatgggagtataataagatacaactactttggaaaactgaactttcatataaagttaaacattatatacagtcacccttaatactgacatttccctctcaaatttattaaaaagtaacggaagtatatttccaaaaaatctcacacgcacacacacccacacacacacacacagagagagagagagagagagagagagacagaattttgatagtggcttatttcacataatagccaaaaaatgaaacaacccattctacacttgtcgatcaagtgtagaatgggtaagcaaattgattgttcatacaatggaatgctacttaacaatggaaaaataatgagcaactgtgtattaaacaagaggaatgagaccccaaagcattatgatgaatgaaagaagccaggaaaaaagtagctactctgattttatttatagaagtccaaataaagatacactgatctatagggatagataagagagwagtggctgtccataaggaggggaattgattgaagaagtacacaaaggaactttcag

SEQ ID NO: 899826 - DNA, 683 bp, Homo sapiens
ctccttatcttgaatttttgttaccttaggaatattcatgggtcctggcaagtggtgaagactttttttctgccttcactagctgactagtttgaatggttatttctgtgactcacacccaggctactatgatgtatcagaaataaggagtaattgccggtacttactaggaaagtacaatagtatcctgttcaagtggcgttgcacaaataaatatcagtgtttctcttaatacttttcattgaataaccagtaagctaagtatacataattacttctaccgctgtggacgagataatttaaacatctttgagttttaatctcttcagttgaacctgaaaaacagacttaattataatttcatctaatggttaagaagaaaaaaattaaaagtgtgttgtaatataccctattacatagtatagagcattgtacaaactcagttaatgacctgatcattttccttcccacataagccccatataagcatcatttggctgcagagattccttgtaactatacaaaagatggaagagttaagggctgaatcagaaaataatttcaacttgagaatttatttcctaaatatcatcaaatygaaataagtaatttttctgttgtaggtattatctgtagtatattcacacacctgatataaaataacttccctagggtacatgtct

SEQ ID NO: 899827 - DNA, 571 bp, Homo sapiens
catcttgcttaattatgtgcctccgggcaaaatagttctgctgaagtcctttcaacctacytactcactcccacttcatcttgggaagcaatttatatttttccttctctcttatacctaagaatctaatgaagatagtgaaggttttttaatacttgccttaacaaatacctctcatagcagacagtaaaaataagagtccagcaaaactttcgtaggaaccccaaagttacatccaagtgtacacacattttgcaatatctaaacctcttctgacacatgatgtggtggcttaaaacaacacacatttattatctcacggttgcttctggggtcgtttattggggaatggctttgctgggtcttcaacttcaaggtttctcacaggctacaatgaaggttagtgacatggtttcagcaccagccttgatggggaaagtttgcttcaaaagtgcatgcatgtggttgttggctagattcagttgattgtacttgagaagtcaatcacaatcacagctccttacttaaaaaaaaaaaaaaaaaaagtaaaagccatttggatcgttgctgt

SEQ ID NO: 899828 - DNA, 590 bp, Homo sapiens
agtttaggagtgtaaatatttatataagtttagggttgtggatatctatataagttagaggtgtaaatagctacataagttagggtgtaaatatctatataagttggaggtatagatatccgtataagcttcgggacacaaaaaactacgtaagttaggaaaatagatatttatataactgttgaggtgtagatatctatgtaagcatagagttgtagatatatatagaagtctgtgactatagatatatatttaaattagagcataaacatctatttaagccctggtggaggctgtgaggctctgagtttttatagtgaaggtcatatatatattttgaagatgaggagacatttgggtgatgctatcagagacagaagatacagaatgcccaattaggaggaactcacagaattcatttaccttcttagaaggcggtggattaacatgaaaaaagagtcagtctaaagggtagaaygaaaggcattcttaccaaaaatctgaactattattccaggtagtgttgctttatttaatttcctcatctacaagattataataaattttatactaattgagttaaattctat

SEQ ID NO: 899829 - DNA, 632 bp, Homo sapiens
acttatggtatttatcactcaaaatatttatttaaattgtttgttgattctcttcttctagttctcactaggcagagctggtgtctgtttctcacacccttgtatccccagagactygagcaactatgcctggtacatcatagccttgaatatgtatttgttttgttactaaaagaaataaatatacagtgaaatgaaggttcaaggataaggttctgaaaagttttcccagattggatgggggaaaattaataagctgttctttgatcactttttgataaacctaagaagactaacttttaaaatgttttagcttatagtcccaactagttgaaggctgaggcaggagaatcgcttgagcccaggagttcaaggctgcagtgagctatgaaagcaccattgcactccagcgtaggtgacaaagtgagaccctgactcatttaaaaaaatgttttaaatttaaaaaatttgtaagtaataaaacattttaaataagagaaaagagacttactagctaattatttgtggaaatgacacatatatactctaatgaaactggtgatacaaacccatcttttttccctatttctctaatactcacacttgtcttctcatttctgtttgttttaatg

SEQ ID NO: 899830 - DNA, 288 bp, Homo sapiens
gattcatcagcatctaacaagttactacttctggtggccaaatctggaagcrtctgttgcatgcaataacatggcacctgggaatatgcacttctgtgcccattatgactgatatgcgatacttggaagaatcattattctactcacagaaggaggaaacccagcaaatgttagagaacaagacttttaacgtaagcagtagtggaagatctgatttactcaccccagcccctttcccagatgtacttgaataaaagagtgagagtgaattctttttttttttttttt

SEQ ID NO: 899831 - DNA, 646 bp, Homo sapiens
ctttgttgattctggatattagccctttgtccaatgggtagattgaaaaaatattctcccattctgtaggttgcctgttcactcctatgatagtttcttttgctgtgcagaagttctttagtttaattagatcccatttgtcaattttggcttttgttgccattgcttttggtgttttagtcatgaagtgtttgcccatgcctatgtcctgaatggtattccctaggttttcttccagggtttttatggttgtaggtcttacgtttaagtctttaatccatctttagttaatttttgtataaggtgtaagaaacgggtccagtttcatttttctgcatatggctagccagttttcccaacaccatttattaaatagggaatcctttccccattgcttgtttctgtcaggttcatcaaaggtcagattgttgtagatgtgtggtgttacttctgaggcctctgttctgttctattgatctatatatctgttttgataccagtaccgtgctgttttggttgctgtacactcrtagtatagtttgaagtcaggtagagtgatgcctccagctttgttctttttgcttaggattgtcttggctatgcaagctctcttttgggtctgtatgaaatttaaagtcgttttttc

SEQ ID NO: 899832 - DNA, 663 bp, Homo sapiens
gccataaatttgtggctggtttcattattagagattaatgtaagatttaaaaagaaaatgayattgccaaaagaaaaattactattaaattaaaaatcaggacaaaagacggcaggtttgctaacattacaactacacaaatgatactttgtgactgttaagtgatttcactaaggtcactctgggcatcatatctgaaaaatgggttccaaaaatgttgaaatctcagaagttttgctagccttttcttcctgcaggataatctctgtctacatgagagtttatatgcaggaaaggtttgtgcttaagaagtatctaaaatccattgtaagaagtgtttccaatgttcctagcagtgtcaatattccaactactataattaaatgcagcatagttagtaacaagtagtttctcctttttatcaaatgtacactttatatgggttattttctgtatgtgatgcactgtatgaataggaagagattaacaataaaagaatcatgttttcaataccatctaaatttattcctgaacttttcagaaactgtaatatacattttgaggaaataaactatatcataagggaagaaaagagaacagaaactataagttaaacctttatatttgtttttataatagtgtgcaaataatagttcccatgtt

SEQ ID NO: 899833 - DNA, 637 bp, Homo sapiens
gggcacctagaagtattgtgggattagakaaaacaaaatctgagactgggatctcagaccagatcaagctgtactgtaacaggggatagaaggaaaggctgcacttgagtcagtctcccaaacatcttggactaagtgtgacatggggtttgtctaaatcttctggcatctggaccacacagggtatctgtgaactcactgagaagttgaaaagcactttctacccctgaggaagcaactgcagaggcattgccatggtgtattttagatttgtttgacctcgagggagttgtcctagcccacactgtgtttctccttcagggcatttggttttcctttctgtatttgcctttgctcccacatagatatttttttacaaattttgtggtcgggcatggtaactcacgcctgtggtctcaatactttaggagttcaacacaggtggatcacttaaggccaaaagttcaaaccatgcatggctgacaaaggcaaacacccatgtctactaaaaatacaaaaattacgcgagcatggtgatgtatgcctgtaatcccatctactcaggtgcttgaggcaagagaatcgcttgaacccgggaggtagaggttgcaatgagctgaaatcacgccacagcact

SEQ ID NO: 899834 - DNA, 678 bp, Homo sapiens
tctctgttacatcaacataaaaggcagtcatttcttgcttgtttctgtgcttgcttgtacatttatgacataaatagcatctgcaaatctaaaacccctctcctaaggaaagcaccacacttcataagaaaagtgagtttccttcaatgataaacaaacaattgtgtgactagcgaaagagtcaaggcatgcgaggctgactggtaaattcttattagatgctcttaaaattgatctcattgtggaagatattaatagagattatactagaaactgtaaactggaatatttgcatctagtcatggctgggtttcctttgcctgttttctataaatatctactgttcagtgagatctgtgagttaaacgtatatcttttcataaactgaggtgtatttatactatgcactttttaactgacagtgacctatctggaagtcagaggtttgcagtccatttctgaattgctaaagctatattcccagaaagaagctaaatatagcagtatggatgataacttatcagaatggctgaacatatatatacatacatagtacatgtacatatacatatgtagtattcctatagtactatatatacatatatagtattaatatgcatatatagtacatatacatatatartattcaaatcatttctcaattatatttaaatgaat

SEQ ID NO: 899835 - DNA, 706 bp, Homo sapiens
acttcatcactctttatctagtgaaatgactattttatttgatatcccctattctgtattaaaccaatatgtgtcaattaattaatttaatttgtgatgatgtttttgtgccatgctgtatttggtgctgaagataaagtaagaaatgacatagacacagctctattcctcataaaagtcacaatctagtctgggagatactcaagcaatgtacatatattgagaaataggaaattttgttcattaagtgagtgttacatccctaccctcaggtttttgccctctcttgtaggtgagaactgttatcctctctccatctctctcttttaatatttttaaagatagggtcttgctatattgcccaggctgactcaaactcctgggttcaagggacacccccaccttatcctcctgagtagctgaactataggtgcacactaccatgccttgctcttgttaaataaaatattcataatttcaaatctcatgaaggatttctcaaaaaactaaaaatagaattaacattcaacccagcaatgtcattactgggtacattcctgagggaaaataaatcattctaccataaagacacctgcactcatgtttatctcagcactattcaccatagcaaaaacttggaatcaatccaggtgcccatcaatggtggaytggataaagacagtgtggtacatatataccacggaat

SEQ ID NO: 899836 - DNA, 603 bp, Homo sapiens
catgactctgagaacagtatatgtgagatggaattccgagaatgacctcctatggctcttgctcttgtgtaatcctctttcctttagttctgggtggaacctgtgactatgatgagcagcaaaagaaagattattgggtggtactaatttactcatatgagtcctttaaaaagcagtagaagtcagcgatattggaagctagagagggattcaatgcagggatgctctcctttgctgacatggaatagacaatttgaaaagacctaaggtggccagggccatttccagaaaggaaacagggacctcagccctacaagcaaaaggaactgaattctgccaacaagctgaatgagctgggaatcaggtttttcctggctcctccaggaaagagccaagtctggccaataattgatttcagatttatgagaacctaagtagagaacccagtggagcccacatagacttgacctacagaagagtgagctatcaaatgtgtcttgtttaatgctgttaagtttatggtaacttgttatgcagcagtagaaaactaatgcacagcatatagayggaaatgttttaagctagcctgctaatctttgctct

SEQ ID NO: 899837 - DNA, 611 bp, Homo sapiens
aaaaaatactttagatgattttaatattcttaaatttgttaagacttgttctgtggcccaaaacatgatctatctggaagaatgttccctgtgtgcttgaaaagaatgtgtattccactgctattagatggcatgttgtatatatgaacagatgttaggttcatttggtctgtagcattatacaagtcttctgtttccttactgatttttctgtctggatgattccattgttgaaagtggggtactgaagttctttattattgtattgctctctgtttctctcttctgttttgttaatatttgctttctatatttaggtgctccaatgttgggtgcatgtatatttacaattgttatatcctctattaattgatccttttatcatcatatattaaccctctttgtttctcatgacagactgaaagtctatttttttcttttttctttctttctttttctttttttcatggagggacgagggaggaggagcagaaggagagagagggagctgaaagattgttttgtctgatgtaagtattgctaccctttctctcccctggttacstttgcatgaagtatctttttccatcccttcactttcagtctgtgtg

SEQ ID NO: 899838 - DNA, 538 bp, Homo sapiens
tctagaattcaagttagctttgtcaaagatcagatagttgtaggtttatagccttatctctgggttctgtattctgtttcattggtctatgtgtctgtttttgtaccagtaccatgctgtttgggttattgtagccttgtagtatagtttgaaatcaggtagtgtgatgcctccagctttgctcttttgcttaggattatcttggctatttgggcttttttttggtttcatataaattttaaagtagttttttctagttctgtgaagaatctcaatggtagtttaataggaatagcactgaatatttaaattgctttggacagtgtggccattttaatgatattgattcttcctatccatgagcatgaatttctttatctatttgtttgtgtcatctctgatttctttgagcagtgttttgtagttatcaatgtagagatctttcacctccctagttagttgtattcctacrtattttattctttttgtggcaattgtgaatgggattgtgttccagatttggctcttggcttgactg

SEQ ID NO: 899839 - DNA, 616 bp, Homo sapiens
ttaagtaatggatatcccaagtacactgatttgatctttactaattatataaacatattgaattatcacatgtacccccaaactacatacayatagtatacatcaatgtaataattgttttaaaataataaatttgcataaaattaaatcatataaattatatatttactcattcaaacattattgaaattggactcccttggaaaatctgtgatactatatgctcatcatgtgtataagagatggaattttaggagtgtgaagagaagagaaggatgggggttggatagcttaatgctgtctttgtgttttatggcctgcttcattactaagatcctattaagaatagaaaaataagtggctgatattcggacagcagcagaagcatctcccatttttttatccatccttgcttctagacaaaggctatattatatagatactacaaatgttggttctgagcctgggcaagagtcaagcacttattgagcatctactgtgtatcaagttctttcttacacatgagaggcagcatagtagagtgaaaaggaccttagatggggcatcccagtgaattctcatctcagctctgtgtgaccttgaacaagtcctgttc

SEQ ID NO: 899840 - DNA, 683 bp, Homo sapiens
gtttttcacttgttcatgtcctctctgatttccttgagcagtggtttgcagttctccttgaagaggtacttcacttcccttgtttkctgtattcctgcatgttttattctctttgtagcaattgtgaatgagagttcattcatgattcgactttctttttgcctattgttcgtgtataagaatgctagcgatttttgcacattgattttgtaccctgagactttgctgaagttgcttatcatcttaagctttggggctgagatgatggggttttctatatataggattatgtcatctgcaaaaaagataatttgacttcctctgttcgtatttgaaataccctttatttctttctcttgcctgattgccctggccagaacttgcaatagtatgttgaataggagtggtaagagaagtcatctttgtcttgtgctggttttcaagtggagtgcttgcagctctcacccattcagtatgatattggctgtgagtttatcatatatggctcttattattttgaggtatgttccttcaacatccagtttattgagagtttttaacatgaagggatgttgagttttattgaaggccttttctgcatctattaagataatcatgtttttttttttcctttggttctgtttatgtgatgaattacatttattgttttgcatatgttgaac

SEQ ID NO: 899841 - DNA, 552 bp, Homo sapiens
ctcttcttggtctgttgaactctatatcattttgtaatgcccttctttgtcttttttgatctttgttggtttaaagtccattttgtcagaaactaggattgcaacccctgctttttttgttgtccatttgcttggtaaactttcttccatccgtttattttgagcctatgtgtgtttttgcatgtgagatgtttctcttgaagacaacatactgatggattttgactccttatctgagtgccattctgtgtcttttaattggggcatttctttttttttttttctttttttttgagatggaggcttgccctgtcaccagaagacaatataccaatgggttttgactctttatctggttgccattctgtgtcttttaactggggcatttctttctttctttttttttttttttcctgaratggagtcttgctctgttgcccaggctggagtgcagtggtatgatcttggctcactgcaacgtctccctcccaggttcaagtgattctgctgcctcagcctcccgactagctgagattacaggcgtgtgccacc

SEQ ID NO: 899842 - DNA, 569 bp, Homo sapiens
attctgaggtactgggccttaggacgtcaacatatgaattttaaggaacataattgaacccataacagtggtctcaacacrgactttttaaaacaacttagttctctctgcatcaacagaaggcccaatcttcatattacacaaagaattggttattaggggtgggaggtggagagtagattaataaaaaaggtaaacattataggaggccaaagtgagagccttgcttaagcccaggagttcaatacgagcttgggcaacatagtgagactccatctctacaaaaaatagtagtactcccatctacttggagggttagggtgggagaatcacttgagcctgagaggtgaggctgcagtgagctgtgatcgtgccactgaaattcagcctgggcaacagaactacaccttgtctttaaaagaaaaataaacacaactcattcttttgagacgagaagctacaattcatttatcaaacaggttatctgctcactagggcatctggcatatagtagattcccagtaaatatttgttcaattaggatgagttgaagtaaatcagaattagat

SEQ ID NO: 899843 - DNA, 614 bp, Homo sapiens
tcccaccttggcctcccaaagttctgggattacaggcatgagccaccacacctggcccagaggtatttttgaagttcagtggggaaagggtgaacttttctataagtggttctccataagatttagaaaaaaaagagagagagagaacatcattcacaaaatcagatcaaggttaattaaaggcccacctatgaaaagcaaaactatgtaacacttaaaagacaacatagaaaaatattttatgaccttatgttaggaaaagattactgaaacatgactccaaaaagcacaaaccttaaaggaacagctggactacattaaaattaaaaatctacgcttaagcccaggagttaaacccatactccccaagacaccacacatagagtgaaaaggcaagtcaagccacaaaatagaagatatttgcaatatatatagccaacaaagcattagtaccagaatatatcgtgaaatcctaacacttcctggccactgcactccagcctctctgacttccttactgttattccracaagcctggcaattcctgcctcagagtctttgcactggctgttccctttgcttggactgtccttcccccagaatgtctgcctggt

SEQ ID NO: 899844 - DNA, 639 bp, Homo sapiens
tgagtagtcaggagtggagttatgaccactagttcagaaggtgaggggygatctaccaatgtttctgaagttatgtttcactgagttctgctagacattatgaatttgtgtagcacgagatacagagcatttttatgggcatgggatgcagggtgcacatagaaagagagtgtttaccaggaaatagtatatcatcaccagtttttgtacatcccatctacttcttgtgagaatttgagcaaaatgacttcatgtctctgagcctctgtttttgtacctgcaaaatgaagataaagtccccatatcatagggtttctgtgaagactaaagttggtggtattttgaaaacactttgcaaagtgcctgaaatacttacttcttggtcctgaaaattttcagagcacttcccctgtatggattagaacaaactgagattgttattactatcagcttttgttacagcgagtccagactatcaagggactcggagctcaggccacagtctctctccttcattctccatccagtgcagggccaagcaatcctgattctcacatgcgccgctccagcttcatcctgaggggcttcaactgtgtgaaggggcccgggacccacagctgaggccgctcgctgcttgtg

SEQ ID NO: 899845 - DNA, 646 bp, Homo sapiens
ttcctgtgtggccttctgttgctgactcaaggagatgctgagatatttctggatgttgtctctacttctttcaaatcttgttccttgtatccctggtttcacctctttatcrtcgtcattctagctcacctccttctgccttcatccaatctgtcaattttatctagactccaataggcagaaagaatttgttctatcaggactgatacttctctttgtcattttgcctttcatgtaaacgtctgcttttggaactcagaagtcaaaactttgactcctcatttctttgggttcattgcctggtaatgggttccagttggtgaatttcttagaaaggaacaggtctctaggtgccagggaatggagagtataggaagggaggtgagggataaaaatacatatgaaaccactatatcatgattgaatgaatgaaaattttctacaattataaaaataagaatgtatattacactgttaaagggtttatttacataaagtctttgaaaatgtattagatattgtggctaaataaattatccagacttcagtttcgaatctccatccaagttcattgcaaagtttggtaatctataaaagaaaaaaaataaaagattcagccgtctggtgactgtgcctgggtttcctg

SEQ ID NO: 899846 - DNA, 617 bp, Homo sapiens
cttggtacataggaggtgtttgctaaactaataactaaaaattggaggtggagagagtgaaaattatgagaaaaagtcatgtaatcattaggcaattaaataatttatccatagtgatgaacmcttatgggaaaagttttgatttagaatcatctcgcattcattgttttcttctttaaaggtgaagttttttgtacttgttggctttcctttgttacccaatatgacttcttgtatgtatagtgtttcattttgtattgcactgaactgcatacaacagaaaccttattacaatggcttctgaagaaagccttttattattcttatggacaagtttcaaggcaggtagttagggctcatgatgggttccatggtgccgtcaaaagtccaggctgcttttacctgttagctctaccactgttagcctgtggctcttgttcttgtgaactcaggatggttcctgcttctacatacagtacatctgtgtttcgtccagaaagagggatgagcaaaggaggaaggtcatggcagttgggataaactggggactcagtaactttgtcagaatttccacatactggaattctaattacatgtcattgtccagaactgtgcca

SEQ ID NO: 899847 - DNA, 653 bp, Homo sapiens
gctttctagaatatttacttaataatatcatactttccttgccattcttagtttagaaactaaaagtttattagtaatattttgtggaattcttgcatttgaggagaataaggtatttgcagcaatcacttagttgccaacagcaattttaggtactgtggtcatactgttttgtgaaggacaactttatatttgcatttgatcacacatgcagcatgcttgtttaccttccttttgaatcttttccttggacaaatggctctccatgggatgataggctcataatattttgtccatgattttaagaatgatttctcctaaatatagagaaaggtgtgaaataaactttcatatattaggaagatagggtagcatttatgtactactatatccaagtaaaattctaatttttattgctgaaagagtgttctgtaccttagcgttgaatttttttttcttgtaagagcaggccatatttgttacttaaccagctagtagcttccagaaaccatcatttaaaatttttcccttgtgawtacaggagagagggcaaagggctagacccacttcatttaatctttgcttggtcccagttccaaggaccccaagctcttcttgcttgttactctttgcccacctccatcctgttttcc

SEQ ID NO: 899848 - DNA, 436 bp, Homo sapiens
ggcaaagaaacaaaggaaatattagaacacctatttaatatgataatatatttaaagttccaagtctaataatgtattagacattaaaatacaggaggctcagtggttcacaagaagagacaacacaaagggtcttttacgtgagtgacacattatagtcagattgtctaaaatgaaagagaaagaatgcattcttaaaacagcaagagaaaagcctctagtacctataaaggaaatcccatcaaactaacggtgaatttcttagcaaaaaccttgtaagccggaagagaacggtataatatattcaaagtastgaaagaaataaactggcagacaagaatattgtattcagtaaaattatccttcataaatgaaagaggaaaaaaagagtcttttccagacaaacaaatgccgatggaattcattctcactagac

SEQ ID NO: 899849 - DNA, 681 bp, Homo sapiens
ccacagtcctagctataggggtgctgtgagagtgcaaaacctgcacatatctaaggtgcctaagccccactttgccatgtggaatgttctcaataaatagctagtgtcatcaaattgagaatggcatacattctgctgtcttcattttccttctgaataaaatgctgagaatagtcataaagtagtatatggttaaaatgacaggtggcaaattctactgagagtcagcctcttgctggatgtttgcctgaaagtgtatctttgatatcaccaagaggttcccactgggggaacacctatctcttcatgcactgctagtccttctcaagcattccacagaaccagtctatgcaccaccagagggagcctagcagggatcactgtgcaagggatggagggggtgacacagcctagagtaagcctcccagatctgctttattccatcctcattctgaactgaactgtcagaggcccttccagaagagcggatgtcatctctattctggtctctgtagctgctagcactgggagtaggaggatcttgtgggtaccaggaacctcatgtcctctagtycataaaggtcactttaatgcagcattctctgccagcctgtgtgatgcctggtctctcttgagccattggagtagcagtggaataaaaacctcctttgtctacactag

SEQ ID NO: 899850 - DNA, 675 bp, Homo sapiens
atgttttctagtttatgcatgtgaaggtaatcatagtggtctttaatgatgttttgtatttccatggtattggttgtaatatttctcaactcttttttttattattatagtttaarttctagggtacatgtgtacaacatgcagatttgttacataggtatacatgtgccatgttggtttgctgcacccatcaacaagtcattcacattaggtatttctcttaatgttatctctccccgagcaccctaccccctgacaggccatggtgtgtagtgtttctgccctgtgtccatgtgctcttattctttaactcccacctatgagtgagaacatgtggtgtttggttttctgtccttgtgatagtctgcttagaatgatggtttccagcttcatccatgcccctgcaaaggacatgaactcatcctttttatggctgcatagtattccacggtgtatatgtgccacattttccttatccactctatcattgatggacatttggattggttccaagtatttgctgttttgaatagtgctgcaataagcatacttgtgtgtgtctttacagtagaatgatttataatcctttgggtatatacccagtaatggaatcactgggtaaaatggtatttctagttctagatccttgagaaattgccacactgtctttcacaa

SEQ ID NO: 899851 - DNA, 662 bp, Homo sapiens
tgctcccacagttacctgaatattcatacaaggcttgaatctaaactctaaaagaaaagatccgattaatctcatgacttgtcagtgggcaagacttttccattaggataatactacttggtctacagrccccttggaactaccacatagaaaacaggttatcttatgaactgctgactaagaatcaggtgttcatttcaaatccaatttcttatggtcagggaggttgagtgatagagatttgtgtaaaagaaaccactttggaaatggaatgtaacaagcttggattaatgagtacctgctctaaccaaggataatttcataatgtggcacttagtgtttttcttatacaaaaggttttgcatttattctttcattttattttaatatttacaaaattctcatatttgtataaagaaggtattctaatctccatttttaagtagggaaatttaagtccagcaaaactaagtcattaatccaaagtatagttagaaagcctagtccatattctgtgactcagaattgttacatttttgctttttttttgctacattgcatggttatcattgtcctccattgccttctttttgtattgtgcttaaaaaacaaacctcttttgcttttatcatctcaaagagaacaacggccagagaagacaa

SEQ ID NO: 899852 - DNA, 603 bp, Homo sapiens
agcctccatcttcaggctatgctaaaactgtccaggccaaggtcaccagtgacttctatgctgtatcaatctactggacattttcagtcattatctttttagacatctcaacataactgacctctttcattaaagtctcttcattacggtctgctcttcatgctccctgttttttttaccagcctttctggcagcttcttctcaaccctctttgctggcttctctgtctgttaatttatatgtttttaagtttcccaaatgttctgtttaaaaaagaaattagtagagatataaagttgtttttttatgtaaccttccttcatgcagaagaaggttcctttttttgtttaacagagaaaattcacaagtattttatactttttaaaaaaacaaaaatgtacatttaaatattacttccaagacaacacattattatgcaaaactaatgagatttgcagagattctagaggttaaagattattttcataggacttaacaatatgtgaagtcctagtgtgtcttacaagaagttatgatgtaaaatakaatctgcttttctgtagctacaagaaaaggtgggaaattttctacttgtgtcactaa

SEQ ID NO: 899853 - DNA, 578 bp, Homo sapiens
ctaagggaaagtcaagagcctaagagggcagaatgtgctccttattgggtactcaaagagttcctrtaagtgccccatgtgaggaagagccaaaagattgccttgtcatgaaagaaaccactggcaatcaaataaaccagcatcaggcaaataatacttgccctttcttggtaaatttagcacacatacttgctatacgcatatacatgctctctctcacatgctctttctcattctctctctctctttctgtctctctctctcacacacatgctcaatgttttactctaaaggagccagaacacagatgaattggggagaagaggcggagaaggcagagcagagaatgagtccatgacccttccccgctggtggacttaggaatcagtggcaggcctaggaggaaggttggccagacagaaacgttgacttgaatgagagattagagttttgatcaaggttgaactgaaattcttaacacctgatgatgagactgtactaatacctgaaggcatataagattgcctaagaaatcttttgccatagggagggagaacccagagaatgtaggtgaaggt

SEQ ID NO: 899854 - DNA, 569 bp, Homo sapiens
gatagttacaagttttccaaaattrtaaatttcacttgaaatttccaattttataactagcaacaaagactgtcagctgttttcattgatgtggcaggattgctgtattcattttcaagacaatatctgcctgatacccaggtatgaataactatagttggtctgtcagttgttctttgaagtaaacatgatacaaaaaagtaggggaaaggagttgtttaccttgaaactcacacaatcttgcaaaggcttttcctgtagacaatggtcacatttcagtactcagcaaaagtgctttatgcataaaccccttttcatcacacagaatactatagacttaaaaaggattgacatttaataaaataatagaattagttatcattactgcttcatcaaggatgttcttaaatgaattggatactctctttttttactcataagtgtgtaaaatagagataaatacaatgatgactagtatagtttgatgctatcgtcatgatttgtgccaaggcactagcagttttactcaccactgtttgtggcatcagtacaaacgttaacagagtaaa

SEQ ID NO: 899855 - DNA, 482 bp, Homo sapiens
gctagcagaagaaaagagataaccaaaatcagtgctcaactgaattaagtagagatgagagaaaccatacaaaagactaataaattcaaaaktttgttgcttaaaataataaataagattgataaagtgctagctagactaataaggaaaaaaaatgagataagatccaaataaacacaatcagaaatgacaacgatgccattacaattgattccgcagaaatactaagaaccctcatatactattatgaacacttctatacacacaaactagaaaacctagaaggaatggataaatacattcaatctcccaagattaaacctggaagaaattgaaaccctgaacagatcaataatgagttttgaaattgaatcagtaataaaatacctacaaaacaaaaagcccaagatcagatggattaacagctgatttcttccagacttataaagaaaagccactgccaatcccactgatattattcc

SEQ ID NO: 899856 - DNA, 674 bp, Homo sapiens
caagttaaaatactactgaagtataagccccaaaagggtaatctatatctcattcatgtttatccccctgtaagaatctgtggtgcatcacaagtgttcaaarcatttgagttgcagagagagattacaaacacagcagtcttcaaacatatgctgtaagaattcagagaagggaagcttggtcctatctgtgtttctagatagttttcatgtactagttggcatcccttctggaaggtatagcatagttcaaagatggagatggaaatgtctagtgctttttatgggacaccatccatttttattttattttattttattttattttattttattttattttattaagtgtaaaattcttatgagatagccttgaaatgtaaatttgggaaaatagggacactttgaaggggaatctgagcatgctgatcagtgagaattgatctggtagcgaagtgcttattatacaggatagacagcagggagtgggatgagagagggaagtggtaaaaaactgatagtgtaattagtataaatgatattgcagaggcaatatgagtctgaactcaaaaaagaaaatctgaagtgaaataaaaagggtggatcctgaagacactttgtaatattggtgcccctgacccttgggcctcttgtttccatgctgtatgttgtct

SEQ ID NO: 899857 - DNA, 644 bp, Homo sapiens
aattggacctcagtggtgttgattcacataatatggtcactttttaaaaaacaacttagtgtcctcatttgagtgcatggatatttccaaatcactggggccttccctctccattctttcyattactttgtttttgtccaggggctagatccacgtgaagaaaatattacattcttctctatcagcctcatctgagccctgtcagctgccattttttgaggaggacatctgaattctcctttcccagcaaaggtaatacttctaaaaatgtgcttgaggctacaaacttggtatataattttggcattaaactcatacctcctccctccacaaaacacatgaataaatgatgcttctactttaaagtggaataacttttataccatgctgactaaggaaaaaatcccacgaaatgtgaataatgttggtcttggccaaataaaaacagtaacaatctaggataaaagcagacaggcaaattctaatagggcatatgtccattcatttagaaaaacatagcttctctttcacagagctactgaaggagaacccatattgaaagatgtgattattgttttagctgagattcataaagagactgaacagctgcacactttattagatctaatctaaatacctgctac

SEQ ID NO: 899858 - DNA, 573 bp, Homo sapiens
aaacccttgaagataacctaagaaataccattctggacacaggaatgggcaaagatttcatgacaaaaatgccaaaagcaatttcaacaaaagcaaaaattgacaaatgggacctaactaaacaaaagatmttttatgcagcaaaagaaactatcaacagagtaaacagacaacctacagaatgggagaaaatatttgcaaactatgcatctgtcaaaggtttaatacccagaatccataaggaacttacatttacaagagaaaaaaaaaccttatcaaaatgtgggcaaaggacattaatagacacttgtcaaaagacatacttgcagccaaaaagcatatgaaaaaaagctcaatatcattgagccccagataggaggggcacctctctctttcttacacctaggatttgcaatgcaaattaaagaaatgcaaattaaaaccacagtgagttactctctcacacaagccagaatggctattattaaaatgtcaaaaaataagagatgcaggcgagattgtggagaaaaagaaatgcttatacactgttgatgggagtgtaaattagttcag

SEQ ID NO: 899859 - DNA, 659 bp, Homo sapiens
gactgtgactatctacgttactcttagctgctttgtgttaatgttactatattgcaagcttttggatattttttcctcacttttttctctcatgatcttgtcagcacataacagcttccttggacataagtaagcactctccaggaaagtgataaagattacataaataaaatttaaaaagttggctgggtgcagtggctcatgcctgtaatctcagcactttgggaggccaaggcaggcggatcacctgaggtcaggagttcaagaccagcctgggtaacatggtgaaaccccgtctctactaaaaatacaaaaattagccaggagtggtggtgcacgcctgtaatctcagttactcaggaggctgaggcaggagaatcgcttgaacccgggaggtggagaatgcagtgagttgagatcgcgccattgcactctagcctggacaacaagagtgaatctccatctcaccaaaaaaaaaaaaaaaaaaawttttaaagtcaccctatgtttctctttcattcttcactcctattacaatacctaaaactaaccaagtagtgagacattgagcaacaggacaaacactagggacaattatacaaataaaaggacataagccatcaaataactaagacttcattgtatttatgtgtataacg

SEQ ID NO: 899860 - DNA, 522 bp, Homo sapiens
ttctctcatgatcttgtcagcacataacagcttccttggacataagtaagcactctccaggaaagtgataaagattacataaataaaatttaaaaagttggctgggtgcagtggctcatgcctgtaatctcagcactttgggaggccaaggcaggcggatcacctgaggtcaggagttcaagaccagcctgggtaacatggtgaaaccccgtctctactaaaaatacaaaaattagccaggagtggtggtgcacgcctgtaatctcagttactcaggaggctgaggcaggagaatcgcttgaacccgggaggtggagaatgcagtgagttgagatcgcgccattgcactctagcctggacaacaagagtgaatctccatctcaccaaaaaaaaaaaaaaaaaaaattttaaagtcaccctatgtttctctktcattcttcactcctattacaatacctaaaactaaccaagtagtgagacattgagcaacaggacaaacactagggacaattatacaaataa

SEQ ID NO: 899861 - DNA, 600 bp, Homo sapiens
ttatctatagttaccatgttaaattcatgtttatattgtttttatatctcagggatatatttcagttatctatcacacttctgattcacttatgttgctcamatgtaaagtgtgactccataattataaatttcaggttgagtatcccttatccaaaatgcttggaaactgaagtgtttcagattttggattttttttcagattttggaatattggcatatacatatacataatgagatatctttggaattcacccaagtctaaacacagattttatttatgcttcatatataccctgttcacatagcctgaaggtaattttatacaatacttttaacaattttgtgtgtgaaactgaaacaaagtctgtgtacattgaaccatcaggaagcaaaggtgtcactatttcagccaaccatgtggttgtttggcatcactgtcactccggactctgaatttatattatatgctactgataaataattgttttcctacacttattcacacataaatacttaacagtaaaaaatgtgatgtaccattaatacagtgaaaaaaatgatgtgttcaggttaactaaacagaacagtataatcacca

SEQ ID NO: 899862 - DNA, 570 bp, Homo sapiens
ctagatcacagcttatttcacatggcagccttgatctcccaggctcaaagggtcgtatggcctcaatttcatgagtagatagagctacaggtgccaaccaccatgcccagccaatttatttatttacttatttatttatatttttattttttgtagagatgaggtttcatcatgttgtccagcctggtctccaactcccgggcttaagtgatcagcccacctcggcctcccaatgctgggattacagatgtgagccactgtacctggctaaaactgtgacctttttgagaatgaaatattttaattgtcttcttaataactatacccagacaacagatataaactgagattgacccaggaaaactagacatatggtcatcctatctaaaatttatcattgtcctcaccaagaagcctgccctctgagttctacattgttcctaattacaacacagtactcctagtatctgtgatatttaattttctaggtacaatrttttgtcttttgctaggtaaacaattttttcttttttccttttttctttctttctttttttttttgagatggaa

SEQ ID NO: 899863 - DNA, 635 bp, Homo sapiens
cagtgtccacttggggcctggtatttagctgaggcctgacacccacctgaggcctgggtgtttaggtgtggtctgttatctttctgttgcctgggtttttatcaggagcctgatgttcaccaggccacctaggtgtccacctggaccaaatgtctctctgggccctgatgttcacttgttgtctggtatttaccaaggcttgggcatccacctgttgactgatgttcagctggggcatagatattcacatggggcccgagggtacacctggtgcctgacgtctgcccgggtcctagtaatccacatgggcctggtgtttaccagaagcctaatgttcaccctgggcctcatgtttacctggagccttggtgtcaacctggggccagatatcgactgggggcctagtatccacctggagatgggatgtccagctgggttctgatgtccacctaggattgtcctcatgtgtggtggatgaaatttagggcctggtggtgaaatttaaaasagagccttaaaagctatcgagccaagtgaagcaagcagaggaaggtcattccattccggcaatgagaagaatgtgagcccagtgatggagccatgaacagctcagtatgtgttgggatctgcaagag

SEQ ID NO: 899864 - DNA, 635 bp, Homo sapiens
cagtgtccacttggggcctggtatttagctgaggcctgacacccacctgaggcctgggtgtttaggtgtggtctgttatctttctgttgcctgggtttttatcaggagcctgatgttcaccaggccacctaggtgtccacctggaccaaatgtctctctgggccctgatgttcacttgttgtctggtatttaccaaggcttgggcatccacctgttgactgatgttcagctggggcatagatattcacatggggcccgagggtacacctggtgcctgacgtctgcccgggtcctagtaatccacatgggcctggtgtttaccagaagcctaatgttcaccctgggcctcatgtttacctggagccttggtgtcaacctggggccagatatcgactgggggcctagtatccacctggagatgggatgtccagctgggttctgatgtccacctaggattgtcctcatgtgtggtggatgaaatttagggcctggtggtgaaatttaaaacagagccttaaaagctrtcgagccaagtgaagcaagcagaggaaggtcattccattccggcaatgagaagaatgtgagcccagtgatggagccatgaacagctcagtatgtgttgggatctgcaagag

SEQ ID NO: 899865 - DNA, 635 bp, Homo sapiens
cagtgtccacttggggcctggtatttagctgaggcctgacacccacctgaggcctgggtgtttaggtgtggtctgttatctttctgttgcctgggtttttatcaggagcctgatgttcaccaggccacctaggtgtccacctggaccaaatgtctctctgggccctgatgttcacttgttgtctggtatttaccaaggcttgggcatccacctgttgactgatgttcagctggggcatagatattcacatggggcccgagggtacacctggtgcctgacgtctgcccgggtcctagtaatccacatgggcctggtgtttaccagaagcctaatgttcaccctgggcctcatgtttacctggagccttggtgtcaacctggggccagatatcgactgggggcctagtatccacctggagatgggatgtccagctgggttctgatgtccacctaggattgtcctcatgtgtggtggatgaaatttagggcctggtggtgaaatttaaaacagagccttaaaagctatcgagccaagtgaagcaagcagaggaaggtcattccattccgkcaatgagaagaatgtgagcccagtgatggagccatgaacagctcagtatgtgttgggatctgcaagag

SEQ ID NO: 899866 - DNA, 495 bp, Homo sapiens
ggggtcttgccacactgcccaggctggtctcaaattccagagcacaatgtgatcctcccaccttggcctcccaaagtgctgggattacagccaggagtcactgcacccagccaggatgtttattttttaaccttctatttgtctgatgtctgggctctatggggagtggcaagggaaagtggtatacacttaatgacacagaggagactttgacctaaatggtgagaccctgaagtgtgaatgctttggaggagaatatagatcagaagtttatgatcaaagtaattatttacaaatagatattttccattactttatttttaatttaaagttctatataacattggaagtaatattctttatgtacaactacaatagattttatcctttttctaayacttctgttctagttacagaaccatgaatgacctctttgataactggaatgaaaatgttgtagctgcttataagattttttaaagataattctttacg

SEQ ID NO: 899867 - DNA, 464 bp, Homo sapiens
agttgttttcctaatgcccccttcccacacccaaccccttcagataaaggagtgtgccttctacctcatgcatccatccagacaggagaattgggctttttgccagagctgtagacctggaggtctggaacttggcctggctttgtgggctttcatggaaagtggagaagagggattagggaagaggcaatggataaaaagtactggttgctcaggttggggtggtcagggaggtgaggggagggagaagggagtaccagaaggccagtgggtaggcttgcaggagctgtgggtggatggcgtggccccaggggacaggagctaggtccagccggctcccactgtcttctggcttrtaggattatctctgctcctccccctttctctgagtgagaaaggtgggaaataaaataatgaagccgtgagtaggtgaggtgttagggagacagcttgccagggtgggc

SEQ ID NO: 899868 - DNA, 516 bp, Homo sapiens
gagttacttgacacaaaataggtggttactcacatttaccacagaatttgaaataggagtctgtgaaactttaagatctcccctacatcagctgatcccttatcctccactcaggcacacaatttattacataaaatgtgccatatatatttaaacattaaagaattatttgatatttaagacacatggagatgtgattaaaacaaggcttattttaaccttgaatctactgcttatatatccttaaattgacataggaattcattttttctttctctataaaagacagttttcattgttctctgtttataaaagaaatacatacttattataaaattttaattgttacacatgtgaaagtcccctatcatactaaactctagaaagatacttttgtgaatttttgactatttctaactyaaaataagttttttttcctttacaaaaattgggtcaagttgtgtgcagtgtttgaaatacgcatttttcttttttctttcccttagtcatcatttc

SEQ ID NO: 899869 - DNA, 645 bp, Homo sapiens
cgggcccatagcagtccatggcctgttgggaaccatgctgcrcagcaggaggtaagtggcaggcgagcattgcctgctgtcagatcagtggagacattaaattctcataggaatgcaatgctattgtgaattgtgcatgcgagggatctaggtcacgccctccttatgagaatctaaggaatgcctgataatctgaggtggaacagtttcatcccaaaactatcccccaaccactgtccatggaaaaattgtcttccatgaaaccagtccctggtgccaaaaaggttgaagacctctgctctatgcaacacctcaggaacttcttcccgtttctggaactcgttcttctacctggagcactcttccccaacctctctacctagctaactcctgcgtttcttcaggtaactttaaataaatgttccttttcccacgagcccttccctgactataccactgtgtgtgtgtgtgtgtgtgtgtgtgtgtgtgtgtgtgtgtgtgtgtgtgtgttttctgacccatggaaacatcttgccctttacctctaaatactttggggtggatttcctaaaaccaagagtgtttttatgtataaccacaatataattatcaaaatcaggaaatttgagattgttaaaatgctat

SEQ ID NO: 899870 - DNA, 665 bp, Homo sapiens
taacagagatgtcaatttcttttatttctctcattyttaatatgaataaatcaataaaaccagacttttgaggagagcatggggaatgaaagaaacaataaagacaatgattaaccacaaaaaatgactccagaggaaaaagtaataacaaaaagagcagaagagacctttaaaggttatatatatatttctgtaaagagaagtggaggataatacacgtttgggatatatatgaatgaaaggtctgggattttaccctgcttgttttgactagtctgccatatttttgtgaatgctgagcagagatatgagacctctgggagacagagtactgtttactactcacaacaatagttctggacagagtattagcactcttttaccagttcattaagcaccaatctccagaggttgaggcaaagagagctaagtgacacgtgcacatacagtgagtgacattaaaggaaaagctttaatcttcagaaatctttataacggaaggaaagcctgcctgatagttacatctgagtgagtcaacactttctttgttatactgaacagtgaacaaaattgtccttcttcctagagggaggagctttatcttccaaagtatttttctatacaaaattctttgaaaaggtagtgtggactaaaggaagtccatg

SEQ ID NO: 899871 - DNA, 610 bp, Homo sapiens
ctcaagagggaaattcaggacagaaagaggtgcaatgattgcccaaggtcacataaccaagtaatgacagcaccaaaacctgaacccagggctaggtgattggcccatgtrtgtgctgaagcttaagaaagccattacagaggccatctctggttgggtgaggggagaagatgtgtgtctcggagggaaaggtggaggctggggctgtgagccaggccctttgttggccacagggagagaagcttgtgccagctgctactgctgattcagtgacatggtgagaaatggaaggcagagagcagaggccaagcacacattcatcgtctgtgattaagagactcttgtttatctgttcctttgcttctcttattctgagacatttgaatacaaacagcatttctcttcaataattatttcctgctctccttcatgaaggctttgttctgggcagagtagtcatgaagcaggcaggcaaagcctgtcataagctcactgagggcctggataaccatagaggaccataaataaagatgtgtagcaggcctcctaggtgacaagcacatattctcttttgaaacttataacaatcttataaagttgtatgagtctt

SEQ ID NO: 899872 - DNA, 707 bp, Homo sapiens
tctgctttatattaaatatcctacaaatgtcctttttcaccacttttatgatatttattgatcttattttaartgcttgttctctccgatctattaatttattttggtttggttgttacagattgttccatatattatctttctcttattgcagttatgtttctcagatgtcttgttatttttactagacaactcttactgctctgggattattaagtactttggctgaaagtatgtactgggagaaagtttaaagtccagaacatggctgacatccctcctggtgagtgtggtggtggagacagggtactcctcagggcggtaagcctcttgggttgctatattggctcaatcactatgtttgcctcatttgctttcttacaagatgaccctgaatctcaggcactctcccttttcctttgccataaactctactcttcctcaacaaaaagctgtgctataattacttagtcctaggatgtgcaggagattatatctgggtaaggaatgatgggccaccctgataatatcccattgactccattataggtgctgctgtttctctggctttcaggtgatgtggagaactggccacctaggtctatatggaatagaaaaaacattaagaagcagttcctcagcctgttccttacatgaagtgttcagctgtcatctgctactgcctgtaattctcactgtttctaata

SEQ ID NO: 899873 - DNA, 504 bp, Homo sapiens
cactccactgagggtgctcttacccacatcgaccagtgacatccatattgtcaaagccaaaagtcaattctgtgtcatcttaggcacactctcagcagaatttgacacaactgatcactctgttcctcttgcatcactttttttttcttttaattccatggtgtcacactcttctgatccttatcctgctctactgggcattccctcttagattctttcgctggatcttcccttgctcagtctctaatctttgacatcttcagggttcccttcacttcttcatcaactccttccctaggaaatcttgtctgatagcttcaaaataatatacataggtgattctaaaattcataattttactcctaaaattcataatttcttaaggccagaagtccaggcttaaatatctgactgcsaaattgatgtgtctagtcatatgtctaattggaatcccaaattcataagatccccatctgagctcttaatgttgtctgccttcaattc

SEQ ID NO: 899874 - DNA, 663 bp, Homo sapiens
catttaatcatctagtgcccagctagtactcggggaaaaaaggatttaaaatcattccatatactttttttttgctaatacttagaaagtacacaggaacgttgtccgatgctgagaatttatagagggcattctcttttaaaatcagtccctgaaatcagctgggggtggtggcgggtgcctgtaatcccagctactcgggaggctgaggcaggagaattgtttgaacccagggggcggagattgcagtgcgccaacattgcgccattgcactctatctagcctgggagacaagagagaaactctgtctcaaaaaaaaaaataaataaaaaataaataaataaataaataaataaatccttgtttttctttaggatgttcttatcactcttattatactttttgagataattgttgattcgtacacatttgtacggaaataattcagagatatctcatgtatctttttctagtaactttcagtaagttaaatttgcttatggttttatagtttataaaatgccttaatacatctcrtttaattttcacattatctcatttaatcttgaatcctaacaataacccaaggagctaactatttttattaaccccattttacagaagagaaagtggaggctcaaatattttacttgatttgtatat

SEQ ID NO: 899875 - DNA, 614 bp, Homo sapiens
atatgctaattgagacaaatgttgattcaggaaaacattttatataaccatacagaagtttaatttgttggtaccactaagcagaggaaaaaaaagtttgttttggaatattaaggactactccacagatttttaaaacagaacgtgtgataaatgaacatatttgttattttataggagaaagaaaagaaaacaagcaagatagaactcctcttaccaaagatgtttcacttctagatctggatgattgtaagtattgtaatttaaaatatttcttctgtgtttagtaagagtattttttatttttatagtacctttcatttacatgtcccaaaatatatcaatatttattgtgaaagacttatagatgaataaggcaagaaagttttggaaatcagtggtatttgtttctttcatctattcagcatatcacttcattatcacatgaacaaatatagatggccaaatacaagtacacaaaattcattttaaaatcttttgctttagtaatttatacttgtttgctaaatagtcatccataccttataacttctacattgtgaaatgtggatyatggggattgacacatgtaacttaaggaggtagaggattaa

SEQ ID NO: 899876 - DNA, 774 bp, Homo sapiens
acttttcagagctgttgtgaagattaaatgatttgaaacatacaaaggagattagaacacaacagggtctgccacagggtaaggcactcatcattatcatcatttacaaacaggaaagtttattttactaaaataaagctactaaataaggacattttagatttgtggtaatatccaagttacacgcacatacatattaagtcagataactggcttatgctataaacaatgaaagaaattacaggtaatgtatcacagattaatttatcagatactaaaaacaaagatttttgataaggaagacagagaaaagaagagtgaattaccttacagtagggtagcagataaccatgtaagagtgacaggcctggttctccaaggaataaagattttagagaaagttgggtgtcgtttggtcttgggtcagatttgcctattagcttaagtgttaataagagcatcagaaagtgactacaatctatttttcattatgcaaatcactcacagaattttagcaatgaagggactttaagaaatatttaactgtaccccttcatttatctgatatagagaaaagtaggtgccttattcaatttgcataggtaaaagccagggcctctaaatccttcctattaagcattcttttcactgcatatagttaccctcaacctttagtttgatttttttatagtatatagagacttaataattttagctttatctctatagaggttcacagaaaragataagtataaaatgaaagagaaaaagact

SEQ ID NO: 899877 - DNA, 546 bp, Homo sapiens
ggcaaaggggacctgacatttgacggggaaggaaggtcttacagctgatggaaggccacccctccctgtccatacctccttttccccccarttccacccctccacccagagctgtcattagtatcttccactagaagctccatgacagcaggggcctcatcttgttcatggacatgtccctgtacacagaacagtgcctgatacatagcagacacgcacatttggttaatgaatagactctagaggttaatagtttagaaaaactggtcaatgaaaatggaacttctcagctggaaaagaatgctagaatcagcatggaggtcaagagggatagagagagaatgttacaccttgtagaaaaatggaattagctgattttggcaaggaagaatttgtgcataagcagaaaactctccattcacttcagccagtggtatcttacctacccaggggacatacagtgctttcagagactcatcctatttcctggaaggggaagaacacaatataaaacaagcaagtcatcaatatggcttatggtaatag

SEQ ID NO: 899878 - DNA, 292 bp, Homo sapiens
agaggttgcagtaagctgagatcacgccactgcactccagcctgggcgacagagtgagactctgtctcaaaaaaaaaaaaaaatacactatcttctcaagcagtgggttaagcttttcagatgtttatgctcccaatgttttagctccacgtggatatttaatattcatatttagacagaggaatgttaacaaaagagaacatatttgttacacacacacacacacacacacacacacacayatatatttgcctacctaaaaaaacccaaatatgtacacatacatgaattc

SEQ ID NO: 899879 - DNA, 581 bp, Homo sapiens
gtaaacatggctttcagctctgaggaatcctcttaaattactctgtatactttmcttgcctttattttctctgtttcctctttctagagctcctattatttaggtatcaaatcttctggattggtcttcccattttcttattttttctctcctactttccatatatttgtgtttttataattttaccttctgcaatatttactaaattctgccttcaatatgtatctcctattttatctaaactccctttatatttgctactgcaattttaacttccaaaagcttttttttttttttttttttggttctgtgattttttttttttttaaacatagcactctgatcttttttaatgaaggtaacaacttctcttatgtttctgaacttgatggtgcacatctcccggatgtgcctccatttcttccaagtatgtttggtgtcagtcatatcaagaggctttccttgcccttctggtattctctggctgttttgctgaaaccaaaagttgtccaccagaaagctgattagaaactctgtgcatgtgcatatagcttgttggctatagtcttcactgtagggca

SEQ ID NO: 899880 - DNA, 586 bp, Homo sapiens
taaatgccacacacatagtaaatgtgtatgtgcatatgtgtgtgtaactgtgtacataaaattatatattttcaacgcatctattttgcatgtacttcatggttcacaaaaatgttcaacatatttaacctgcagatttttataacataggatgggagttcacgttgaaatccattttcttattctagctcttcaaagcccacaatgatgaatataacaaaaccacttctctatactgtgcaatcagtcatattcaatactgtcaggatatacaagaataatgaatcttaattctgttattcactaacatttatttttcttctggttctgagaatacctaccgcaaatagtatctgctggtgctcatttcagtataactggaatggaacaagagagctgcatgaattgccaattataaacatctgagtttagatttgaaagtaaattcagcagmtaagatcatgacaggaaatctgccataccttttaggatatgacttactcatgctggaaagttatatacctacacagggttttattcacctatccagagaatacattggattggatttagtggtcagtagtat

SEQ ID NO: 899881 - DNA, 599 bp, Homo sapiens
actctgagaacagtatatgtgagatggaattccgagaatgacctcctatggctcttgctcttgtgtaatcctctttcctttagttctgggtggaacctgtgactatgatgagcagcaaaagaaagattattgggtggtactaatttactcatatgagtcctttaaaaagcagtagaagtcagcgatattggaagctagagagggattcaatgcagggatgctctcctttgctgacatggaatagacaatttgaaaagacctaaggtggccagggccatttccagaaaggaaacagggacctcagccctacaagcaaaaggaactgaattctgccaacaagctgaatgagctgggaatcaggtttttcctggctcctccaggaaagagccaagtctggccaataattgatttcagatttatgagaacctaagtagagaacccagtggagcccacatagacttgacctacagaagagtgagctatcaaatgtgtcttgtttaatgctgttaagtttatggtaacttgttatgcagcagtagaaaactaatgcacagcatatagayggaaatgttttaagctagcctgctaatctttgctct

SEQ ID NO: 899882 - DNA, 635 bp, Homo sapiens
gtacaataaaacaaacatatttataagacattttctataaaccttctactggccagcttggctttcaggagtacaaggatgaataaagcatagttcctgctatggagaatgagaataattaacacactaatatgcatcttctcttgatgtttctggaaactattttaaattaaatgtttccatattgatggccaggtgagagtatcttttactacattctgttttgcctagttcactactttttcacttttacacaagaaaaaacacagttcaaagttgtgtaacaataatttttatgagatttaaagttatatcttgtaagtaaccaacttttaagtgtatatgcaaacacaagaaaaactcatgcctatgttactcctgattcataggctggactacctttagcctttagtttaccacattattaacagaaagaccaaattaaaggagacacatatttaagatatatgtcagtcactaaatttttcagcaggtatcacaagttatttattttttatttgaatattatttgtaatcaatttatttccatttcatttggataacttytgctggcatctgcaacaaagtcagaatttgattgaagacaattggaataaagagacctcaggtcagga

SEQ ID NO: 899883 - DNA, 657 bp, Homo sapiens
ccactagaattaattcatttattaatcttttcttctgtattagctatgtccagtaggcactatgcaaagcactaggcactcagaaaaagatacagctcttttcctcatagatcttacattctcataaactagayagaaacttacccaataattaacatatgtatatgtatgacataattagttgtatgttaaaagataagaacaagatgttaaaaggacacaagataattcaacaactgcttcttgtggttggggacagactgctaagaggcattaaattaaataagagagattatatttctagtaatttttgaagtaatcccattactaggtatatacccaaaggattatgactcgccctactataaagacacatgcacacatatgtttattgcagcactgttcaaaatagcaaagacttggaaccaacccaaatgcctgtcaatgatagattggataaagaaaatgtggcacatatacaccatggaatactatgcagccataaaaaaggatgagtttacatcctttgcagggacatggatgaagctggaaaccatcatcctcagcaaactaacacaggaacggaaaaccaaacactgcatgttctcactcataagtcgaactgaacaatgagaacacatggacacagggagggga

SEQ ID NO: 899884 - DNA, 636 bp, Homo sapiens
agcttaataaggactgtcgccccagccagataaaagcaatagacaaaataacaacagtacaagcaacaacaataagcaaaccactacaatttttttaaattgcctttaaagatattgaaagctgaagactagcaatacagaatgagagtctaagatttcaatttgtacttgtcatggaaagctaaacaatgtccagaaattagcagtaccttttctttctcattttatttatgatagtcaatgtctttgtttgttttagttgtaggtagtagaatagtataatgctaagtatatttcttaactagggttcacttggcagccattctaataaatctttgttcttttcttttaaggtttctgcccctttgttttagaaaattcagagactgcaccaggaattcattttttttttgtctttttggacagttaatgttagtaatttagtttataagaaaaattcctttgcaatacctaagtgcctagcattcatttgttcccctcatgatctccttggcaattcttatatttttatgagggaaatctatgaaatgcaatcaatctgtgtgggttttatatatgcactcccaactkgctcagcttgctcagatgtgcagaaaacatccgggatcaaaacaa

SEQ ID NO: 899885 - DNA, 621 bp, Homo sapiens
tgcatttaaatttgcaaagtactttagttgcttttgagacttaaattactgctctgtaaatgtagcatattgcaactgccaatgctgctataaaataatgtattgagaaagattatagacttgtctaagattaccttctttgttgtcatttttgccatccactttctaccaattttcttttttctgtattaagtgaaaaatgtttaaggaatttaccctctttcctcattccagaggcaaattacctaagcagattaaaagactttggctatcatagcaagctattttggaatatcagtgtcattttcaatatattattttccttttgaaaaccatttatacgtaatgaaaagtgaaatgatttataataattagccagtgaactcaatccgggcagtagtaacttaatggctcatatcacattctctatacaaatgtcatccaaatatttggttccagttggtttattttggaaaggttccacagtaagacaattttgtctgtctttgacagtcaaaacwgttctaccagtctgcttcattagttgctttagttcagctaatatgcaactctcatgatcaatccatgccctcaaggtttggagtcttgtaagaggaaaaa

SEQ ID NO: 899886 - DNA, 648 bp, Homo sapiens
tttagcccttagggaagaaaatctaattgtagttagtgatgaagggagcgttaacaatgaggtgcatcagaccccctatcccatcatggccaagcattcygttttcaaggtgactctgcattcccttggccaggaggtggtccattcagccagttgggtgggggtgggggggcacttagaattttattcatatttctagataggattggccacatttgtgggaaaggcataaacaccatccagactcttcatttctttcttttttaaaaacaattattattatactttaagttctagggtacatgtgccaacgtgcaggtttgttacatatgtatacatgtgccatgttggtgtgctgcacccattaactcatcatttacattaggtatatctcctaatgctatccctccccccatccccgaccccatgacaggccccagtgtgtgatgttccccaccctgtgtccaagtgttcccattgttcaatacccacctatgagtgagaacatgtggtgtctggttttctgtccttgcaacagtttgctcagaatgatggtttccagcttaatctatgtccctataaaggacatgaactcatccttttttatggctgcatagtattccatggtgtatatgtgccacattttct

SEQ ID NO: 899887 - DNA, 553 bp, Homo sapiens
gggagtcccaaatgttattaactaccacaattttatataactgattcttcactggtcatccagaagcctttttgaaagtcccactgccatacctgcctcctcggtgaaatagatgtraaagccacaaagagagaatcaatgagccacactcatattggaagcgaatggagttgacttcaccagtgggaaaagcaattacttttcaaagtgaaaactgatcaattcacaactcaaggaaagcatggagtaatttcagaactccagtaagaagtgataaatgtctagtttggaatcatgtggctgaaaatcttaccatatgctttccacaggctgagcaagaggatagatcattgaatagatgctttaattccatttttgacaatgaaccttgtgcttctgaaaatatttatatttaaccatgaggttatgatgattttttctctacactttttgagaagcctcttcagaaaagagcaaagttgtctgctctaatggatagaataaggagctgggagaaaggagacctgggtattaatctcagctctaccactac

SEQ ID NO: 899888 - DNA, 613 bp, Homo sapiens
tttaattatgtaactgtgaatgcattataaactgaaaagtaaaatgaacaggatggaatataagagttaatgaatacagagacctgttaatttgataataattgatgtatagaatatgcttttgctaacagtttatttaattgcaaatgaaagtgttagtaattatttcagtgtataagatatatttattgatattatataacagtcaatgaatttgcttattttctttgtatatttctgtgtattttagagagctattataaaattaactcaaaagtacttaatatggttagagtaataaagctttatgtacagggtttaaaatttctttgctgatttgtagctgggggtgaggtgggggatcagctcctttcctccagagagaactttgattttgtcaccagcctatcaaaatgagtacctggttttaagccttcccaaagattagccaattccacagtgtacacctgttccattttgatgatacttcctaagagacaaatttcttgtaaaggctgcatgttgacctttagttccacttactgtcggtcatatttgcagtgaaaytgagtatttttctaaaagtagaaggatgacaccacgtgataagaag

SEQ ID NO: 899889 - DNA, 579 bp, Homo sapiens
ttaagtggagatatttcctttttcagcatagatctcaaagctctgaaaaatatcacttaacagattctacaaaaagactgcttccaaatggctcaatcaaamgaatgcttcaactctgtgagataaatgcacaagtcaaaacgaagtttctctgaaatcttctgtctagtttttatgtgaagatatttcctttttcaccataagcctcaaaacactcacaaatatccctttgcagattccagaagaacagtttccaaactactcaatgaaaaaaaaaaaatttacctctgtgggatgaatgcacacatcacaaagcactttctcagaaagcttctttctactttttatgtgaagatatttccattttcagtataggcatcaaagcactctaaaatatccgtttgcagattccacaaaaagactgtttccaaactgttcaattaaaagaatgtttcaactgtgtgagatgaatgcactcgtcacaaagaagtttctcagaatggttctgtgtggtgtttttgtgaagatatttcctttgtcaccgtaggcctcaaggcactcacaaatatcccttttcag

SEQ ID NO: 899890 - DNA, 590 bp, Homo sapiens
gagcccattggggtctatggtgaacaatccaatatttccagatgaaaacaagaaggaagctatccatgaaactgctttgtgatgtgcaattcatctcacagatttaaactatttctttatwcagtaggaaggagatattcttttttttgaattgactatgggatattttggagcccattgaggactatggttgaaaagaaaatatcccaagctaaaaactaaaaaggagctatctgtgaacctgctttgatgtttggatttatctcacagagttaaacctttcttttgattcagcaggttttaaacactcttttggtagcatctgcatagagacgtatcacagcccatcgaggcctatggtgaacaaatggatatcaccagataaaaactagaaggaagctatttctgagaccgcattgtgatctgtgcatttatctcacagagttaaatctttctattgattcagcaggatgcaaacactctttttgtagaatctgcaaagggacagttgggagcccatttaagcctatggtgaaaaattgaatatccccagataaaaactagaaataaccaatcagcgaaactgcttt

SEQ ID NO: 899891 - DNA, 660 bp, Homo sapiens
cagcctatggtgaaaaacagaayacccagagtttaaaaactgcaaagtagctctctgtgaaactgctttgtgatgtgtggattcatcacacagagataagcctttcctttgatttggcaggttggaaacccttgttttctaacctgataatgaatattttgaagcttgttgaggcctatggtgaaaaaaaaaatccctagttaaaaactagaaggaagctaccagtgaaactgctttgtgatgtgtggattcaccactgagagttaaatctttcttttcatccagaaaattggaaatattctttagatagaatatgcacagggacatttgggagaccatagaggctaatggtgaaaaacagaatatcctcagataaaaactagaaagaaggtgtctgtgaaactgttttgtgatgtgtggattcacctcacagaattaaacgttgttttgattcaacaggtgtgagaccctcttttcataggatctgtgaagggacatttggaagcccattgaggtttatggtgaaaaaccgaatatttctagataaatactagaaataacctagctgtgaaactgccttgtgatgtgtgcattcatttcacagatttaaacaatccttttgattctgtaaattggaaacactcttatggtagaatcttt

SEQ ID NO: 899892 - DNA, 646 bp, Homo sapiens
atgaaatatcttcacataaaaactagaaagaaacattatgaaaaacttcttggtgatgtgtgctttcatctcacacagttgaaactttcttttcattgagcagtttttacacagtctttttgtggaatctgcaaatggatatttggagtgctttgaggcctatcatgaagaaggaaatatcttcacataaaaaccatacagaagcattctgggaaacttccttgtgtgccttcatctcagagagttaaacctttcttatgattgagcagttttggaaacagtcgttttgtagaatcttcaaagggatacttgagagcccattgaagcctatggggaaataggaaatatcctcacataaaaaaaaaaacagaaactttctgagaaactaatttgtgatgtgtgctttatctcacagagttgaacatttcttttgattgagaagtttggaaacagtctttttgtagaatctgcaaagggatgtttgtgactgcattgaggcctatgggcaaaaaggaaatatcttcacayaaaaactagaaagaaacatcatgaaaaacttctttgtgatgtgtgctttcatctcacacagttgaaactttcttttcattgagcagtttttacacagtatttttgtggaatctgtaaa

SEQ ID NO: 899893 - DNA, 684 bp, Homo sapiens
agaagggttcaactctgtgagatgaatgcacacaacacaaataactttctcagaatgcttctgtctagttttatgtgaagatatttccttttcaactacaggcctgaaagcactgcaaatatccayttgcagatactacaaaaagagtgattccaaactgctcaatcaaaagaaagtttcaactctgtgagttgaatgcacacatcacaaagaagattctgagaatgcttctgtctggtttttctgtgaagatatttccttttaaaccatatgcctggaattgctccaaatatccaacttcagattctacaaaaagaatgtttcaaaactgctcaatgaaaagaaaggttgaacgctgtgagttcaatacacacatcaaaaaagtttctcaaaatgcttctgtctagtttttatgtgaagatatttccatttccaccattggcctcaaagcgcttcaagtgtcccattgcagattcttcaaaaagtgtgtttgaaaactgctcaatcaaaagacaagttcaaatccatgagatgaacgcacacatcacaaagaagtttctcagaatgcttctgtcttgtttttatatgaagatattttcttttcagctataggcttcaaagcgctccaaatatccaattgcagatactaaaaaaagagtgtttccaaactgctcaataaaagaa

SEQ ID NO: 899894 - DNA, 608 bp, Homo sapiens
ttgtagaatctgtaaagggatatttttgagcggtttgaggcctatggtgaaaaatgaaatatcttcacataaaaaccatacagaagttttctgaggaactgctttgtgatgtgcattaatctcacagagttgaacatttcttttgattaagtagtttggaaacagtgtttctgtagaatctgcaaagggatatttgtgagtggtaggaggcctaaggtgaaaaaggaaatatcttcacataaaaactagagagaagctttctgagaaacttctttgtgatgtgtgcattcatctcacataattgaaccttttttttgattgagcagattggaaacagtcatagcagtctttttgtagaatctgcaaagggatatttgtgatcgctttgaggcctatggtggaaaaggaaatatattcatgtagaaactacccagaatctttctgagaaactactttttgatgtgtgcattcatctcacagagttgaacctttgtttttattgagaagtttggaaattgtcattaccatcttttggtagaatctgwaaagggatatttttgagcggtttgagtcctgtgtgaaaagggaaataacttcatataaaaact

SEQ ID NO: 899895 - DNA, 564 bp, Homo sapiens
aaaaggaaatatctaaacataagaactaggcagaaggtttctgagagactgcttcttgatgtgggcattcatgtcacagargtagacattacttttcattgagcagattggaaaccctcttcttgtagaatccgcaaagttagatttgggactgctttcaggcctgtggcgaaaaaggaaatatcatcacataaaaaccagacagaagctttcacaaaaacttctttgtgatgtatgcattaatctcaaagtgttgaaacttcctattgattgagcactgtggaaacagttattttgtagaatctgcaaagggatatttgtgagctctttgaggcctatggtgaaaaaggaaatatcttcacttgaaaactagacagaagatgtctaagagactgcttcgtgatgtgggcattcatctcacagaggtaaacatttcttttcaactctcttcttgtagtatccacaaagggatatttgtgaccgttctgaggcctgttttgaaaaaggatatatcttcacataaaaactaggcaggaggtttctaagagactgctttttgatgcg

SEQ ID NO: 899896 - DNA, 523 bp, Homo sapiens
accatcctcagcaagtgaccagaagattaaccagtttgtgaaatgactaaggttcatctacagtcaacatggcagcagagacagatataaaatcgcataagtcacccagtttttaaacagatagtccaaattgtgtgtggggaggggtgtggatcagtggaaacagcggggtgaaaatcttggctaggatagctcatttaagatatgccttcgcctggcccattttcaaaattctggtatctctttcgtaaaacagtcaatatcagattgtttgcaggtaaggtagtccaagaggtcctgcacaggaaatgtccagtgctaggcaaatgtcaaatgaccaatgctgggtccttgctggaggtgtcaggccaatggtaaccccttggcgaagtgcctctgctttagcctaagttcaaatgatccggtttcaaacggggactttggaaatgccatacattcttccccagtctcaaatatgctggttgtgktaaaccatacagaaataaaaaccactgtccagatg

SEQ ID NO: 899897 - DNA, 389 bp, Homo sapiens
ctaatagtgtagaatgaggaatcaaaatgacccaaagatccagttgctttttcccttgggtttggctacagtgagtaatgtttcatagtcatgtcatccaagcaccaaaggcaaatgaccacgtgtgccagccaaagaggaacatggcttttatttattttgctcccttaggcttccttatgagggaggaaggaagttgagttacctcctcatccccccgcccaagaatctggatttactagattggcaaaatggacattggtgaaatactgacagcctcctctaaagacaccagaaagctcttattctgctgtgtatatgataatcactgcactatggagtactcactgtgtcctaaacatccrtcaacatctcctttagttcatcca

SEQ ID NO: 899898 - DNA, 649 bp, Homo sapiens
atgtctgccaagatatcagaaatgctgaaggaccagaaaaaggggatgtctgttagccccagaatcagcccaagtaccatcattctggtcatttcaacagagaattggcatgggaasagaggagtaggattggaggtggatgtacatatgttttgagaaacagtaaagtagataagaggagaagttcatcaaagattaaaactcgttctccactacagcaaatgatcctgaaactttaatcagatttgtctttaggttctcttccaaatgcccacagaaccactgtcaaacaatgtaaccaatcaaacaaaagcatttctgcccctctacttaaggatgccctgaactttattatgggggaatcaaaaaaattgtgggttcaagcccagctctgatagctccaagaccttgggaagtcacataccacatagttctcatgggaagtcacataccgcatagttctcagtttaatcaatcactgtagaagaaaatcattgagtaatgagtccaatcaacataatgcttgaaaaatgaccagatcattcctgttttaattgagtaataggattttgaaaataaaataaggattattcctagatgagttaagccttcaggtaaaaaatgctttgaactagagacaaattattag

SEQ ID NO: 899899 - DNA, 546 bp, Homo sapiens
ggagttcaaggaaacagaaatgagaaaattttcaatatagtcatggtttcatggtagaaaaggttagtaaagactagattctgtataaaaaaaaacttcaaaatcattagtttaatttttcttaactacagagactatgaaaaaaggctaagtttttaataatttttttcaaagctaatgccttattggctcttttaaaaattatttattgagtatcttctgatctataagacgtagttgatgatataactgtgaccagcatatagtgtccactctcaagggattctttgtgtcatagaggattgtggcagttttaagccatggctacaattatttgacactccacccatcaaaagatgggctctatgtcccctcccatgcacctgagtgggcctacaattactttccttctgaggctgagtaatataaggtcatgcacttgggaacttgagctggtaagaagcccaactaccatgatgtcaccatcctggaggsgcaagacacatactccatatgtaggcaatggcactcttactgacactccca

SEQ ID NO: 899900 - DNA, 546 bp, Homo sapiens
ggagttcaaggaaacagaaatgagaaaattttcaatatagtcatggtttcatggtagaaaaggttagtaaagactagattctgtataaaaaaaaacttcaaaatcattagtttaatttttcttaactacagagactatgaaaaaaggctaagtttttaataatttttttcaaagctaatgccttattggctcttttaaaaattatttattgagtatcttctgatctataagacgtagttgatgatataactgtgaccagcatatagtgtccactctcaagggattctttgtgtcatagaggattgtggcagttttaagccatggctacaattatttgacactccacccatcaaaagatgggctctatgtcccctcccatgcacctgagtgggcctacaattactttccttctgaggctgagtaatataaggtcatgcacttgggaacttgagctggtaagaagcccaactaccatgatgtcaccatcctggagggkcaagacacatactccatatgtaggcaatggcactcttactgacactccca

SEQ ID NO: 899901 - DNA, 617 bp, Homo sapiens
gcctttaagattttttctttctcattgaccttgaaagtctgatgactgtgtgtcttgtatagtatcttgcaggggttctctgaatttcttgcatttgcacatagacttctctagtgagattgaggaaattttcattgactatgtcctcaaatatgttttccaagttgcatactctctctacttctctctcaagaatgccgagttgtaggtttggtctctttacataagcccatatttcccaaaggctttgttcagtttttaaattcttttatttttgtgggactgagttgatttgaaagactggtctttaagctctgaaattattctttcagcttggtctagtttgttattaaggcttccaactgtattttgaaattcctgtagtaaaattttcaattccagaataatttagttccttcttaaaatggctatgttgtctttcaactctgtgaattgctttactgacttccttgggttgagttgcaactttctctwaagtctctccctctctttctcttttttttttttttttttttttttgagatagggtgttgctctgtcacccaggctggaatacaatggcgagatcatggctcactgtagcctcaacctcctgg

SEQ ID NO: 899902 - DNA, 545 bp, Homo sapiens
actctgggaggctgaggcaggaggatcacttgaggccaagactttgagacaagcctgtgcaacacggtgaaaccctgtctctactaaaactttaaaaaattcaattagccaggtgtgctggcacgtgcctgtagtcccagctatttgggaggctgaggcaggagaaccacttgaacatgggaggcagaggttgcagtgagccaagattgagccattgcattccagcctgggcaacaagagtgaaactccatctcaaaaaaaaaaaaaaggtgctcaatgaatccatgaataggtaaatcaattgttgtccactcctaggaaagccatacaccatcaaggctgcccacctgcccccttggccacagagcaggcctgtccaagggtcaaccagaaccctaggccacaaaacataccacrgccttcccagcacatgacagggagtcccaaaatcgggggcctctctcacgtcacacagatgacatgagttgctctctgctatgggagtggacaattcccatgtccaaacttgtcttgggatagggaca

SEQ ID NO: 899903 - DNA, 582 bp, Homo sapiens
cactctgggaggctgaggcaggaggatcacttgaggccaagactttgagacaagcctgtgcaacacggtgaaaccctgtctctactaaaactttaaaaaattcaattagccaggtgtgctggcacgtgcctgtagtcccagctatttgggaggctgaggcaggagaaccacttgaacatgggaggcagaggttgcagtgagccaagattgagccattgcattccagcctgggcaacaagagtgaaactccatctcaaaaaaaaaaaaaaggtgctcaatgaatccatgaataggtaaatcaattgttgtccactcctaggaaagccatacaccatcaaggctgcccacctgcccccttggccacagagcaggcctgtccaagggtcaaccagaaccctaggccacaaaacataccacggccttcccagcacatgacagggagtcccaaaatygggggcctctctcacgtcacacagatgacatgagttgctctctgctatgggagtggacaattcccatgtccaaacttgtcttgggatagggacactgcttgactttttaaaagccaaaacgctacagtat

SEQ ID NO: 899904 - DNA, 596 bp, Homo sapiens
aagtagaaattgcagatagagaaggccaggcctgtcctattattcttttagtttccaaggcagcattcatttaagcatagcgtttaaaatgatattggayaatgccattggataaaactcttttgcagaacagaactgtgcaaagcaatactgttttaaggtgaattgaagccatccaggcagagagaataaggttgtcttcttatctcttctgttgacttggtctaatctgtgggcagttgttccttggcctcaattttcccattggaaaggggatttttggaaacatatcttaaaactcttgagctgaagaagctatatcaatgaaaaatgtgttgtttaaacacaacaataacttttccgtggtatgcagcattatatttatacaccataagttgagaaaagccttgaaagtaacacaaataccatgaagcctgttttataattcctgactcccagaaaccctgagatgtattcacagcctgtagtcaccctccagaacccaagcaggaccttggaacttcactccatataccactccaaagcaagttttctgctccagtgtgatgagaaatgtgatgttcactgaaatgcac

SEQ ID NO: 899905 - DNA, 589 bp, Homo sapiens
acctgatttctcctcgttgcayttgcttttgcttgtttcatcctgtcactgtgaatctgctctagaggattcgtggagtcacagttgtgctttgattctctggtgaatactgtaattaagaatgcctttctgtttgaaattagtatgaaaattgtacttttgcaagtctttgcttcacttacccatgtgtttgtgccttcaggaaaggataacagcatagcgctgaacatgtgatggatcagttagggaatgtttgggctcaaataatagaaaatcccacctcaaaccaccaatgtaaaaaaaaaaaattaaatttaaaatcccctactgatgtgcctttattgtttaaggtaggatggactttgggattggctaggttcaacaactcaacagtgtcatccgggaggcagctccttttcattcccatgctctatgtcgacctcatgatgagactggtggttctcacagtcagaggatgactgccagccccaattagggctacatgtcttcctgtccacatatagaaaagaaagggaaagaaacaaaaggaagcctctggaagctctctcagagcaatgaggccacatac

SEQ ID NO: 899906 - DNA, 610 bp, Homo sapiens
actaaaccagggaagcagcctcttctaaatcctgcttcaatgaggcttatgtctgcatgggwgtgctactcattgaacacaaatataaaggtgccaccagacaaggagtttttctggttcatcattgcactgcaggatgccatgaaggagtcacaggctgtggcttccatgaagcccgtgacaaatttaataccctattacttgtgtcgtctgcactagcacttcatttggtgacatcactgggtacaactaaagttgaaatttgtgtgacatttttgcaggtgttgcttttcaccaaaaatgttattttacatagtttagccacagtgcagtgctttaagtctagaactaaacctcaggaaatctaatgaggttgaaaagaaaagtgaaagttaacggctgcagctttaacaaaggctcatcctccctccggctctaaagagtcagtaactgagttcagtaactgaaaattaaattagaagaaatgccacctctgcagctacagctacctttagcattaacaataatatagaatgggatgggggtggggggttctgctcaatagagccatcaagaaactttcagagcctttaaacgggatggaatctgc

SEQ ID NO: 899907 - DNA, 584 bp, Homo sapiens
ctttgatgcctcatgtttgacatacagcttttgacagttcacsagcaattcttcttgagatattctcatccatagggtcccacttcccaaaacagatgagatctcctccttctcatgattcttcttcattttttttttttttttttttttttgagacagagcctcactctgtcacccaggctggagtacagtggcacaatctctgctcactgcaacttctgcctcccgggttcaagcggttcttctgcctcagcctcctgagtagttgggactacaggcatgtgccactatacccagctaattttttgtatttttagtagagacggggtttcactgtgttagccaggatggtcttgatctcctgaccttgtgatctgcctgcctcggcctccaaaagtgctgggattataggcgttagccaccacgcccggccccattcctttatcttttttcccgatttatttttatctctttgttaaaaactatgaccatcaccaaagttaaggccttgacttctcttcttgattttctccacttatttccatgccttaacttggtgattctgcaaggatatcttgaaaagc

SEQ ID NO: 899908 - DNA, 417 bp, Homo sapiens
tttatagttttgggtttaattttaartcttcaatccatcttgagttgatttttgtatatcgtataaggaaggggtgcagtttcaatcttctgtatacgtatagccagttatcccagcaccatttattgaatagggagtcttttccccattgcttggttttgtcagctttctcaaagatcagatgatcataagtgtgggtccttatttctggcctttgtatcctgtttcattggtctatgtgcctgttttggtgccagtaccatgctgttttggttactgtagccctgcagcatagtctgaagtcaggtaatgtgatgcctccagctttgttctttttgccttggctattcgggctcctttttggttccatatgaatttttaaatagattttctagatctgtaaagaatgttgttgat

SEQ ID NO: 899909 - DNA, 642 bp, Homo sapiens
ggtgcggtggcttacacctataatcctagcactttgggaagtcaaggcaagaggatgacctgaggtcatgggttcaagaccagcctagccaacatggtgaaaacccctctctactaaaattacaaaaattagcgaggcgtggtggtgcatgcctgtaatcccagctactcaggaggctgaggcagaagcatcacttgaacctggtaagtggaggttgctgtgagccgggatagtgccactgcacttcagcctgggtgacagagtgagactccgtctcatgataaaaaataaaaattttaaaaaagaaggtacacaattataatctctcccacttgaacttcattcattgtataatgcacattttcctaaatcttacagttcaagttttatccttagtaaattgctcagtgtctttggaagagtgatgacatttgttgtcatatggttaccaatgtaatgatagagtagagaatggctgattaattctttgtttctgatcaaagcagcataaatataagcaggtctttgagcccttcaacaggctacaacctccsactaactctttgcatccagccttccaatgtagatttggaatttacagatccttctgtttcttttcctcacctcatccaagagatttgt

SEQ ID NO: 899910 - DNA, 589 bp, Homo sapiens
aattgagatttgggaacctacccctagatttcagaggatgtatggaaatgactggatgtccagacagaagtctgctgcaggggcagagtcctcatgaagaacctctggctagggtagagctggagggaaatatggggtcagagtccccacacagagtcccaactggggcactgcctagtggaactatgagaagacgaccaccgtcttccagactccagaatggtagatccaccaatggcttgcactgtgagcctggaaaagctgcaggcgctcaataccagcctaagaagcagtcagaaatggggctgtaacctgcaaagccgtaggggcggagctgcccaaggctgtgggattccacctcttataccagtgtgccctggatgtgagacatggagtcaaaagagatcattttggaactttaaggtttcatgactgccctattggatttcagacttgcatggggcctgtggcccctttgttttggccaatttctcccatttggagcaggtgtatttccccaatgcctgtaacrccattatatctaggaagtaactaacttgcttttgatttagcaggctcattggtagaa

SEQ ID NO: 899911 - DNA, 602 bp, Homo sapiens
tgttttatttcatataagtttggctatttcagctcattttggttttccatttgtgtggtatatcttttcccactgsttttctttgaggcttggctttttaccattaaagcgtgtctcttgtaggcagcaaatgtttggatcttacttttcttatttaatttgccagtctatatcttgtaagtggaatatttaggccaattacactcaggggtaatattgaaatgcaatgtttttattgctgtcataatgtttttacctggttgttttgtagcaacaattgtataattgctttatagactctgtgatctttttacttatgtgtgcttttatgatggcaaattttgtccttttatttctgtctttagaactcttttgagcatttcttgtaagtccagtcaagaggtgacaaattcccttagcatttgcttgtctgagaaatactttatttctccttcatttatgaagcttaatttagccaaagccaaaggttttggttggcagttctttgctttaagaagacagaaaatcgaagcctgatctcttctgggttgtacagtttttgccaagaagtccactgtcattctgatgagacagtctttata

SEQ ID NO: 899912 - DNA, 606 bp, Homo sapiens
acacgcttttctgagcctgttgcttcacattcttccattttctacccattayccaataccaaactacctccaaatattcaggaatttttatagtgacaatcccacatctcagtaccaattttctgtctcagtccattttctgttgctataactgaatagcacagattgggtagtttatttttaaaaatagatgtttatttagctcatagtcttgttgtcaccaagttcaaaagcatggcaccagcacctggcaagggcctctgtgctgcaccatactatagcatgaggtgttctcatggtaggcaggcatgggtgcatctgctcatgactttattcctcttcttataaagccaccagtctcatcatggggtctcagcctaatgaccttatgttatcctaattgctgcccaaaggccccatttagtcccacctcttaatagtatcacaaagacaactgaattccaacatgagttttggagaaggcactcaaaccatagcagtactcatacactcataccctttcatcatatgtaagaatattgcaattatttcatctttaaatctgattgtggggaagatctatttctgacacatggaaaatccatg

SEQ ID NO: 899913 - DNA, 644 bp, Homo sapiens
cagacaagacaaaagaagtgtgaaaccagaggcctaaaggcmccctcggcagtgagtgtgcattagtcaggttgcactagtaatctgtcagaggacaagaatgtgtgaagagcaagaacagtgccaggtcggaacatcctggtgttggaactgcagcattctgaggagctgcaaattgtttggatgcactgaaggaaaagggtatgtggcttcacaagatcaagagacgaagcagataggagagtgccacacttggagacatgagttaaaaatcctaaggaatcccggcactttgggaggccgaggtgggcggatcacgagatcaggagatcgacaccatcctggctaacacagtgaaaccctgtctctactaaaaatacaaaaaattagccgggcatggtggtgggcgcctgtagacccagctacttgggaggctgaggcaagagaatggcatgaactcaggagggaggcggagcttgcagtgagccgagatcgcgccactgcactccagcctggacaacagagcaagactccatctcaaaaaaaaaaaaaaaaaaaaatcctaaggaagtggttgcctagggatgagaggtagggatggaaagaatggcagatattagctaaggactacaggattgctttgg

SEQ ID NO: 899914 - DNA, 649 bp, Homo sapiens
cgttcttattatttcctttgctgtgcagaagctgtttagtctaatatagtcctgtttgtctatttttgtttctgctgcctgtgcttttgaagtattagccataaaactttgcctagaccaatgtcctgatgtatttctcctatgttttcttctagtagttttatagttttacatcttaacatttaaatctttaatccattttgaggtgatttttgtgtatggtgagatagaggtgtctagttttattcttctgcatatggatatccagttttcccagccccatttattgaagagagtgtcctttccccaatttatgctcttcatacctctgttgaaaatcagtaggctttaaaaatatggatatacttctgagctctctgttctggtctattagttgatgtgtctgttttaataccaataccgtgttgtttaggttattaaagctttatagcatattttgaagtcaaggattgtgatgtcttcagctttgttctttttgcactggattgctttggctmttagggtcttttatagttccatacaaattttagcattgttttttctatttctcagaagaatgttattggtattttgatagagattgcattgaatctgtagactgctttgtgtagtatagtcattttaacaa

SEQ ID NO: 899915 - DNA, 642 bp, Homo sapiens
ggttataagggggaatattttggttacatccttagtatcaaacacctgtttagagttttagtttagaatgacattggaaaagaacatttttctgtctgaaattgtggatgatgaaacacscatctcctgaaagttactaggtaggctttgacatggagactgccccatccagaaaccacagaaatgattcaagtctctacatgagattgaatgctaggcttagacctagtcggactatgttgatttgtttcacttttatagaaaatcagattcatagctttatatactctttccaattaaaaaataaatcctatgaaatattatttgcataagaatttgatttaagctttgccaatgctgaaagtaagatgaatgttttgagtaagggagtagaaaaagcatacttaccctgatgagcctccggatcacacagtatggggactaatgggtcatatatttttatttatttattggagaaactcatccctcaagttggtcacctactccttagtcagcgagctcggtaattgtcatagaaacactcatttttacagtgttatagttgatcactgacatggaaccagactaggtaatcaaacatcttagccatatgcttgttctaagttccaacctagtcaatta

SEQ ID NO: 899916 - DNA, 563 bp, Homo sapiens
tcagtcttctcagttttgtcctgtttcttctatgaatacagtgttgcattcctaaagaaggtcttctctttacygtttcttccattgacttacttagatggctccaagaattcccttgagagttgggggaaaggaggattttttttttccagctacactgagtctaagatgagtgtcactttgaacccagcccagttttagcatatgggattcattgacggtgattccaggttaattcaaaggacggggctctgtatcctctgtggtgtcacatgcaactgtatttccagtgctttgcctgaggtcattgctctagatcactaattatcaccagaggacataattaaatactgaactgagggtatcgaaagtactagaatttgatttgtgaattagtttctttcaattaaggcaaatgaatatttattgagcatatattatatgctaggcagtgtgcaaatgtcatcatgtgatctttatagtcatcttttaaagaaggtgctgttattttagcatttcatggaagagaaaaatcaaagatctaaaagaaaatttgcctgaga

SEQ ID NO: 899917 - DNA, 610 bp, Homo sapiens
ttttactaataggggttcttccttgcacctytttctgtgtatgagtctctgctgccttaacaatgaatactaagtaggagcagtatgtactccattctaagccacatctatagtggttagtcccctggccctaggcttataacttgcctttatctcttcatgtgactggtttacaaaatgccactaagctgagctaggttggcttatcccactgttggcctagccctcttaggactttatctgaaatctttatgactactttcccagatacatagtgtgtgtctattgctctcctgggagaatctatgtaggcttctaggtcaggttggtcagacgatgcatgaaaagcataaaatgcctgcttcttttgggttgttcttccttcctacctaaaacctgacactttcacccttggcttcatggtcctgtgaatgcaacatgatttttctttgttactgaaaaagattttacttctccactcttatgattctctatacaatagacctataatttccttacctgatatataatctttaagcaatttaagatttttggcatatgaatgctgaaaattagaagaatgcaaagatttagattattatgctgaaat

SEQ ID NO: 899918 - DNA, 556 bp, Homo sapiens
ataccacttataagtgggagctaaacaatgagaatacacagacacggtgaggggaacaatagacattggtgctacttgagggtggaagctgggaggtgggagaagatcagaaaaaaatacctattgggtactargcttattacctaaatgtcaaaataatctttacaccaaacccccatgacatgcagtttacctatataacaaacctgcactagtacccctgaacctaaaataaaagttaaaaaaatttttttggagatgggatcttgctctgttgcctagactggagtacaatggtgcaatcatagctcattacagcttctgactcctgagtttgagccattttcctgcctcagccttctgagttgctgggactacaggcatgtgcggctatgcccagttaattttcaaatttttttttctttttttcttttttttttttttagagatagtcttactattttgcccaggttggtcttgaactcctgacctcaagtgatcctctcacctcagcctcccaaagctctgggattacaagcatgagccattatgcctg

SEQ ID NO: 899919 - DNA, 474 bp, Homo sapiens
ttgagcccaggaattcgaggcttgcagtgagctacatgatctgtgctccagcccgggcgacagagtgagacccaatctcttcttttaaaaaattaaataagtaaataataacattaaaaaatgagcaacactgatcacctttagaagtcaaaggagtagtcgctttgagggtaaagggatacattctggaagcatctccatctgggtgacagtggcatgggtgtgctcactttttaagttttgttcattttgtaccttttcactgagctgcacgtgactgatttgtgcagttttgtgtgtgctgcctacttaaataaaaaatatttgtaggctgggcatggtggctcaagactataatcccagcactttggraggccaaggtgggcagatcacctgaggccaggagttcgagaccagcctggccaacatggtaaaaccctgtctctacttaaaatgcaaaaattagccgggcat

SEQ ID NO: 899920 - DNA, 615 bp, Homo sapiens
agttttcacccattttatctccctcaatgtcatgagaacttatacatgcttacagctttgaatatttctatgagagaagaaaggaaatatgcttctcagtgtcctaaatgtgaaaggaaaggtaggacttaaatatcatcattgttggtatttggtacacaaaaaaaggagcattggactagcttgcatcatggagcttaatcacagataaacctcttatagggtgatatggttggatatgtgtccctgcccaaatctcatgtcgaattgtaatcccagtgttggaggaggggcccggtgggaggtgattggatcatgggggtggatttgccccttgctgttcttgtgacagggagtgagttctcaggcaatctggttgtttaaaagtgtgtggcacctcccgctttgctctctcttcctcctgctccagccatgtaagtcgtgcctgcttccccttggccttccaccatgatggtatgattcctgargcttctctagtaatgctgccagcctgcagacctatgagtcgactaaactctttcctttataagttgcccaatctcaggtagttcgttctttacagcaaggcaagaatggactaatatatagggctgt

SEQ ID NO: 899921 - DNA, 617 bp, Homo sapiens
tgaagtgacacttttcaaaagaagacaaacttgtggccaagaatcatgtgaaaaaaaggtcaacatcactgatcataagagaaatgcaaatcaaaaccacagtgagataccatctcacaccagtcagaatggctattataaaaagtcaaaaaatagcagatgctggtgagtttgctgagaaaaaggactgcttagacactgttggtggtagtgtaaattagttcaaccattgaggaagacgtgtggcaattcctcaaagacctaaagacagaaataccattcgacctaccaatccattactgggtatataccaaaaggaatataaattattctattacaaagatacatgcacatgtatgttcattgcagcactattcaaaatagcaaagacatggaatcaacataaatgcccatcaacaataaactgcataaagaaaatgtggtacatatacaccatgcaatactatgcagtaataaaaaagaatgagatcatgtccgttgcaggaacatggatggagctggaggccattatccttagcaaactaacrcaggaacagaaaaccaaatactgcattttcttacttataactgggagctaaatgatgagaacacatgga

SEQ ID NO: 899922 - DNA, 639 bp, Homo sapiens
aaagcaggatagaggttgttttgggtggggggtwtcttgaggagtgagcacaaatggggcttttgtgtgctgattatggtctgagcactggttgctttggtaggcttgctttgtgaaagtttattgagctgtacgctgatttgagcacttctctacttctttgttaagctcattaaggagtaggacaatacagaacaaatggttcttctcattgactttcaagtgaaatatgagactgggtatctctagtggtttgttaaggaaagcattgttaggctggcaactttttttttttctgcatccactgtattgtagtgttgatttggattttattgggtttcagtctccaaataaaccaataaggggtcaaacatccaacagatcagtggcaatcagcaacagaacaaaaacaacaaacagcaaagcaaaacaccatcaacactgcagtgctataggactgcatttgattgaaaaaagaatcctcatgctccactaagccagaaaaagctaccagtataaggcattgtttccaagaaaacttaagaggaaagtgaaagctaaacattgctatcactgaagccaatgttatctagacatgttctttattttccccggaaataccatctaggattatgtcac

SEQ ID NO: 899923 - DNA, 437 bp, Homo sapiens
gggcaaagaaacaaaggaaatattagaacacctatttaatatgataatatatttaaagttccaagtctaataatgtattagacattaaaatacaggaggctcagtggttcacaagaagagacaacacaaagggtcttttacgtgagtgacacattatagtcagattgtctaaaatgaaagagaaagaatgcattcttaaaacagcaagagaaaagcctctagtacctataaaggaaatcccatcaaactaacggtgaatttcttagcaaaaaccttgtaagccggaagagaacggtataatatattcaaagtastgaaagaaataaactggcagacaagaatattgtattcagtaaaattatcctgtcataaatgaaagaggaaaaaaagagtcttttccagacaaacaaatgccgatggaattcattctcactaga

SEQ ID NO: 899924 - DNA, 607 bp, Homo sapiens
aatttatagataagcaaaatgagacacatctggatgtgaatctcaatatcattatttacttgccttggatagtcatttaattgggcaactcacttgaacttctgggacctctgatttctcatctgtagaataatacctgccttggaagattattctgagaagtagagtaatgaataaaaaacacatagagacacatctgtaacacaagaggtgctcagtaatctgtaaattttactatatttttgtattgactcactcctataaagtcatacagcagttatgtatcagacacagggttcatactctcaggctctttcaactacactcctgaaactacactatcaatgcagctgaagtaactagaagtatcaataacatctaaaaccattccagaacaaaagagattccacagccataattggtaattttccaagtgcttctgaataatatctgagcctctccttgcaggagtattggatgagagacagggaaaccagatacctcaactttcaggcattacctgtaaagccaaaawatggcaactggaatatctcctttagaagttttccagaaatagactttgtaatacaagggacttccttatagg

SEQ ID NO: 899925 - DNA, 609 bp, Homo sapiens
gatgttgagcaccttttcatatgcccatttgacttttgtgtgacttcttytgagacatatctattcaactgttttgtccatttttaaatggattattagattttttgcctatagagttgtttgaactctatgtattctggttattaatcttatgtaagatggagaatttgcaagtattttctcccattctgtaggttgtctgtttactttgttaaattatcatttgccatccaaaagctttttaacttgatgtgatctcatttgtccatttttgttttgcttgcctgtgcttgtggggtattgctcaagaaatctttgcccagaccaatgtactggagagttttgccaatgttttcttgcagtggtttcatggtttgaagttttagatttaagtctttgatttgatttttatatatggctagagataggggtctagtgtctagtttcattcttttgcatatggatgtccagttttcccagcatcatttattgaaaagactttttccctagtgtatgtttttggcacctttgtcaaaaaatgagttcactgtaggtgtgtggatttgtttctggattccctactctgttccattggtctacgtgtctggt

SEQ ID NO: 899926 - DNA, 618 bp, Homo sapiens
ataattgtcagattcaccaaagttgaaatgatggaaaaaatgttaagggcatcccaagagaaaggtgggttacccacaaaaagaagcccatcagactaacagctgatctctctgcagaaactctgcaagccagaagagagtgggggccaatattcaacattcttaaagaaaagaattttcaacccagaatttcatatccagccaaactaagtttcataagtgaaggagaaataaaatactttacagacaagcaaatgctgagagattttgtcaccaccaggcctgccctaaaagagctcctgaaggaagcactaaacatggaaaggaacaaccagtaccagccactgcaaaaacatgccgaattataaagatcatcaagactaggaagaaactgcatcaactaatgagcaaaataaccagctaacatcataatgacaggatcaaattcacacataacaatactaatcttaaatgcaaatgggctaaatgcyccaattaaaaggcacagactgacaaattggataaagagtcaagacccatcagtgtgctgtattgaggaaacccatctcatgtgcagagacacacatgggcttaaaataaagggatggaggaagatct

SEQ ID NO: 899927 - DNA, 631 bp, Homo sapiens
ctctgcatatggtgggccttgtatcaggatgtggatgggtgtggctttcagtgagtaccagagagcatttcctcaggtaaccgtgtgggttactatataggcagaactgaccataaactgtggctcaggtaactgaaactgagtcatggaactgcctcagtgaccccagtaaaggccaaggtctgcatgcctggatgcatgactgtaaatgggcaccttcctccaagtctctggaatagcaggacctctgtcagactgtggctgggaggagtttgggatggttacagagtaagtttagaattctcaatggaaccaagttgggtgaaccctatcctggtctgtagctaaaacaggggtcctgtagtatcccacgtgagtgagggcctgccttctgaatagaacacttctcaaacataagctttaacagcatttcacaactgcatccctggatgtcaaatctctcttagaggtacttattttggagatggtgtcttgctacataacccaggctggtctcaaaatcctggcctgaactagttctccaaccttaaygtaccatgtagctgtcattacaggtgtaagccataatcctggttctctcataaaggcatttttgtcaggggtggctgac

SEQ ID NO: 899928 - DNA, 631 bp, Homo sapiens
atacaaaaacttagtcaggaatggtgatgcacacctgtaatcccagctactcaagaggctgaggcagaagaatcgcttgaacccgggaggcagcggttgcagtgagccgagatcatgccattgcaccccagcctcagcaacagagtgagactctgtctcaaaagaaaaaaaaaaagagaatactgttaaatgtatataaatgcaggttgtctacaaacattacgtataactatgctaattattctgaagtaataaatagaaagcaaggtacaactactgactccactgttaagtttatacactagactgttcttgtttttgcagtgcaagtacttcagcctgcaaatattggataatttccttagatcatcaggtttctgtcaaagaaacgtagtatcttttattgtttaccattctgtgttactaaatttaatcctatctttgtgctaagcttttttgtgctctaaaattagcttttacctaaacaaatctgtgtctattttaaaggactaaaaatgaaaaaaataaagttttcagaaccaaaaacaaaccaataaatctgaagtacyagataacgataatctggagtcagaaaaatgacaaaaggggatgggcatggtggctcacgcct

SEQ ID NO: 899929 - DNA, 612 bp, Homo sapiens
aaaataccacaagctgtaatttcttcctggacatataaatgtaacaaaaacatactgaccaaaatacaatttgtaaaaaatgtataagtgaattaagtgtgtgaagggtcccaggtgagcacawtgcaaagagccacatagaagataaagaaaagcctgttacttatacccaacacagctcttccatatctccagtataactctgtgcctttaaaagtaaattattggcctggtgtggtggcttgtgtctgtaaacccaacactttgggaggcagatgtgggtgaatcacttgaggtcaggagttcaagaccagcctggccaagatggtgaaaccccatctctactaaaaatacaaaaaattagccaggcttagtcatgggcacctgtaatctcagctactggggaggcggaggcatgagaattgctggaacccagggggtggaggttgcagtaagctgagattgcaccactgtactctggcctgggtacagagtgagaccccaccacaaaaaataaaaattaaaaaaaaaaagttaattgccaaccaggcatgatggctcatgcctgtaattccagcaatttgggtgaacaagatggaggacaaccagagg

SEQ ID NO: 899930 - DNA, 600 bp, Homo sapiens
aaggtttggctcattcttttttttctttatttttatctgactgggttatttcaaaagacccatcttcamattctaagattctttctctctctctctttctttctttctttcctcttttttttttttttttttttttaacagagatttgctcttgtcgcccaggctggaatgcaatggcgcaatctcagctcactgcaacctctgcctcctgggttcaagcgattctcctgcctcagcctcccaagtaactgggattacaggcatgcaccaccatacccagctaattttgtatttttagtagagatgggatttcaccatgttgaccaggctggtcttgaactcctgacctcagatgatctgcccacttcggcctcccaaagtgctgggattataggcatgagccacctaacccagccaaattttaagattctttttctgcttgatctagtctattgttgaagttttcaaatatatcttgtatttcattgaataaattattcagttcctgaatttctgcttggttcttttttctgcttggttttttggtaaatttctcattcatatcctgaattgtttttctgatttgtgttgtttttcaga

SEQ ID NO: 899931 - DNA, 215 bp, Homo sapiens
acaggctctcactatgttgcccaggctggtctcaaactgttgaattcaggtgatcctcctgccttggcctcccaaagtgctgggattacagggatgagctaccttgcctggctgattttaatttttatcaatgaacataatttttaaaattcaatggtgctaaaaggctcctgctgacaagcttscatcccttcagttcacgtccttccccatcc

SEQ ID NO: 899932 - DNA, 671 bp, Homo sapiens
ttctatgcaattgaaaactaagaaagaccaggagtagctatacttatatcagaaaaaagagacttcaaggcraaaatgataagaacagacaaagaagtccattttataatgataaaattgtaaattcatgaagggaatataacaatagtaaattcagtgagaggatatatatttacaaacacacatatatgtatataacaattctctttctctttatatatatgtgtgcatgtatatatgtgtgtgtatatatatgcacatatataaatatctatatatacacacatatatataattgttatatcttctttctcaatttacaactttatcatatatatgatggttaatattgagtgtcaacttgattggattgaagcatgcaaagtattgttgcttggtgtgtctgtgggggtgttgacaaaggagattaacatttgagtcagtggactggaaaaggaagacccatccttaattagggtgggcacaatctaatcatttgccagcatggtcagaataaaagtaggcaaaagaacgcagacagattagacaatcttagcctccaagcctacatctttctcccatgctggatgcttcctgcccttgaacatcagactccaagttcttcagctttgagactcatattggcttccttgcccctcagcttgcagata

SEQ ID NO: 899933 - DNA, 630 bp, Homo sapiens
aaaaacaagtaataagattgaatcagtaataaaaaagtcacccaaaaaagaaaagcccaggagtagatgggttcactgctgaattataccaagcttataaagaagaattaaaccaatcctcctcaamgtatttcattaaagaggaggaaaaatatccccaactcattctttgaggccagccttgccctgatctagaaccagacaaagacacaataaaaatgaaaactataagctgatatccatgatgaacatagacacaaaaatccccaacaaaacactggtacattagaaagataatacaccatgatcaagtggaatatatgccagagataagtaaatcaaaaataaagttttaagccccacaactgacttaatggacccttcttcctatctaaaggtgttccaaagtaaacctgaagaaatagttccagccatgatggaaagggagggccagacatgcctcactataccctccgccctttagaactcaagcacaaccaatcagcattaacattaaagcagagatcttaaaagagacaaaacagactctttgcagcaataagatacaaaattccaacctgactgtagtatagcatcacataacagatagcaggctctgaaagaaatcac

SEQ ID NO: 899934 - DNA, 652 bp, Homo sapiens
taatggtggaatagcctggaaagacattttcactccaaaggagagaaaacataaagaaggaagtggtgataagtcctaakcaagtgtaaaatttagcaagagaaattctattatatcttaacatttaagagtaatcctctttggttcaatgctctaccttttggacctaccagtgtaggagctgctctctgtggctctttcagaaagagatcccacacccaagaacctgggtctccactctcttaaagttcatcagcacaatttcaccctgaaagctttgggaggaggccccctggccttttgaaacctagtccatgtctctgatgacctctgatatgctttcagtctccttattctagtttattggataatgatgttcctttgcagctgaatatcactatggtccatactaacaaaatctaaaaagttgattaagttcattagttgcacccatgacctctttatgaaatggttattcagctatccccaagtgttctcttaagaacagtgttctcagtttttgcagtatagataggctgagaatttgccaatattttcaagttctcattcagtttaacttaactattattactttatctttttttttgtattttactataagcattcaagagaaatcaagctactccttcaa

SEQ ID NO: 899935 - DNA, 616 bp, Homo sapiens
tagaagtgtgtctcaattggcktatgtaaaattccagctctgtgaaatagcacaattctcataaatgatgattgactgggtagaaaatgtatctataaacttagagcttccttagcactcaatttgggatggtagtgcagtgagagcctatgttataattctaatgagacttcaagttacttataagttttactaccgtatctgattgacactacttgtgctaaattccatcagtgtctaaacaaatgaagaatatacataacactcaaaaatcaaaatctaaaaattacaggatcataaggcaggaagctttgaatatgacaaagcatagtgatatcaatttgcaccatatagtggggcccaagtgccatgcatatatagtacatatggtaaatgacataaaggcagatgtagaggaaaaatggatctaagaacagtaatactgtctctcttcttgatctactggaccaaacaggtatcaggtaattaaagaagagagaaattttcattgttcagggcaactcagtagacctttggggcatgtggtgtcagatatttcaaagtttcttgagcacttactatgtatcatgtaagggcgacattcttggaatactat

SEQ ID NO: 899936 - DNA, 598 bp, Homo sapiens
aacaatcatatgacaaaaagctcaaatcactaatcattagagaaatgcaaatcaaagccacagtgagatgctatctcataccagttagaatggctattaacaagtcraaaaataacagatgctggcgaggttgcagagaagagggaacacatatacactgttggtgggagtaaattatttcaaccattgtgtaaaacagtgtggcaattcctgaaagagctaaagacagaaactaccatttgacccagcaatctcattagtgggtatatgcccagagaaatataaatcgtttaattataaagacacatgcatgtaaatgttcattgcagcactattcacaatagcaaagacatggaatcaacctaaatgcccatcaatgacagattggataaagaaaatgtggtacaaatataccatggaatattatgcagacataaaaaagtatgaaatcatgtcctttgcagggacatggatggagctagaggctattatccttagcgaaataacacaggaacagaaaaccaaataccacatgctttcacttacaaatggggcaaaaaaaacaaacaccgcatgttctcactcataggtgggaatt

SEQ ID NO: 899937 - DNA, 598 bp, Homo sapiens
aacaatcatatgacaaaaagctcaaatcactaatcattagagaaatgcaaatcaaagccacagtgagatgctatctcataccagttagaatggctattaacaagtcaaaaaataacagatgytggcgaggttgcagagaagagggaacacatatacactgttggtgggagtaaattatttcaaccattgtgtaaaacagtgtggcaattcctgaaagagctaaagacagaaactaccatttgacccagcaatctcattagtgggtatatgcccagagaaatataaatcgtttaattataaagacacatgcatgtaaatgttcattgcagcactattcacaatagcaaagacatggaatcaacctaaatgcccatcaatgacagattggataaagaaaatgtggtacaaatataccatggaatattatgcagacataaaaaagtatgaaatcatgtcctttgcagggacatggatggagctagaggctattatccttagcgaaataacacaggaacagaaaaccaaataccacatgctttcacttacaaatggggcaaaaaaaacaaacaccgcatgttctcactcataggtgggaatt

SEQ ID NO: 899938 - DNA, 560 bp, Homo sapiens
tctcataaaaatcatttaattgtatcaaatgtaggggaaaatagtgaagattagttyttgtagttacaaatgttgaagtaactcaaaaaacattttttaaagatgagcaagtagtaaaaaagaggccaggatgctacaagcagtaggagaaagaaatcagtccctaatatccattccggtaaagaaaaagtcaaaggacaagaaactgtctcttcaaggcatcactcaccattgaaaggtcatttctcattggaataaacttgaaaaggaaaggaaaagaaaaccctaagatgtaatatttatggctttaaaaataccctaaaatgtgaatttaattttactcaagaggagaaaggtagcttttaggataaatatttgaaatagtcccaaagtaatagaagattattcaaaataaagataacttatgaatcagtatcatcatataaactttatcttgctgacatatattatgaaaccatcataaaaatagcaaaacagtaaccaaggaagagtagcctatgtcaaagttttgtattcttcagtttgatgaagataaataa

SEQ ID NO: 899939 - DNA, 639 bp, Homo sapiens
agatgtctaataggatggatggagtagagcccaggcaycagggacgggctgttcatgagcctttcattgcaagatacaggagctcaactcttcctggattaggcttcaaaggagagtgtattggtcacacctgaaaagacccagagcaggctggatccaggcctcagtcatcaggtctctgtctttaccccaccaccccctgccacctttctttctttccttctcccagaattgcttcgctttggacatctctctcaggcagactctctactggtggctgtcagcatctctaggcacacatcctcctcacagctgtgcctgcctgtgggaaagaccatgcttggcagtgagtgacattgggagtgatttggaccctcactctgtccactgtggccagggggtgctttggacaggtcatgtgtgtcttttggaacccagaagtgaggggcattcaatccaaacactgtgggctgagagtgggagagaggtgggtctttaaaggcaaatcaaattgctgtgggcaggcagatatttccagtgcccgcgtggggtttggtcaataagcagcagtggggaagatgaataatcagccatccagaaaatctatctatgagctgctggactcagctgctggtctga

SEQ ID NO: 899940 - DNA, 608 bp, Homo sapiens
gcctataaggaagtcccttgtattacaaagtctatttctggaaaacttctaaaggagatattccagttgccatwttttggctttacaggtaatgcctgaaagttgaggtatctggtttccctgtctctcatccaatactcctgcaaggagaggctcagatattattcagaagcacttggaaaattaccaattatggctgtggaatctcttttgttctggaatggttttagatgttattgatacttctagttacttcagctgcattgatagtgtagtttcaggagtgtagttgaaagagcctgagagtatgaaccctgtgtctgatacataactgctgtatgactttataggagtgagtcaatacaaaaatatagtaaaatttacagattactgagcacctcttgtgttacagatgtgtctctatgtgttttttattcattactctacttctcagaataatcttccaaggcaggtattattctacagatgagaaatcagaggtcccagaagttcaagtgagttgcccaattaaatgactatccaaggcaagtaaataatgatattgagattcacatccagatgtgtctcattttgcttatctataaatt

SEQ ID NO: 899941 - DNA, 579 bp, Homo sapiens
ttttgttctacacattgtgttaggcatggtagatgggacatcacgtctgccctccaagagcttccagttagtcaagtgattgctgttcatattctttcaccaggtgatgtgtgaggcaagaaaataagatgrgggcaactagtggtggtattcagaaaatatgggtggaatctgtggaaattgagcaggccaaacaagagttttcgagaattatttccaaagtctgatccaatgctgtccaataggacttgctatgaagagaagaatgttctagatctgcactgttcaatagccggtagccacatatagctgttaagcacttgtaatgtgagttgtgtgactgaggaactgaatttctaatttaattttaattacttgataaacagccacatataactagtggctcctatattgggcagcacagaaaatgtccacacatatctgaagcttttcattctatcagttattttgaaaacgctctactgctctcagtgtatttaatctaatatctgagttatttcctcatgtaacttaatcttctcagattagtttctggtatcagtgtaaacatactgcaaa

SEQ ID NO: 899942 - DNA, 607 bp, Homo sapiens
attttcaggggcaaggaaaatacatcayggtaccctcagcagagaagtgaaaaggggagaggaaggaccaccaaccctccttgagagttgcctgcatgccaggtgcattgtgtcacagaatctcctttaatccatacaaaaccccatgtagggatattatatacctattttttttaatgaggaaaacctggctcagattataaaatacaattttgctaaggaagcatagctagcaagaatgacagccaggattcaaattatgaggtgtgtgattccaaagtccaatttctttacattacactgaggtggcttgtaactgccctcttccaaccaatcagtgatactctgtttgatgtgtctacagatggggcaaaggccccttggtccccttggctcacctgcttagactagaccatcaggacagctctgatttcagtttgggtctctatcttgtgccctaactcccatcatcatcttctcaacaaatgtctatgcctgtgaccctgggagaatgagaacgcatgtaaaaagctatgggtgggagctccatgaccacaggggaacacccacataggagttgattctgtggagcctaattctgtagatt

SEQ ID NO: 899943 - DNA, 607 bp, Homo sapiens
attttcaggggcaaggaaaatacatcacggtaccctcagcagagaagtgaaaaggggagaggaaggaccaccaaccctccttgagagttgcctgcatgccaggtgcattgtgtcacagaatctcctttaatccatacaaaaccccatgtagggatattatatacctattttttttaatgaggaaaacctggctcagattataaaatacaattttgctaaggaagcatagctagcaagaatgacagccaggattcaaattatgaggtgtgtgattccaaagtccaatttctttacattacactgaggtggcttgtaactgccctcttccaaccaatcagtgatactctgtttgatgtgtctacagatggggcaaaggccccttggtccccttggctcacctgcttagactagaccatcaggacagctctgatttcagtttgggtctctatcttgtgccctaactcccatcatcatcttctcaacaaatgtctatgcctgtgaccctgggagaaygagaacgcatgtaaaaagctatgggtgggagctccatgaccacaggggaacacccacataggagttgattctgtggagcctaattctgtagatt

SEQ ID NO: 899944 - DNA, 607 bp, Homo sapiens
attttcaggggcaaggaaaatacatcacggtaccctcagcagagaagtgaaaaggggagaggaaggaccaccaaccctccttgagagttgcctgcatgccaggtgcattgtgtcacagaatctcctttaatccatacaaaaccccatgtagggatattatatacctattttttttaatgaggaaaacctggctcagattataaaatacaattttgctaaggaagcatagctagcaagaatgacagccaggattcaaattatgaggtgtgtgattccaaagtccaatttctttacattacactgaggtggcttgtaactgccctcttccaaccaatcagtgatactctgtttgatgtgtctacagatggggcaaaggccccttggtccccttggctcacctgcttagactagaccatcaggacagctctgatttcagtttgggtctctatcttgtgccctaactcccatcatcatcttctcaacaaatgtctatgcctgtgaccctgggagaatgagaacgcatrtaaaaagctatgggtgggagctccatgaccacaggggaacacccacataggagttgattctgtggagcctaattctgtagatt

SEQ ID NO: 899945 - DNA, 540 bp, Homo sapiens
aggcttatggcttacaccctctggagcagtggcctgagatttatctgggggcccttttcaccactgctagaactagagaagctgaaacacagggagcagtatctctgtgttgcacagtgcagtggtgcactggtcctggcccacaaaaccttcctctcttctaggcctctgggcctgtaaagggagggctgccatgaaggtctctgagatgtcctggagacattttccccattgtcttggctattaacatttggctcctctctacttaagcaaatttctgcagcagtcttgaattcctcctcaaaaaatgggcttttttctatcttatggtcaggctgcaaattttctgaacctttacactctgcttcccttttaaatttaatttccagtttcagaccatctctttgctcacacatagaaccatatgctattggaagcagccaagccacttcytgaatgctttgctgcttagaaatttcttccaccagataccctaaatcatccctctcaacctcaaagttctacagatccctagagcag

SEQ ID NO: 899946 - DNA, 587 bp, Homo sapiens
aagagtttactaaagattgaaattattcgttcattggatatacagtattacttaatagtaaaccatcctggcctgatgtttttaagataatgttttaattattaatttctttaattaaatataggttataggtccaatcaagatttttattttttagtgaaccacttttggtaagatatgtttttctggggttgtgttcatttaagctttcaatttagtcctgttttgagagaccccagctaaattggggttccagtatcaagagctgatagtaaccttgcctttttgaaaatgaaggattgctggatgtgggtgtttatagtgtgccttctatggatacttcttttacctgactggtggcctaatgcctagttattcaacctatgacataggaggtctctcacatggaaaacttggttgtactggcaggtgtgtggctcttatctgacctatgtctagagtatgcctgcctgaccatacctctgatgstgggaaccctgtgctctccccagcaccccagcgaaaacttggtttggagcagccattagttctttaggtggaaggtgcagattcaatacactaccatg

SEQ ID NO: 899947 - DNA, 613 bp, Homo sapiens
cctcacgtgctaataagtattgcatattaacaaaaatcccaacagatttttgtgttcatttttacatctagtacattcargccaagcttgatttatttgtgacattggcaatcctcttatttttttctctgctgcctacctatctacctttcagtgtcagatatggtgattctgtcgctgcccaggtagatgttgactctgatgcagcatcaagttcacctaacacaaaagacaggacaccatgtaaaataagaacaggaaagaggcagacacaaaccactatgaggtattacctaccaacagaggtatataactcaggccaaggtcatattgtattgttggtgggggtggtcacaggggagcgtggggtcctgtctttgttgctgttggctttccttctgggacacctgacagtacagagatgagaaatctaaggatagagtgggaatcaatatggtgacctcgtcaggcagtcatacctgaagtgtcctcactttgccattgagtttggctacaaatgattcttgatcaatcccatgagataaaggttcccaagattttctcctccaaagcgtcctctcaaagtgttccctaagagctctttcatccctgc

SEQ ID NO: 899948 - DNA, 706 bp, Homo sapiens
tctccccaactcctaaccacttacataagaggaaagaagaggcagaataagttttaggtcttaaaattcccttggcaggccatcagaaggtgccattgctctggayggctgtctgtagctaaaggaggtattgagacagacaagtggtcacctttagtattctaacaggtttgaatttttacctttcgagagctactaactttgggagaaaatacattgagatcagttatttaccaattattgacacaaagagtttgaaaaatatctagcacatggctaagagaaatttatgtgggggagctgtgacttagaaataagacattggccgagcacagtggctcacgcctgtaatcccagcactctgggaggccgaggcaggtggatcacaaggtcaggagattgagaccacgctggccaatgtggtgaaaccctgtctctacaaaaatacaaaaaaattagccgggcgtggtggcatgcgcctgtaatcccagctactcaggaggccgaggtggaagaatcacttgaacccgggaggcagagattgcggtgagccaagatcatgccattgcactgcagcctgggtgacagagtgagactctgtctcaaaaaaaaaaaaaaaagaaagaaataaaacactaaaattcaactctgacatattttcagctgtgtttgttttccatgattacacattttgaagtgtgatcct

SEQ ID NO: 899949 - DNA, 534 bp, Homo sapiens
tttttttttttttttttttttttttttttcagacggagtttcgctctttcacccagactggagtgcactggcacggtctcggctcactgcaacctccgccttccggtttcaagtgattcttctgcctcarcccccgctgtagctgggattacagttgcgcatcaccatgcccggctgatttgtgtatttttagtagagacagggtttcaccatgttggtcaggccggtctcaaactcctgacctcatgatctgcctgcctcagcctcccaaagtgctgagattacaggtgtgagccaccgcgcccagccagtctgtgttactttttttatgatcagaaaaaaaaaaacaaaaaaacctaattttagaaactgacacacagagaaaagtaaaataacatataactactttagatcctacacatgtaaaatggatgattctgaactagagtagggtggactcaggcttgcactgtgacttagggaagtgctggctattgaactgttgggtaaaaataaggaagggaaaactgcaag

SEQ ID NO: 899950 - DNA, 601 bp, Homo sapiens
aaaaacccttgaagataacctaagaaataccattctggacacaggaatgggcaaagatttcatgacaaaaatgccaaaagcaatttcaacaaaagcaaaaattgacaaatgggacctaactaaacaaaagatmttttatgcagcaaaagaaactatcaacagagtaaacagacaacctacagaatgggagaaaatatttgcaaactatgcatctgtcaaaggtttaatacccagaatccataaggaacttacatttacaagagaaaaaaaaaccttatcaaaatgtgggcaaaggacattaatagacacttgtcaaaagacatacttgcagccaaaaagcatatgaaaaaaagctcaatatcattgagccccagataggaggggcacctctctctttcttacacctaggatttgcaatgcaaattaaagaaatgcaaattaaaaccacagtgagttactctctcacacaagccagaatggctattattaaaatgtcaaaaaataagagatgcaggcgagattgtggagaaaaagaaatgcttatacactgttgatgggagtgtaaattagttcagctattatggaaaacagtgtggtgatt

SEQ ID NO: 899951 - DNA, 585 bp, Homo sapiens
ggccttttaacctttgcttgttggcctgtttgtttctttgtttggtaacttagaagatccagtaaatagtgcttctgtttgtctactttcggactttatatgaatataagtgcttttttccttaaagccatttctttcctttttcattataacgatctcagcatcacagactcaaacagtgtgcacaaattaaaaccagtggctccacgtgaattttattggtttcacccttcattttatacttctatgacattactttcatgttaaaatgaagaccatcccaaaataattacagagaaaaggaataatgaatgccatgattaagtttcagtgattaaagtattcagggacagagaaaacacacaaatctcttattcttatcagctgtgtccttgaaacaggaatagcaacaagatgtatgtgattgtaggtggatttctgtgctcctctgaggtcagttaatctgtcagtttcacgcaaagtctgccctatttttaaastgtcaatactaaagtggacttcagccttggatttactttaatcaggaatattaaatgtacaatttttttataaagctagcactga

SEQ ID NO: 899952 - DNA, 655 bp, Homo sapiens
aattatcttagatactttgtttctggaatgttatatttaatatctcacagtattttttaaaacctaattatgttcaatttataagaatttatttactgggtaagaatgtttaayaggcttaattgattagggcctctatattcgtgcaagccctcactgtatgaatttacagtccctgtgaatcacatctcatggaggtatgcagtgtaaaattggcacagctgcacatctctgctcatcattgaaagcacacagtgttttcctttgactttatttcatgaatgtttctgacgaatatatagcatgtcctgtaccaaatgacaagaacaaaacatgttcaccaatgagagaatactagaatttggacttggaactaaaagccattggcaggtgcacttctatgcctgggatctccctgtacttcactgaatattctggaatgcctaaaagcaaccctaattattaattcatcaatttaatcatttaaaaatatatgtgtacctaagatataccagatctcagtctaggaatataaagaataaaacagtccttacctgaaggtttttagattagagaaaaacagtgacacggaggaagtaattaaaatatgttattataactgccaccaaatggatatgcacaaggtatcgtggag

SEQ ID NO: 899953 - DNA, 687 bp, Homo sapiens
ttttctcttgcatcacagtctacttctacctgaatgatccttaaataggaactctagaacttaacttctcctcaatgttcaggactcctaaacctgtatattttgccattgatttaaatttcaaatatgcctaacataagacttgttatctgttccctcaaaacaagctccctctccataccattaactataaaatcaaatttgtaaatattttggtggcaggtaatatctctgtaattataaacacctgacagagcatcccacctactataaaatacacatctgtgatgagtaaaatcattttatagggaaggatattttaatggtaggctcaggagtttctgaaatcagtttttttttttaagttctttaaattccatagccaggaagattatagaaaccaggtttcgtacatctactgggtggaaattcaggtaggttcttttgcttatatttcaaggaaccatttaactacaaagtgacttgaatgcaatgtagctccttttgctttttttgtattattttattttactttcattcttctgaatttatacataagcaaataacatagcaatgctacactacatagcaaaatatctccrgactgcttgtttcatggggaaacatcctagaaatatgagatatctaacccccaaatcagatctacaacaaataaaactacagttt

SEQ ID NO: 899954 - DNA, 607 bp, Homo sapiens
tccacccaaactatgtagatagaaatgtggttgaaggtgacttgctaaaagaaatatgaagatgtaggaggaataagcaatgggcttcagcacaacagatgtctgctatagtgcttaaaagaaaagagtgacctcaaagtccagaaaacttatgataagccaggttattcttctgtgaaaaggaactttaccagcagaagaaaaattctcagccaggcactgtggctcatgcctgtaatcccaacactttgaaaggctgaagcaggtggattgcttgagcccaggagtttgagcccagcctggccaacatggcaaaatcccctaactaccaaaaaagaaaaagaaaaagaaaaaatagcctgtagtcccagctacttgggaagctgaggtgggaggatagattgagcccaggaggcggaggttgcaatgagctgagatcataccactgtactccagcctggaaaaaaagaaagaaagaaagaaagaaagaaacaaagaaacattataatgtgctactttggatgcatctctaaatrtactttttgtattgagattcacacaagccaaatattttttttctcatgagcattatagcatggcaaataaa

SEQ ID NO: 899955 - DNA, 624 bp, Homo sapiens
gtgtatctctgagggtgttgccaaagagattaacatttgaatcagtaaactaagagaggcagacccaacctcamtgtgggtgggcaccatctaatcaactgtcagagtggctagaataaagcatgaagaaggtgggagaagccgacttgctgagtcttccagtcaccatctttctgctgtgctggatgcttcatgcccttgaacatcagactccaagttcttcagcttttggactcttggacttacaccagtggtttgccaggggctctcaggccttcaaccacagactgaaggctgcactgtcagcttccctacttttgaggttttgggactcagactggtttccttgctcctcagcttgcagatggcctattgtaggacttcaccttgtgtcatgtgagtcaattctcctaataaactccccttcatatatacatgtctcctattagttctgtccctctagagaacactgactaatacatccctctactcaaaaactacagtgcaaaacaagaaagctgtactgtccacctccactattcacctgtgcccacaggtaattcagtcaactcttttatgcatgtccttctaatactctttccttacattctcataggtgtatat

SEQ ID NO: 899956 - DNA, 724 bp, Homo sapiens
ttttcctatttccaccttaaatccatttatcatttctgaagccrtagttctaattgtaaaactaataatttgccctatgtgctcaactcttattttttataagatatcttacttttacttatatttaagccctggtataaagtttagtgtgcttttcccacctaatacctatttaaaatatgtaactattaaagtttggaaaatgttcatgagtcctgttaactcatgtacaataccagtagtatagatttcacctttggggaacattgtcttcattcattcatttatttatttattcagcatgtgcctgttataggtataactaaagtatttcacattccaatggcatggctctttacatatcccaaaggaataaaaagatttaacataatttgaagggaatgcaccaatcaagcaaaagaagagaatgaactttgagagtcatttgaagcacgtctgctatcatatagatatgattattccatctcttggaaaaacggttatggaaaaagaaaagtttccaggaaaccagttaccaatgactcatgaattccttttcaggttgtcagctttctcatttaatgatgccctacctagtggtcgattttataattcagtcagactctctgtgaacaggcaatctcagaaagtacaaacccctagcccgatcatgcatttgcaaagaagaaggttgtgccaggacaactggaacacacatcttatt

SEQ ID NO: 899957 - DNA, 579 bp, Homo sapiens
tactatcaactttccttttctattttaccctaaccccaaaaccaatctcaaatcaaaaaataaatctttgcacatacagtacattcctctgattttgcaagcttccactggaaagtttcttttctgcagccatattcctgtttgagggagttcctgttttcataggagaaaaactcagtgttggccatgagtatgcagtgagaggcaaatgtagacatagaagccactgtgctctgcctcaaacagaatggctccatgccccatgcccccaaaactagatctttatctatgcacagaaaggtgtcagcatcagccagcctccccatctactaacatgtacttgtctgtaggttggaaccttgatgtaaccatctagagtgtttgatccaaaaggattctagaaatctcacgagatcctctgtttcttcttttactacaacctgctacagactctgaagctgttgttgtggtgtgtgtgttgagggatgtctagagtaaacaacatatcaaggccaaacatttattcaytcattgttcagatgtgtaaggaacacctaccatgagccagtgtctttgctg

SEQ ID NO: 899958 - DNA, 569 bp, Homo sapiens
cttttaacttctccatgaactccagattgctttgtctacatttgcttggatayactaaaggactattaaatattacatatacaaaaccaaactcctggtttcaattcacaaagcttcttttctcctagcatttaacatttcaataattattaaattatttcagttgttcagataaaaaaaatcagaactactctaaagtagatttttttttttcctctcatacattcaatgtatcaacacatcctcatgggtctctgtgatggttaatttcatgtgttctcttggctaggttatggtggccagttgtttgaccaaagaacaaaatagatgttgaaggtatttttttttaaagataattaacattaacatcagtagacagtgaacaaagcagattaccctctctaatgtgcatgggtcttcccactagctgactgggggccttccaatcagttgaaggccttaagactgaagactgaagtttcctgaaaaagaagaaattcttctcaagaattcttgactgcaacatgggaaacttatatgagtctctagtctgctgctctgtggaattt

SEQ ID NO: 899959 - DNA, 612 bp, Homo sapiens
ttatttgagcactttgaatacatcatcccactctctcttggtcattagatttctgctgagaggtctggtgttagatatattgggacttctctatatgttgtttgcttcttttctgttgctgcttgcaggatcctctctttgtctttgcctttgactgtttgattataatatatcattgggcattgttatttgaatttaatctgactggggagccttggccttcttgtacctggatatttatatctttttccaggtttggaaaaattctagtattgtttctttaaataagttttctctcattttctctttttctactgtctctggaatagcaatgacctatacatttgcttttttgatgttaacccctaaatcccataagctttctttattccttttcattctttttctatttttctctctttcactgtttatttttaagtaactggtcttcacattcacatattctttcctcttattgatcaattctcttgtcgaggcattctattgcatttcttattttattcattgtgtattttagccccagtatttctatttatttattttttattacttaaatctctgtwaaatttctctgataagtttctgaattat

SEQ ID NO: 899960 - DNA, 612 bp, Homo sapiens
ccctgtaagaaatttgctgtaattttatctttgtccctctgtatgtaatgtcttttttcttccggatagtattaagattttctctttatcgctggttttgagcaatttgtgtaataataggataattatctcttcttgataaattgacctctttaagaatggtaaaggtaaaataaggttttattttactctggtattactctttaggaaatataatcttaaagtttgtgctttctcttgtttttttctttatgtttattggcttgagttttattgagcttcttagaactcaattgtcataaaatttgggaaagtgttggccaatatttcttcaaatattttttatacagccatccctttcttctctcctttggagactttatttatattaagcagcttgaagttgtcattatctcactatttattgacattctgttcagttttgtttattctcttttccctttgtgttccattttagatcgtttctwttttcatatcttcaagttcattaatcttttcttctgcaatgtctattctgaaattattcccaggcaaagtattttttattcctcattgtagttttcacctttggaagttcagtttgagtcttta

SEQ ID NO: 899961 - DNA, 655 bp, Homo sapiens
tagcactccttcagtaagccctgaatttgcgtacttyttgtgccttggagatggttataaggggctttttgtcccaaagaataacttttggtctcagcatgctttgcctacggtatgccagagctaatccagatttctttcaggaaaaaaatttaatagataatcaataaagataatttttcacaggcaagaaaaaatggctctattcatgaccaaataataaccactccacttttgcatgacactttaacaccataaaaacactttggcagatattgttttctcattttgcttttaccaaacctcaacaactggatcaatatggcgccatctactcaacagataaggaaactgagtcacaggaatggtaaacagtttgatcatgttcacacagctgatgaatggtagagccatgtatagaaaccaggtctccactcaaggagagaaagagagaagtctcagaagcaaaacataagacatcaaagaagcaaagttgacgcttacatggacatttgaaggtagccccaggcagggatgctgggaggtctagtgaggcctcagcatatagatatacatacttgtattttaatggtctggttgctttacacacacacacacacacacacacacacactttttaatacacttacaaaat

SEQ ID NO: 899962 - DNA, 587 bp, Homo sapiens
tgtgtgctgggacaaaccagtactgttgatggaaggtcacaggtcaccacagggactcatttgtcctaatttcatgtcccaggaattctcaatmtccctgaattcagttacaggcttttctaatttctataccactcagccagacaatttgacctttaacaactattccttgtctccctttgcttttcctctggtctggatttctaatcccttccccatcacaagtcagttaatgacatcaccttgcatccattctccccaagaggtttggggagagtcaggggttctaaagccttggtgcatatgggttcatcttgttgtcctccttgatacagaacactgggtgggatgatggctccaggatcactgctgtgtgtacagtttcattctagtcttctacctgcccacattccagttttcactcttatccaaaacagccaaaggcctggattcccattacctgccacttccctgtctcgatggcatcttctatttctgaaccaagtccagccagagctcatttttgttcacctcacctctcagaccagatagctcagcaggcaatccttaagcataggctcaagttg

SEQ ID NO: 899963 - DNA, 559 bp, Homo sapiens
gaattcagaatacagaagtagctggcccttttckcacttctctcaaaagctggttgagtgggtagaaggtgagggagacagaggcaggacctatatacataacagatgattgaaagaaaaggggcaatgtcactggtgaaatcttcctttttaaaattttctccaggaagtagacagcaagaaagcagtgatgaatatgatagttcaattctttcatgcactagatgaccatatatctaagtttgccctaaacattttcagcttatgtttgtcgtcccaggataattattagcagtattctattttgttctcgaaagtgtccttatttagacagtaaactatatagtcatcccattgatgtaggggtatgttaagctgattaacaagactagatagattttgacatttattcagtttactgcctaaagattttaaatagcttttcaaagaaatagtttctcaatcaaaatgagaaattgtaaagattaaatatgtattccaaaccctaccagtcatttaataaagcagcaaacaaaagtcatgaaaatgccagcccaat

SEQ ID NO: 899964 - DNA, 594 bp, Homo sapiens
cactgtttgaacacagtaaacaagtttgcatgcaaaataataggaaatgttttaatctgaaagccatcgtaacctcatctccaaaattttttcagagaaaatgaccaaagagttgcctacagtgaggtgactaaaaataaaaactgtagactgaacttcaccaacttcaaaaattatacaacagtaaaaattttctccaaattgtaatatcagtatgaaaaataaacacttcaaatgtctaatcaacagagtacattttattatttttcaacatttaacatttacacttaaaaataggagtctgtataaaaatgtaacgtgctgtatcatagaaaattaaatttagaatccttacttaccactaactctcttttaaatataacttataagatatattttgtaacaaattttatgcttgccacactttgtgtaagaatccaataagattcttcttttacaaacaaagaaaaacaatgttaactgatttaattattccacgtgtggacagtgtatgtctcttattttaatyaactaatctgaaagttatattggcaagcaaattctccacttaaaatccattttttagcacattaa

SEQ ID NO: 899965 - DNA, 606 bp, Homo sapiens
gtagatgcatagactctagacaattgataacccccagtgggaactgtttctcctgaactcaggaggaagggccaactttgttttttttgtttttttttttttagacacgtgtttaggctagataggtaagacaaagaactccctagatgagccaacactaggcaggaaaccagaccagatggtaaaataactagtacccagggtgagaataccagaagaaattgtgaaaaattagaataaatcatctcccatattagaggagctgaaatgggcagcacaattcagggggctccagggtgcttttgtgctacctagtgtactgttctcaggacactttgaaacttgcagtatgtttggctccttcagctttgcctaggcatttagtgcagcttgcatccagatgactattttttgggtaaaggcctgtgtttaaaaatcactggtgtccaggggtttccatttcttggtaatgargaccactgcagtgtgttgggggtgggggtggctttcagtgtagatctgccagtccctcttcaggacacactgaatcacctataacttagtgtaagcctgagaggagtctacactgtggaagccataaggaag

SEQ ID NO: 899966 - DNA, 469 bp, Homo sapiens
tgtatagaaatgctacattcctgtatgtttgtatcctgcaacatgactgaactcattagttttaacagtggagtctttagggttttctatatgatgtctgcaaacaacggcaacattactttacctttctgatttggatgcatttgattcttcttggccccttgctctggctaggacttccactactgcactgaacaaaagtagtgaagcaactgtcttgttgcttgatcctagaggaagagtgttcagctttccactattgagtatgatgttagttgtgggcttgcaatatatggccttttgtgttcaaaacacttctatacctaattcccttttctccatgaaaagattaactgttaaacrccctttctgcatctgatgatcgtagcatgtataaatcaaggtagttcaatgtaagtctaaatggcttggaccacctgaaagacttttctctgccttggtcaaaggt

SEQ ID NO: 899967 - DNA, 602 bp, Homo sapiens
ctctgatcagtcagttactcctgaagagtgactctcaaaatcccgcartggttcacatggattgattaaaaaaagcataagtggcccccacttttttttttttttatttcttggttcccaaaccattagttttcctgctgggcctgcagtaccatggaacagcctgcctgatgtatgtactgcatcctatatgagggtatcctaagtgtgaagcctttttgacccagtaactagtgcttctgccaggcttcctgaggctgtctgaacattctacaaggctacttctgaatggtcttgtgtaataatgacggatgacctcctccaagacccagatcccacttggtatctttgtgacctgagtcactttgagaactgaggttcacaatcttgcccaggtgggaacactgagtcacatggcaaaaattgaagttcctgagaaatttgggtcagttggggcctcagttggccagcttctgagatgcgcttctctggagtagtagtgactgacagtcagagtcctaaagagacttttggggcatgcaggtgtgggtggggttgggaggcagtttttgggaaggggaatgagttaagctgaaaggaaa

SEQ ID NO: 899968 - DNA, 593 bp, Homo sapiens
agtcaaagttcttaaagcacttcatgatttttctgcatccttgatggctaaagtcagcatgttactgmatgaggaatttataggcaaactacttggccagggaaatttagctgaggtgtcattctaggtttagaatgtagttcacctgaattgatctagtgttctttcagacaccactgaatttacagaagcaaaacactcactacacttctcaggtcttggaaaatgctaccagtacagagaaagatgatagaattcccaaataccctctaccccctggtggcaagatggatatctggcatctccttgcccccaaccagtctggctctgttgacatcctctctgattcagtaatgctagttcttggactctatgtagaccgtagataagaccatagtgggcattgcttctcctggattcagaaggtagaattatctctggctttctagacacttgtgttttaatgggacagatgaaagaattccacaggtggagtcaacacgagggaatacaccatgccagtgtaataagaattatctagggccataaagggctgcaacatgttggcttgtacctagaagttagaggaaacc

SEQ ID NO: 899969 - DNA, 635 bp, Homo sapiens
ctctactaggctgagggcagttctccagaagaagtggcttgggaaccattagcagccagcagtcttagctgctgggtggtaaatgccctgactcagtaaaagggcatcgcatgaagcaccaactattttcatcatacatgctggaacaacttgtcccactgatggcaagaagggggtgtgattgtgtaccagcatactctggttgttgccaaatctgtgacttggtgagtatgtggctgagcatgttgccacatgcagcaggtcctcttcacatctgagaagggcagtgcacaccagactctgtgaagctcagcatgtttgtggtgccaaatatggagacggaagtatcatggaaatccagaaaggagaagtggaaggaactggctggcaggatggcagtgacatgggcatctgtcactcagcatagcagggaccctgggacctcaccaagtagaatttaagagcgcaagaatcatattagagaatggtaaaagctaatcacagagctggtaactcttcttcccttacctaattctgttgagagcagtaagcccagccacaactacttgttttgtgatactttgtagctcagggtgggcstgactccaatttctacttacatcttatgggtctga

SEQ ID NO: 899970 - DNA, 587 bp, Homo sapiens
catgtcaaacaatgctctgtccaaatatactttcttctataacatttttgcccccctctgggagggaactaagaccaggttttgtaggaaaagstaagagctttatgcaagtttcacacatagtgctgatgtaccttcagaatagtgttgcatgagatgagggagctcctttgacacaggttagagcatggaaggcatcatccccatgatgggtgggtttggggcatcgtgaatctccctagtgatcagggagaagctccctttccctgttcaagattgtcaacaggggctggtggctcagtgaagctctatgctctgcccttaggtggtagaatggatcttccttggaaccagtctgaataggaggatacaggagaagacatagcccaaggcctcttttgtagctccctttgcttttgcctgagctattgctgccagcccttatatttagtcctgttccatattttgagtatcagggaccctttggtatagacacagaactacagatagtggcagtgtataaaatgcaagtgttagtgccttcatcattttgatcgcatgtctcctcgattgttggactcctataa

SEQ ID NO: 899971 - DNA, 634 bp, Homo sapiens
acagcaagaaagtcaaagaaaaggctccacaaaggctatgtgggccacattaaagcgcaagatttatttwcattatattttttcttagcagaacccatcttatctggttagacaggcttctttagaaccagattttgttctttgtgacatttggagttaatatgaggaaatgctctttgtattgcccagtattgaaaatgtcagtaaacaaacgcagcagtcagagaagggggggttctaacaaaagacattgtttcttgatgcaggaggtaacaagagtatttagaacaaaggttttctcaaaataggctttttagcaaactttggagccctgctctggtaccccacccgcttccattctgctgaaacagcgatgttgatgaaaatacttattattttaaccagccccccaaacttaccaacacaaacacactcttaatttcagggctgacagcagggctgggaaggtccttataggatcgcaaaacaactcgggcagttgagggcttccggcagccagctaacaaaaatatactctcagaggatgcagctcagggaggcgtgggacctgcacagcagagagcctgaaagctggcctttccgttttttacagagcttcacccttcacatctgg

SEQ ID NO: 899972 - DNA, 696 bp, Homo sapiens
ctccaccaagaaagtcatttkatatataacaatccaggcacattgaaaataaaacaaaacaaaacaaaaaggtatcatgcaaacatcaatcaaaagaaaggaggaatgactatactaatattggataaagtgaaccttacaggcaaagaaattactagagacagaaaggagcattataaaagggtaaatcttccaagaggacatggacatggcaattctaaatatgtatgaccacaaaaaacatatctgcaaaatatgtgaaacaaaaaaatgatataactgaaaaaaattttaatgcacaattgtatttgagttttcaacacccaggtcttcaaaattaatagaatatttaagtggaaaaatcaggaaggatatagaagatcccaacaacaccataagccaacaagataaatcagcgtttacagaattctcctcccaacaacaacaggttataaatctttctcaagtggccatggagtgtatatcaatataaaaccatatcttggatcataaaacatacctcaaaaatttttaaagaattgaaatcatacagagtatgttccctgacaacaatggaataaaactagaatcagtaatagaaaataagaagaaaatctccacacacttgaaaagtaaacaacactcttctaaataatccatgggtcaaagaaattctaaaggaaaaaatcaaaatat

SEQ ID NO: 899973 - DNA, 626 bp, Homo sapiens
cagtgtttgacctggacttagaagaaagctgtgggtctggtatactccatgcttatacattgggtctgtgtggactctttggaggtagctgtagtgtagtggtaagtaagtgcagaatcaggattcctgaggatgaatcctgttcacttagctttatgatcaatggctggctaacctctctcagttttagtttttatagctgtaaaatccccacataggatttttgtgaagttttaataagttaatgaatgggatttgttaagcaaatacaaatagtacaaatttgtgaaataaaacaatttatttttgtttttacaaatttaaacaaatacaatttgttaagcaaatgctggctcgtgtgatcctgtgtttgaggaaataagggaagtggtatttcacttccctgtgcttcttgaagcacagagtcataaggagtaagtaatagtaagtcctgagagagtatcttgcaaataccaagtacttgacatatgaataaatgaatgaatatcctggacagagttacttatcatgataatactgaaccaaaaataaaaacagtattgtcctgtcagagaggaaaaagttgcttgctagagagtctgrcgagtagataacacaggcttgtt

SEQ ID NO: 899974 - DNA, 611 bp, Homo sapiens
tgttcccttcacaccctgaaattctgctctctagccctcactacaaggacaattaaacgaaatgaaacrtattttatgtaattatttaaatatatctcttctgttgtttaagatctttggagaaagaactgagtcagtattttatcctgaaatctttcataaaacattttcatgcaaagttgatgagatttttggaatcaaatcctttcaaatgttttttttttttttttttaatgtaacattgggtgtttgtttctgtcagttaagctgaaggaatgagacagtctctgtgcctgttcttatctgagctcgcatggtaattctcatggtcaaaaagagaagtatgcctttctgacctctttttttttccatgatgatttccatttctggaaagcgaagattctgcaaatttacatccttcccttttagggtgcttgacatattgggtccttctacctaactccatgatctcatatgatctcaatttaaagttgatctgcattaaaagctcatgaaatactgtaatctgaagttaagaaagaactactcacatatccacacatccatccatccatccatcctccatccttcttggctcttctgctcatgga

SEQ ID NO: 899975 - DNA, 567 bp, Homo sapiens
aggcaggtctttttgttctattcaggtcttcaactsattagatgaggcctacccacatgatggagggcagtctgctttactcaggtccactgactttaatgttaatttcattcaaaaacactcacagaatatccagaataatgtttgaccaactatctgaacattctgtgacccagccaagttgacacataaaatgaaccatcatgcccccctaattttgacatacccatgtctccattatctctccaggcatatcactaaactctccacacaaaccaaaatctattcatgtaaagttttaaaactgcttgccatatagcatacatgtaaagaactagaaaaggtattttataagacccaacaaaaatgaggagtatgaaatatttttaaagattgatgcctacattttaaaaaattaatatgacatacatcaaatcaaagatcttctatttcttcattgtttgttcttatttaaaatagctcatcatttctaaaatagtattctttaaagttgaaatatcaatattggtatctgtgaatctgggaagaatttatttagaaacctgt

SEQ ID NO: 899976 - DNA, 606 bp, Homo sapiens
gatatttggtgttaaatgttttgctttttatcagagatcatttatttgatacactttcctaagtatgatattaagtagaccttcacattaacttttgggaaatgctgtcagtttctgctactaaaatgtatgtatctttccttccattccttatctctggttagctaacttacttatgccaaggtgctaacagaatcatcccttacttttccccatgacatttactttaaaaaaaaattgagatctttctaactttttgatgtgggtgttcagtgctataaatctctttcttaacactccttagctgtgccccagagattctggtatgttgtgtctttgctctcattaatttcaaagaatgtcttgatttctgccttaatttcattatttacccaaaagtcattcaggagaaagttgtttaatttctgtgtaatattatggtttttgagcaattttcttggccttgacttctatttttattgagctgtggtccaagagtgtgggtggtatgatttcagttttttgagtttgatgaaaattgtttcatgtccgattgcagggtaaattttagartatgtgccatgtggcaatgaaaagaatgtatat

SEQ ID NO: 899977 - DNA, 600 bp, Homo sapiens
aagaaagaaaattgtatgcaaaaaaaaaaagaatttctatcatcttgagtaacttgctacagcatcatctagaaaattcaaaatcacattcaggtatttaatcactcccatgttcagcccattatttgagaccctgatccaaggctcttgctttgtccaggtcagttgtcactcacacaaattaattatgtatttgaagaatatttatgaatacgtataaatgatcacacatatatgtgaaaaaagcaagcaaaaagttgcatatgagttataatttcattttggatgaaaaagaaaaagcaccccagtagataaacatgtatttgcaaataaaaatattaggaggaaatgtgatatggtgttataataatttgagagttccttttcttctatatactattctatattttataattctataaatataaccatctataaattttataatcaaaaaaagtaaatatctaatataacttaaaatcaaagaaagatgactgtaaaaaatctgctttgtataatatatttctaattattgttttattgagtttaagaacatatgggtttaagaagtatggtmatgctattttcaaataaattttt

SEQ ID NO: 899978 - DNA, 588 bp, Homo sapiens
caatctttcaatggcttctggctgccttcaggatgaggttcaaacctcacaccttgcataaaaggcttttgtgtcttctagctataacctttttcaccctgatagttcttcatacaaaacagaaaatgaatattcctgtccatttttatcctatcatcttcagattatcactttaaatttatttttcactttatatgtttatctacctatatctataagaaagacttcgataactcgaataattttttttagccttaaactgaatatttcctcatgccactggtcattcttctaaacactatatttaaagtctgtttagagttaactcccactaaattatgatgattaataaatttcatgatatactaatttaaggacatagatagacaaagatatagatagaacttctaactattcacttttgtagataatgctgtggcatgtatcctttcataagaaagtcttttttgtttttttgagacagagtctcattctgttgctcaggctggagtgcagtggtacagtcatggctaattgcaacctcgaactccygggcttaggcgatcctcctgcctcagcctcctgagt

SEQ ID NO: 899979 - DNA, 535 bp, Homo sapiens
aatcagctgttctgttggttgaaaaatggacttcactgcggacttgaattattttccagactgacccatgtgatgatggttctaacaaccatcatgttaaatgttttggattaagaagtttcctttcccctctttctgtgtctatcctaacatttttcatgacaagaaaagaaacaggcttggttaacagagttccattttatttaaaatatattgtattaaaccctgaagaggggaccttatttttatataataatcagttaattccaagtttggtttaggcttgctgcttcccttcctgcaactttcttcatggtaggaatatactctggagagatgtccttgtgatagtctatagtcatatacagaaaaacaactcaaatccctcaataacctaacaacatcacaggcttaccttgcaaaggggaaatgggactatctgaaatccaagttcaccagtcatatcatcaakagaagagtgagaaattgtaaaaatccaagaaatcctaactgtgaaatttccagttactgtgac

SEQ ID NO: 899980 - DNA, 586 bp, Homo sapiens
aatcagtgtaaatggataaaagaagaattccaatggctggacacagtttggggaattccaaaaattaaattgtaagggagatgaaaatgaattaacaaagaatgcaaaaagtagtcattcagaaaaaagataaagacagaagagtatgttattctggaagccaagtgaagagtatgtatcaaggagaaggaagtgatcagccatgttaaagcacttggtaggtcatgtaaaatgaggactgggaaccaactattgaatttagcaacatgaacgtgatttatgaccttgacaagaaaagtcacagtagtcagtggagaggaaagccttactgaaggggacaagaaagggtacaaggagggcaaaatggagacatgaatgtagacaaccctattaaagagatttgctataaaattagacagaaaattagagtagtcattgaagggagaagtggggtcaagagaaatttctttttaaaacaagagaaacaacagcatgtttgtatgatgagcaagtagggaaagggagaaratgagaattcaggagagagaaaggaagattgccacatccttgagtagccaaaggaggt

SEQ ID NO: 899981 - DNA, 673 bp, Homo sapiens
ttcatttaaatataattgagaaatgatttgaataytatatatgtatatgtactatatatgcatattaatactatatatgtatatatagtactataggaatactacatatgtatatgtacatgtactatgtatgtatatatatgttcagccattctgataagttatcatccatactgctatatttagcttctttctgggaatatagctttagcaattcagaaatggactgcaaacctctgacttccagataggtcactgtcagttaaaaagtgcatagtataaatacacctcagtttatgaaaagatatacgtttaactcacagatctcactgaacagtagatatttatagaaaacaggcaaaggaaacccagccatgactagatgcaaatattccagtttacagtttctagtataatctctattaatatcttccacaatgagatcaattttaagagcatctaataagaatttaccagtcagcctcgcatgccttgactctttcgctagtcacacaattgtttgtttatcattgaaggaaactcacttttcttatgaagtgtggtgctttccttaggagaggggttttagatttgcagatgctatttatgtcataaatgtacaagcaagcacagaaacaagcaagaaatgactgccttttatgttgatgtaaca

SEQ ID NO: 899982 - DNA, 615 bp, Homo sapiens
aaaagaatgctttttgcaggttttgggagacattagtaggagcagcgatgaagttagcagtggacttttcgccgttgttggtgactgctgggatatgttttatcccttcattctgatttggtgttctttttaagattctctgagatgcctgttataatcagtaagtgaggtgaattgactagggcgttttgagcgtcagtgatgagcaacgcaagagcatcaggactgtctttttgttcctctattgagagaagcccttgagtccaatatggagtgtaaaacattcattttaagtctttctttttaattgtaaattcctttaggaacataaaagtgaatatagtctgttatcaataaataacattttgatatgattatctttcctttttagaatacgccagacaccttttgaaagctaatttttggtgaagaaatggattcggttacataagagtgcaacttcagactgaagataggccaaggtcgtcactgatctcaagatttcaaccttgaccatgggcagtgaccagattgaaaggggagcaagttcggcagtgggagagttgacygtgtcaccccctgcattgtgctgccatttggccagcctgtccaagg

SEQ ID NO: 899983 - DNA, 584 bp, Homo sapiens
aatcaattcttcctcaaccccaggatttttcttcaagacccaattgtacttaaggacaaactatcacatcagaagcacagtgtttctattcagtattgtcctagatctgttgtgtgttgtataaacagacttaacttctctttgctttttttcaaatagaattggctgaggttgggcaggaatatttgcatacaatttcaagtgtgtaagagatagtttttggatgaaagatatttaaggaagtcatgtggcatttagtgagcatttactatgtgctgggcaatgcgctacaacattttctactcattgtctcattaaatttttaaaataattttaagagggagatcaaatgatccccgcttaatagactgggaagctgaggctgagggttgaagtccctagcccaagatctcccagcaggagagtgatggtactgagattggtctccacgtgtgattatatggagctggcagacatagcactataaggcactgctgccttcacccgggaagctttccctgatctcytatctgcgctctcagtgccatgtggctcccccgttccaggatgtatgacactatgtt

SEQ ID NO: 899984 - DNA, 578 bp, Homo sapiens
gcatgtgcaaaggcccagaaataagagggggcacagcacattgagggaattgagagaagagcagcaggggctgggacatagggagcttgcagagaagagactggggtaggaaagaggcagsaccctcatggtacaggattctttaagccacttttaatagtttgaacttgatcttggggaaatggggagctaataaagggttttaagctcagaagtgagacaatcagacttgagtatttgtgaggtccctagtgtggagagcatattcctgggataagtctgaaggtggggaaactgaaagggggctgttgtagctgctgaggtaaaagataatggtattctgataatcctagtgagctaagtagtatgggtgctcctggggattgggtttacgagtgctaaagcccaccttgaccctgaccatcactcaggcagcccttgtgccaggcctgtgctaattaataatttcatttaatgcttgtataatcttgccaagtatgttttgcctccacctgccaaaaagagacaaggatctacctgttgtctttctctggggggcccggtgacaaccaaaataa

SEQ ID NO: 899985 - DNA, 578 bp, Homo sapiens
gcatgtgcaaaggcccagaaataagagggggcacagcacattgagggaattgagagaagagcagcaggggctgggacatagggagcttgcagagaagagactggggtaggaaagaggcaggaccctcatggtacaggattctttaagccacttttaatagtttgaacttgatcttggggaaatggggagctaataaagggttttaagctcagaagtgagacaatcagacttgagtatttgtgaggtccctagtgtggagagcatattcctgggataagtctgaaggtggggaaactgaaagggggctgttgtagctgctgaggtaaaagataatggtattctgataatcctagtgagctaagtagtatgggtgctcctggggattgggtttacgagtgctaaagcccaccttgaccctgaccatcactcaggcagcccttgtgccaggcctgtgctarttaataatttcatttaatgcttgtataatcttgccaagtatgttttgcctccacctgccaaaaagagacaaggatctacctgttgtctttctctggggggcccggtgacaaccaaaataa

SEQ ID NO: 899986 - DNA, 575 bp, Homo sapiens
ttaagagttaggcattcattgtagtcctctcagtctgggcctgtttgtacccgcccttcttggaaggctttccagatattcaaaagaasttgggttttattccaaaagcaatggcaacaaaagccaaaactgagaaatgggatctaattaaactaaagagtttctgcgcagaaaaagaaactaccatcagagtgaacaggcaacctacagaatgggagaaaatttttactatctacccatctgacaaagggctaatacccagaatctacaaagaacttaaacaaatttacaagaaaacatcaaacaaccccatcaaaaagtgggcaaaagttatgaacagacacttctcaaaagaagacatttatgtagccaacagacacataaaaaaaatgctcatcatcactggtcatcagagaaatgcaaatcaaaaccacaatgagataccacctcacaccagttagaatggcgatcattaaaaagtcaggaaacaacaggtgctggagaggatgtggagaaatagaaacgcttttacactgttggtgggaccataaactagttcagacattgtggaagac

SEQ ID NO: 899987 - DNA, 600 bp, Homo sapiens
gcaagtcccctgcccctgaaacatatctcaaatgtcctcacctcatacccctttcatttatcctacactgcccgacaccccaggttccctgagatttgaaagcactttccttttctatttctaccacaactgtaaaactagaaggcttcaaggagaccaagagagagaacaaaagagccagagttactgtctgcccccaaatcatttgaggagaaattcagacagtagcttggaaagatgaaaaggatccactggcttttggtgagacagaacaaaagaaatcaatttccaaggatagttacagtctcttctgagagcccccacattcttgatatctgctcacccttgatatctgactgagttcctcatcctcttccatcccccagagaatgcctcatcaccctggcctgccttcatcaagaatcttgttaggttggtttagccagaatcccatttacctctgatgtgtcatcttagtaattttccatccaccaacctctacattactctttgkctatacaatcccacttgcccatgttgtattcagagttgagcccaatcccactccccagctgcagtacccctatcatggtggtccta

SEQ ID NO: 899988 - DNA, 600 bp, Homo sapiens
gcaagtcccctgcccctgaaacatatctcaaatgtcctcacctcatacccctttcatttatcctacactgcccgacaccccaggttccctgagatttgaaagcactttccttttctatttctaccacaactgtaaaactagaaggcttcaaggagaccaagagagagaacaaaagagccagagttactgtctgcccccaaatcatttgaggagaaattcagacagtagcttggaaagatgaaaaggatccactggcttttggtgagacagaacaaaagaaatcaatttccaaggatagttacagtctcttctgagagcccccacattcttgatatctgctcacccttgatatctgactgagttcctcatcctcttccatcccccagagaatgcctcatcaccctggcctgccttcatcaagaatcttgttaggttggtttagccagaatcccatttacctctgatgtgtcatcttagtaattttccatccaccaacctctacattactctttgtctatacaatcccacttgcmcatgttgtattcagagttgagcccaatcccactccccagctgcagtacccctatcatggtggtccta

SEQ ID NO: 899989 - DNA, 565 bp, Homo sapiens
caggctaaggctggtgcaatggactttattttctaccaataggagctacccacagacacgaggcctccccaaccctgtagttccatcttgacttgcaaaacctgagataacttgacttcacaataggaaattctgccttccaatgtttcagcttggctcttcatccccaaatgttaaaactgcatcaactagggattgaaccagattttgtgacttcactagggttcttgaagttctcaaatggagagatcgatactaatttctcaatgaccacggtgaagcaaaataacatttttaaccttctggcaaattcagaattttctaacagagagaccacatcatttgttttatacaacactccaccaaatctacttctgtcttataaagatagaaagaatgtgaggtgttcctgaacacaccagtcactgctcaagtgtccacctgctttgatgatttagaactatcctgtgaaaggcacactctagtatacatgagaagagcaagagataggatttggcctgaagccagccrgaaaatgtgttagttgcattccacagtctgggtc

SEQ ID NO: 899990 - DNA, 623 bp, Homo sapiens
agatggggccatgttggccaggattgtctcaaactcctgacctcaggtgatccacctgccttggcctcccaaagtgctgggattacaggyatgagccaccatgcttggcccacattttcaactgataaatatataaccttgttttacatgtttctatttacagaaaactcatgtaatacaccattgatgcattaacactgagcttatggccaatagcactatagcttccatctatacacacattttctcccttatcatacacacattttctccctaagacacatcacagccttcttactcttaggaacactacacagcactttagcactctgattgggggccattttaatgacaaaatcatcaacagaaagtcaaaaatgggaaaaatgtggcactaaattgaccactaaaagaaaacttgtttacagaatgagagctgaaacaaaatggaagagttcaatctcatttgggaatgtgaacttctggtaacaaatttttcactggacttttcacatctccagtgactgtaaaagtgctgtatcaatttggggattacatatcaattttggagagtaggtgaattcataaatacagaattcaagaataatattgatgaactatgt

SEQ ID NO: 899991 - DNA, 623 bp, Homo sapiens
agatggggccatgttggccaggattgtctcaaactcctgacctcaggtgatccacctgccttggcctcccaaagtgctgggattacaggcrtgagccaccatgcttggcccacattttcaactgataaatatataaccttgttttacatgtttctatttacagaaaactcatgtaatacaccattgatgcattaacactgagcttatggccaatagcactatagcttccatctatacacacattttctcccttatcatacacacattttctccctaagacacatcacagccttcttactcttaggaacactacacagcactttagcactctgattgggggccattttaatgacaaaatcatcaacagaaagtcaaaaatgggaaaaatgtggcactaaattgaccactaaaagaaaacttgtttacagaatgagagctgaaacaaaatggaagagttcaatctcatttgggaatgtgaacttctggtaacaaatttttcactggacttttcacatctccagtgactgtaaaagtgctgtatcaatttggggattacatatcaattttggagagtaggtgaattcataaatacagaattcaagaataatattgatgaactatgt

SEQ ID NO: 899992 - DNA, 609 bp, Homo sapiens
tgagtcaacatacgcaaaatgcttaraaaaatatctggtgtatagtggatatatatgttaatgttattgagatttcatttacttttggattgcaaaaggaactgaaaagacccaattcttactctatgtcaacatgtaggaataagtaaacaaaatatggtttgaattttgtcctgaatgcattaacttgaatctaactaaaacctggttactatattagaaacaattttctctttgatttgcccaggagatttgttttccagttatgtctaaaataatactctttctttttattcttttcagtatatatttttattgtttttcatttaatagtgatgcatagtgtatcttttctgatttactttaaatgtgaaagaaaattctaagatgttaatattattattactgccattgatatatcccttataggaattaattaatagaaatagaatcaaagtaaatttagttatataatgcttagcatgtattatattctcaaaattctgtattcagtttcagacatgttcaaggctgaatatatgatctgacaataatctgcttatatagataaaaacatcatttgagtggattaatttattaattcaactg

SEQ ID NO: 899993 - DNA, 575 bp, Homo sapiens
agtgcggctggagcagaggggaccagcaaaaggaaagatcgtggggtcagaaaggcattatagaagtaatgctgtagtgtcttgtagccatggtgaaggctttgatgtttaagctatataaggcagaagtcaaaggaaggtttttggacacagaacagattgcaggaacaaggatgcagtcttattacctttgataactttcctgagtaactgattcatcataagtgctcataaatactagttgaataattatctattatcaaggtcatttgcaatataactaccattcttagagtatattttagttagcctatgtccttttgtaattgccatatttagaaatagaccaaggtacccaagtttaatctgacagggtgaagagaaatacatattccatgatgttccaaatcagtgaattccagagattttactttttcttttggcagacaaagacactattgaccattacagttaataaacactcctyttctacagtctcatacttgggcaattggagcaggcgagagaaatccaagtaaaggagcttacatttaccttttccaaatttatattat

SEQ ID NO: 899994 - DNA, 639 bp, Homo sapiens
attaccaatttcctctgcctgtcacctgactgctaagccacatacaatggggctttgttatggtagccgatacagtttggatgttttcctcctccaaatctcatgtcraaatgtgattcccaatgttggagctggggcctggtggggagacattggatcatggggatggatccctcatgaagggcttagtgccatccccttggcgatgagtgagttcttgctcagttatttcacatgagatcttgtttaaaagtctgggacctccccaccctctctctcttcctcctgttctcaccatgtgatatgcctgctcctgcttcaccatgactgtaagcttcctgaagcctcaccagaagcgtagcagatgttggcaccatgtttgtgtagcctatagaactatgagccaattaaaactcaataaattacacagtctcaggtaattctttatagtaatgcaagaacagcctaacacagcaacacccatatgtggcatcatatgctggttttgtcattagctagtttatgctacagaaacaagctcacccctcaaatatctgtttattagtatttaaaagctcattctttactcaaagtccaccataggtctaatgactttctatgacacctcccttccaagta

SEQ ID NO: 899995 - DNA, 599 bp, Homo sapiens
cttacatcccaccttaatataaacaataamcagttattactgagggctccctatgtgccaagcagtttcatgtatcatttcattcaatcttcaccacactttaatcattttataattgaggaaacttaatttataactgaagcaacttgccccaaattgcccaagggcagggatctcttatgatttggggtttcaccaccaagatataattagagataaggatgttatttagctaattaagtcaaatagacaaaacaaaccatttgcctcaattatctgaattttggctcaccattcttaaagtttggctcagaaattatactcttcttttttctaggaacagttttgttttgtttttggcttgggtaatctggcttattgcctcggttctctcatcagtgactaccacagtattgttctcagagcgatttcataaatatacatggagagaggaagtaagggagaaagacagagagaagaggagagaaggagggcagcagggagggaggaggatgcctctttgttagcaaacccactggacgtgtatgcccgagaatgaaggtctgcaccaaatgattgctaataaacctcatcacttt

SEQ ID NO: 899996 - DNA, 588 bp, Homo sapiens
cttaggctctagagagggagagagatgacatgtgaataaamaaggccattttggatgctgcgaatattacaaagaaaataaaacgggatgatgtgagagtgactggcaggactattttagacaggatggtcagggagacctctctgtgtcactagcattggagctgagaaatgaaccctaagaaggagccagccaggctaaaggctaaagaagcagtctcaggcagaaggaatggaacagaggctctgaatgaggctcaggaacaagactgaagagcttgagaaacagaaggcccatgtggacacagtatagggggaaaggaggaaagcagtagagatgcaggtgaggagaaagagatcacatagctctctgagtaaaactgagctcttctaaggtatccggcacttcatgtgtggcatgggtgcctggagggctctagcatcactttggcctaagagggtcagtcctagctggtctcacaagacctttcctctctaacatcccatagctcaagtccagtccatggatgagagacaatggaggggaaggttgttgtgactcagtaggataagctagaaaatgggaaca

SEQ ID NO: 899997 - DNA, 623 bp, Homo sapiens
aatgaaatttcataaagtgaaaaaagaaggacacataaatgatgtctgaagaattaattgccaaaagctctccaaacytgacaaaagacatcaagacacaaatttgagaagtccaatgtacccaaatgatgttaaattaaaaaaaagaatcgcaactaaccagaatattgcaaaattgctgaaaaccaaagacagtaactctgtacctggaagtggggcaaaggcagacagattactgtcaaaagatcaacaataaagcagacagctgacccttcacaagaaacaactaaattacatctttaaagtgctgacagagaataactgtgatgtagactacatatccaacaaaaacttttttccatagagaatgtaaaataaagacattttgatgcaaagaaaaagaaaaaaaattgtcaacaacagacccacactaatggaaatacagaatgatattattcacaaagaaggaaaattattccagatggaaactttgagataacaaatagaataaaaggtaataaaaattataaatatatgggtaaatataaataatgctgactgaataaaagagcagcaacaacaataataccatattgtcgactgtaaaaatataaaaattatgc

SEQ ID NO: 899998 - DNA, 468 bp, Homo sapiens
aatgtgtcttgtgggtcaagaaggaatttgatgtaatggctaagagccagactgacttggattcaaatccaggtgttaaatattagttctgtgcccatgggcaagtttttaaaacctctctaagcattttctcatctgtaaaatgaagataataatgtctcattcgcagagctgttgtgagggttaaatgtaataatatatgtgaaataattagcacaaattgactggtgcagagaaagcatgcaaaatggttgctcgtgtgattacaaaagtagatagaggacatgtggtggagattggggaacattcccagaagatgcatggtgataaggacaattgtctcagctggatgtgaattcatcttgctgtggcgggtctgtttgtaaagaagaataatcccatggatkaataggcagccagccaagatggcttgatcctcctcattgggtctagccaggaaatctgtgt

SEQ ID NO: 899999 - DNA, 605 bp, Homo sapiens
gtaaactgaataaagaaaatgtggtacatatatacatagaatactatgcagccataaaaaagaatgagataatgtcctttgcaggaacatggatggagctgaaggctgttatccctaggccattatccaaactaacacagtaacagaaaactaaataccacatgttctcacttataagtgggagctaaatgatgggaacatatggacacaaacaacacatattgccactggggcctacctggaggtgaagggcgggaggagagagaggagcagaaaaaataactattgagtactaggcttagtacctgggtgatgaaataatctgtacaacaaatccccatgacacgagtttacctacataacaaacctgcatatgtatcccctgaacctaaaataaaagttaaaaaaaaaaaaagaaaaatcctgccagtgacagattggtaggttgtgtcggggaaaaacatccatctaatgtgttcttttagatataactatccatctgatactcttcaactttggggtagagataagtataggtaactttaactgaatttatcctgtgacatatkctcacagtaggaaggaaattggaatctgacccatat

SEQ ID NO: 900000 - DNA, 573 bp, Homo sapiens
gtggatgtccacttttcccgatataatttattgaagagactgtcctttcttcattgtgtgttcttggcccctgtgtcaaatattaattgactataaatgagtcaatttacttctgtcctctctattctgttccattggtctatatctttatttttatggtactgctatgccgttttgacataatcttttatgtatagaaaatgctaatgactccacccaaaaagctgttagaactaataaatgaattcaataatgttttgcatggcacaaaatcaacatacggcatcagtagcatttttatatattaacaacaaactttccaaaaaagaaatcaagaaaacaatctcatatgcaattttatgcctatataaataaattttatataaatgaagaaaacttcagaataaattcaaccaaagaagtaaaagattcatgtactcactgatgaaagaaatggaagaaaacaacaaataattgggaagatattccatgtttatgaatatgcataaataatatttttgaaacgttcatactacccaaagtartgtacagatttaatgtattccctataaa

SEQ ID NO: 900001 - DNA, 622 bp, Homo sapiens
caagggacatgaaggacctcttcaaggagaattacaaaccactgctcaaggaaataagacacaaacaaattaaggagcattccatcctcatggatagggagaatcaatatcatgaaaatggccctactgcctgaattagtccattttcatgctgctgataaagacatacccgagactgggaagaaaaagaagtttaattgagcttacatttccacatggctggggaggcctccgaatcatacagtacaatacatgaggccttgaatcaaacaattcaagttgagatttgggtggtggcacagacaaaccatatcattccacccctggcccctccaaatcttatgtcttcacatttcaaaaccaatcatcccttcccaacagtcccatttcagcattaacccaagagtccacagtccaaagtctcatctgagacaaggcaagctgcttctgcctatgagcctgtaaaatcaaaagcaagctagttacttcctagatacaatgggggtacaggtattgggaaaatacagccattccaaatgggagaaattrgccaaagcaaagaggctacagggcccaagcaagtccaaaatccagcggggccatcaaatttttaagcttcaaa

SEQ ID NO: 900002 - DNA, 584 bp, Homo sapiens
aatggttttaatttattcctctctttagatcaaatttttaactgagaaaatatgctctctacaggtgctgatttacccagtaaactcaaacaaatttttcgaaaagaaagatattgtcaattctaaatttttccttttgaaatgtataaatgtttcaggcaaatatttttataagtcttgtcctctttgtatcattcaggataattttcttcaaaaaatatttttacaagccaaaactcatctaataagatcctaattatgattacgttgaacattttaccaaatgtagatattacaattataggctttctcaatttaatttgaatagtgcacaaaataataatttgctgaattaaaaataaaagctcctagatgtcagcaaaaatggcaagtaaggaattctgaaatctcctctttcatataacctgcacattgtgcacatgtagctaaaacttaaagtataataataataaataaataaattttwaaaaaaaatgggaacaaatgggggaaaaaaaccagagctatgaaaattaaccaaaagcttgcagcaatctgagaagtgctcattcaggaaaaaaaga

SEQ ID NO: 900003 - DNA, 573 bp, Homo sapiens
ttcttgctttttagactaaggggttttagaataagggtctgttaatctggtycctccaaaatcagtgtcttttctaagtaagaagtcagctatcttccaaatcagcacagagccactgtaccactaagtgactgaatgatcttgaacaaatcaccttacctccttgattttgattccctatagttgtaaagacggaaatattaatattgaccttatttaacaaggtgattgtgaattgaagtgagatacgtaaagcctaaagaattatcatgttaatttttaaatatttgagtcaaaattataatttaataacagaaaaacacttgggtgttgcctgcataattaggcatccattctttaaaataaagaggccttgtttacttatctgagagggttgtggaaggctcaaatgaaataatatccatgaaagtccttcacctacctacaactgtgattatttgatatcccagaataattttcccacaaaaaaatgctcttatgttctctctggcagcatatataccaaaactggaacaaaacatactttcaccacagaaattcatgagtggtaca

SEQ ID NO: 900004 - DNA, 533 bp, Homo sapiens
agtcacagtaactggaaatttcacagttaggatttcttggatttttacaatttctcactcttctmttgatgatatgactggtgaacttggatttcagatagtcccatttcccctttgcaaggtaagcctgtgatgttgttaggttattgagggatttgagttgtttttctgtatatgactatagactatcacaaggacatctctccagagtatattcctaccatgaagaaagttgcaggaagggaagcagcaagcctaaaccaaacttggaattaactgattattatataaaaataaggtcccctcttcagggtttaatacaatatattttaaataaaatggaactctgttaaccaagcctgtttcttttcttgtcatgaaaaatgttaggatagacacagaaagaggggaaaggaaacttcttaatccaaaacatttaacatgatggttgttagaaccatcatcacatgggtcagtctggaaaataattcaagtccgcagtgaagtccatttttcaaccaacagaacagctg

SEQ ID NO: 900005 - DNA, 614 bp, Homo sapiens
aagatggaggaggttgctggagacaagagacttaataaaccctctggttggcatataagtgttttacaaagctgattaacaggaagattacccccaccctcctccaggacaagcccttgatagttgctaggccaggcacatttttctttatccttttaaaagtaaatttcctaaataatgcaaggatgacagtctgggaacttaacattttttacctaattggcaacaaaatttgttcacaagcaagagaaacattttttgaacattaggaagccgggacagaaaagggatcccacttaggaagtagaggagagagggcaacaaactgaatcaaatttaaccatttttgttttaatcttggccaatttaacataattagttgctcatgttcatcagtttcattaaacatccttcactttcctttggcaatatttactcaaatattcactcatgatcatgacaagcatgatctctattttyatctttcttataacgtgggaatttggtatgtatccagttactctgttaaatgaatagggtcaattggatcattgaaacccttttgaattcactctttcttgctttctttttctttttctttttttttttttttt

SEQ ID NO: 900006 - DNA, 442 bp, Homo sapiens
acaggaggctctcagtgctgtatctcaggatagggtcaagtgggagtggtggttgcgatagggtggggttgcagaaaatactaggaagtgccagaacctaaattagaaccacccataggcttacgaggcaaacttattacaactacagatttttgttattatattttaaatctaccatttcctgttagctaattacatgccaggcacaatattatgtgctgtatacatattagttcatgctaatctggaaggaactgttattgtctccattcgaaatgcaggaaccgaaactcaagagattaagccactaactcaaggctacttggaagtggcaaacctaaatttgacyccaggactttctctgcccaaaaccccttagttcttaaccattatattctacaggcttcacaaataattttagtttcacagggaggacaagtta

SEQ ID NO: 900007 - DNA, 622 bp, Homo sapiens
tgactgcctcggcctcccagagtgttaggattacaggcgtgagccaccactccaggccgaaattcactttttaaaggcaattctagttgaactttctgtaacttgcaacctgacactttccattaataagccccrtcgtctaaccctctagtgtttcttctggccactttattccccgccatgcttctccagctacatctcatcactctctactcccagcaggaagcctgccaactccagtctaccccttctgccctcatcccaaagcccagtcgggaccccttatccagactagtgcaggcgagaaacagaggtctgcaatcctgtgtcactcttccctccagtgtgaactatattcagctggtgtccatgagaacgcctaaagggggacaaggattttaaggcaggggtttgagaacgaagagtatgcagtccaccccaacccgctccctgctctacctgagggtcaaagcccctcactgttcacaatgacacagactaggcaagtgctgggggagagccggggaaagacagacaaatgtggattctaagcagaagagcaagagagaacactaaacttgctgtggtcaagaaagaaagtaaaaggaggaaagaaggaagc

SEQ ID NO: 900008 - DNA, 598 bp, Homo sapiens
ttggagcatttcagatttcagattttcagattagggatgctcaacccgaactgactcaagtttacacagttaaaaaatgaaagatttgaactcagattggttaaactttaaaatccatgttcttcactaacagctaaacaggctaacttaatcatcacctgcctttcatcataaccttcctatgaatattgaattatgttggctggcctaaaatttcgaacagcatgatctgtgattgagttcctgcttgccattgtctcatcccagtgggtggatagagccccatgttccagcctctccgagtcattaaatcccactgaagttaaccaggccatgcctagaattatcccaatatataatatgtcatctatttgatcctcccaaaatcttggtggaattgacaccacatagatcataagccccactccctatatgagagtggccaagacacaaaaaattactttgaatagtcygggttaaatatagctagccagaagcaaagccatgaccagacccaggtttcctgactcaaacactaaagcttcatgcattaaattcacaccaaatacatttaagctagacaaggcatatagaaaac

SEQ ID NO: 900009 - DNA, 601 bp, Homo sapiens
gcaaggcaattgggtaaaaagcacacttctgcattactgcttctatcatggrgaacgtggctcattaggatttcatcaacactttggtatgtactaagacaaagcagcaaactatgcgaaataagaatcaatacatacttgttaaattaatgacaagtttaaggtctatcaaggctcagaagcatttaaggcccaggattttcatgtaaatattcagggaggaacaggtgttaaatgtctatttaaattatgcagcttagctaatttaaaagggaacatataaaagggaagacatttcttctcttctctctagccttgttagttcccagcattgccacagatataaatatggagaaaagaaaagaaaacaaaaacttaatgccaattccttgccccagagagtaattttacttcccctctaaatgactagctattaaacacacagaaaaatcctaaaaaaaataagtgacaaataataatagcttcataccactttggtacgtaggggagctaggaaccatagaaagtgctttacatacaatatttctatcttattagagccatattgagtttgaaacaattagacaatacaacatcatgc

SEQ ID NO: 900010 - DNA, 602 bp, Homo sapiens
taacaaatataaagttcctagtacagtaattgacacaacccaggaatttgatatgtgctagtcttttgctcccaygccttggttgggtcagtgtgatcctgttttctcagaagtctccactcaaccccagcccctcacaaccacaattctgcaaaattccttccaaaggcaaaggcacacactcaactgcttttgtgggacctggagcaggcattagacactacaagtcagtccttcatgggctcctattaatgaattgagcttttaaccagtctgatgcagccaggcctggagttcccaagctgaagcccattagcatacatagccccatttactgataaatgcatgcaactcatctccagcatgtcactgttttatggctgcttgctgacttggggctcaagtgatgaagtttaatgcagttatggtttcttatttttaattggagctttagatttcaagaaacaaaaaaatggtgtttaattaaaaatcactcatggttcttagcttgctgggctgtaaaaataaaatttaaaacaatcactcatgggtttgcaatcctttggttcattaaaaggagggaaaagtgtttcaagaaagga

SEQ ID NO: 900011 - DNA, 638 bp, Homo sapiens
tatagaagttcagagaagaaagtgattgtttccaactcaacttttcagaaagaatatcaaggggtggtggaagggggagagggagcagagcctggaatatgggaacrattttgccttttagagaatttcaaatcctactgagcaacttccagccactaggtggctttcagatactctgttgaggttcataaattataaaggccggttataggtatttgtgagattcctgtggcttggaaacttggctttaatgaagatagaaagaggctgtatatcatagtggtcaatagtgctggttctggggtcagacaagcccaggtgtgggtaacttggacttaactccttggatttaccctctgtacagctaagtatccacctctataaaatggggacaataatggcacatgcattactggattgttgtgcagattcaatgaaatgtctggtccacagcaaacactcaatattttttagtattttattatcaaaacaattcataaacttggagttacagatgagaaaattgggcccagaaaaagcatgttgtttacacaaagtcaaagatctaggcaaaggtagagggggcttgaaccgaggtctaaagttgaatgttgtcagtagataatacctacaaacac

SEQ ID NO: 900012 - DNA, 654 bp, Homo sapiens
tctctattagcaacttacattctgcagacaccagccctacttaagactctcagttacactgtcagcttcctagccagtccaaacatgttagagtcagttgataaggattgctaaatttgtcttgttttgcttttgttctgcagtttttgaagagccggaagatccaagcaacagatcatttttctctgaaattatctcttcgatttcggatgtgaagttcagccacagtgggaggtatatcatgaccagggactacttgaccgtcaaagtctgggatctcaacatggaaaaccgccccatcgagacttaccaggtatagaaccccaggcacccataggtatattgaacattcccttcatgagcttttaagtcagcccctgcttccaaaggtttacagtgcagcaaaatggaaggcaatgcatggtgatacattcagtaaaatggtacaggctataagtgccacaggatttaagataacggtacatgtggagaggctagaattcaatttaattgatatggacagagcacttcatgtggaatggayactatagaggtaaacaaatggtcctgctctcatgcagcttaccatctggtggaaaagtcagatgatgaacaaggaattgagtgtgcctctctgcaagagatggtccagcc

SEQ ID NO: 900013 - DNA, 493 bp, Homo sapiens
tggtatacctcccccttcgttctctcttccttattctctggtcatgtaagacatgctgcttccccttcacytcccagtcatgctttctgtacagcctgcagaactgtgggtcaattaaacctcttttcttcataaattaaccagtctcaggtagttctttgtagcagtgtaataacagactaatacagaaaattcgtaccagagaagtggggcactgctatacagatacctgaaaatgtggaaccgactttggaactgggtaatgggcaggagttagtagagtttggagagctcagaagacaacaggaagttgaggaagagtttggaacttcctagagacttgttaaatggctgtgaccaaaatgctgattgtgacacagacagtaaagcccaggctgaggtgatctcagatggagatgaggaacttattggtaactgaagtaagggtcactcttactatgctttagcaaaaagaatggtggcattgggcccc

SEQ ID NO: 900014 - DNA, 589 bp, Homo sapiens
tatgcattaaaggatgggttttgcttgsgggaaagggagggaaccaagggtagaactctgaagagttgaactaggaaaggctaggaggttttctcaaggctttggggaaaatgctgaaaatgttttagtagagtgacataaaagtttgtattttagtatgtttaccttggaaaattgtggaattggtttagagggggtagataccagagtgtgaaatactggtgaagggactattaaagtaatccacagaatttgtttaaaggatatagagggagagtcagcttagattgactcgcaggttccagatgagtgactacatttgagaggagttaatcaggctaggggatacaaagaaaggagaaatgataaataattcagttctgcatgtcctgagcctaggggtgtcatcagcaagtattaggggaggagaattaagtatgagatgagaggagatgatgtggccctagccacctgccttttgcttgctcttaggggtgcctgggaagggatgcataggtatatgccatggttagggttttggtaggcttctcgtggtttggtattgatggatgtcttgggcctctgtcag

SEQ ID NO: 900015 - DNA, 609 bp, Homo sapiens
cctcccatccctttctctctttactccaggcatctccttgctgcttggctgctgtttgaatatcctgggtattttctgcctcagggcctgtgcacctgctgttctgctgtttggaacctccccactccctcccccaaccacatggcatcctcatggttttgtcctccactcctttgatctttgctcaaatgtcaccttcttgagaaggccccctctggctcccccaactgtaatgtaaacgctctctcactccctgcccttcttcacagcctcagccccgctttacttttctccacacttattgccatctaataataccatgtgactgacaacttacttttttgaaagtttgtttctctctttgagagtggaagctccatggaggcaggggtttttgtctcctatatgccactgggccccagtgtcttgaactgcgcctgacacatagcaggcattccttaacatttgttgaataaatgaatgatttgttgatcagctttggattcaagctataargacactgaccacctgctttgtggtggtcaggctggggcttggtgagttcccgcaaccctacaagggtctgactcctaccactgtctcaccatc

SEQ ID NO: 900016 - DNA, 609 bp, Homo sapiens
cctcccatccctttctctctttactccaggcatctccttgctgcttggctgctgtttgaatatcctgggtattttctgcctcagggcctgtgcacctgctgttctgctgtttggaacctccccactccctcccccaaccacatggcatcctcatggttttgtcctccactcctttgatctttgctcaaatgtcaccttcttgagaaggccccctctggctcccccaactgtaatgtaaacgctctctcactccctgcccttcttcacagcctcagccccgctttacttttctccacacttattgccatctaataataccatgtgactgacaacttacttttttgaaagtttgtttctctctttgagagtggaagctccatggaggcaggggtttttgtctcctatatgccactgggccccagtgtcttgaactgcgcctgacacatagcaggcattccttaacatttgttgaataaatgaatgatttgttgatcagctttggattcaagctataaggacactgaccacctgctttgtggtggtcargctggggcttggtgagttcccgcaaccctacaagggtctgactcctaccactgtctcaccatc

SEQ ID NO: 900017 - DNA, 587 bp, Homo sapiens
tgtgttgattctgacatcatggatgaggaagagagcctggtgatcacttcagtgatgatgtctggagacatcgtggactgatcagagtcagggatgtgtattctattagaggacatgatttctgtcatggagayttcagtagtagcactagtgggcactccataaaggactgcacttgtttctgtgattgaggtggtctcttcagaggtgctagtctccctgaatccaggagtcaatgagaatgttggctctgtcggaatcctcctagtctcagagaaggcaggatttgatgtgaaaacagtggtatcgtccacagcggaggtgatacccattgaaggtatggttatggttgtttctgagtcagctaggacagaggaatgagattcatgaacagaactggaggtcctcactttggccaccgctgtgtttgaggaaggatgaattttctctgtatctgtcatgatttcagaggtggccggtatttcaactgaggtgctgctcaaatttggagatgaactggttttaggctctgagcttgtatccaacacttctgtagtcttcaccaggcctgggaggataagtgaagt

SEQ ID NO: 900018 - DNA, 600 bp, Homo sapiens
cttgatgtagccccaggagaacctgtttgggtggtaatggtcatttctgtagattctgccttgatgggggaggtagagagcctggtgatcacttcagatggatatgtcttgtgacattgtggactgatcagggctaggtcctctgctagaggacatgacttgtgtcatggagtcctcaatcgtggcactagtgagtgccttgtaaggaacagtgcttggctttgtggctgagtggatctcctgggaggtgctggtctcccttggtgtgggggtcagggtggatgttgactccatctcaattcttgttatctcagaggaagcaggtatggttgtagaaacaatgtcttttatggtggaagaggtgaccactggagatgtcactttggatggctctgggaggcctggataagaggaatagaattcttgtctagcgctgatggtgcccatctgagtcacagctgtgttttctgaaagctgaattgcytctgtctccatggtggctttagaagtggccagactctcatctgaggtgatattcatactgggaggtgaagtggtcacaggttccaagcttgtgtccaacatgtctgtggtcttcat

SEQ ID NO: 900019 - DNA, 633 bp, Homo sapiens
tgtcatttatttttaattctattctattattgtctaagtgataatataaatcctagatttatactctttaagagtataaattcactgaagaagtgaattttcattttaattattgtatttttcaactccaaaatttttagtttcctttttataatttcaatttatttattgataatctcaatttggtaaagcatcattctcatactttccttttttctttaggccacattttctttagatcactgatatatttaaaatagctgacttcaaattcttgtctagagaggtgaacgtttatgcctcctcaagcacaatttctattgatttgttttttcccaatgtatgagccatactttcttgtctctttgcatgtcttgtaattttttttattgttgaaaactggaattttggatattataatgcgtcatctgggaaaatcagattctctcctctccccagggtttgttgttgttgctgcttattgctgatgctatttaatgaattacttctggaaagtttatattctttgttatgtgtggcccctgaagtctctkttccattgggttagtggtcagctaatggttgaacagagtttttcttaaatgcctgaactaaaaattatttgtctttgcc

SEQ ID NO: 900020 - DNA, 631 bp, Homo sapiens
gccacaaaaagaataaaatacctagaaaaacagctaaccagggaggtgaaagatttctacaatgagaattacaaaacactgctaaacgaaatcaaagatgacacaaatagaaaaacattccatgctcatggawaggaagaatcaatattattaaaattgccatactgaccaaaggaatttacagattcaatgttgttcctacctaactactaatgacattcttcacagaactagaaaaaaactactttaaaattcatatggaggccaggagcgatggctcatgcctgtaatcccagcactttgggaggccaaggcgggtgaagcatgaggtcaggagttcgagaccagcctgaccaacatggtgaaaccccctctctactaaaaatacaaaaattagctgggcatggtggcacacacctgtagtcccagcttcttgggaggctgaggcaggagaattgcttgaacctgggaggtggaggttgcagtgagccaagattgggccactgcactccagcctggagtgcaagtgtctgtctcaaaataaataaataaataaataaaattcatatggaaccacagtagagcccgaatagccacgacaatcctgaacaaaaaagaacaaagcaggagg

SEQ ID NO: 900021 - DNA, 622 bp, Homo sapiens
caggagaattgcttgaacctgggaggtggaggttgcagtgagccaagattgggccactgcactccagcctggagtgcaagtgtctgtctcaaaawaaataaataaataaataaaattcatatggaaccacagtagagcccgaatagccacgacaatcctgaacaaaaaagaacaaagcaggaggcattatgctacctaacttcaaactatattacagggctacagtaaccaaaacagcatgttactggtacaaaaccagacacatagaccaatggaacataatagatgacccagagatagagccacacacctacaaccatctgatctttgacaaagctgacaaaaacaagcaatggagaaaggactccctattccataaatggtgtgggaataactggctaggcatatacagaagattgaaattggaccctctccttacaccatatacaaaaatcaactcaagatggatcaaatacttaaatgtaaaacccaaaactataaaaactataaaaactctggaggacaacctcggcaatatcattctggacataggaaacatttcatgacaaaaacactaaaagaaattgcaacgaaagcaaaaattgacaaatgggatccaatt

SEQ ID NO: 900022 - DNA, 659 bp, Homo sapiens
agatttggtttctggtgagggctcacttccttgttcatagacagtcatcttttctgtgtcctcatatggtagaaggggcaagggagctctctctcaggccttttttataagggcactaatcctrtttgtgagggttccaccctcatgacctaatgacctcccaaaggcctcaccttcaaataccatcatattaggggttaggattttaacatgtgaatttaggtggggacacattgggtctatagcaggaggctagagattgacctaaagtacacctaacaatttaaacaattgcagactattgtcaccctttcttgccatttctttagcaatactcatccccccaaaaactaataggcttttcatatttttgcctctagacaactccattgggtcgtaaccatagtcagaggttttgtttgatcatgtgttttcaacctggaaatttctactttctggccccaaatctctatgcttcacctgtctactagttttcaaattttttggccatgacccataatgagaatgaatttacttcatgacctagtatacaattatgcatgtgcatattggtatgtatttatgtataactaaatcataagttttattatacaacagtatttatggccactacatgggttacatgctaatagtttcta

SEQ ID NO: 900023 - DNA, 543 bp, Homo sapiens
agctgagatcacaccattacactccagcctgggcagaaagagcgaaattccatctcaaaaaaaaaaaattgcaaaaataaaaaaagaggaaaagacaggagacaaagagacaaaaagtgagtgagcaggtgaggagagagattgagaactatgagagacagcaactagtagaaaaaggaggcaggagactgcttgggtgccacagcacccacaccatcctcttgcccctgtcatttggacccaatagctgacccttgatagaggagagcagacctcgcagcagcctgagcctgggcagccgtgcctccaccatctccccactcagcagcctaagtcccaagctatatgtgatgcaactctcagagtctatggatgtgtaaaaatgtatactctggcaaacaacttacagatagttacctaatatatacatacatacatacatacatacatacatatatgtgtgtgtgtgtgtgtgtgtgtgtgtgtgtrtatatatacactaataagcaaactctaagaaagtcaccccttggaggaagggag

SEQ ID NO: 900024 - DNA, 633 bp, Homo sapiens
gcagtagagtgatctcagctcactgcaagctctgcctcccaggtttaggccattctcctgcctcagcctcccgagtagctgggactacaggcgcccaccaccaygcctggcttttttttttttgtatttttggtagagactgtgtttcaccgtgttagccgggatggtctcgatctcctgacttcgtgatccatctgcctcggcctcccaaagtgctgggattacaggcacgagccatcgcacccggtggggcttatgttttttctttctttctccagggtccagaaagggagatggatgccatacaggccaaggaggaaatgaagaaggcccgcgaggaagaggaggaagagctgctgtcgggaaaaattaacaggcacgaacattacttcaatcaatttcacagaaggaatgaactttagtgatccccattggatataaggatgactggtaaaatctcattgctactttaatctatgtttcaaactcaaatgtctacatggcactttgtccaattttctttgaacagtgtttcatgcttctgggtggggtaggttgtatctcccctggtgacccccttgcactgagaagttccctcttgacaattttacacactggaagccagaggccagc

SEQ ID NO: 900025 - DNA, 586 bp, Homo sapiens
tagaaaggggaggcaacgcctgtcttcgttgatggttaaggaagttcagacccatctgcatctattgaggggtccctagtggagaagtgagaggctacagttcctgacgggattcctgcccctttgggaaagcmacttggcaggtgttttgagaggtttttttggactgggaacaaatcccaagggagaatccaaaggaggagggggcctcagatgtgccaggctattcctgacagcaagaggctgcaattggccatcgggccacagacatggccctggcaagcctgaagagctgccttaaagccatcttttgaggccatcgcctggagcggctccccatgtggagtcaaactgtgtctgtgctgagattaggatctagtgtacttccccagatagatggacaggtgccaagggcatcccagaaacagggcaagggcaggtggtctgtgggggcagtcgctaagggggatagaagacaggttgtgaaggagccaccttgggtcttttgggtctgtttttcctcccggtgtccttacccatggcctctcccctgccgcagggctttggtgctgtctggccagctccc

SEQ ID NO: 900026 - DNA, 621 bp, Homo sapiens
tgctaaattttgaaaggtgatattccacaaagacatctccaatctaacctctgctcatctcataactacaaattagaaaaataaacagaggccgggtgccgtggctcgcgyctgtaatcccagcattttgggaggccaaggtgggcggatcatgaggtcgagagattgagaccatcctggccaacatggtgaaaccccatctctactaaaaatacaaaaattagctgggcgtggtggcacacacctgtagtctcagctacttgggaggctgaggcaggaggatcacttgaacccgagaggcagaggttgcaggttgtcaccagcctggagacagagcaagagtctgtctcaaaaaaaaaaaaaaaagatattaaatcaacagataaagggactgagaagctgaccacctgtcacctacataatctgccttcatttgagtgtgcatgtttatggctaaagtgatcatgcagcaggactttcttttgtccttgtgagcagtttgattaactctttcgattttccatcagttctttgacacagttgtaccttaaatatttctgatctaactagattctgctgagtaaactaagctactctcaataaaaccatttaatttcatgc

SEQ ID NO: 900027 - DNA, 535 bp, Homo sapiens
tttgaagatgttctgaggcaaagtgacattaraaagacttctgaaaaacgtatagctagtcagtgatttaacctgaatactggcataagatttgcaagctatatgaagaattctcatatcattgatttatagacaagttaatttatgtagattattatattcacaaaaacgagtgtgaatggggacttcaaaaagttcatgtaaaatggaattaaaagataaaaatttaaaatatgaactttatttcttaacaaaagattcatcaagttcaagacactcttctgagtggtgatcccaaccatgtagtttatccctaaaaaaccaagggtcctggaaacttaagcatgtcaatgcaatctttattaactgaaaaaaataaaaaatgagtgccctttacaaatttatttaagatcaggaaacaaagagaagtcagaaggagccaaatcaggactataaggtagatacctaatgatttcccatcaaaactctcacaaaatcacctttgtttgatgacagaaatgagcaggaatattgt

SEQ ID NO: 900028 - DNA, 568 bp, Homo sapiens
acaggtttctaaataaattcttcccagattcacagataccaatattgatatttcaactttaaagaatactattttagaaatgatgagctattttaaataagaacaaacaatgaagaaatagaagatctttgatttgatgtatgtcatattaattttttaaaatgtaggcatcaatctttaaaaatatttcatactcctcatttttgttgggtcttataaaataccttttctagttctttacatgtatgctatatggcaagcagttttaaaactttacatgaatagattttggtttgtgtggagagtttagtgatatgcctggagagataatggagacatgggtatgtcaaaattaggggggcatgatggttcattttatgtgtcaacttggctgggtcacagaatgttcagatagttggtcaaacattattctggatattctgtgagtgtttttgaatgaaattaacattaaagtcagtggacctgagtaaagcagactgccctccatcatgtgggtaggcctcatctaatsagttgaagacctgaatagaacaaaaagacctgcctc

SEQ ID NO: 900029 - DNA, 644 bp, Homo sapiens
tcacaagaccctgggaacccacctcttgcatcagcgtgacctggatgtgagacatggagtcaaaggagatgattttggakctttaagatttgactgccctgctaggacttgcatgaggtctttagcccctttgtttttgccaacttctcccatttggaatggctgtatttacccaatgcctgtacccccactgtgtctaggaagtaactaacttacttttgattttacaggctcataggtggaagggacttgccttgtctcagatgagactttggactgtggacttctgagttaatgatgaaatgacttaagattttgggggactgttgggaacacatgactagttttgaaatgtgaggacatgagatttgggaggtaccaggggtggaatgatacagtttggctctgtcctcacccaaatttcatcttgaattcccatgtgttgttggaggaacctggtgggaggtaattgaatcatgagggcaagtcttccccatgctattctcatgaaagtgagtaagtctcatgagatctcatagtttttaaaaaaaggctgtcccccacacaagctatctctcattttttgcctgccaccattcatgtaagacgcgacttgcttctctttgccttctgccatgattgta

SEQ ID NO: 900030 - DNA, 575 bp, Homo sapiens
gcagctttacatttattaagttattcgatcctcacaacaactccatgaagtagataataatatctccatattacagatcagaaaaatggcgcacagagaggggaagtaacttgctcaagagattgagtaattttgcacagtgatgagtggtatttagttaccttacttttaatgaattaattctaactttaaatgagcatttgaaatgcttcactttgttggtgaaatgaaataaataggcattttcaagatcaaatctagcttggggggttcagtgagtgaaagtttctcaggctatgaggcattccaaatgaatgaatatttcccagtaaacaaatgcgggaaacaccgttcttttaaaactccaaacaagtaaatttgtaatgctgaaatttagtgagattgatacattgttatttaccattctgctcccataaatttcagatataaagcaatgcctgagcatggrctgtataaattatttttggaacactagaagaggcactagtcataaaaaaatttaacatacaatttttaaataatacattgttcagacttagtttgttctctctgta

SEQ ID NO: 900031 - DNA, 651 bp, Homo sapiens
aacatcaaattcagaggctccaaggatgtcatcgggacccatgcttttgatctcagagctctgttttcatgtgtggtgcctcatttcttagacagtgacgccgcacctgccagaaaattcagttttacatgttttctcccagccactgtaaaagaaagaaactgtccctttcttgcaagatcgtgcaaatgtatgtcctataattggaactcattgaccagaaatggtttggcatgggtctcatggcgtcctgaatttgcagtgggttggccaaatctgctttacctgaggagctgatgctactgtgacctacagcaaaagaagtgggaacatgtgaaggagaggtattttccaagagaaaggtaggatttatcttttttttttttttaatcaaaagaatcagtagagaatgctgggatgctgggcaggccaaaacacagattccaccacaccaagaaacctcattccataaaccactcactaaggtttatctacaacaaaagccatcccctcttctgtgctaggaagaagccattaatagtcctcaagtgtttgctcttccagaggactcaataactcagatcccagagsgtaagggagctacaggactcaacaatacaaatccaattagcaatttctgtctctggaata

SEQ ID NO: 900032 - DNA, 533 bp, Homo sapiens
aaaaggaaaatatgtaaagcactcagcaccaagtgtctattaaacgacagtaattagtttggggagaagtttcaactccatggggtacaagcatgaactagttttgttttttttcttaaatattattatcagttgtatgttcagtctttctaccccagtgggtgctaggtcccttaactttctggccactttcagctattaaaaaacctagttcagtctgacttaaatctccaatttcagatccaatgaaaagttctcttctggccagatgcggtggctcatgcttgtaattccagcattttgggaggctgaggcaggcggatcatctgaggtcaggagttcaagaccagcctggccaacatagtgaaaccccgtctctactaaaaatacaaaattagctgggcgtggtggcgggcacctgtaatcccagctacttgggaggctgaggcaggagaatcacttgaacctaggaggcagaggttgcagtgagccaagatcgggccaytgcactccagcctgggcaaaaagaacga

SEQ ID NO: 900033 - DNA, 630 bp, Homo sapiens
ttgtcttgcctgataatgttgttgagtgttcagcactcctagatctggatggggtgaagaactcactggaaagagcatggagtcaggataaggacacttagkcttcaatcctgactttctgctttattatccccatgtttttaggcaagtacctgagggtctccattacctcccctacagaatgaggaatatcattcctgcctcactgaacacttatgaggattaataattcaataaatatttaaagtactcagcccggaacttggcatccgttgggtgcgcttcgcatcttccagttggagaaatcagttatcagtgtttgggaattgcattaagctcataaagtaatggctggaaattattaagattgatttttaaaaatacaatcatgcttttattctcttttggaaaacagaactttattgcttctcacaacaaaactttcagtgccctccgaggagaaaaataaacttacaaaagaaaaaaaaagaaacttaaaaacaatatggcacttctgtggtatcaagcctcaaaggtcttacctcgagattattttggtaaatccatttacatttttttagtctccctgcccctccaatgtcatgtgtaagaacacatagatttttgaca

SEQ ID NO: 900034 - DNA, 573 bp, Homo sapiens
gcagactggcgcctgccgttggaatctcagggtttgctgtttcccagtttctacttgcccagggccctgggacttcttcttcatgaccttacagctccagcttctaatgcactctgatcaattgcgcctctatctgaatgtaagagtttcccaggtgtaggaatatgataggtccgggtagtaggaggtgtacactctggtccaatcagatgtagccaggtgaaggtgtcaggtgggtgcctctgctgtgtgtgggctagagagcatctcagagaagtcatgcaggtagggaagcacctctctggttcttggtggagctctctggagtggtatggctaaacactgaagaagatgatgaggatgtcgctgctgtgctcaaaagggcccagccttcttgtcataatcgtatacttgttatcctatttaacactcatgatcatccagtgaagggttaacactattctacagaggagacaactgagatacagaaaggtggamaaacattgcttcaaaagttatttttatgaaatgttaattgtctcacatatctggattccaacctgagggaaaatg

SEQ ID NO: 900035 - DNA, 651 bp, Homo sapiens
accccacagacagcccccgctgccaacaacatctcacactagtgtggtttgtttgttacaactgatgaaccaatcttrttatattattgtcagtcaaaatctatagtttacattagggttcactcttgttctgtgggttttgccaaatgtataacaacatgtatttatcattatagtattatatagaatagtctcactgccataaaatctctaatgctccacttattgatctcccattcccctaaattcctggaaatcattgatctttttattgtctccatagttttgcctcttccacgatgttatatagttggaattatatagtatatagccattacagactggcttatttcacttagtaataagcatttaagtttcctccatgtctttcatggcttgatagctcatttctttttagtgctgaacaacatgccactatctggatataccacagtgtatttttttattcacgattgaaaaacaccttatttggttccatcttttggcaattaagaataaagttgctataaacatccatgtggaggtttttttatgaactgaaatttttagctcattggtttttatccatttttgaattcacgttatttgtcttctttttttactcagttttgcctagaaagaaatttaact

SEQ ID NO: 900036 - DNA, 623 bp, Homo sapiens
agagggagtggatgcaggttatcatattatcacaaaaattctggtgaaaattagcttagttcctattgttcaaatggaaacactcttattgagtatccattatgtgttcaagattatgctagtgcattatcttatgtagtagttactagagtctgaggaagttagtactattgtctccatttttaaataagagaaaaccaagctcagattgactaagtaacttattttgaccacatagctgagaagtagcagggtggagatatcaccaaggtttgctttttctatatccactcactgtccaccacccttcactgtttactgcaggacagtccaagggtaggggtgtatggctctgaattaatcccaccccacaaatgtatcttctttatattttccacttcccaaaacccaggctcaagaaatcatcaaagcaactggaattctcactcactgctgttgggaatgcaaaatggtatagccactttggaagacagtttgatagyttcttaaaaaactgaacataccatatgatccagcagttgcactttttggtatctatccaaatgagttgaaaacttatgtccacacaaaaacttgcatatggatgtttatagtagctttat

SEQ ID NO: 900037 - DNA, 693 bp, Homo sapiens
tctgagccttcagtgagtcataatgtttttgctggtggagggtcttgtctcgacagcaatagctgttgacaaatcagggtgggggttgttgaaggttggggtggctgtggcaattycttaaaataagacaacaatgaagtttgccatatcatctggctcttcctttcattaaatacttttctgtagcatgtgatgctatttgattgcatttgacccatagtagaatgtctttcaaattgaagtctatcctctcaaaccctgctgctgctttatcaactaagtttatgtaatattctaaatcattcattatcatttcaacaatgttcatggcatcttcaccaggaataaattctatctcaataaatcactttctttgctcatccataagaagcaactccacatctgttaaagtttaattatgagatagcagcaattcagtcgcttctccagattccacttctaattctagttcttttgctatttctgccacatctacagttattccttcactgaagtcttcaatccctcaaagtcattcatgagcgttcaaatcaatttcttaaaagctcctgttaatgttgatattttgacctctttccatgaattatgaatgttcttaatagcatctagaatgatgactcttttccagaaggttttcaacttactttgctcagatccatcaaaggagtcact

SEQ ID NO: 900038 - DNA, 693 bp, Homo sapiens
tctgagccttcagtgagtcataatgtttttgctggtggagggtcttgtctcgacagcaatagctgttgacaaatcagggtgggggttgttgaaggttggggtggctgtggcaatttcttaaaataagacaacaatgaagtttgccatatcatctggctcttcctttcattaaatacttttctgtagcatgtgatgctatttgattgcatttgacccatagtagaatgtctttcaaattgaagtctatcctctcaaaccctgctgctgctttatcaactaagtttatgtaatattctaaatcattcattatcatttcaacaatgttcatggcatcttcaccaggaataaattctatctcaataaatcactttctttgctcatccataagaagcaactccacatctgttaaagtttaattatgagatagcagcaattcagtcgcttctccagattccacttctaattctagttcttttgctatttctgccacatctacagttattccttcactgaagtcttcaatccctcaaagtcattcatgagcgttcaaatcaatttcttaaaagctcctgttaatgttgrtattttgacctctttccatgaattatgaatgttcttaatagcatctagaatgatgactcttttccagaaggttttcaacttactttgctcagatccatcaaaggagtcact

SEQ ID NO: 900039 - DNA, 627 bp, Homo sapiens
caaagagggtgggtgttgcagttctaccacattctaggaagtaagagggctagaagatttgtgaatagtcttaaagaccgacacagctttatatacagattttctgattctmatttcagttactcatagatttttaatattttgggttattttctaaatatgagaggttgctggataattggttttttgataattgtgctttgctcaagaatgtcctggagacatatcatctttgttaaaagatgtcctttaaacgtatatcaactgggcactataactacttaggatctaacttcagttgacaatatgtcacctcctatgaatgaactttccccttcaactttctccacacgaaaaaagagatcagtggtggctccctttctttccccagcctgcctaacaacttgacacattgaagattttattgattgctttgtagaggttttctaatcttgtaagttgcatctttttaaaggaatccagttatttgtggaaacaattggagacttgggagacttttctaattataagattaaatgaacaatttcaagagactatgtggaggctgatcaaggggcaggaggaggtgatggccatatccaacatgggtgtgggcagtaaaggtgt

SEQ ID NO: 900040 - DNA, 627 bp, Homo sapiens
caaagagggtgggtgttgcagttctaccacattctaggaagtaagagggctagaagatttgtgaatagtcttaaagaccgacacagctttatatacagattttctgattctaatttcagttactcatagatttttaatattttgggttattttctaaatatgagaggttgctggataattggttttttgataattgtgctttgctcaagaatgtcctggagacatatcatctttgttaaaagatgtcctttaaacgtatatcaactgggcactataactacttaggatctaacttcagttgacaatatgtcacctcctatgaatgaactttccccttcaactttctccacacgaaaaaagagatcagtggtggctccctttctttccccagcctgcctaacaacttgacacattgaagattttattgattgctttgtagaggttttctaatcttgtaagttgcatctttttaaaggaatccagttatttgtggaaacaattggagacttgggagacttttctaattataagaytaaatgaacaatttcaagagactatgtggaggctgatcaaggggcaggaggaggtgatggccatatccaacatgggtgtgggcagtaaaggtgt

SEQ ID NO: 900041 - DNA, 627 bp, Homo sapiens
caaagagggtgggtgttgcagttctaccacattctaggaagtaagagggctagaagatttgtgaatagtcttaaagaccgacacagctttatatacagattttctgattctaatttcagttactcatagatttttaatattttgggttattttctaaatatgagaggttgctggataattggttttttgataattgtgctttgctcaagaatgtcctggagacatatcatctttgttaaaagatgtcctttaaacgtatatcaactgggcactataactacttaggatctaacttcagttgacaatatgtcacctcctatgaatgaactttccccttcaactttctccacacgaaaaaagagatcagtggtggctccctttctttccccagcctgcctaacaacttgacacattgaagattttattgattgctttgtagaggttttctaatcttgtaagttgcatctttttaaaggaatccagttatttgtggaaacaattggagacttgggagacttttctaattataagattaaatgaacaatttcaagagactatgtggaggctgatcaaggggcaggaggaggtratggccatatccaacatgggtgtgggcagtaaaggtgt

SEQ ID NO: 900042 - DNA, 630 bp, Homo sapiens
tggaaactatactggatatccaccactaaaacacaatcagctcttgcttagattaaaaatttctaaggcctttagctttgatttcagttttgcaatatgctgtaactgccaggacagtgacccctggtgaagacaaaggtttgagtatcagatcgcttgatatgattaagcacattcctgtttcattccacagataccaatattaagtcagacgtgaaactcccttttgatgcctatcactatgctctgactcgctgcacaacttaacctcttggtgactccagttccttgtttgcaagtggagatgaacaggtctgctgtgaggattgaatagaataatacatgtaaaagatgcgttatttgcttgatacccagcctggtacacatgaaggattactaaatagtttacatgaacattattactacctaattgtttttaattcaggaaaatgtagaagctacaacatcagaatatgcttctgtagtagtacttttkcctctagttcagtaccctgtcaaccaccacatgaagtggtgtaacaagacataattgaaacactattgtaatgaaaggaacactagacatgcagtcagaaatctgggctcaatttctgaaatgcatgtagcatt

SEQ ID NO: 900043 - DNA, 226 bp, Homo sapiens
ccctgttcatagactgcttgagacacctcacctacgtacytcccataactggccattgggcactccatacactcagtgtgcctcaccagcacccaaccaggcttgctctcccagtatgcttacacaaatagaaagtgtaagcatctcctcctacggagaactgatataattctatgggaataaaaaaagtcagaaactggagcatttcagggcaccgccctattga

SEQ ID NO: 900044 - DNA, 489 bp, Homo sapiens
atatgtaccatgcattttctaatcatttatttattaaacaaacatttattatttaacctgttctgggctctatgctggacactggggaagtaacaacaaccaagacgtgatccacacactcaaaaactttacagtccaattgggtgaggatgggttagaagagccagattaaatctgatttttaaatctctgtatgaagggccaggcttgattgctcatgcctgtaatcccagcactttgggaggccaaggcaggagggtcatttgaggccaactgtttgagaagagcctgggcaacacagcaagacccagtctctctaaaaacaaacaaaaaaattagcctggcacagtgacctcaactacttggtaagctgaagtggatcatttgagcccaggagttctaggctgccctgatmtatgattgctactgcactccagtctggccaacagacacagaccctgtctcaaaaaaaaaaaaaaaaaagaaatt

SEQ ID NO: 900045 - DNA, 579 bp, Homo sapiens
ctcaattttggccatattttatgaaagggccaaaagcaatcaaaaaaaaaaaaaaaaragagagagaaagaagtgagaaagaagtaggaaaaaaagaagaaagacatgtggctattattacagcaacatgaaggtggtcaaccacttcaagtttttgtggtcagtgaggtcacaagagctacaggctgacatttcaaacaaattatgcacattgaggtcacatcgctctacttcaggcagtttctcataattgtagtgttctgtttacaagaggtccttgacttaaaaatgtccttttgtgccctctagtgtttaaattcatcaaagcttttgagaagttcatatcttgtttctgaactccagttgaacaacatttcattcttagaccaagtgtttatctgtatctgaagggggccaacatacatcttgttccaaaatctctaaagtttacttaattttttttttatttcaaagggagctaggtaggggttggaaaactaccacagagcaaatcctgcccactactttttttcattttgtaaataaagtttattggaacatattatgctcattcattac

SEQ ID NO: 900046 - DNA, 637 bp, Homo sapiens
tctgtctagctggtcatactcagaggcacatgatcccttgaagtcccatttttctgattgatgatgatggctacagagaggagctcctgctatggataactttgttgaatccccartgtgtctagaatggccaagaatgagtctctcagcagccagcaccccttaacacttcccatgaaagatctttcgggtccctagaaaagatccgttcatacgctggatagctggatcagtggagatgacaaataaggtgatcaggcatgccagtaagttggaagaaaccaaagtcaaaccaacagagtatgagttctcctttcccttgggtctatgtggaagcttcctagatgtctgagcacccagaccccaataacttcctctcacccccagccctcttttggggccagtgccatgggaccagttagtgcaatggaggtccagcattctgcaggatccttgagtaggaagctggtggagcacccaccgccctttgtctaccacggtgatgaatggttgttgacaaggctaaacaaaggtattattagtagattacatctgagaggctggactcatgcagaaacagggcagcaagagccctgggccctgctcagcccccaattagtccacaaaagcctaaacc

SEQ ID NO: 900047 - DNA, 641 bp, Homo sapiens
cacatacctgtagtcctagctactcaggaggctgaggcaggaggatcacttgcgctcaggagtttgaggctacagtgagctatggtcatgtcactgcaccccagtctagaaaacagagtgggaccctgtctcwaaaaaaaaaaaaatgtatagattgtgattggaatttacttggaattggtttccaggatgaaaggaagaaatgctatagattacagaagaatataaagtctcctcctcaaagcttccctttatgcccacactatagcaggtaaaagggtcagagtaccaaagaacctaagctcaatactgtaggggaccaacctaacctctctgatcatcattcatttatagaatagtcattgaacaccaactatgcaaaaagctcctgctagacgctggagatagacacaaaaaccttcctgtttgtaaaatggatataattatgtgccttaaagcaagcattctgaatacacagataggcttcaagacattccgctgaaaaatatttgttgattaaaccaatatttctcaaataccttctatgtaccaagcccagtgccaagccacaggcttacagcaaaaaacaaacactagataaatttgatgaactcataggacctacagtatataaaggatac

SEQ ID NO: 900048 - DNA, 564 bp, Homo sapiens
ctacgagaaagctgacagaaataaacaatggggaaaggacaccctattcaataaatgatgctgggaaaactgtccagccacatgcaagagaatgaaactggacccttccccctcatatacacaaatcaactcaagatggatgaaagacttaaatgtaagacctcaaactataaaattcctaaaggaaaactaggaaaaacttctctggacattggccaaggcaaagaacttatgactaagtcctcaaaagcgattgcaacaaaaacaaaaatggacaaatatgatttaattaagcaaaagagcttctgcactgcaaaagaaacaatcaacagagtaaaaagacaacctacagaatgggagaaagcatttgcgaaccatgcatcttacaaaggactaatatgcagaaacataaggaacttaaacaaatcaacaacaaaaacccaaataacctcattaaaaagtgagcaaaggacataaacagatacttctcaaaagaaggtayacaaacagggagcaaacataaaaaatgctcaaaatcactaatcatcagagaaatacaaatta

SEQ ID NO: 900049 - DNA, 589 bp, Homo sapiens
acagagtccctactggggcactgcctactggagctgtgagaagatgaccaccattctccagaccccagaatgcagatccactgacagtttgcaccatgtgcctggaaaagctactgacactcaatgccagatgtgaaagcagccggcgggggagctgtttcctgcaaagccatgggtggagctgcccaaggctgtgggagtaaacctcttgcatcagtgtgacctggatgtgagacatggagtcaaaggagatcattttggaactttaaggtttaatgacagccatattggattttggacttgcatggggcctgtagtccttttgttttggaaaatttcttccttttgaaatggctgtgtttaaccaatgcctgtacccacattgtatctaggaagtaactaacttgctcataggctcataggcagaagggacttgccttgtctcagatgagactttggactgtggacttttgagttratggtgaaatgaattaagactttgggggactgttaggaaggcacgattggttttgaaatgtgaggacatgagatttgggaggggccaggggtgaaatcagatggtttggtt

SEQ ID NO: 900050 - DNA, 620 bp, Homo sapiens
aagaaatgagaaacttcatctcttctggtgagtagctacttgaggctctgttccaacctggcaaaaccwgacagtaaattaaaaacaaaaagacttgggatccaggaaataaggcttcaacctaagaaaacaattagaaaaaaaaaaagcccacatgcagcaggtgccaagatcaattagtctagcttgaagcaagggctagagagctccaaatgagaagaagaaaggaagagagggagagaataaaaattaaaaatggcaattttggggaaacaaaaagctatacaaaagaaaggatatatagtcataattggttttcctatggtgaatgatacattggtgtagtaatgtaaatgttttgcattacatttaactgctatacaaaacacaaatgatgatgctttcaaaggagaatgtagaagttaaaaaatgaagtacatttgataaagtgtgaagccaagccaagccttcattctgccagtctgcatggctgcagggttaataccacatggaaacccccaaggcttacagcctgtgttctccaaaatggcagcttgagctgcacctgagtccctttgaccttggtgggaacaggagctgctagccagaatgtggaaagc

SEQ ID NO: 900051 - DNA, 581 bp, Homo sapiens
ggatctaagcaatgcgtaccataatgacactgttatccctgaagttctgagcactgagtacatattaatattaagcctgcctaagaacattttcaatgattatgttatattattaactcatactgagtttatatcaagcaaacctctgtctgcttgaaaatctgttaggacatactaacatcatggagttaaatttctgggtttaaatacaggaatttatttgatcacattccccctagcccccacacaagagtgaatgtaaaaactgatgaaatctgaataagatctgttgcctagttcataggaatgtgccaaggtcaatgtcctgtgtttggtattgtgctacaattatgtgagatgttaccattgggggaagctgggagaagggtacacttctctgcagtttttttcttttttggcaacttcctctaagtgtgtacgtattttaaatgaaaagttttaagaaaattagtcactcacaatatttaagagcacccacaacrttttggctcaatttctctggccatgtcttcagtagttttaggggtgccctttcttgtctaaacatgatgacttctggt

SEQ ID NO: 900052 - DNA, 643 bp, Homo sapiens
aatggggcatggagtcttcagtttaaaaaagggaaaagcacaaccccataccccttgttttgtgcctcttggcacttcactcctgaaaatccctatacttgcatggcaggctggaggcccacggagggccattgctctctgtaatgtctgtgcacccagttttcaggaccccaagtccaaaagagacaagaccttcataggatttcttagggattgagctggacaaagcaaaggtttgtaagcaggcactagtgaacactacccaggagctggctttgacctcgttcctgggagaaagctgccctctggtggcacagcttgcttttataactcaaggggaagaaagagcaagctctggtccagtagaaaagccaattgaggcaaagcctagattagacggtgtagaatataaactggacagaaagcacagtggagctctcgtgtcttttccattctctgcattcttcagggagggcaactaacacggatctatggcacttaaagtagatgccgtaaccgtgccaacccaactctcaatggttggcacttgtctyagtctgttttgtgcttctataacaaaatacctgaggctgagtatttataatgagcagaagtttattggctcacagttttagaggctgag

SEQ ID NO: 900053 - DNA, 581 bp, Homo sapiens
gtctcccaccctagtttctactaacatgacatataagctggctgcacttcatcaagtcccagctactgattttctgggagtatgtaatatgtgtataaccatgtatcagattgattaggacccatttgtgtgactgatatcacatgtccaaaatagtttcacatttataatcttaatttttaaccatactacaaacctgtgagatagaaagggtgaatatatttgttccctttgacgtattagaaaacttaggcaaatagagattcagttaatagtagagtccaggtctcttgactctcattcttgggttcccacactaaattaaactggattagtcttttgggataagtctgaaatggaatgcaactagattctttgtggaaaaaataacttaataaattctattcaattcctaaatgagtagataaaaaacaaagttgtatttcccttgttgagaatttgcctttgaatccctctgtgaaatgaattagaatgttttcttaggatgtaagaaatatacaaactcagaaaaagcacatctcacatatttttwaatggataatttctcctgggacttcttt

SEQ ID NO: 900054 - DNA, 525 bp, Homo sapiens
ccatctggacagtggtttttatttctgtatggtttamcacaaccagcatatttgagactggggaagaatgtatggcatttccaaagtccccgtttgaaaccggatcatttgaacttaggctaaagcagaggcacttcgccaaggggttaccattggcctgacacctccagcaaggacccagcattggtcatttgacatttgcctagcactggacatttcctgtgcaggacctcttggactaccttacctgcaaacaatctgatattgactgttttacgaaagagataccagaattttgaaaatgggccaggcgaaggcatatcttaaatgagctatcctagccaagattttcaccccgctgtttccactgatccacacccctccccacacacaatttggactatctgtttaaaaactgggtgacttatgcgattttatatctgtctctgctgccatgttgactgtagatgaaccttagtcatttcacaaactggttaatcttctggtcacttgctgaggatggtc

SEQ ID NO: 900055 - DNA, 537 bp, Homo sapiens
tttgatgtgggcatttagtgctataaatttccctrttaacaccgtgttagctgtcccaaagattctggtatgttgaatcttttttatcattagtttcaaagaacttgatttctgccttaatttcattatttacccaaatgtctttcaggagtactttattcaatttctatgtaattgtatggttttaagtgaatttcttagtcttgagttctaatttgcttgcactgctgtctgagagactgtttgttatgatttcagttcttttgcatttgctgaggagtgttttacctctgattatgtgatcaattttagagtaagtgccatgtggtcataagaagaatgtatattctcttgtttttgggtggagagttctatagatgtctatcaagtctgcctgacccagagctgagttcaggtcctaaatatctttgtctaatattgtcagtgggatgttaaagtctcccactattattttgtgtaagtctaagtctctttgaaggtctttaagaacttactttatgaatctgagtgctcctg

SEQ ID NO: 900056 - DNA, 533 bp, Homo sapiens
gccaaatcatcgaaaataaatawcatcacttgagaaatgatcagagaaataagaaagggccaccataacatgaataagacctactgtgaaggagaaggctttgccatttctattgctatttagggtgaactttgagttatggtgttctgttgggcacatcacatattgaaagaaaagtttgaaaagctaaagtcattgggagagcacacaggatggcaaaaagtcataaaatctttcttaacagcagtggttgaaatagttggagccacttagtttaatgaagacaaattagtgaagacagtgtggctgaccccaaatatttgacaggctttcataagtaaaagggatattggcctcatatagctctgaggtatgaatggctgtaaatggaaattggacatttcttatgataaaaagaaatttcatatgacctagagttttgcaaaaagcttccacattattagatttatacaggtatagaagagaggactactaaaggttcagacactatgggtataggatgggctcctgat

SEQ ID NO: 900057 - DNA, 533 bp, Homo sapiens
gccaaatcatcgaaaataaatatcrtcacttgagaaatgatcagagaaataagaaagggccaccataacatgaataagacctactgtgaaggagaaggctttgccatttctattgctatttagggtgaactttgagttatggtgttctgttgggcacatcacatattgaaagaaaagtttgaaaagctaaagtcattgggagagcacacaggatggcaaaaagtcataaaatctttcttaacagcagtggttgaaatagttggagccacttagtttaatgaagacaaattagtgaagacagtgtggctgaccccaaatatttgacaggctttcataagtaaaagggatattggcctcatatagctctgaggtatgaatggctgtaaatggaaattggacatttcttatgataaaaagaaatttcatatgacctagagttttgcaaaaagcttccacattattagatttatacaggtatagaagagaggactactaaaggttcagacactatgggtataggatgggctcctgat

SEQ ID NO: 900058 - DNA, 671 bp, Homo sapiens
aggtcacagtgccggcatactggtatacatatgtcaaaatgatgatggctcagattttttttaaatggagcaactaaattttgaaagaagaaaaatactcaagggaatatgattaggraaaaaaaaatgttactacttctctcttcttagccacatacatttgacctgtactgccagaggacttgggagtgttgacctagaattcacattactttcacaactccaagattacgtgttaacaaaactaaaaggtgtcaattacctgctactctaatatgaaatgtttaatatacaagtccctacaagaattgaaaaagtccaaagaaaacatgattaggttaaagtttagtaaatccttcatgacttacacagatattttcctcttaagagtataaccttttaaattgatgatactcaaaccttaacagaagcaaagcaccaggttgaggacgactggtattcctaaaagtgtgttggtcatatttgctgctgtattatttgactattgcatcaataatgccaaccagtaggagatatgtttaattaccctaatatcatttcagcaaatagtcaaaataatccaagaagaacttagaatacgcacatgatgtttaaaagtatattcttattagaagcaccaaactgcttatggcatacttcagatgaagagg

SEQ ID NO: 900059 - DNA, 628 bp, Homo sapiens
tacttcaacttctacaaggcaratttactgatctttatgtccccttgtttgaagcttttcacataatagatatatattttctggatgtatttaacccatgtctggatagctgaagacatttgtaagtcatggcattatataattgactctaaataactaatgcatgtggggcttaatacctaggtgatggattgataggtgcagcaaaccaccatggcacatgtttacctaaaaaccctgcacatcctacacatgtatcccagaacttaaaatttgaaaaacagaacaggccaggcgtggtggctcacgcctgtaatcccagcactttgagaggctgaggtgggcagatcacttgaggttgggagttcgagaccggcctgaccaacctggagaaaccccatctctactaaaaatacaaaattagccaggtattgtggcacatgcctgtaatcccagctactcaggaggctgaggcagcagaattgcttgaacccaggagacggaggttgcagtgagccgagattgcaccattgcactccaaactgggtggcagggcaagactgtctcaaaaaaacaaacaaaaaacaaaacagaaaaaagtagacagtagtcacttaaaatttgttga

SEQ ID NO: 900060 - DNA, 628 bp, Homo sapiens
tacttcaacttctacaaggcaaatttactgatctttatgtccccttgtttgaagcttttcacataatagatatatattttctggatgtatttaacccatgtctggatagctgaagacatttgtaagtcatggcattatataattgactctaaataactaatgcatgtggggcttaatacctaggtgatggattgataggtgcagcaaaccaccatggcacatgtttacctaaaaaccctgcacatcctacacatgtatcccagaacttaaaatttgaaaaacagaacaggccaggcgtggtggctcacgcctgtaatcccagcactttgagaggctgaggtgggcagatcacttgaggttgggagttcgagaccggcctgaccaacctggagaaaccccatctctactaaaaatacaaaattagccaggtattgtggcacatgcctgtaatcccagctactcaggaggctgaggcagcagaattgcttgaacccaggagacggaggttgcagtgagccgagatygcaccattgcactccaaactgggtggcagggcaagactgtctcaaaaaaacaaacaaaaaacaaaacagaaaaaagtagacagtagtcacttaaaatttgttga

SEQ ID NO: 900061 - DNA, 602 bp, Homo sapiens
ttcaaatgatatatagagagggtgctacaagggaacttacacagaagttgactatggtgataatataaaaatatttgatatagtataggcacacagaaatctcctactgaaaatccaaaratagttttatacgaagaagaatacatgtaaaaattatttaactatttttctttatacagattcccagagaggtttaatattcaagaatgttcttcttttttattttcatgcagatgtaacataatttgctaagtgtcttaaatctgtaacatgattaccttcctttattctatgggaagtccctgcagcaagttttaactacaacattggctcaaaatattgtaactcatatgctacttagctctgaaaaatacatgttcatcctctgttgaacaaggaacatgaaataccttcctgtttgtgggctttgttctacaaatgttaatgcacacttgaaattgatttgatgagttttacctttattttaaaactccagtgctaaattcccatattacattttcaggcctatggcatctaggatcagctttgggccaaaatattattttatttcctatttcattagttttttttctggccaacct

SEQ ID NO: 900062 - DNA, 674 bp, Homo sapiens
aatatcccatttaacttttgcaatrtcccatcaagaaattgaatattacttaatgaacactgtagtcccaccttatttgccaggaatatgttccaaggcccccagtggatgcctgaaattgtagataatatcaagccctatatatgctacattttttccatctgataagtgacaaatggatgggtagcatgaacagtgtaggtatgctagacaaagagatgagtcacttcctggatgggatgagcaggagggcatcaggtttcatatggctacttagaatggcacacaatttaaaatttatgaatttttatatctgaaatatttcatttaatattttcagatcgcagttgacttcaggtaactgaaaccacagaaagtgaaactgaagataagggaggaggactacagtagctgtgtgactttttcacaaaattaatcattataatcaaagaacaaaatactgcagtagtcaagtatgtttgaatcttagggtttcagaccattttcctttctcagttttctatctcagagtgtaagagtacatatagcctggaaacgatataaatacaataaaaagaacaagatataaaaagtctttactaattgattaaaaagaaaaggttaaggaccacgtggaaatcaagttatgtttatgagttctgagaatgacaaca

SEQ ID NO: 900063 - DNA, 539 bp, Homo sapiens
aattgattaaaaagaaaaggttaaggaccacgtggaaatcaagttatgtttatgagttctgagaatgacaacatgttcagaaggaaatagttttaattctatgaaatttaagtttctatttctagtttttgaatgtaactctttgaatattgtccttagttttgttttcttgttcttttattttatttttaattgacacatcagaattgtacatagtcatggggtacactatgatgctttgatataggtatacaaagtagatgaagaagacacaagtaaatggaaatatattccacattcatggattgtttttcaaacgctaattgtatttattttagaaatgtagaaatagtcacaaatagaaattagtatttgataagtgctgagtctctgtactaaattagctcacctgattatgtgaatcatttaatgtttgatttagctgataagactggtcaatattaatattataaataytatataccattctcatatcatgctaacataagaaacaataaaattttaaaagaaaaatattg

SEQ ID NO: 900064 - DNA, 643 bp, Homo sapiens
agtgtaagttcgctggttcatgtgctaggatacctcatgattcccactggggagcaaagtgattcccagaacatagcattgtgctattattcttactccctttacttattctgagagcagctcagaatctaggcatcaaagtaaagccccaaatttcaaacacaaaagtgacaagaactttcattttcttgacattctcctgggggaacagtggctgttattagggtgaatttgacagcattgattgattgtcaattttatttagagagcacaatggcccccactttcattttattcttaccaaggaccctttacaatttgactgtattttacccactcttcatttcacccacccccatgtatccctccttccatcctccaaatagttgacagatttggaaaggggatagtttaatcatatgccagtttgagtggaagtcaatttttatttcatttcttctgtgcttcactgctggccaggctttttaaaaattcttttctgttgctctgtaaataatagccaattcagctctttctgacttaaaagaaaacctattctttgcaaygcctttgttttattccaaaccctagtgatgttctgacccatacattttatttgatttagggcctgtagatttccagt

SEQ ID NO: 900065 - DNA, 560 bp, Homo sapiens
cagtgatacctaaactgaaacacaggaagttgtggactcaatcaaagggcaggggaagaaagtgccagtgttccaggctcaagagtggtaaatacctagagataaacaaasgtacatgttctgggagcaaaaagcagttcaataaagctgaaaagaaaagcacagagcagggctggcaaggtttgattctagaaatgtaaggagttgcttatccatattaaacaaggcaagactgggtccttaggctgaggagggacctctgtctgccctttgcttccaaggctgccattttatttgtgacttcgttttctcttcaggaccatcacagagactcatttgatatcaggttttctcttttaggggatttccttgtgccccacgttctgccctcctacttctttgcaagtggcaagtttgtggcatcatttgggttctaaaacacttgactgcctttgtcttcagatcttttctttacctaaaaaacactgctcaatctcatctgtctcaggctgataccaagtaactatttcttttgaacaatttgggtctggtggttctgt

SEQ ID NO: 900066 - DNA, 643 bp, Homo sapiens
ctgcaccaaacatgggagtgcaggtatctctttgacatactgatttcattttctttggatatatacccagaagtagaattgctggatcatatggtagttttatccttaattttttgaagacccttcatactgttttccatagtgactgtactagtttacattcccaccaacagtgtaaaaaggcttccttttctccatgtcttcaccaacatttgttacctttttttgattaaaaaaaaactattataggtgtcaggtgatatctcatcatggttttaatttgcatttcacttaagattagtgatgttgagcacttttacatatacctgttgacctttttttgtaggtcttgttttgattttaatttttttgtagagaaggtgtctcacgatgttgcccaagctggtttcaaactcctgggcttaagctatcctgctacctcagcctcctaaggtgctgggattacaggtgtaagccactgtgtcaggccattgttttgagaaagacctattcaggttttttgcccattttaaaatcaggttatttgtttttttgccattgagttgtttcttaattcttaaaatattaataagatgtgagcaaacagtttaaatttcagmaaactaaatatctttgaaggtca

SEQ ID NO: 900067 - DNA, 622 bp, Homo sapiens
cttccctggttttggtattagggtgttactggtttcacagaatgatttagggaggattccctctttctctatcttttggagtagtgtcaataggattggtaccaatttttctttgaatgtctgagagaattcagctgtgaatgtatctggtcctggacttttttttattggcaatttttcattaccatttcaaccttgctgtttgttattggtctgttcagagtttctatatcttcctggtttaatctgggagggttgtatatttctgggagcttatccatctcctctaggttttctagtcgatgtgcatactatgtacaccttgttcatagtaaccttaaataatcttttgtatttctgtggtatcagttgcaatatctcccatttcatttctaattgaacttatttggattttctctcttcttttcttggttaattttgccaatggtctatcaatttcatttatcttttcaaagaatcagctttttgttttatttatcttttgtattttttgtttcaatttcatttagttctgctctgatcttggttatttcttttcttacgctgggttcttgtttctccagttyaatgactttaaataacctgatgactatgtgcctag

SEQ ID NO: 900068 - DNA, 637 bp, Homo sapiens
gagaacaaatctctgcctggtaacttagagaattctcccatatctggaccaaggccatcaaggtggtacctctacaagtcatcaggaatcacagcattactggtcttggggtgccccctaaagcagatacagtttagatcacaataccttagtcttttcaaatttccagaaggcctccctgagaaggatggctacaaataagctcagacagcaaagactagaataaatgcctaactcttcaatgtccagacattgaagaatatctaactagcatcaacaccatctggggaaaggtgacctcaccatatgaactaaataaggcaccagggaccaatcctggagaaacagagatatgtgacctttcagacaaagaactcaaagtagctgtgttaaggaaactcaaataggttcaagacaacacagagaaggaattcagaattctatcagataaattcaatgaagatattaaaataattaaaaagagtcaagcagaaattttctggagctgaaaaatgyaattggtatataaagaatgcatcagagtcatttaatggcagaatggatcaagcagaagaaacagtgaccttgaagacaggatatttgaaaatatacagaggagacaaaagaaaaaataata

SEQ ID NO: 900069 - DNA, 626 bp, Homo sapiens
agcctcatccccattactccctttgtagatcaccctgttctgtccagacagcttctttctgttaccccagtccccatgctccttcccaccccagtaccctacaggggctcttttctcattgggcaatggtctcatctcatttctacctggctaattcttcctcaccttttcagtctgaggtcatgccacttccatagaggacacattttactgccaaattcagattagattccacttaatataccctctgatacactatagttttcctccatgacacttagcaaaattgttgtgacataacagttatttggtagttgggttttttgtttgtttttaatatccctctctcctacacagatgtaagatccttgggacaggaacagcatcttttctgttaccacctaatctcagcatggtgctgatacataattaatgctcactaggtatttggtgaatgtaggatttcaccaaatcctttcatcccccaccaggacctgaaggartagtaatattgttagtatccaacattttgccacaagtaatatgtattttagtagcacttctagaaaaatgagtttaagacatcatctaaacagtaagatttgcaaagactgtactaggactga

SEQ ID NO: 900070 - DNA, 639 bp, Homo sapiens
accaaacatgggagtgcaggtatctctttgacatactgatttcattttctttggatatatacccagaagtagaattgctggatcatatggtagttttatccttaattttttgaagacccttcatactgttttccatagtgactgtactagtttacattcccaccaacagtgtaaaaaggcttccttttctccatgtcttcaccaacatttgttacctttttttgattaaaaaaaaactattataggtgtcaggtgatatctcatcatggttttaatttgcatttcacttaagattagtgatgttgagcacttttacatatacctgttgacctttttttgtaggtcttgttttgattttaatttttttgtagagaaggtgtctcacgatgttgcccaagctggtttcaaactcctgggcttaagctatcctgctacctcagcctcctaaggtgctgggattacaggtgtaagccactgtgtcaggccattgttttgagaaagacctattcaggttttttgcccattttaaaatcaggttatttgtttttttgccattgagttgtttcttaattcttaaaatattaataagatgtgagcaaacagtttaaatttcagmaaactaaatatctttgaaggtca

SEQ ID NO: 900071 - DNA, 651 bp, Homo sapiens
cctttctctcaaattcccattctccatatccctttaggtaggtgaggatcttatccctagccagcagctgtaagggaactgggccttcctttctctggacatagcactgkaggtcccagtatatgttaagaatgtagatggtcagaggaacagaggaaaacctgcatctgagtccccttgtcatccctcctgtggattcctggggaagcatggaaaacaagtatttaaaatgacaggacaatccatctgccacccgtgggaatggtagaaaataagggatattcatggaaggctgcttttgtacagtctcacaaacagcagcccttagacctaagaggacattgcctatcagtcttctcagtgtagaggaagaactgtcagggccagggagtttgggatgagagaccacaaaaggcagagaaagaattgtcctctccccaaagtgcagatagctctagaaaggaagtaggagttgctcttaatggaccacatacagatgccctatggagacaaacaaatgacctcaagagccactggaaaacctggtctcaatgtgtagcaggatttaaaaattcatgataggaaataaagaattggtggagacagagtcttcccaatattaagcagagaaagaagttgcatgatatgcag

SEQ ID NO: 900072 - DNA, 590 bp, Homo sapiens
acagcatatttccttcacaaatatttactgtgcaggaaatagaagggttgggcctattaraaaactttctgcattgctcatttccctaattattaatgaatattgttctcctagcatcacaaattcatttctgaactcataattaaatgactaatacatataaggttctgtatccagtaaaggaaataaccaaataattttctacatttgatagcttttgggtttattaaaagcacatgacctcattctttctgatgccaatatcagggtgccttagagagaactgttgtgaaaaaaacttgtcttttttttgttgaaattgatttcaaatatgaagcaccaaaatttacctttcttaaaagaaaccttggtaactaaagccagtttttattaattgtaaaaggaaatttctaatttattaagaaaattaatggcttgataagtacatggagaaatttcttacaagctaagattcagtcatttctctgctctcataaacagttataatagctaactatttccaccatttccaaagaattgagaatttatttgtttcttaatagaggattatcttcattggaatattctca

SEQ ID NO: 900073 - DNA, 635 bp, Homo sapiens
atctcgggatactgatcagggagatgcaatacattaaagatgctgattcaggacaggtaagcccagtaaataacaaagacttctaagaaaatctctgtgtattatactgtggtgaagagggaattggattcgagaaaattcaacacagaatcatagctgcgtatggatggatgcatttgtgaaagctcaggtatccgaggtatccaggtttgcccttaagccactactaaaagatagtagttacccttatttcttaatatcttcaaagatgggatttccacattttccccacaatgcttatacccaggctattttctaatgtctatcctaaatccctcctcttgaaagttaagcctgtcctttcttggggaatggttgtctcatgtttctttcaatatcatgaatgattgaaaagaacttcttatgaatctgccctccctgtccatctatattccattccaaattctactgttctcagcacctctggccatgaatgctatcatcctgttttttccttcttgtattttttttctacccccagataattgcaccattacttttagtgtttccttcaaactatataaacataaatttcttttggcttgtcatgcytcctcccatatttcaaatctcta

SEQ ID NO: 900074 - DNA, 672 bp, Homo sapiens
ggcagcagccttgccccctactgagttggtgggatgggagccctgtgatcctgggcagggctgcagctgcccagccatggctccagatccaggcatccctgcastctagggagcccaggaagctctccttctccacaggctcagaagtgcccactcctgctccctggcctctccctgctcctggtgcccgctccaatttcagagcaaagttgaagccaagcccaggcattgttgcaaccagccctcacactgcctcagccccctctgaaactttgggcaccagtgagctcagggagggaggctgggggctgctgagggcagtttggtgcaggcctgtaggtgccccttggtgcaagcagtctgggcaccatggagagcatgttgatagttgcaggaggcagacagatttctaggagggaaggggtgggtccctggtgaagatccaccttcgagccagggatgacctgcagccttggggccaggctgccagttccaggtggggtccgtgacccaggacgagaacttatggtgcattttccaggcctgcccatggccacctatggtccattcaatatgcacttcctcccttctgagcccataaaaatcccagactcagtcagacttgcacactcattgggattacctgcctgctgaaaggacctacccactgca

SEQ ID NO: 900075 - DNA, 494 bp, Homo sapiens
ctactctctcattttgaattcyagtcactatattttcccctccttccttcagctctagggatggtggtagctccactgttcctatccctgggattctgcaccttcccttacagtttccctatgccctgcctgcactattgtaaacagtctctccttagatcatcctcgtatgagcacacttctgcttcctgctgggttcctgattggtactaattgtaatgcttctcctaactggtgcttcttcctgtgtcccctcatactgcatcatttttattggcaagcaaacctgctgtcctgtggtcagtgctctctgggagagtccagtcattcaattggatattcaacaggcaagcagttgctctgtggatgtatatcacattaggccagccaggaatcataaattcacattcagagagaagataaggctggtgtgagtgcgatttacagaaatcattcattacattcccttcccactcatgccttttaatggtagc

SEQ ID NO: 900076 - DNA, 633 bp, Homo sapiens
ccagcttcccgtcagataacacatatacatgagctatatgcactcatgtgtatacacatataactcaatctaactttcccctttctataaattcaaattatgttccctgatgtggtccatcctggaggtcacgcacagagctcttacctgaaatggaagggaagataggaaggaacctaacacatatttagcatctactatatgtatataaaattaagacatatattatcctattttatcctcacaacaaccctgtcaggtatacattattacttctatagatgaaacaaaataaactcagaatggtaatagtcactcatgtttgagtgtcctggccaagaaagacaccttcctctttcccaagtctttattgtaatctcacctatgcacatatatccaggactaattctcaatcggagaaaatttctaaaagggccagcaaaaaggagcactgctcagtcttcatgctcacagcagtttcctccttgaaagtttccatggcagggccatcaactggggccaggagcagtggaggagcacctggaggtggagatcttttcttccmgcctgtcagggctctgctcagatgccatccatctcacaggcccagggagtgtttaatgaagccgattt

SEQ ID NO: 900077 - DNA, 699 bp, Homo sapiens
cagtgggcctaggggtggaaagggaggcataagtgccaaaatatatgatgttaaaactcagaaagatcaggaataagtcctgaagtgaagtgtgaagtggcaaggcatccagtttagggcatacagaataccagagaggggaaacctgatttatgaggtgcccgctacaggaatggctgggcctgggctggctggcttaaatttgcaagagaatgaggtaacttagcctcaccagattcttgggaggggtggggtatggtggatgggaaggaagacacacaaaaaataaaatcagatttctggcttcattatgttcataatctagttggaaatataagattaatctatgtaaaacacctggaaagatgctttgctagttttcctcattgccgttgttttgttgtttcaaatatttgcattcctgggaagttaaaagttaacttacaatacagacagaattaacaaaagatgagttgaaaatacaaacagcatgcaattgagggtgaaatgagagatatagtaaaaagataagtggtataatttgagaggggataaagtacaaatgaactgtgtttatgaagacttcttggaaacagatatacaccatggtcattataaactgggatgttctrttatcttagttatgacccagagctaacagaaagcagtggctctgcatcacacatagactgcagaatg

SEQ ID NO: 900078 - DNA, 659 bp, Homo sapiens
atttcaaggcacacagggaaacatccatgtatatagccagggaacaactttatctgctaggaagagagtgacttgcttctgggctcacgtgacaaaaaactcacacttgaatgatagacacatctttttctttctgtttgttggcagattgtccactatagtagtttgcatgctaagcagaattggagggtgtgaaggaaacgagaagataacaacgtgcctaaacaatttttcttctttcccccagcatgaggagtatacatcagaagtttatttcccctatagtcagtacctaactatctttatggagatgctaatcaacttctttaataatgcttctggaataaaatactaccactgttcggggtcaaagacacacaccgtatttttttgtctttgcatatatgttagagcctaattcattctatagtgtctatgtatgtcattgtacatagtatttatctatctatatcattgtacatagttgtctgcattttatgatgttggaatagagatttggatttgcaattgaratacatctatattgacttttttgttagtttgttttttaaaaattctttctcagattatttcgttttttctattctgctttaggccagacactctgaaagggtctgtacatggaacagactgggcat

SEQ ID NO: 900079 - DNA, 620 bp, Homo sapiens
ctaaaagtatgtgcacatgtttaaaatggacttgtaatggaaagcaatagtttgctattgttattattattattattattattattttgagacagagtcttactctgttgaccacactgcagcgcygtggcagcgatcttggctcactacaacctccatctcctggattgaagcgattctcctgcctcagcctcccaagtagctgggactacaggctgcgccactatgcccggctaattttttattttttggtagagataaggtttcaccatgttgaccaggctggtctcaaactcctgacctcaagtgatccactggcttctgcctctcaaaatgctgggattacaggtgtgagtgaccacgcctggcctaatttgctgttctatcctactcaccaccagtctttcttcttagaggttgaatttgcttagttctgatgataatctccaaatctctaaaaatatgcttacacttaaattttggttgggcacctgtagacactattaacttcctttcatggatttttctctggaacacagcttcagagaaaaggccttcatttaataacagcagcagatccccctcctatgtagatatagttctctacccagtcaccccaa

SEQ ID NO: 900080 - DNA, 623 bp, Homo sapiens
ctttttggaacccagcttctccatctccagtagacctcacatgtccacagcacactatgttttcataatatactttttaatcactgagcggttgagtacctgagacatagcataactccgtgtcctcagatgatcttttggagccaggcttttctctctgtagaaaacctcaccatgcctcatgacagcacagtctgagcctattaatttgagggttctttctagggaacatcgcctctatccactaagttggtggcatcatgttaactggacttggtgaccacgaagtactgtgaatgccatggtaaaacacatgaactccaggggatgggaaataacccttgcaaagattaagggacctactacattggtaatgtttttaggggtcccatggtcttggggatgctgggacatcccctccaaaatgaaaacaagttattgtgccttaaatttcctatcattaaggaagaactatgaagcttggtcagacccttcagggtttgaggcagcttatttccacttgggatgcagttggtcccaagacgatatagctgattcttatcatctyccttagggatggagttctgacccgtgtatcagatgatgttaagaatgttagtttt

SEQ ID NO: 900081 - DNA, 627 bp, Homo sapiens
gaggatcagctatacaatcttgggaccaaatgcataagtgggggctgtggtttgtcccactatccctctttttatttatggctccaggaattgtgacarcagaattcagaagaaactgtatctggatggagcaaatttaatgtgagaagcaagtggatctgagcaatgcaaggggtgaattgtcataaatgctgtggtgcctgcccagatttgtgtcacggggccataatattgtctctcagctgctgtaaatgttggctgctgtagcactatgcattctttcacacttagcttttgtccactcatcattgttatggttatattctttcatatggttgtaagtagctgtaatgtagttcatttatttgtttttactgctctatagcattcaactgcatgaatataccacaatttgctcattccatgcttctattgatggatctttgaattgtttactgtttttggctgctgcaaataatgtagctatgaatattcttttacctgtctgaatacacacacatatgtttttgttgggtttctatctaggagtgaaattattagatcagagggtacacaaatgttctagataacagatattgttgaacagttttccaaagtggtgtgtgt

SEQ ID NO: 900082 - DNA, 554 bp, Homo sapiens
ccatcttctgcatcgcccatgctgggagatgtagactggagctgttcctattcggccatcttggctccaccccccaacttcctctaaaagtattttcaatatcrtcatagttaggctttaaaaaaaacatggagtaatatatatatgtgtgtatatgtgtaaaatccttcacatatgcatcacaatattaagggtggctatttcttggtgattggattatgaatgtttgttgactatgaatgcttctttacctttttcttttctttttccagtctctcagtaatgaacattattacctttataatcagaaacaaaggtaaattgtgcatgcatgcagacacacacacacacacacacacacacacacacatacacacacacacacacacacagtccccacagggatccttaagttaccctgagctgtggacactgtctgaatgaacacactggtgggcctcatctttggaggtcaatgcacagtcagcaggcctaactaagcagcaagaaatacagatgataatgtcaatccttcagaaatgtgcttggctgat

SEQ ID NO: 900083 - DNA, 589 bp, Homo sapiens
tttgcacctcactgctgtcacttcgtatgatattcttaatcttcttgcatgttttagcaggtatcagtattttattactttcctagcaaaacagtattccattatatgagcataccacaattttgttcatccattcttcacttgattgacccttttagctcttaccaacagtgctataaaaatttgggtacaagttttgttgtgaacatatgttttcacttcttatgggtatacaactagaattggtattagagagtcatatggtattttttatttattttattttattttttttaagagttggggtttagctctgtcaaggcagtctggagttcagtgatacaatcatggctcactccagcttccatctcctagtctcaagtgatcttcccacttcagcttcctgagtgctggaaatacagaaatgagccccggtgcctgactctgtatttttaactttttgagaaactgccaaactgatacccaaatgatkgtacaaatctacagattcataagcagggtatgagtgtaccaatttccctacatctgtgtcaaaacatgttattgtcttattattattaatagccat

SEQ ID NO: 900084 - DNA, 600 bp, Homo sapiens
tattagtaaatcttcaataactagcactaatctttgcccaaatgaggtaaggcctccatttctgattggaataattaattccttggcccacaagaaatcttaggctattaaaggtamaaatcatgtttgtcttgagtttcttaatagtaatgggctttttatgtagtagatactcaaaagtcaactgagtcaactaggtaaagctgagcaggataaggctttattcccaatttgctttcatagctctgaatataagaaaatgactccaaaataaacattctgtggttctattaagctgttttcaactttacattataaaaatgcttaaaagttgagagattatacaaaatgaatacctgaattcaaagatatatctaaaatgcaaagcaagggtatttaaatatttgaatgtcaggtaacttttgagggaagaggaattggcattttctagcttctatatatttaagccaatttattagataattacaggtcttgcaaatagctagtagagttaatttggcaaaggtgaaagggaatctgctgtctttatcaatcttggaaaagtctgtactatattccctctggtagaacataattagg

SEQ ID NO: 900085 - DNA, 627 bp, Homo sapiens
tggtacttgaaagatgggtgtttggaagggaagggaaaaggaaagggggacatactagggagtagcatgggaaaatttgtgacmatgatgtggggaagggacagtggaacaaagaggaggacagaccagtctccaagttctagaaagaggtgctaagaagtggtgggaaattgaagatgtcttgacaggtgataccagattgtgtgatactataaaattcaggaaaggtgtttgctctgtttttgatagcagtggggcacccatggagcaggcaggtgactacaaggcgggatcttgcttcaaagctgtcttgcaggagaagttacctaaatacccagactgcttttgagtggggcctatgccgtaagcatgtcttttattttgaggtgttgtgcttttatttttaaaaatcttctagacataggcacaattgaaccaaactattagccccaagtaagtgaatatctgcaaataaacacttaatattaaagttaatgacctagcaccttttaactatccacatgatgaacacagttcttgtcctgaaatcaagtaagtctgagctctacaatagaagaggagatattattatccccattttacaggtgaagaaaggagacctagaga

SEQ ID NO: 900086 - DNA, 627 bp, Homo sapiens
tggtacttgaaagatgggtgtttggaagggaagggaaaaggaaagggggacatactagggagtagcatgggaaaatttgtgaccatgatgtggggaagggacagtggaacaaagaggaggacagaccagtctccaagttctagaaagaggtgctaagaagtggtgggaaattgaagatgtcttgacaggtgataccagattgtgtgatactataaaattcaggaaaggtgtttgctctgtttttgatagcagtggggcacccatggagcaggcaggtgactacaaggcgggatcttgcttcaaagctgtcttgcaggagaagttacctaaatacccagactgcttttgagtggggcctatgccgtaagcatgtcttttattttgaggtgttgtgcttttatttttaaaaatcttctagacataggcacaattgaaccaaactattagccccaagtaagtgaatatctgcaaataaacacttaatattaaagttaatgacctagcaccttttaactatccacatgatgaacacagttcttgtcctgaaatcaagtaagtytgagctctacaatagaagaggagatattattatccccattttacaggtgaagaaaggagacctagaga

SEQ ID NO: 900087 - DNA, 652 bp, Homo sapiens
agagagtccatgacagtacttccaggctgttactgaatgagccagaaagttctggaagtacagaaagagaggtcactgaaggaaaatgccattacacagcacttacaaaatgaagaacatgaccatatggatggtccagatgatttgaacagacatgtaattatcttggagaagcagatagtactgggagagtcattgatgattgagggaatctgtttaaatgtagctacattgggatagtattataatcataatatttgttgagtgcttgctatgtgttgggttgtaaatcctttacctatattagcttacttaatccctacaaaaaccctgcaagatcagcagtgctattattgttcttattttacagatgaggaaactggagcaaggagaggattttgctccaaagtctaatggctaactgagctgaggtttgaatccaggcaatagtcaccagagctgcactcacaaactcaaaactgtagtgtgaggaaggtggatcacatgctttggaagtatttcaggctgggaagtcttccagtttctggaagaaagatatgataaagcccataacagaggatatgggagccarccaaggaagtgaacccatacacatgttcccagcttctacagagggccaaattctgatagg

SEQ ID NO: 900088 - DNA, 618 bp, Homo sapiens
aaaccccatatttccaccattaatgcagcagtggtagggaagactccttaacttccaccttgtcatatatatatgtcttctcagtcatatcgaagtactgtggtttaaaccaatgtccccccacaacccacccacctctactgataaaaatatatcacactactctagtgtagccttaggttcctcttctgcacacacatgtatacagctagtccatgatgtatgccttccagccggcaaaggtcttttctgggtcttcatgtggtatctgaacatgtcccaattctccattttcttaagaccactctttgaggtcattgctctgacactgtttagttatgtaacactgtggtgagctacaattatttaaacaatgaaaaatctcctgaattggtggtttctgcaatatagggagggtcattcattcattttcagcacatatttattgaatatttatgtgggctgctcttggcactgggattaaacagctataaacaacacacaacacacttgccttcttggagcctacactctgayaggggaagacagacaataaataaatatatgttaggtgaaaaatacatcaagatgagaagaaagcctgggcgtggtgtctca

SEQ ID NO: 900089 - DNA, 636 bp, Homo sapiens
tttgtggaagaggaacattggraatagactatagtgtttcacttgctagtcttgagctttcttttttcggtgtaggacatgtctggaggttttttaactagcaaaatagaataacatggtagcttagtaagatttctgcataggagaaacttggtctgaatagagtagaaggaaagtgcagaaaaggaatgatgaagagctgaagaaaggcaggcttgagaaggggaaggaagaatggaaggcattgtgaaagaagagttgacaggacctgctgaaggatgggaggctttttacgcagattgggagaattgctatatctcagatagaagcagggataacaatccattttgaagataacagtttcacttttagctatggttagtaatatcgaacctaaaaatgatggcacagcagccaagtagaaaggtccagcctgctgttggagatgcaccctagggagaatgttcggaacttcatatataatgtagatgaaggtgtaggaggtgtcaacagagacactgagtcctctttaaaattgtgagtagcgggggcagatgctcggcaaaatccaccttgctccttgttcctgtggtttaggtctggactaagaaaaaaaaatagtcattagtttgggga

SEQ ID NO: 900090 - DNA, 609 bp, Homo sapiens
accgtttacaaagatgagggcagagctccggaaaagccaaatgccttggctggcaacatcagagagtgaccaccctgcctgggttgaaagagcaagagggaggacctattatcagaactcygaaagggccacctgagagaagcagggatttcatagaacaaaagttattatcctggtcacgtagggcagctgtactacatgttttggctcagcctttcaggcagcttcaatctcaggacagctccatatcaacacaagctttcacaatcatcatggcaggagaagagcctggataagcacatgccagctcttaaatgctgctaattagaagtggtgcatcacttctgctcacattccattggccaaagcaaattatttggctttgcccacccaacttcaagggagtagggaagacagtcttcctatctactcaaaaacaaaggagagggccgagcactgtggctcatgcctgtaatcccagcactttgggaggccgagttggacagatcacctgaggtcaggagttcgagaccaggctggtcaacatggtgaaaccccgtctctactacaaatacaaaaattagctgggcatgagtgcctgtaatccca

SEQ ID NO: 900091 - DNA, 609 bp, Homo sapiens
accgtttacaaagatgagggcagagctccggaaaagccaaatgccttggctggcaacatcagagagtgaccaccctgcctgggttgaaagagcaagagggaggacctattatcagaactctraaagggccacctgagagaagcagggatttcatagaacaaaagttattatcctggtcacgtagggcagctgtactacatgttttggctcagcctttcaggcagcttcaatctcaggacagctccatatcaacacaagctttcacaatcatcatggcaggagaagagcctggataagcacatgccagctcttaaatgctgctaattagaagtggtgcatcacttctgctcacattccattggccaaagcaaattatttggctttgcccacccaacttcaagggagtagggaagacagtcttcctatctactcaaaaacaaaggagagggccgagcactgtggctcatgcctgtaatcccagcactttgggaggccgagttggacagatcacctgaggtcaggagttcgagaccaggctggtcaacatggtgaaaccccgtctctactacaaatacaaaaattagctgggcatgagtgcctgtaatccca

SEQ ID NO: 900092 - DNA, 634 bp, Homo sapiens
gaagacagagttggcaggttctattaaatataagagtggggtttgaggaagttgaggatgactccaaggtttttgattkgagcacctagattgatggagtctggaagattgtaggaacatcaggatttggaggcaaggccagaatcttgcttttcatcttgtttgagatgcctattagtcatctaagtggacatgtcaagcaggccattggataacaagtctaacaaattgggcatttaattgcatggaagaaacaccagaaatgagtcacagggaagcatctgactctctgtgtgaaaagcaggataatttcttcaaacctcaatttcctcatcattgaaatgggagtaacaaccagtgttgtgaaggtttaataagatgataaaaggacctagcacagtttttttgagcaataaacagtaaatattattaataattacttactatttttacattttcctgcctgagtagaatctacagaaaattaagtcacttgacctaccatttagtttccttgtcctaagaataaaggaatctctgagtatttttaatgggcttggtgacttacaatttcttatagctgtcatataggtctagggtaaagatgcaatttttttcctgttttatagatgag

SEQ ID NO: 900093 - DNA, 666 bp, Homo sapiens
tggatgtaaattattctccaactctcaggtcatacagataagacaaaaatatcagtgaaaaagactgaaatttgactacatgcaacttaaaacttctgtacagtaagatagcaaaaacaaaacaaaaamacacacacacacacacagactgggaaaatatgcttgcaacacatagttgataaaaattgaaggctcttacaaagaaaaataataaggccaaaagaaaaatggtgaactgattcacacagagggtattatatttgccagtaaacataaataagatgtactacctctttagtaaccaggtaaattcaatttttaaataatatataatttcaaacttacaagattggcaaaaagaataaaaactgacaatatcaagacttggtaaggatgtggaacaatgggaactctcaaacactgctatttggagtgaaattggcacagccactttagaaagcaatttaacaatatcaggaaaagttgaaggtatgtaatagctataatccaacaatatttttgtagcatgtatcctggagaaaattttgcacacatgtgcaaggtgacatttatggaactactcattaaattattccttataaaagtaaatattgcaagtgaaattgccatcatttggaaaaatgctaagcaagatgtggtataatc

SEQ ID NO: 900094 - DNA, 641 bp, Homo sapiens
tcaagtgtttgtgttggtcaaataactcctaaattgacagtcattcatacatttgagtttgaaataaaaattcatgttatttatttctgcttaatagactttaccacaagcaaattcatgaggcccacacattccttgtttcactgtactccttattttataagctctggttttgacaagcctcatctcacatgaaatgtatattttatctaaatagacaccttagttaaaattgtatctctttacattttcatcatgcaagaggtataaatgcccaaatattagggggatggtcatgtaaaagtaagtctgtcatttctgctgcagttcacacaattctgcctcctcatctagggaaaggacactggtggccttcctctctgttatactacccgcctccccctgttaatggtcctgcaagaaagatgtggctgtcatgtctggtgatgggtactctccgggagctctgttgaccagggaccactctgtggcacaaagtgaccctttcaccttttcctaggctgccagatctctggagccaccatgctggctctgtctccctcttggagtccycgggcaggtgggcactgctgtactttctatctgcctccctgttcaaagcactttctatctgtctctct

SEQ ID NO: 900095 - DNA, 636 bp, Homo sapiens
attatagggtcacacttacacacgaattttcataagttgtcatatgatttgcaagaaagcctaaattatgtctccactcaggtcttctctcaattgtggtcggaactggacattcccacgaggacagtttccacttccagtaatggctgaggaggtcctattgcaaataataatgagaaactctggaccaagtattttagaaccaccacctgaaagtattggagagtaagtaagagcaggtaggtactagaaagggtttgaaatctagaagagaccagtgacattagatgagtttcctatttttttcttttgtattgtttcacagcttttagcctaaaggcagacctggtccacactctgcaggacatagaaacccataatcttattgcttaaagaattaggagacagagatcaagacaatcataccagctagaaagtgaggggttctcgggtacggtggcttatacctgtaatcccagcactttgggaggccagggagggcagatcacttgaggtcaggagttygagatcagcctggccaatatgatgaaaccccatctctactaaaaatagaaaaattagccatgtgtggtggtgcacaactgtagtcccagctacttgggagcctgaggtggg

SEQ ID NO: 900096 - DNA, 610 bp, Homo sapiens
cctcccatccctttctctctttactccaggcatctccttgctgcttggctgctgtttgaatatcctgggtattttctgcctcagggcctgtgcacctgctgttctgctgtttggaacctccccactccctcccccaaccacatggcatcctcatggttttgtcctccactcctttgatctttgctcaaatgtcaccttcttgagaaggccccctctggctcccccaactgtaatgtaaacgctctctcactccctgcccttcttcacagcctcagccccgctttacttttctccacacttattgccatctaataataccatgtgactgacaacttacttttttgaaagtttgtttctctctttgagagtggaagctccatggaggcaggggtttttgtctcctatatgccactgggccccagtgtcttgaactgcgcctgacacatagcaggcattccttaacatttgttgaataaatgaatgatttgttgatcagctttggattcaagctataargacactgaccacctgctttgtggtggtcaggctggggcttggtgagttcccgcaaccctacaagggtctgactcctaccactgtctcaccatcc

SEQ ID NO: 900097 - DNA, 610 bp, Homo sapiens
cctcccatccctttctctctttactccaggcatctccttgctgcttggctgctgtttgaatatcctgggtattttctgcctcagggcctgtgcacctgctgttctgctgtttggaacctccccactccctcccccaaccacatggcatcctcatggttttgtcctccactcctttgatctttgctcaaatgtcaccttcttgagaaggccccctctggctcccccaactgtaatgtaaacgctctctcactccctgcccttcttcacagcctcagccccgctttacttttctccacacttattgccatctaataataccatgtgactgacaacttacttttttgaaagtttgtttctctctttgagagtggaagctccatggaggcaggggtttttgtctcctatatgccactgggccccagtgtcttgaactgcgcctgacacatagcaggcattccttaacatttgttgaataaatgaatgatttgttgatcagctttggattcaagctataaggacactgaccacctgctttgtggtggtcargctggggcttggtgagttcccgcaaccctacaagggtctgactcctaccactgtctcaccatcc

SEQ ID NO: 900098 - DNA, 637 bp, Homo sapiens
atttcaaggcacacagggaaacatccatgtatatagccagggaacaactttatctgctaggaagagagtgacttgcttctgggctcacgtgacaaaaaactcacacttgaatgatagacacatctttttctttctgtttgttggcagattgtccactatagtagtttgcatgctaagcagaattggagggtgtgaaggaaacgagaagataacaacgtgcctaaacaatttttcttctttcccccagcatgaggagtatacatcagaagtttatttcccctatagtcagtacctaactatctttatggagatgctaatcaacttctttaataatgcttctggaataaaatactaccactgttcggggtcaaagacacacaccgtatttttttgtctttgcatatatgttagagcctaattcattctatagtgtctatgtatgtcattgtacatagtatttatctatctatatcattgtacatagttgtctgcattttatgatgttggaatagagatttggatttgcaattgaratacatctatattgacttttttgttagtttgttttttaaaaattctttctcagattatttcgttttttctattctgctttaggccagacactctgaaagggtct

SEQ ID NO: 900099 - DNA, 590 bp, Homo sapiens
gaaaagctctctcaggctttaattttctttgggtcactttggaayctggtttcatcaggcattgtcatgttcccagttattagtggaaggccccaaagtctccaagggcctcagctctgcttctctatgtgcagttcagtgaacaacctaaggaataactagaaaatacatgttttttaaaaattaacaggccagagtttagagatggatgctgactttatcttacgagcttccttgagaagccgtatgcttccatgataatgctaccactggccaggcacctgtaatcccagcactttaggaggccgaggcaggaggatcacttgagcttaggagtttgagaccagcccaagcaacatgatgaaacaccatctctatgaaaaatacaattagccagtcatggtggcacatgcctgtagtcccagctacttgggtggctgaggcaggaggatcgcttgagactgggagatcgaggctgtagtgagctgatatcatgccactgtactccagcctaggtgagaaagtgagaccctgtctcaaaataataataataacaataatgccaccattgctcaggatattttaggaac

SEQ ID NO: 900100 - DNA, 561 bp, Homo sapiens
tatctaagtcacggcaagtcccttctgcttatgaacctgtaaagtcaaaaacaagttagttactttcaaggtacaataacagtataggcattgagtaaatgctccccttccaaaagggcgaaatcagccaaaacraaggagctacaagccacatgcaagtctgaaacccagcagagtcatcattaaatcttaaagctccaaattaatcttctttgacttcatgtctcatatccaggcaacactgatgcaagtgatggttttccaaagtgtgggcatcttcattcctatggctctgcagggtacagcccctgtggctgctttcatgagctggcattgagtgactgtggcttttccaggggcaaaatgaaagctgtgggtggatctaccattctggggtctggaagacattggccctgttctcacagctccactaggcattgtcccagtgaggattctgtgtgggagctccaatcccatatttccccttggcactgccccagtagaggttctccatgaggcctccaccccatgatagacttttgcctcgacatccaggctttt

SEQ ID NO: 900101 - DNA, 592 bp, Homo sapiens
tttttggcctgagcaaatggagtttgatggaaaaacagttcagcttttgacatgctacattcaagatgtctgtctgtaagaattccaagtagaagattccaaacaggcaactagacaaacgaatctgggtgcaagaaaaaggttaaggctggaagtagattttggagtcattaacactaagatggtatgtaaagccatgggactttacaggagataagtgatagaaaaaggaaaacagatacacctggttacaaagccacagggacttcgccatttaaaataaagaagaagggaggattgtgctatacacttttaactgacctgttgctatacccagcagctggggttcttgaaagcaacagaaattgaatgagactgacaagtaaacaatcaatgtatggatggctactcgcacccctgaaggcaataggatggttgggcagacgacgtcagaaagtgggcaggaaccaaaaaatcaaacccagaaagtatgaccacacccagggaacagcccagttaggacacctctgcagctgaacactgagtgggagctcagcctscaggaagaatctctaactgcccccacatacct

SEQ ID NO: 900102 - DNA, 602 bp, Homo sapiens
tattagtaaatcttcaataactagcactaatctttgcccaaatgaggtaaggcctccatttctgattggaataattaattccttggcccacaagaaatcttaggctattaaaggtamaaatcatgtttgtcttgagtttcttaatagtaatgggctttttatgtagtagatactcaaaagtcaactgagtcaactaggtaaagctgagcaggataaggctttattcccaatttgctttcatagctctgaatataagaaaatgactccaaaataaacattctgtggttctattaagctgttttcaactttacattataaaaatgcttaaaagttgagagattatacaaaatgaatacctgaattcaaagatatatctaaaatgcaaagcaagggtatttaaatatttgaatgtcaggtaacttttgagggaagaggaattggcattttctagcttctatatatttaagccaatttattagataattacaggtcttgcaaatagctagtagagttaatttggcaaaggtgaaagggaatctgctgtctttatcaatcttggaaaagtctgtactatattccctctggtagaacataattaggga

SEQ ID NO: 900103 - DNA, 621 bp, Homo sapiens
catttttttttcaactcagcaagccttgatgytaaaagaatagatgtatgtactacagttgtgtttatgtaattgctgagttaatctaagcatatacattctttttcctctagaatagttatcttaattatgcccagtttgtaagcatactctatatcatgctctaggccaggttcaacaaactgtgtcctacagaccaaatcctggcccacgtacctggcttatgtaaataaagttttatgggaacgcaatcatatcctattatttactattgtctgtggccctgagacctgcttttgccataccatgatagagtcaagtagtcactacagagcttgtgtggccagcaaaagctaaaaactttattatctctgactcttcaccaaaaataggttgtctgctcatgctctaaatttcactgaagcaaacttttaaaatatgtatattataatttgcatatgcaaagatacatatttataaatacgttatatctttataagtctgtactatcttagtttcctattcttaaactaatcaaaggcaagaaatagggtaacattctggtagatgaaataaatgttattctgactgcattatttttaatctttggtgcactaaagt

SEQ ID NO: 900104 - DNA, 644 bp, Homo sapiens
aacccaaatctggaaatttttcgtatatatattttttaaattctgtgtacccacaatctaggaacattttaaakatcatttttttagataatttccactacgctgatattttaattcttgtctgtttgtagtaaatatacacaaaatatcaaaataaatctctaggacacatctgtttcctgttcattgtgcacatcatgttataagcttttggaatgaaaatcgacatttgaaaacctcaagaaatgacaatagcagcagcgatgatgtttttcagctctcactgctaatgtgggaactgattatttatttcaaaagcttttataaaataaagcaaaccttgaatatattcagctaggaaataaaccttgaaattatatggttaccaataacagtaaattagagtttcaacaaataactcagtgattttcttaaaaatgctaaacatttcttaaatacttgcccagattgtttttgttaattttaagatgctttcaaaagtttacacccatgtgtgtgcaacatatatacatatattattctttcttttaggtaacgcagttggttaaaggaccagaacgcattcctaaacaagtgtacgttttaaaataatcttatgttataagcaggttgccaacttttga

SEQ ID NO: 900105 - DNA, 582 bp, Homo sapiens
aactactatacttgctacagaaatgttattgaggacaatgtctatatagtattatgccccatctgaagcatgctgagtgagaaatttctttttagagttaagggctggaaagttttgctgctccagaaacattgcagtgtttcatccttgttggaataaaaacaataacaataacaaaaactagctgggggactggcatgactccttttcactttggctcctaggaaatgtagaatcaaagtcttgccgttagtggctagaaaggttgacatgatgattagtccttggatttgggaatatatatataaaacccccaaatcactgaatactctcagatctaccaattgctgatatgctcatgatccacaaaggactgttgctctatcactgactagaaataagaagcaaaacagtaaatcatggatttcaggacgatcatttgtaaatcactattggaatgatcattaagcattcaacaaacayttgtggagactctgtgccatgtatcattctggatgttctgtacatacatcaggaacacaacaaagatgctggctttagtatgtacctttagtatgtacc

SEQ ID NO: 900106 - DNA, 584 bp, Homo sapiens
gagatgccagtcttaggtttcctcaaagaaatgtgtaaaagaaactgattacttcttttgtatagctaaaaatatatttgttgataaatcaaatattgttttaaaacgttaatatccattttgttccttattaatttgattttctttttgtatatcaagccctttgaataataaagcaatattaataaattatatttttttgttagggaccataatgcaatacttagatttataaaatgtagaaacaaaaaatataaaaaacagaagaaaaacttttttaaagctccataattatttttattataatgtgtgtggagagactattgtctgctcagctttatcatggttacaaagatagttttcctctaatccttgctgtttaagaaaacagttaattgctttaccagaccctctgaagaactgaattctaggtttctgttctttagacgcagtctgaatggtttatgaatttcttttaaaaaataaaattatcagaaattaaaaaatttgctyttgcatctaatttgataaatcattagatataccttatagaagaaaagtaaaagctaaatattatttaatgt

SEQ ID NO: 900107 - DNA, 584 bp, Homo sapiens
gagatgccagtcttaggtttcctcaaagaaatgtgtaaaagaaactgattacttcttttgtatagctaaaaatatatttgttgataaatcaaatattgttttaaaacgttaatatccattttgttccttattaatttgattttctttttgtatatcaagccctttgaataataaagcaatattaataaattatatttttttgttagggaccataatgcaatacttagatttataaaatgtagaaacaaaaaatataaaaaacagaagaaaaacttttttaaagctccataattatttttattataatgtgtgtggagagactattgtctgctcagctttatcatggttacaaagatagttttcctctaatccttgctgtttaagaaaacagttaattgctttaccagaccctctgaagaactgaattctaggtttctgttctttagacgcagtctgaatggtttatgaatttcttttaaaaaataaaattatcagaaattaaaaaatttgctcttgcatctaatttgataaatcattagatataycttatagaagaaaagtaaaagctaaatattatttaatgt

SEQ ID NO: 900108 - DNA, 574 bp, Homo sapiens
actaatctcctctagaaacaccctgacagatacacccaaaataatgctgtaccagctttttaggtattccttaatcagtccacaagtccaayccttctcaacttggcactcatatgtacctcctcaaatcatacttaatttccaaataaagataacagcaaggaaatattcccacctaacatgatgcaactaatatgaaccatcctgcctataaccgaaaacacgttaatccattacccagaatctggttttcaggatttcaatatttgggactttaatcttttggaatttcaatttttggaattttagactttagaaattttagattttagtcattttagactttagggattttgatctttagagatgtttatctttctgtatttcaacattcaggattgtggcattcaagactgtgtcttttggaattatgatcagcaccagactctggcacctaatttttcttgaattctctgactctgggatgataaaaggcatctgtcatcaaaagactgcgttagattaactagaaatgaaggttaacaacttttcttatgcctgatagaaatgtgca

SEQ ID NO: 900109 - DNA, 651 bp, Homo sapiens
gcccaactttgcaatggtaagatttctagaaatttttaaaaaacctataatatacaagaagactggggcgggttgatggtaaatcctggggcacattggaaaggcgtccagaggccgctgtgctaattaatgcgcagctgcacccattgtgggcatgtccacagccggcttcctggtatgcagtggagatgggcccattgacactagtgaagggaccctggatgggctcacatttcaggtcctgtttttctccaactgtatttggatctctcttgaaatgctccctttaaaaatactaatgctagctcagaaacactccaattaccatctccccacaggcttaaatgttaaacctcaagatctaaactttatcccttatgtatgtgagcaggcttgccagatggcaggccaattaatatatttttgcaaggtgtagaaatgttttttctccataggggaacaatgaatccatctgctccacatcttcctttcccctctgtcttttggggaaaaccattatttaattttcagacataagttgtgcaactttgtaagtgatactttctgcttttttagggaagtagctttaataattgaaacytttttttaaactctaaagatgtgaagaaccctgtcatggactaaaatata

SEQ ID NO: 900110 - DNA, 658 bp, Homo sapiens
ggatggctggggacaacttctattctagaacatgggttgggaacatggactctggactcatattttctgtgtttgcatctcagctctgccactttgtagctctgtgacctaggactaactcaacttcctgagtctcaattttcttgtctataaaatgatgaaaatgctgcccatctcatagagttatgaggattaaatgagcgaatacatgtagattccttagaatagtggctgacacttggtaagtgtcattagatatcattagcatttctatatctttcactttatatgtctcttctggctgtcttcatgtgtgcatagttgtactcttgctaagaaatgcatagatttacttaaggatgttgtgaagcttgtccacagaattataatgtggttttggagtctttagtatattataatagagggaaaagttattactgtcaattttttccaccttcaaaaacaattattgcttaagaattactgggattaattatcttttaaatgtttaaatctgaattcatatttataaaattaatacctgttcaaaatcaatattagtagaagmcaaatatattgagtgacttagttggccttatctttagtcataatttcagattggaagtgaaagcgaatttaaaagatgtggttgtgtaga

SEQ ID NO: 900111 - DNA, 651 bp, Homo sapiens
cagctccaaggacagcagctcagtcattgacccaggcagacatacaggtattacaggacggtaagccttttagacacaaagaggaaatacagtgcattataattgtgactctagaaaataagactgatacagatctttagatttgcctatccaaatgaaatttaaacatctaaaaatcacagagctttatgagtagcagtagattcttactgtaaaactgtacctgcgtaatgagacatgctggaacatgaaccactatgaaataattcacatatctcagtgttcagatcgctaatggaaagaatgtatgtgacatggatacaactctacggtataaatatataggtatggaacccttaaaaacatgttttgtaaaaaatactatatacacctaactgaaaccttttaggtgcataatagtaataaatatttcttattctgtacccctccccacccccaccatactctcaagaaaagcctgtttagatttgtgcttttatctgcatcaaaatttttcttatttaacacatgttaaatttgtgttggtatcatatattcttttgyatgtcttttcatcgaatggtatttcaaagactactgctatttgcatgcaagtaactgtatgcaattattgtcagattgcaaacgtgg

SEQ ID NO: 900112 - DNA, 619 bp, Homo sapiens
tttcatgtctcacgtccctggcacattcctggtacaggatagtgagagatgcyaaaacttgcaaatacatttcttgaatgtctaattaataatatgatcattttggggtttagtctccttcagattagctggtaattacatttctgatctgtaaggcagaaacttgttgttcttgtccagcaataactaagcccacgatctgatcaccactatccctaattcacaaaacttgagacatctcatgtgttatgaatctctgttccaggggtgtgagcacattgccaaaccacagtgctggtttcctaaatacagctgtccttcacataccattgactatccagtctcataaagtcacctgtggatcaagagcatccaaaggcaagtgactacgtgggtttagaaggaagggctgtgtcaagacctacagggagaccaactgacccacatgaaactgaatttataggtttagcccactactattatgtgttagcccagacatttagataactgtggtctttgatgttcctgtaggcttgcaagatttctgcaggggatttcacaagcagagttatacatttggcctttggtaaaattcctaatttttaaaaattagatctga

SEQ ID NO: 900113 - DNA, 597 bp, Homo sapiens
cactgattatcagggaattgcaaattaaaatcacaataagatatcttttcacacctgttagaaagctattatcaaaaagacaaaggataacaagcgttggcgaggatgtggagaaaagggaatgcttgtacatttgtgggtaaattggcacagctattatggagaacagtatggaagttcctcaaaaaattaaaaatagagccaccatattatctagagatcccacttctaggaatacatccaaaagaaatgaaattagtatgttgaagagatatttgcactcccaagttcattgcagtattattcacaatagctatgatatggaatgaacccaagtgtccactgatggatgaatgaataaagaagatgtggtataaatatacaatggaatacaatttggccttatgaaaagaaaatcctgccatttgtgacaacatggataaaattggaatacattatgctaagygaaataagccaggcacagaaagacaaacactgaaagatctcacttacatgtggagtctaagaaagccaaactcatcgaagcagaaagtagaatggtggttgctagggttaaggcagaggagggaaaatgag

SEQ ID NO: 900114 - DNA, 597 bp, Homo sapiens
cactgattatcagggaattgcaaattaaaatcacaataagatatcttttcacacctgttagaaagctattatcaaaaagacaaaggataacaagcgttggcgaggatgtggagaaaagggaatgcttgtacatttgtgggtaaattggcacagctattatggagaacagtatggaagttcctcaaaaaattaaaaatagagccaccatattatctagagatcccacttctaggaatacatccaaaagaaatgaaattagtatgttgaagagatatttgcactcccaagttcattgcagtattattcacaatagctatgatatggaatgaacccaagtgtccactgatggatgaatgaataaagaagatgtggtataaatatacaatggaatacaatttggccttatgaaaagaaaatcctgccatttgtgacaacatggataaaattggaatacattatgctaagtgaaataagccaggcacagaaagacaaacactgaaagatctcacttacatgtggagtctaagaaagccaaactcatmgaagcagaaagtagaatggtggttgctagggttaaggcagaggagggaaaatgag

SEQ ID NO: 900115 - DNA, 579 bp, Homo sapiens
gtcccaagcaacttctacctgttacctaatgtttccaactagtggtgtgaaggacccatgaaagcaaggatctcatctaaatcattcatgttttaactctcagtgcttctcttagagtgggtgcctaagacatatttgtgaaatttaaacacactctgtttatgacactcaatacaacaagatttgaatctcgtgtcttcctagccctaggatttggggggaaaataacatgtgtttttttcagctttggattcattatctgaaaaatagaaacaacaataccttgttaaccaggttgtgcctagtaaatattgaataaacattaataagcatgaactgtgcttgttgttagtgcagtgggagtaccttttcctattttatctctctcctatgctctgtatttctaaagctcacttagagcaatgctccctctgacaaatagtgtgtagagcttggaaccaaacagcatagctaataatktcattaatgcatggattctagtgtttccttttcttcccatgtttatgcctttgcagattaataggaattgagagttaaagtagacatctagcattagga

SEQ ID NO: 900116 - DNA, 605 bp, Homo sapiens
caaaactcctcaacaaaacactagaaaactgaattcaacagcgtactaaaaatactaaaaggatgatatactatgatcaagtgagatttatccctggaatgcaaagatggttcagcatgctcaaatcaattaatgtactacatcacattaatggtaggattaaaaataacatgatcatcttaatagatgcatcttaataaaagtttttgaaaaaattcaacaccttttcatgacaaaaactctaaaatacattaggtatagaaagaatttacctacatataatagaggccatatttttgacaagtctacagctaactgaatactcagtgatgaaaagctgaaagctttttctataaggtcttaatcaaggcaaggacatccatttttgccatttttgttcaacacagtaatggaagtcctaatcaaaggaattaggcaagaaaaagaagcaaaggcatccaaatcagaaagaaagaagtaaaactatttctcttggcagattacatgatcttatatgtagaaaaccctctttctacaaaaatctgttgaaacaarcaaattcagtaaacttgcagaatatgaaatcaacatgttaaactcacttt

SEQ ID NO: 900117 - DNA, 623 bp, Homo sapiens
gcccagcatgccttagccatttttcctgatgctctcccttttcccggcccctcctgagaggccccagtgtgtgttgttcccctctctttgtctatgtgttcacattgttcaactcccactgataagcgagaacatgtggtgtttggttttctgttcctgtgttagtttgctgaggttaatggcttccagctccatccatgtccataaaaagggacacaatcacatccctttttatggctgcatagtatcccttggtatatacgcaccacatgttctttgtccagtctatcattgatgggcatttgggttgactccatgtctttgctattgtgaatagtgctccagtgaacataatgtgtacatgtatctttataacagaatgatttatattcctttgggtatacacccagtaatgggatttctgggtcaaatggtatttctgggtctagagctttgaggaatcaccatactatcttccacaatggttgaactaatttaygttcccaccaacagtgaaaagcgttcctatttctctgcagtctcaccagcatctgatgtttcttgactttttaacaatcaccattctgactggcatgagatagtatctcattatggttttaatt

SEQ ID NO: 900118 - DNA, 635 bp, Homo sapiens
aatgaacagaaagtaatgcaccctttgcaagcacttgagtcaacctcagagacatctggggacacagaaaaccttacatcttgaaattaacttaagatcacttgttttgcacatgccccaaaatacctggaaaaaacaaaagaaaatttcctccaaaggaaataaactttaacttcaaattatttctacaaatgactttttaaaataaaacatccagcacgcaactaaatatgagaaaaaaggacaatataggaaaacaatctacacgataaaaagtgcgatagatccacaagcactctagtcaatggaattactagcaacagactgtaaaataatgatgacttactatgctcttagaattaaaagtataatatccaaatatcagctaagaactagaaattatgaaaagtgacataatctctttgaaaaaactagaaattctgtggctaaaatgcacacaaaaaaggtaagaatactctggatagtataatggcaaataagacataaggagagaattaatgaatgagagattaaaacaagctgcctgtttttggtaagcagatggctttctggtgattacaaacctcactgggggcaaaakgatctccaagtttattattatcgcaattttatgg

SEQ ID NO: 900119 - DNA, 587 bp, Homo sapiens
tcttctataaatgattctgctcatcactgcctttygagaaggaatggtttcacacccactgggaatctgtagctggagtactttgctaataaaacaaccaaataacagataattgtccagcagttttccccaaatgaatcagagaaactggaagctttcaaagcaatggcagaatctttgcttgtagatccacccaatgtgtcagcttgtttgaaagcaaagaaaatatcttatttatttcccctaaggtgctaaaaaaaaaaagggaaaaaattgcttgaacatttaaacaaggaactttcaagatgagttataaatgctttatgagcttttatagttgggaaattcttaataataagctacaatctcttgacttctttatttgattcaaaaaatctttacttagctgggtgtggtggctcatgcctgtaatcccagcactttgagaggctgaggtgggtggatcgcttgagcccaaaagtttgagaccattctgggcaacatcgtaagacctcatctttactaaaaatttttaaaaagtagccagatgtgatggtgtgcacctgtgatctcagctacttgggagg

SEQ ID NO: 900120 - DNA, 564 bp, Homo sapiens
ctcttggggatatcggacccccatctacatgctcaacggaatcatacggttacaagctgttttcgaaattattactaatacaaccggtcaagccttgactgttcttgcccagcaggagactctgatgaraaatgctatctatcaaaatagactagctcttgactacttgctagcagctgaaagagaagtttgtgaaaaatttaactttactaattgttttctacacacaggtgatcaagggcaagtagttaaaaatatagttaaagatataacaaaactggcacatgtacccatacaagtgtggcacggactcaatccaggatccatgtttaaaaattagttcccagcaataggaagatttaaaactcttataataggagttataatagtaataaaaacctgcttactgctcccttgtttactacttttacttcttcaaatgataaaaagcttcattgctaccttagttcaccaaaatgcttcagcacaagtgtactatatgaatcactatcaatctattgcacaaaaagacataagtagcaaaaataagagtgagaactccca

SEQ ID NO: 900121 - DNA, 603 bp, Homo sapiens
aagcagcccatgatgtctccagctgaaatagattctttttccttcatgcctcttgcagttattgttgaaaaatcaatttggaagttacaaacattttagtaacatcactttgttgcagttatgaaatatcttttaccttttcaaattgttttatagtcatccctcacaatacatgggggatgggttcccggacccctgcatatacccaaatatgccatacttaagtcctgccgatggccttgaagaactcgctttaagtcagcacctcagtatatatgggttttgcatcctgcgaatactgtatttttgatccatgtttagctgaaaaaaaaaatccgcatgtaagtggagcagtgcagttcaaacctgtgttgttcaagggtcaattttatttttccctaactatttaagatctttgaaggcaagagagttttcctattttcactaggtacagtttatataatagaaacttagtatttgttttatttgatrtaccatgaatacacttaaaatattcaaatcaatttatttttaaatacaaattcatatttaattctggatctgaatactaatcagtgtgcctagatgttatttcttttctgt

SEQ ID NO: 900122 - DNA, 385 bp, Homo sapiens
tcacattgcctgcctggcttgtgcttggtgttttctctgmttctttcatgaagcttcaggtgtgagctggagaaacgttcagttttgagtatcatagaaataaaatgcattccaatatgccagaatcagaatggcatgcattctaccttatgcattaggcactgtgacgttaaatcttccttaagcagtgctaatcaataagaaactggctattacctgtgttgttcacctgtgttttatgtttccagttgctcttcctccttgtatcccactgcacaaacacattccatacttgtacatttcatacctgtccttccatagagtcatcagtctttgtatatctttcctaatgaattatagcttttttctttttttgttccttagt

SEQ ID NO: 900123 - DNA, 604 bp, Homo sapiens
aaaaaaaaaaactttgaattctaktttaatgtttttcccaatgtaccatactactgtattaccatccttaatcattctttaaaattttatcacaaaaattgagttgattattattattatttttgagacagggtctcactctgtcacctgggctggagtacagtggtgtgatcatggctcattgcagccttgaactcctaggctcaatagatcttcgcacctcagcctcccaagtagctgggattacaggcacatgccaccacatctggctaatttttgtatattttgtagagaaggggtttaatcatgttgcccaggctgttctaaaactcctgagctcaagtgatccacctgcctcggcttcccaacctgctgggattacagacatgagccactgtgcctggccaaatattgagtttcttaatttcccccaaaccctccccaccttccgtctcatgactttgtctttttcttcacaagaactttatattttctgtttctaaaatctataaataaaaaattattccagtgggattttctgtattatacaaaggagaaattacaatgccgttaaaagaactatggagattaagatagtatattt

SEQ ID NO: 900124 - DNA, 650 bp, Homo sapiens
aggatgagattggtgtttacrtccttccttcggttagtttcatttccttcagaacttcacctagagaatatgggttttcttgcagaagcactcacctgacacttagaaccacagaagattgcacagaaagagcccaggtatcagtttgatctttagaaactgcagcaggttactcagcagcattcaattaatacggaagcatatttgcttccattttttttcatgtcagtattgggaagggttaaaatatcaaagaaactaaaattatttcatgagccttctgtatatatattttataattatcatttaaacaacatatgccccatgttgaggtacggtagatacaaaaggattaaagcagactgctgtcttctaaatctagtaaaactagatatatgtgacaagtaaaataaaaatccaaatgacctggaatatatgatctagtttaccagtagaaaaaacattaaaatggtccaaggttacaaaaatggacaccaaaggatgaaggttttaacctgaagtattagcagacagaatagcatgaacacttagggaaaaaggaaaatgcagattattttgaaagttaatagttcattaataagttctctcctcgttcatcttataaaattattctcaaactaagatagaac

SEQ ID NO: 900125 - DNA, 680 bp, Homo sapiens
gcaaagtgccacagaacatgagctccaaggttcaggggggccgtccaaagccatgtgaccttggccaagtccctcggcttctgacagcctcacccctcctcaattccatamgcagagattcggagtggacttttggggtctaaaatgacatgtgatgacgatattatttaaaacaacataaaatacctccaactttgagactctatccctggtgagtaaaatcagtttcataagaaaaccttaaatgctggtaagttcttaaaaatccagcaagcacagacgtgtgagcatgtgtttgctaacccagatggacaccatacattttttaaaagtgatttttgttagcatctaccctggggttttcattccttctcacagactgtaccctgcccatgaactctccgttaaagagacggcaagacacaagcctaactccagatgaacttttctgcaccgtgtccctgtttctttagaaaggcagagttttaaatatttcctaacttcacataatagccttgcataagacacaaatgccaggaaccataatgaagtggaggtaatctacacaatttaaaaacacttattgtgacaaaatggattgacaaggtatagacgatacaagcacatataaatgaaatgcatcccaccggaaaagcattttgctcacattgttgtttacg

SEQ ID NO: 900126 - DNA, 598 bp, Homo sapiens
[347 bp omitted]ctgtgtccggcaagaggagcaggtgatggaggagttgagcttcgtgcctacggtctcagagatgctgggactccctgcggcccacatcaggatgtgaggtgtgagatcttgctgcagggcaaggactcgcttctgcctgcaatcatcgcccttcttcagatyagcctggggaagttcccacaaacgagccatttagggagataactcaaaatcaacgccatcatctcggggaggaaaaaaagtgggggcca

SEQ ID NO: 900127 - DNA, 607 bp, Homo sapiens
tcattttcccttcttgatgaatgcttacgggccagtttctggaagccctttccaggagcgtcacatttttctgtgggtctgcctgcagcccgrgctcctgagacatttcctaaagacctccattagaagcttccactgctccccttactggcaggcgttcagcctttgccaactgcaggttgatggaattgtcggagagagagcatgtcggggggctctgttcatctcccctaaagtagtcactgacatgagcaacactccctgtatgccaggcactgctcccttattgcccattttgtcctcgtaataatcttgcaaggtagccacaagagattattactcccattttgcagatgaggaaactgaggcatgaagaggttaagtagcctatgtagctggtaagtggaggagccagagtctggaccccggcatcctggcagttccagcctccttctcccagtcatcactgtatgttccattgttccgtttctatttcactcacatataacgagcagctaagtttcctgagtttttggatatgacaacaagcagcgggggcccagcttactgagaagagtgaattacagttttttcaagatccagaata

SEQ ID NO: 900128 - DNA, 653 bp, Homo sapiens
aattagatttttatcaaaattaaaaatctttatgaaaatacattaagaaacagaatagataagacaaactatgtgaaactattcacaaaatatttatctgacaagctcttaaacctaaatatgtgaagaattcctcaaacctcaatcattatttaaaaattcatttttttagggaaatctgatttttaaaaaagttttaatagcttttgggatataagtggtttttggttacatggatgaaatgcacagtgatgaagcctgagattttagtgcacctgtcatcccaagtactgtgcattgtatgcaatagatagtttttatccctcaccccctcttgtcctcccctcttctgagtctgcaacgtccattttaccactctgtatgcctttgcatacccatgtcttagctcccacttataagtcacaacacaaggtatttggtttttcattcctgagttaattcatttagaataaagacctctacttccatccaagttgctgtaaacaatgttatttccttcttttttaaggctgagtagtagtccatggtgtatacataccacattttctctatccactcawcggttgatgagcacttaggttgatttcatatctttgcagttgtgaatcgtgctgcaataaatatgtacctgc

SEQ ID NO: 900129 - DNA, 656 bp, Homo sapiens
aagttgtattagttttctgtggctgctgtaacagattaccataaatttggtggcttaaaacaagaaatttattttcttacagttctggagcccagaagtccaaaatcggcatcagtgggtggaattaagtgctggcagagctacactctctccagaagctctcggggagcttcatttcttgcttcttccagcttctggtggcagctggcattcctttgcttgtagtcacatcactttgatcctcaaggccactatcttcaagtatcccttttctctggtgtcacattgccttctctatctctcatagaatctccttctcaattccatttataagaaaacagtgctggcatttagggaccacctgaataacctaggatcatctccccatcctaaaatatttaattcaatcacatatgcacagacatttttttccaattcaggtagtatttacaggttgcaggggtcaggatctgacatctttgggacccattatcagtctactaactatgttattaaatatagcttgcaaatatkttgttgaggattttgtttttatattcctgagagatattggtctttttttcttttgatatctttaaatggctttggtagtaatgtaataatgtaatagtggcctcatagaatgagttgggaag

SEQ ID NO: 900130 - DNA, 656 bp, Homo sapiens
aagttgtattagttttctgtggctgctgtaacagattaccataaatttggtggcttaaaacaagaaatttattttcttacagttctggagcccagaagtccaaaatcggcatcagtgggtggaattaagtgctggcagagctacactctctccagaagctctcggggagcttcatttcttgcttcttccagcttctggtggcagctggcattcctttgcttgtagtcacatcactttgatcctcaaggccactatcttcaagtatcccttttctctggtgtcacattgccttctctatctctcatagaatctccttctcaattccatttataagaaaacagtgctggcatttagggaccacctgaataacctaggatcatctccccatcctaaaatatttaattcaatcacatatgcacagacatttttttccaattcaggtagtatttacaggttgcaggggtcaggatctgacatctttgggacccattatcagtctactaactatgttattaaatatagcttgcaaatattttgtygaggattttgtttttatattcctgagagatattggtctttttttcttttgatatctttaaatggctttggtagtaatgtaataatgtaatagtggcctcatagaatgagttgggaag

SEQ ID NO: 900131 - DNA, 656 bp, Homo sapiens
aagttgtattagttttctgtggctgctgtaacagattaccataaatttggtggcttaaaacaagaaatttattttcttacagttctggagcccagaagtccaaaatcggcatcagtgggtggaattaagtgctggcagagctacactctctccagaagctctcggggagcttcatttcttgcttcttccagcttctggtggcagctggcattcctttgcttgtagtcacatcactttgatcctcaaggccactatcttcaagtatcccttttctctggtgtcacattgccttctctatctctcatagaatctccttctcaattccatttataagaaaacagtgctggcatttagggaccacctgaataacctaggatcatctccccatcctaaaatatttaattcaatcacatatgcacagacatttttttccaattcaggtagtatttacaggttgcaggggtcaggatctgacatctttgggacccattatcagtctactaactatgttattaaatatagcttgcaaatattttgttgaggattttgtttttatattcctgagagatattggtctttttttctttwgatatctttaaatggctttggtagtaatgtaataatgtaatagtggcctcatagaatgagttgggaag

SEQ ID NO: 900132 - DNA, 577 bp, Homo sapiens
aagtttgggagtaggggtgggaatcccactacagtcaaattattttgatgttactttccaggcttagagtttatcttccatatttccaatgagaatcarttcctcaagtggaattttatgataaactgctgaaagtagtatttaaaatggaaaccctgacaagaatgagtgtcacagggagtaatgaattcatgatggaactagttgggagtgtgtgacattttaagtgcctcatcactctgaattcactgggcatttattgtaatagaaaggaccatattgaattcatttggcattcatgtggacttcacatgtatttatggagatgtaacatggtaatttaatatttattctactaagcattctttaatggacattgaaagatattgtcatacaatgcttagtaaagccggtaactctaacgttattcttctatcaaaacaaagaaatgaaacaccattttgattcccaaagcacccgagtaagttatttggataagccaacattatgtatttactcccccaaatctgctttctaaatttttaagccacaaggttgactctaggaccaagacaat

SEQ ID NO: 900133 - DNA, 557 bp, Homo sapiens
atggggagaaattcaaggctgttgcagaaatttgcatcagtaatgaggagcaaaatattaatcaccaagacaacagggaaaatgtctccagggcatgtcaggggtcttcatggcagcccctcccattgcaggcctggaggccttggaggaaaaaatggctttgtgggccaggcccaagtctcccctgctttgtgcagcatgggaacttggtgccctgtgtcccagccactacagccatagctaaaagaggccaaggtacagctcaggttgtggcttcggtgggtgcaagccccaagccttggcagcttccacatagtgttgagcctgcaggtacacagaagtcagtaattgaggtttgggaacctctgtctagatttcagaggatgtgtggaaacacgtgatgtccaggcagaagtttgctgcagggacagaacactcatggagaacctctgctagagyagtgcagaagggaaatatggggttggagcccccacacagagtccccactggggcactgcttagtggagctgtgagaagagggtcaccatcctccatac

SEQ ID NO: 900134 - DNA, 642 bp, Homo sapiens
aatagtttaggaaactctggatttctagaagtagtagcagtgctttgctttattccacttgcaagtagcggttcaattgaataaacttttatacctaaccaaccaatattttaagccagtctcactctcccctctctctcattctcagtttattttgcgtatttcttataatgcaaaacaaaaaccttctgtctctgaaaaacgtgattaatcaagaaaccaatgagtgaagtgtgctatcaaattgaagactctactggcacaaggctaaatctgaatgaaaaacgaaaagaaccaaacagaaccagaaaatgttaaatgcatagattccatttcctgaatcattgtataccaaagatccaggaaatggttagggatgttttagtctcatataaatataggtcagtgttgtacacagtgagaaaactagattagtagcatcatcttgtgccctactcatgacatttgcacttcatatttttcctttatctttgcaatatttaagagctttggttaccaatcattgtgaacttttgtgttgcagggggtgtaaacacagcataatcaatcaattgatgtctacrctcttcacttttctttaaagttgtctgaaagtgctgtctctttgcctgacagacatag

SEQ ID NO: 900135 - DNA, 616 bp, Homo sapiens
gtgttcagtttcctcatatgtgaaatgaaaatgatggtatcatttcctcctaatgctgacttgaggattaaatgagttaacacacataacgcttaggatggtggtggacgtacaaaacactcaataagaatttgcttttgttattattacttgttcacatctatgcagcatttgtgcctgcatgctcacacactctagtcttacgcagcttattcaccaacattggttcgggatgacatttgactgttttcaaaagtcaaatccacttttcatggacaaagattttccttcataagtgttattcaaaagattgtgctgtctgccctgaaaacagttcttatggaggagaccaaaagtatttttggtaaatgacagtctgtgtagagtgagtcatgtcactagatgtgtacttggaagggcaaaacagttatttcaatgtacaaattattgcctcattactttatcacataccagaagagagtttgggatggatctaaraagtataacaaaaccactgcaagttgttctgtcatttagcatttaattaaaaataactagagaaacaactatttgaaatgctcagtgtttttcttctttttttttcatgtaacaatat

SEQ ID NO: 900136 - DNA, 630 bp, Homo sapiens
catcctgtgcatctgatcagttatgtgttatatatttgatttataatttttctggcaagaactctaagtcaacctatctatgtgtttacaaaactacaaaaacaagagctttcagtatttgtttttgtactgctttaaaaaaaaatttctttttatttttctttgtgtgtgtgtgtgtgtgttaaagctagctgaggttttattttggaccaaaaaaaaaagcaattgaattgttttgtagctggaggcatgggcaagtgcggtccccagtcagtaaactctcccgtgggtgggctgaggggctagggctgagcctcaggtgggtctcctcttccctgtgctcctctgcacaacggcctccctcccaggatctggggcagccgcaggaggggcaggctgggaggggctgccgcagctgttgacttgggcaggacgtcagaggactcggacaccagcttcccatcgcgggtctcggtcttcttcacaaccacagccctggtgaatcatttcttattgaccttacttttaacaaygaataaaaaagagccaaatgactgtccctggctcatcatgttaatatcagaagacaacactgaaaatccttcgcaaattttaactactaccctcttg

SEQ ID NO: 900137 - DNA, 588 bp, Homo sapiens
tggccagtgataataacaatgcctatcgcatcaaaatgttgtgaagattaagtgaagataatacatgtagaacattcactacaatgcctagtacatcacaaggtacttatggaactatgactttaggtatcccaatttttaatgtaggaaacaaaagattttcagcttgacaatgtttcgtgatgacaaagtaaaaaatgggtatgcagtttatgagtttatgactgggatatcatgagggttaatggaaaggggtaggttgaaaaggttagaaaggagggctggtcctattctcaaggaaatctggtgtctaagaagttttggcttcattgtttagggagattttaagggaaagctgttctcagagtagtgctttaggaatataggttattggggttaaatgacaggaaggaacagagacagaaagcagaaccatcagttaggaagttcttacatgggccctggtctgaattaattagrccttgagacagaccagagatgatggtgggatgcagagtagtaggttgatgaggatattacagagaacaaatctagatgagatgttggctgttgagtgtttattggctg

SEQ ID NO: 900138 - DNA, 633 bp, Homo sapiens
ggcaaagtttactgcatacttcttagaaagtgcatctttacgtactggggttataaggtgtatttgaacttctstatatatttatttttattacatttatttttaattttagccaactctatgcactaatttcttcatctctagggtagttgtattatgccacttgatcttagccaaacagcacagaaacagtgatagagtggtgatattattaatacgcacttcactgagtggttgtgaagattaaaagtgaatattttgcatagcgtgaacctgaccagtacactgtaatgtgctggaacaatatagagggagacgggggtggatgagggtcagggatgtcaaggaagttttgttgtggaggatgtgactagaattgtatttttgaagagagggtgaggactcagatggtagtggagatactgttatcacagttacagggaggccggctaaactgacctctaatcttcccagcaaggaagtcctcacccccttacctaacacttctgccatgttttaaaaggccagagagatttttccctgctaattattcacttgacccgagaagtaagtgcttctctactttcaatctgtgctttctatcactaagataaactagtaatgatttgccaa

SEQ ID NO: 900139 - DNA, 629 bp, Homo sapiens
tgcaggaataataatgactgttaccgaatatgcttgtccatgcaatcaaagcctttgacacttcrttcaagaactctcttgtctgttacatcgaggatcatgtcaaatattcttaaagggaatcttctgttccagtaatttttgtgataatcccaccatatgttactattttggaaaacttgatagagagatgaaaatatcaaagtaggcatatgtttttatgaaagtttcagaaaagtatgtttattttgacttatgtctaaattagattcctaacagctgaatgaaatgtaaattagttgtttttgttgcagaagatagacattccataaaacatggtatcaatcgtcttaaaagtgctttattttggtctgtgaagtgatggccggcatgatcactcttacagctgataagaatgaacaccaaaaagtgttcagacactcaggacataacgtggaagtagtcaggtcgtgcatgtcctttcaatcttcagggtttttgtacctaccactctctctgaacagaaatctttctcttcttcctttctccttttttcctaacctgcatttctgaaaagctcttcaggtaatttggatcatcaggcaggtgggagtgactgatctagttca

SEQ ID NO: 900140 - DNA, 550 bp, Homo sapiens
actcagtctcaaaaaaaaaaaaaaaaaaaactttataataattaaatttttaaaatgatagtattaatatatttaataaccaatactttctgtatgaaaaaagagtaagatataacttttgtasaggattgaaaaatctcaagcctagagaaaggggaacctggctggcacaactggtatgagtctgaaatttgcctgagaggtcccatgaccaggctggggcaggtgaacttcactgactgagtttgttgcactggagatgccctgtacttgtggagtttgttggaaaacagaacatgccagcaatttatttgcttctagaccaactcatgatatccagaatccgatgtgctgagagtatgcctttggcaactgaagaattacgtgaattgcaagagtcccctgccttcctgctgattcaggctgtggcatgtgatttgttagcactgcctgatatttctgtcttgagccctaattttttctgggtttgggccttgtcttaaatccataggtgtacagctcttgatattgagatgggggtgctaatatg

SEQ ID NO: 900141 - DNA, 550 bp, Homo sapiens
actcagtctcaaaaaaaaaaaaaaaaaaaactttataataattaaatttttaaaatgatagtattaatatatttaataaccaatactttctgtatgaaaaaagagtaagatataacttttgtacaggattgaaaaatctcaagcctagagaaaggggaacctggctggcacaactggtatgagtctgaaatttgcctgagaggtcccatgaccaggctggggcaggtgaacttcactgactgagtttgttgcactggagatgccctgtacttgtggagtttgttggaaaacagaacatgccagcaatttatttgcttctagaccaactcatgatatccagaatccgatgtgctgagagtatgcctttggcaactgaagaattacgtgaattgcaagagtcccctgccttcctgctgattcaggctgtggcatgtgatttgttagcactgcctgatatttctgtcttgwgccctaattttttctgggtttgggccttgtcttaaatccataggtgtacagctcttgatattgagatgggggtgctaatatg

SEQ ID NO: 900142 - DNA, 587 bp, Homo sapiens
ccttccagatctgtgtctcagcagaggcacacaaccactccctctggcaagttcctccctggttttgtgttaatttggtgcaatctctgatgtattctcccactacaaagtcatattgtagagatgaggattcaaataagaatagaaagtatccaattagatagcaggatattcattgatagcacccatttgagcaaacatgcgttttcaaatcacagatatcacaagttctatgcaatctcaaagaacttcaccctgcaaatgaatttgtattgttttatatttggaggaatcccaaggctcagagtagaaacaggaactcttgccttccatgtgtttgtgtgcttactatatcaaaccaggaggctgtatgtgttttagatggaaatacacacacacacacacacacacacacacacacacacacacacacacacacaccaattttagatattaaattggcaggaactaccattcctccagtagaaaggcatttttcatcaaaagttgtttacactgtactttccccyttagatcacaattgagatcccaactttgtatttcttagttccttaaatataataata

SEQ ID NO: 900143 - DNA, 440 bp, Homo sapiens
tgttctctgttgaaaaagctggcttcaatttattgagcaagatgctggtgttatcatctaacataaaacctatcttataataaagtgttgacacatgtaatgagtactgtactgaaaaatggtggtatgtatatggtttgtactgattatgtatcgcttttataccatcaaaaagttgaaaaatcataaagttgaatcatcctaaaatgggtacattctgtactatgtttccaaggcttcagaagtgttgcatacacattcctagccagctgatagtgctaggagccaacagtagtctcccccgggggccaagaggagggcgaaatctctactatggtatawgatgttctcgtgggccaagtatgagggtgatatttcattgttggcactgggtttctggaatccatcctcttcaccagggagatttaatgaaccaaatg

SEQ ID NO: 900144 - DNA, 664 bp, Homo sapiens
tggatatcaaaatggttgtttagaatattgtttaaacaagcacacttcaatacatttatttagttttttaattaagccacattattaatatatctttaacactttttcggtgtagattttagttgtaggtcctaggtaagtatatatccgtgaattgagagatataataaagtacataaagtggagaaatagaactagtatatataaatatgctttggggaattatagaagaaaaaagaattctctgaattagtgtacttagggaaagtttccaggaatctgttacccacccttaaactccacttacccatccaccaatctatctttataaaactattgattgacttgactactccagatcatttcttaatgctgagtatatatgagatgacttcaagtatattttatggaaacatggaattaaaagataaaaataaaaaatatatactttatttctcaacagaaactcaatcaaaatcaagacagtttttaagtgatgatacctgttgtttggtctatttctaaagaactgagggtgctgggaatttaaccatgtcaatgacgtcttttatacattattaatggaagaaaaatgggcgttctttaaagactctttaaaatwaggaaagaaaaaaaaaatcaggaggcgccaactcagggctgt

SEQ ID NO: 900145 - DNA, 714 bp, Homo sapiens
aaatgatgcttaaagacctgtatatyttccttgctggtttgtcatgtggcctcatatatctttggaatagtgtctgtgaatcatggaatgaaactcaagaggtcgtttggtccagctgcttgtcctaacctctctaaatcaatttagctccataagtcccatttgtatcaatccactaaaaggtactaactttatttctgggtgcattaactcagtaaatgacttaatatatatggagtgcataatagtgcctgtgcataatagacagtcaatatatgaccatttctgctgttccttatatttaacatttttttaaagtctgctgatgtaagaaacttgattgcctttgaaattagacatagctacattccaattatgactgtgtgttcttgagtgaggacttggcatctatgagccttagttccttaatttataacacagggatgagaatacttcatgcatttcatgattgttgtgagaattaaatgaggaaatccttgcaaaaggagggcacatagtaaattcttagtggatgtcagctattattgtcatcactgctgttatcatttgcatctcaatagatgacattctgttgctgaaactacagacatctctgggataaaaaatgaatggtacttttctattacttatgccttggagtgatgtcatgtattgagtaattttcctcttgagtggagctgacggcagagtttt

SEQ ID NO: 900146 - DNA, 616 bp, Homo sapiens
gaaaaaaagcacatccttaattgatgtgacagataacagtttttcaaaataatcacaacagtgtattcaaatatatattaaatatataaacatttatttacgcttacatataagtaaagtgagtgacagcgatgacacaaggaacacaagggaaatattagggacattttataattatacggtacttgcacaatctgtgaagtagtatagtgttatttgaaagtgcacatgaattcgttctaaatgtatgtttcaaactctagggaaatcactttaaaaagtgagaagagtagcacaattgatatgctaaaaaggagaaaaaatgaattataaaatgctcagttgaaaccataaatagcagttaaagtgtgggagactaaaaaaaaaaaagaacagggcaacaaatataaaacagtaacagatatggtagatattaatccaactatatcaataatcaagttaaacatcaatgctttaaatgcatcagttacaagatagatattgccagagtggttaaaaaataaaaacccaacctatatttgtctgaaagaatctactttaaatacaaaagacatacaggttaaaagttaaagatgraagaaaggtacgccatgct

SEQ ID NO: 900147 - DNA, 593 bp, Homo sapiens
ttgaacaagacaatagctgtagagcagtggttctcaactggrtgattttgtcccccaaggacatttggcaatgtctaaacacatttttggttgtcacaacatgtggagagtggttgctaatcacagggtagaggccagagatgctgctaaacaccctacaatttacagaacaggcccccccaccacaatcatccagctttaatgtcaacggtgctaaggttgagaaactgccacacagagatagaagagggtctgtaatatattagctaatcatctagaacaaagattaaaaacaaacccaaaaccctctaatataagaatctggtagggactctgctattaaccagttctgtggccttgagcaggttaatacactgagcatattgaattcaatttgttcactcattcatttaaccagctttttaaaaaatgctgtgttccaatctaggcagatgaaagaaaataattgatatgcacaaaggtttaatgcaggaaagaggcaatgtccaaagaagaccagagtgactgaaaaataatcagaatggagtgcaaagcagacgacttctggaccttgtagatcctagtgagaagct

SEQ ID NO: 900148 - DNA, 596 bp, Homo sapiens
gtgtgtatcagaaagtagtgagaggtgccagggctctgatggtagaaacaggaaaaatcacgcaggatcagtttccaccccagagagaggtagacagagaggccatgagaaactgaggggtcacacgtgatgcccatacaattttcaaacttaagggtacaaaaatcttatttgtgggagcttccccgaaggtcgtttttctgggctcatcttgagaattctgggcctttagaactggggttggagtcagggattgtcttttctcatgagcatcctgggagactgagtaatggggtcactgggccgcatcagtagagacaaaggggccctcacttgtttgcaaatgtcctcatccacctgtgttgtcttcctgtcttctgtcttgttacatgctcttttctaaaatcccatttagattcctagaattctgatcaagtactgtccgtttgcagcttttcctatggctttcaaattctcttgagtcttttcctctgtctmagcatctctgatgtagcccacgtttttctacctttctaataaatgaggatctgggagattaggaagaaagactctagagaccagcagacatggatatg

SEQ ID NO: 900149 - DNA, 621 bp, Homo sapiens
tcacctcatttcagcatcagtaataatcttgaactaagtgactaacacttaacagggttctaagtaagagtcggtcttggaagcccagagatgcagaatcagaacatctcattacaaagctgtraagtactttcaataagacagtaaattccttggtgaaagggagtgaatctctgcattatcagtatttagtttaatgcaatgcttattgtagacaatcaattcatgattttttgaaacacaatcaccaactttagggcccttatgaatcgtctactctaaccacattgtgtcagagtaattctcttgatctgttccattggaagagtctcttcttttcttgacttcactttcctattgttcatctttctccaaaatcctgaggaaagtttctaatttatcgatgggtagcataaaagggttataggatatagcattacctactgtcttgggttcatggatcaataatttgcatggagcccaataaaatacaccaccaatccataaatttcaatccatccaaaagatgctgggcagccttttccaaagggggtagttggtggtgagttgcttgaggacctgttttctcagtagctacttccttgtttaaaaaatgatctt

SEQ ID NO: 900150 - DNA, 599 bp, Homo sapiens
tggtctgccagacccaggataacaaaaytaactagcctttagtttttgccactgcttcttatttaactagatttctaatcttcagcctcttctcgtcaaaataatctgattctccatgcattgggggaaatatcagggaaatttcttgcaaacatatgacacaagaaaaataagagcacatccaagaaaacttccacggctagtgacaatctagcaattcatcccataaggatcaaacacaaaaggatttcatattcactttcaaagttagttatgcaattcatttatacttcacacacttagaattctggatttatatggaaggcctcttttttttcctgtattctctataaattgtgaatgctgttcctgagttgaaggttagccccagtaatagaaatgcagtcaggtggaaattgtctacagcagaactattactggatccatgatgcgatatctctacatacaatatgctttgggcataaatgagaagaggaaagaatggcactgaaataggatttcccctctaactaaggccattctaactaaggaagaaattaccgtattggaaagatgccactgccttctattcaatattc

SEQ ID NO: 900151 - DNA, 612 bp, Homo sapiens
ttatttaaaggctataaaatgataataatgtaatagttttgatgttaagtcaaagctattctacccaagttatgccgtagtacagaagtaaattactataaccttttgtattacatgcattgtcagcatacctgggagaattactacatccaaaaggaccactcttacgtctctgcaattttataactctttatgagattgtagcaatctgtccacagtacaattctgaacttggtggtgatggtggtaaaagctgttagtaaaatctttccctatttttctttatgcgtagtcaagacacagcatttcttggccaataaagccagcaggacaatatcacgcttgtgtttatagcatagtaagagtctcttgtatttgcataatgctctaatgctttataaagctcttacccatacagtaaattacttgagcttcacaataaccctgtataaccacctccactttacggctgaggaaataaaattcaccagaagtgaaaatcttgtccaaggtgagacatcagtgaaatrtttgatttgaggtttgatccctttacttgcagtgtttttttctttctcattataccattcctcctaagtatcagaatatcac

SEQ ID NO: 900152 - DNA, 647 bp, Homo sapiens
aaaagaaagtatacaaacaatgtctcatctaatagaaaatatcaataaagagagaagttattaaaaaggaacccaatagaaattatggagttaaaaactgcaataactgaaatgaaaaatccaccagaggagtcaaatgtagattttaagcaggcagaagaaagaactagcaaacttgatgagtggtcagttgagatgtgtgagagggccaatcaaagatcagcagtgccacttagctggacctctcttaggtcagccaacttccagcaaatccccatatttttgtgctgtatagatactgttgtgattctgagatttgatggttgtatgatatgcagcatttttgtggccatagttgagcaatacagactgtaaggaccatgagggccactgatacatttatgctgttccctgctatacatccaatgtctgaaacttaatagatatttatatctaaatatatgttaaaatgatttccttttaattggaaagtgccctgttagtttaagtttagtctcctcattcatagaataagcaaattaaagtggtttttaaraagattattctcaagacttaaattgcctaattgtttacaggttgtctgtaaaaacttctcagccttagttgcattgtataggatgaaaaag

SEQ ID NO: 900153 - DNA, 697 bp, Homo sapiens
agaaattctcctcaacacaataaagggcatatatgacaaacccagagctaacatgatactcaaaaatggaaggtttttcctctaagataaggaacaagacaagaatgcctactttcaccacttttatttaacatagtactggaagtcctagccagaacaattagacaagaaaaagaaataaaaggcatccaaatatgaaacaattaaatgaagtagtctgtttgctgatgacatgatcttatatgtagaaaaccctaaaactccactaaaaaactgttagaactaataaacaaattgagtaaagtagcaggtcacaaaagcaacatacaaaaatcactagcatttccatacactaacaatgaagtatctggaaaaaaattaagaaaacaatcccctttacgatagcataaataatacttaggagtaattttaaccaaggaagtgaaagatctgcatactgaacaccataaaacactgatgaaagaaattaaagaggacacaaataaatggaaagatatctcacattcactgattagaagaattaatattgttaaaatgtccatactacccaaaatgatctacagattcaatgtaatccctatcaaaattatcatgtcattcttcacagaaatggaaaaaacaatcctaarattctcacagaaccacaaaagaccctaagtagcccaaacaatcttga

SEQ ID NO: 900154 - DNA, 606 bp, Homo sapiens
agagaaatggaaattgcagcattgagaattagaggaggttgtgagaggagggctgagaactaagaggtaactccagcatcaacaagggtgaaggtggagagcctctcatagagcctggcaggaaaaccactggtgacatttgagagtacagtccaggttccccagagaaagagaaccagtagggcatgtgtgtgtgtgtgtgtgtgtgtgtgtgtgtgcatattgatatacacacacatatacatatataaagaaatttatcataagaaattggctcacatgaatatgaaggctaagtcccaagatctacagtcagcaagaaggagacccaggagagtcaatgtgtagttccagtgagagtccaaatacctgagcatagtacaaatttcagtccaaaagctagcagacttaagacctaagaagagccaatgtttcagtacacatttaaaggtcagaaaaagccaatgtcccagctcakatagccaggcaggagaagctccctcttggcctttttggtctgaatttttggccttccactgatagggtgagacccactcacattagggaggacaatctgctttactcagtccaccaattcaaatgtta

SEQ ID NO: 900155 - DNA, 559 bp, Homo sapiens
accctcaacaaactaggcactgaagaacatacctcaaaataataagagccatctatgacaaactcacagccaacatcatactgaacaggcaaaagatggaagcatttcccttgaggaccggaacaagggaacasgatgcccgctctcaccactcctattcaacacagtacttatttcctagccaaagcaatcagtcaagagaaataaaaggcatccgaataagaaaagaagtcaaactgtctctcttcactgacgatatgattctatacccagaaaaccctaaagactctgccaaatgacttgagtagtttcaggatacaagatcaacatagaaaaatcagtagcatgtctatacactataaggttcaacctgaaagccaaatcaagaatacaatcccattttcaattgccaccaaaaaaataaaatacccaggaatacatccaaccaaggaggtaaaagatctctacaggaagaactacaaaacactgctgaaagaaatcacagatgacacaaacaaatagaaaaacattccgtgctcatggattgggagaatcaata

SEQ ID NO: 900156 - DNA, 618 bp, Homo sapiens
atattctgacaagttatattctagatgaaattgcttcttgactctaagcatctaggactctttaaaaaaattattataaaaatgttcaagcattcattaragacaaatgtaaaaaaaaaactttatgaatctatcatccagtttcaacagttaccaacacatagccaatcttgtttcattaatccccctgcacccactctgtttgctggtaatttaaagtaaatcccacacatctatcattttccctgtaaatacttcaaggcatctttaactagtaaggatttttttaaaacataatcacaatgccattactatgcttaacaaaatgacagcaatttcttaacatcatctgaaacccaatcatactcaaatttctccaactgtctcaaagatgtcttttttcagttggttcgttcccatcagaatccacacaagattcacacattgcatttggttatgttcttaaatctcttaatctaaagcatacattgaatccctctccctcttcttttttatgctacttatttgctaagacaattgagtcatttgtcctatagaatatcacacacgttttggatttctgtggtaacgtgtttctctagccttcagaaagtgaaa

SEQ ID NO: 900157 - DNA, 575 bp, Homo sapiens
tgtttattttttccaaaaactaagactatgtgctcattagagataatatagaatattgagaaaactgtcagcaatcaaacagatggcccttaattccaccaaatagaagttaccactgcctgaaacacacaggcacacacacacacactaaatagaaaatacgttcagttttattaagtttaggttgtaacatatgtatgcataattttatgttatgtttttatatttctatttttacagtataactctatattctgaatttagatcccaatatatttatttgtgtatttgtgagtgtgtgtatatacatacatatatatatgtaaatatatggtaaattttatattctgagtttattttttcatataccattaaggtattaatagttctctattggttaacttttctcaacattttcaattaccttccacatatccaaaatttagcatctcagttggagatttaaacaacagctaactcattcactgcaatgcattgttcctgcactatgttagtagaaattmtctattttttgttggtggaggatggttgtcatgaagataaaggcctgcctc

SEQ ID NO: 900158 - DNA, 623 bp, Homo sapiens
  misc_feature 389, 390, 391, 392, 393, 394, 395, 396, 397, 398, 399, 400,401, 402, 403, 404, 405, 406, 407, 408, 409, 410, 411, 412,413, 414, 415, 416, 417, 418, 419, 420, 421, 422, 423, 424,425, 426, 427, 428, 429, 430, 431, 432, 433, 434, 435: n = A,T,C or G
  misc_feature 436, 437, 438, 439, 440, 441, 442, 443, 444, 445, 446, 447,448, 449, 450, 451, 452, 453, 454, 455, 456, 457, 458, 459,460, 461, 462, 463, 464, 465, 466, 467, 468, 469, 470, 471,472, 473, 474, 475, 476, 477, 478, 479, 480, 481, 482: n = A,T,C or G
  misc_feature 483, 484, 485, 486, 487, 488: n = A,T,C or G
ctacaatatctgtgagttacttttacaaaamtaaaactgtatcaaaatagtgtctttattagaattattaatttgaatattatttgactattacataattaaaaccaactgatataaatctgaagattagcaaaattaaagtatttctttacaataggtgatattatttactgaaagattcttgtaaattaagagattatgaaataaatactacaccttgtacttatttttaataatgttttaattttagcttataaaataagttttttgaaagattacgctgcaaatctctcttctgtacctgttctccaatttataagagcatatgtgtgtgtgtataaactttttttttttttttgagacagtctcactctgttacccaggatggnnnnnnnnnnnnnnnnnnnnnnnnnnnnnnnnnnnnnnnnnnnnnnnnnnnnnnnnnnnnnnnnnnnnnnnnnnnnnnnnnnnnnnnnnnnnnnnnnnnnctggctaatttttttgtgtattctagtagagacagggtttctactatgttggccaggctgttctcgaactcctgacctcatgatctgcccatcttggcttcccaaagtgctgggattacagacatgagccacagc

SEQ ID NO: 900159 - DNA, 565 bp, Homo sapiens
ccacttatttgtccttctgatcaatagtagtctygatttcctggtcttgaagcctaattctaatttactctcctgtgttctcccaaatctacagtttaccattccattgacgtcccacctgccttttctaatcacaagccagtagtttgatgacagaaagagctagtgaccttctctgatataggtcccttagaaaattctcttctggggttagtgcaagtgacaagacaaaattcacagccattgctactaatgacatctagcagcagcattaaaaaaggaaacctcttcgcacagctaacaaaggtcatccagaaaacaccagtgctagcttgcagtgaacaccagagtcgctgcccatcataaacccaattactcactcctgctgtgtctcggggtatctgtaactactcaccagcaaccatccttggactgtggccaccaatcgtgccattgtactaaagtcaggagagagatttctttctgtgcattgacctaaaaggaaaaaaataaatttaaaaaaatactgaacctcccttctgcaataaaacaaaatggctttcat

SEQ ID NO: 900160 - DNA, 267 bp, Homo sapiens
gcagggtgccagggcccagtgtcagttacctgacacagagtgtmtcaatttgtcactgttaggtacttaccttctcctggcccttattaatctacctttttaacaaagagaaagagcaggcctccagctcaaggccttcctctagaagttgttttgatggtctttgtctctttttggcaaagaaggcagatcttttaattttggtagagttctaataatctctttctaaataaatgtatttaagttaaaaaaaaaaaaaaagagaaa

SEQ ID NO: 900161 - DNA, 654 bp, Homo sapiens
ttgctacttctttctttggtaggcaatatacacagtaaayctaaatcagagaaaagttaatataaggtttccaaaaccacatctgatacatagaagacacttaatacatgttttctagttgaggcagaagagtgatatgtaaataaaaattcctcacgtttttatcatctcatggacagggaccttggagggaagtaaatctggctggtatctcccatagggatggccagcaagaatggtaattaccatgggacataaacattgtgttcaaagatgtttgctttccactttcatatccacaggacttatcagggtgctggtatgtagcaagtgttacacaaatacatattaaatcactgagttgaaaggacacagagaccatgtctcaggaaggccctaaggtaagttgtcatagataaagccctggatctaacacacataatcaaatatggaaccagagaatcagagatgttgagagtgaattaacagttgagtgggcagtacatagcggtttgaacacattccagcaatgcaagcccaatatctgaggtcttacccatcattaatgaacacatgagtatttgagtcatttatacccaaaagagatagaatagcagaagcctaggaattttcaccaggtcactgaatagtacc

SEQ ID NO: 900162 - DNA, 595 bp, Homo sapiens
taagacagacataatatgttagcaggaaaaaaaatgctttggaactttctgatttacttagaaytaagcttcctatccccacattaaataataagtaaacattacttagaggttatgggtatcagtatttccactttctatgcattgttatggtaataaagccttttagtcaaggaaaatatgaagccataaaacttaatgctctatttgaggaacaattacagcaaattataagcaaccgggttgtacaaaactgcgacaaataaaaatttaaagtataataatatgctataagcgtttatataactgatactatccatttgttttaagtgtcagtctttctaaagataattaccaaaaaaatctagattcccaaaataattgtcatgttgattacttagaaggataggcttcaaataaatttgcgatgaaggatttttaatagaattctggtataaaatatattttctactcaatttcagttaatgcaatagagaatctgttgcatgcttcaaagtaactgtgtgtgtgtgtgtgtgtgtgtgtgtgtgtatttaattaattttgcaaggcaaatatatatttactattaagt

SEQ ID NO: 900163 - DNA, 602 bp, Homo sapiens
cttcacgtttaaaaatgatttcttctgcttgatcaagcctgtttttgaaactatcagtgtattttttaaaatttcattcattaaattcctcagctctaagatttatctttggttctttttcatgatatctatctctgttgaatttctcattctgattattatttttttctgattttattgcattgtttgtattcttctgtatctttctgagtttcatattttgaattccttttcagatattctataaatatccttttcttttaggtgtattactaaagtcttactatcttgttttagtagtatcatattttcttgttttattatgcttcttgtgtccttatgttaatgtctacacatctagtgaaatagcctattttttctatttgatggagtagcttttgtagggagagacttttttcctgtagaagggtcctaaaatgtcagttgagtatgatgcagtggtttgcttgtgggtttactaagcctggtttccatgcagtttcttcagccataatagtcatctgtaatgcctgtgatttttctcagtggtctargctgtggattttgtgacagtggtggtgtgattttgcttgtagctgggg

SEQ ID NO: 900164 - DNA, 596 bp, Homo sapiens
ttcatatgaatggaagaaacaatttatggctctttgtgtgtggctttaacttagtataatgttttcaaagtcatcctgttgtagcatgcattagtctgatgacattttctttttctttttctctttcttttcttttttcttttttgagacggagttttgctcttgttacccgggctggagtgcaaatggcacgatttccgctcactgcaacctctgcctgctgggttcaagcaattctcctgcctcagcctcctgagtagctgagattagaggcgcctgccaccatgcccggctaatttttttttgtgtttttagtagagacagggtttcaccatgttggcagtctgttctctgactcctgacctcaggtgatccacccgcctcggccccccagagtgctgggattacaggtgtgagccaccgtgcccggcctgtctgacgacattttcaaacccgtgtttcttaatcctttttagatccaagagatccttttggagatgggaagaattttagaagttgtctggtccaacataccttcattttgtagatgagattaaggctttaatcaygccaaacagtctattgctcttttcatg

SEQ ID NO: 900165 - DNA, 672 bp, Homo sapiens
tgaatagaccataggtttatctgacctgatgtcaacaagctctgctgttcccagtttggagctgtcatgaatagcgctgatrtgtgtgtgcttgaacgtgtcttttggagaacgtaccaccacatttctgttggacatatccttggaagtgggattgtggggtcataggctgtgtatgtgcccagcctcgggaaatctgtggcaagcagatttctgaaacattgcaccaacttacgttcacagcagcagtgagtgggggttccagttgctccccatcctcaccactcttggttttgccattttcactttgcaccttctggtgggtgtgttgtgtgtgggcagctccttatttcaaagtgatcaaggttagggctcactggtgagcccaggccacaggctctgggatatgtgtgggtatcatgagaccttccgtgaagaatctctggttggagggccttgaagaccagctcttgtccagtaaaggctcctatggaacgtatagaattacccggcgcttgttagaaatgcagactcttggctgggcacggtggcccatgcctgtaatcccagcactttgggaggacaaggcaggaagatccctggagcccagaagttcaagaccagcctgggcaacatggcgaaactgaaactgacccaatagtcccatagata

SEQ ID NO: 900166 - DNA, 610 bp, Homo sapiens
tccatatttattctatctctctgtctgtctattaatttatttatggtggggagggaggaggaaggcaacagatggagttataaatggacatgaccctgcatttgctctgctaactcccctcggtttaaggaaacatggctattcctcgaccctgcatgcctggctgacccaggctgtcctcgctggtggctggtggctgggggcaaatgcatttgtaatggaagaggtgaactcactgtcgggggttcgagggagcgcggggaggtgttttcttctgtggtaataagattgtcagggccccttcctggctcgtgcattgcatggaccgatgcaggctgccagaatgggaagctcactcttcttaattagtcctaatgcagttgaggctgttttcttagcctgaccaaagggagtagtaattaatatggtgggagagacagacggagagttcaaggccggcatgtgtgcccccgaccctggggtcactggggaaggggaacctagaagacaatagcctggctcccgcaggcctggacaaaggctggttctggttctcaaacctcagctcactgtggccttcccattaatgaraaattctgtcctttcattc

SEQ ID NO: 900167 - DNA, 568 bp, Homo sapiens
aactcgtcctgcccctgggtggccggggcacccgggccttctgcctccacactttgtttttctttttcttaaaaaaaaaaaaaagcgtaatgagmtgcacgtttaacaacatgtttagctaattgagtctgtccacggcatatcccaacctgggcgctgagagataagccggtcacctggagcgtgccacaaaaaggagagaagacaaagccagcagctaatagaaatcgttaattggggaggacgcccctaaccacatcagatcaaagatgcaggcggactcttcccaccaaacgaattcgcctttgagctcttggcattgggttcagcactccctattatcaactggaaagcaaaatgctttgttttgcctgaaagacgttcccagatggcacgttcccctgcgtgcaccctctcggttgcgagcctgaaggcatcgcgatcgtcaccatcgtcaatccggatggcccaatcgcatcgaatccagcctgcgtgaaaacacttcacttctgacctccttaacaccagagccaccccagacgccacacactgcacttaccctggagcg

SEQ ID NO: 900168 - DNA, 645 bp, Homo sapiens
ttgagcccaggagttcaaggtcaccctgggtaacacagcaaacccatccctacaaaaaaatagaacaattagccaagcatgatggcacatatctgtagtctcggctactcaggaggmtgaggtaggaggatcacttgagccccagaggtcaagactgatgcctgcaacactcagtaattcacacacacacaaaaagataataattttgattttcagaatcccaaaatgctctggagtctagagagagccaggtcaaagcagccaccctgaatcatcatatacctgtcacacccctggagaaaacaatccatttgtcccttttcacatgatgctgctcagcacgctctggaaggttttagctcaggacactacactttaggagaaacattgagaaattgaccatacctagggatactgtactcaacttggggctcacaacactctcttgtgttaccattggttgtgatgtgggcttttaaaaattcttaaataaataaatgaaaaagatcaaatcaaattcaatatttcccccaatggtaaaaagcaatcttgctccatcctaatctgcttctaattcatacgctgatttttttccctctagtattacatgataaatattttcccagaaattagtaagcatgcagt

SEQ ID NO: 900169 - DNA, 617 bp, Homo sapiens
ccttaaataaacaggcgccagacaagagcttcctgaaccttggacatttgtctttctcctctgggaggggtgaagaaatggggacatccatggtgatctactccaaagtcggtctagcctcattccagggagaagtgaggacatttaatactatcagttttaaaaaatgacacagcacacacgataggccagagcttaaggttgaatcagagagaaccaggtttcaatcagctctgccactgacttcctgggttactttgtgcaatttttacctctttgagcctgtttcttcttctatgagtggcgaaaaataaaacacaattttgtgaggttataggaatcatctgaaagaataattctcataacaaaagctaatgctgaaatgtttactaggtgttaagcattaagctactgtctttttatctattattttatctctcataacagccaatgatagagatactattgttatccctattttaaaaaaatagaagcatgaagagaataggtaagtagctctaagtctcactastacacagtgcttcacctgggacccacacacctgcagagggatttgtgggtagaattcagtgggtttatgaaagtaggtgggagaa

SEQ ID NO: 900170 - DNA, 634 bp, Homo sapiens
tatatccaaattattatcagttaaataatcaatataaaattataattaatgattttatattttttcatactacatctttgaaatctggtgtgtatcttacacatccagcatagtgtgggtggaattgtttccctctaaaatttatatgttaatgttctaactcccagtgcctcagaaggtgactttatttggaaacagggctattgcttctgtaaattttttttttttttttttttttttgagacagagtctcactctgtcacccaggctggagtgcagtggcgccatctcagctcactgcaagctccgcctcccgggttctcgccattctcctgcctcagcctcccgagtagctgggactacaggtactcgccaccacacccagctaatttttttgtatttttagtggagatggggtttcaccgtgttagccaggatggtctcgatctcctgaccctgtgatccacccgcctcggcctcccaaagtactgggattacaggcatgagccaccgcgcccrgcctgcctatgtaatttttaagataaagccatactggagcagggtgggcccctaatccaatatgaccgctgttcttacaaaaaagggaaatttggaaatagagacatccatgcag

SEQ ID NO: 900171 - DNA, 569 bp, Homo sapiens
tattacataacataacatagcgtaatataataatatagtaaatataagtatagtgaatataattactttgattacataagtatgattagtaataaatgatagatataaaatagtgttaatataatacaaaatactatagtataatacaatataatgtgtatgtttctttttaaaaccttttcagtatacgttgaaggaaacaaagacccaagtttaatagggaaatgatttttgtaataaagtgaacaaactggataggttctcttgagctggttacagctgttttctgactgaattttaattataaaagatctagccagcttctatacacactctccctgcacaaatgttaactctggttcagacaccttttctgcacccagttattctcactcataatttctttctccttgggtttttgttttattttggaacggctttttaaccttcagaartacattttgtctggaggaccagagtatcgatgtgatcctacctgtagattcttggcaagagagaaaatgttcttattaatgcagaaagtcctacccagaaggaagaaaacgtct

SEQ ID NO: 900172 - DNA, 588 bp, Homo sapiens
ggcaagagagaaaatgttcttattaatgcagaaagtcctacccagaaggaagaaaacgtctcacctagaaaaaagtcattatgtagttttttctgggctcatggtttcctgaagagacctggtcctagtcaatttctccttggtattttattatttttgtccatttgaggtgaaatccggaggaagtaattatgaggttgttttaggggcacaggtggcattttcatggattggctgagctgactgcctgcagttgatttggggatggggtctactttagggtttcactgagtacaggtggtcacagatatccacaggttccaaccagtgatggaaaatattcagggaaaaaaaaacagtaaaaataacaccataaccataaaaaaagcaatgtaataactatttacatagcatttacattgtattagctatcatatataagtaatctagagatgatttcaagtatacagtggatgttggaagggtgttcataggttgcatgccgatactttgccgctttatataagagacttgagcattccaggattttggtgtttgtggggragggatgttgaaaccaatatctgc

SEQ ID NO: 900173 - DNA, 611 bp, Homo sapiens
ggcacccaaccaactcaattatcttaygtatgaaagttctgcttacggactgagtgcccctggccctggacaaaaaagatgatgggctttaaaatcacccactccatatgtctactggttttccacactaaatgaggcgatgatgcactccttgctgaaggcacacaccatgaactaaaggagtctgctggagggagtgattatttggcagagttggaaaaatcttacagaggaagggatacttgaaccaggccttgaaggatgaatatgaaattatctgcaagcaagagtaggaagtcaagaaaggcagagagacaagaaacacatgcagaaagcaaaacatattcacagacaggtgaagtactctgcagagctgtcaagggctagaagaatataattaaggtgtttaaacagcaatgttaattcaaattcaacacatttaagacagactgttgtcttccccactttccctaggcagccaggctcaaaactgttatctcttcttttttcttcattcttagttctcatgttcaattagcatccagttgatttcctccttaattctggagacccaccaccatcttgatgcctaggacactgtcccagtgcgc

SEQ ID NO: 900174 - DNA, 629 bp, Homo sapiens
tacctgggaggagtgagttcctccagttaaatgtggctgtagatgttggaggctarggaggctagtaaatatcaaaaggaaaagggagtgggaattgctatcatgtaaaatatcaaagttaaaatactaaggtgcattttccctgaagggaactcatgtctgactgctgtattcaaatacgtagctttggtaacaaacaaaatccgtatatgcaaatcaacatatccaaacatgccaagactgcttttccactgcacttggaaggatatattatgcctaaccctgcccaacaaattaaggtttgtgcctaaaatgttagattggactgtatgccagttagtctccatttattcctagtactctgtcctaagaatctttttaaaactatatcatgatgaattgaaatgaagataaaattgctcttttgtaactttatcttagtaatgtaaagattcagtaaattgatgagtcaggttgcagccctcatgtgaactgaaagaagttgctcgcttctgtgttgacttagatcaagacacgtcacgcatcctttctggggtagtacctgtggagccgggaagggtctcctgcagtgccattctgccttctcaatgagcaaaaccattttctaa

SEQ ID NO: 900175 - DNA, 595 bp, Homo sapiens
tcactcaaatctatccggaagcagtcttgctccacagccttctgccattcacagccacttccctcccgcatttctgggacagtcaccgttcctttctaatttagtaactacacaaacttgtcttattctcccttattgtcttcacttttcccccaacttcccaacttaaatctctatatacctttagttttattccattctgttttgcatttctttccttccatatactttcatttttctaatacctaccaaaacattttcgccttagatttcccttttttatctagaattttctcatcttgcactttgtttttatctctgccacatataactgagaagtcaatggactgtactgaatgagtaatgaataatcatttaaaaagagctaagctaaagggttaataactgatcattttttccttgagtgagcctatgaatcaataggccttttctatgttctctgtycccacctcaggaggctacaggatcatacatgtaaatttcttggaagtcttaatattctttttaattattacatgatgtcaatttacaaactctcctagaaaatgcagcaaccttaaaatatcaccttgac

SEQ ID NO: 900176 - DNA, 595 bp, Homo sapiens
tcactcaaatctatccggaagcagtcttgctccacagccttctgccattcacagccacttccctcccgcatttctgggacagtcaccgttcctttctaatttagtaactacacaaacttgtcttattctcccttattgtcttcacttttcccccaacttcccaacttaaatctctatatacctttagttttattccattctgttttgcatttctttccttccatatactttcatttttctaatacctaccaaaacattttcgccttagatttcccttttttatctagaattttctcatcttgcactttgtttttatctctgccacatataactgagaagtcaatggactgtactgaatgagtaatgaataatcatttaaaaagagctaagctaaagggttaataactgatcattttttccttgagtgagcctatgaatcaataggccttttctatgttctctgtccccacctcaggaggctacaggatcatacatgtaaatttcttggaagtcttaatattctttttwattattacatgatgtcaatttacaaactctcctagaaaatgcagcaaccttaaaatatcaccttgac

SEQ ID NO: 900177 - DNA, 606 bp, Homo sapiens
tcagggcaacctccgcctcccgggttttacaccattctcctgcctcagcctcccgagtagctgggactacaggcatgcaccacctacgcccggctaattttttttgtatttttagtagagatggggtttcaccgtgttagccaggatggtctcgaactcctgcccttgttctcctcccacctcggactcccaaagtgctgggattacaggcgtgagccaccgcgcccggttcaagtgaatctcctgcttcagcctctcaggtagctaggactacaggtgcacactaccatacctggctgatttttttttagtttttatagagacaaggtcttgctatgttgaccaggctggccttaaactcctggcctcaagctatccccctgcctaggcctcccaaactgctgggattataggtgtgagccactgtgcctggccaaaatatatattaatcaccaaaaaaaattaactaccacaccatggtggcttaacaaccgaatggagaagccactgaacttgaaaagctagagaagcagtyggatccagcactggctgctttggaggtggggagagaaagcaagatgcggaaagaggaggggaatgacagcc

SEQ ID NO: 900178 - DNA, 644 bp, Homo sapiens
aaccatgaaaaccagggttttggagaagtcctttaggagagtttgctgctgggacggacaaggaccctgcttgctccagggcagtcattgtgggtttccagaaaaaaggcaagaggttctcagaggtgctggggtatggggggattccaggttgttaggggttgaactgtgtcctccggaaaaaggtgcattgaagtcctaaccccccagtgcctctgaaggtgaccttatccgagggtggttgcagatgtaattagttacgatgaggtcatactggagtagggcgggcccctaattgaatatgactggtgtccttataaaaagacggtcatggaaactcacagagacgcacggggggaacaccacgtgaagatgaagaaataactcagggtgattcttctgcaaaccgagggacaccacaggtctccagcgaccactggaagctaggaggagcctggggaaaaccctcccttaccttcctccgaaggaaccagccctatggacaccttrattttggactttcggcctccaacactgtgagacaacatgtttccattgctttaagacacccagttgtggtgttttgttatggaagccccgggacactcacacacagggtttgactgcgtcttcctgagtttaat

SEQ ID NO: 900179 - DNA, 574 bp, Homo sapiens
tgtttattttttccaaaaactaagactatgtgctcattagagataatatagaatattgagaaaactgtcagcaatcaaacagatggcccttaattccaccaaatagaagttaccactgcctgaaacacacaggcacacacacacacactaaatagaaaatacgttcagttttattaagtttaggttgtaacatatgtatgcataattttatgttatgtttttatatttctatttttacagtataactctatattctgaatttagatcccaatatatttatttgtgtatttgtgagtgtgtgtatatacatacatatatatatgtaaatatatggtaaattttatattctgagtttattttttcatataccattaaggtattaatagttctctattggttaacttttctcaacattttcaattaccttccacatatccaaaatttagcatctcagttggagatttaaacaacagctaactcattcactgcaatgcattgttcctgcactatgttagtagaaattmtctattttttgttggtggaggatggttgtcatgaagataaaggcctgcct

SEQ ID NO: 900180 - DNA, 592 bp, Homo sapiens
agtgggtcattggatgtcatagtgagaggagccaaacccacttccaccctttgattcctggccccacataatccgaagttaaaaccaggtactgtgatgactcacctgatttttgattcttgtgatggtgctttttgtttgtggttagtttttaaaatttggtgttctcgtgggggtatgggaagggcgaatggtgcaggcttccattggccatcttgcttgccccctccaatgtaatctggctgtaggataagcagcatgagaaattggctgctgaatcaaagcacagattgcatcctgtagctagaactccatcctttctgggtgctgtctcctcaaaggctttgtaatgaagccttcagtagactattcctccattctgttaggccagctcgtcctagatgattgagtgtgtggcagagccagtgaattccatgagtctgagccaaatgatgcatttatgttttgtgagaggcatttcttgttcaggagcaatgtaggggcaatgttgtgacactgaataaagcattccttgaattcataaatggtggtgctagcaaaagcattayggagatagaagatgaacctacat

SEQ ID NO: 900181 - DNA, 622 bp, Homo sapiens
aaaaaccaaaaaagagctaaagctgttctcccacaaacagaccttcagcttctccagtgggggtgtgtgttcaggaaaggatgctcttcctttcctacttccacagttggagcactcacattttttkgggggtggtctcctgggtcctgcagatttttttggttttgtttttgctttttaacttgtatttttattttgtagatcctctgtgatttatgctttaaagaggttccattttgatgtgtttccaggatttgttttaagatttagagctccttttagcggttcttgtagtggtgacttggtaatggcaatttctctcagcatttgtttgtctgaaaatgactgtatctttccttcatatatgatgcttagtttcactggatacaaaattcttggctaataattgttttgaggaggccagagatagggctccaatcccttctagcttgtagggtttctgctgagaaatctgctgttaatctaataggttttcctttgtaggtttcctggtgcttctgtctcatatctcttaagattctttccttcatcttaactttggataatctgatgacagtgtgcctaagcaaatacctttttgcgatgaattacccaggtgttt

SEQ ID NO: 900182 - DNA, 649 bp, Homo sapiens
cctttttcatgtgtaatacccctctgctgggaacaatcaacttttctacatgcatgtcatgtacttgattgcaaacaaatcactcacttaccatgttcgtcaagtaaaatattgtcaggcttcatatccctagaggagtaaaaagaaaaaagaaagttgctcacaataaaacgaacagaactaaggggtaggggcaaaaaggcttaagaaagctaactggagttgaaacagtgtactagcttctcaatactcatcttctcattcaattctcacagtaaatttatgagacagaaaatccccaatttttaaatcagaaaactgaagcttaacccaaggtcacaggctagtaaatggaagaaatgggctctgaaccaaggcctctctcattcaaaaactcagactctaaacttcctatagcatgttgtatctaagcatgtagatattggtccattggatcatataaagcatttacattgccataaagtaatgttagtagtattaagcatcattttcttgtgtaactctagaattrcacagatgatgtgagcttaaagactataaatgggaaaaatatggttgataatgtagttatataaccaccccctgtctccttttgcctcctcacatccacacctgctgttgctttgcc

SEQ ID NO: 900183 - DNA, 610 bp, Homo sapiens
tcagccatcatcataaaacaagtggaatttgcacacaaacacattcagactcaatttatctcttggcagctcactgacaagtcatatttaggatttacataagaaaattgagttaggtcagtttaatgctttaaaaggttgctaatataattgaggttatagtctgcacaatttcttacctctggttatagtctgcacaatttcttacctctggtttcactgtgctctgaacagtgatttgcaaacacgtgcctgtggaatagtacttgtacatggtaaaattttcactggtccttcacaaaaaatatgaaagtaagagtgttccaactatcctgccttgggggaaaaaaagtcctttactccaaaattatatcactcttgttttttgttgtgatataaaattttcttaatcttttgaaatggtggcaagagcagatggtagaattgtgattcattggccttatttagcaaaacaaaaaagttgagaaagttatgagattatgttcattttcctcttctttccattctgtattctccaggcatttttttcaacaggttttatttttttagagtagttttgcrctggcagtaagattgagtagaaggcaca

SEQ ID NO: 900184 - DNA, 631 bp, Homo sapiens
gggaggatgggtgggaagatggaaatctctcatttttttgtctttatgaacctgggaccaaaaaaaaaacgaggaactttacctataaattagattgtgttgtgattcataaaccatgctaattttataatttaaaacattggaattagttatgattttaaaaatttttaaatagaactcaaaaagaaatgttttcctcatatgattgatgttttaagtgtggccattgtttccaagcaaaaatgacatttattcaattgtattaaatgagatttcttagtaggctatttttacttgattctatgtcagtaacatgtgaaataagcattagaggtgtgattaaattattggagagaaaatagttatgtgaatatttgttttcttggacacatttgaattactatatttttcccaagcacactttgaagtacattttaaaaaataatttaacatcagggttgcactacctctctatcttgtaattccatgttacattggagctttttaaacacttatttgactctctcttctsgaaactctttcttcagttgtttttcatcttattattctctcttgttcctccttattccaagggtcactctatcattggctctttggctgattcatatat

SEQ ID NO: 900185 - DNA, 655 bp, Homo sapiens
gtgttgtagttttcatcttgagaagtttggtctttgtgagatttaaaacatttctatacttatctattgatcaagtgaaatagaattataataacttttattttaaagtttttggtctgacaatgctaacatctttgctaaacctgagttggctttgattaaatactttttttctttttattttcagttaatgttttctccacctttgcaggcctgctaatttctttgatgcctaatattgtaaatattaacttgtgagtgctagatatttttgtattcatatttgaactttcttctggggctcagttatgttattttaggaaagtttgatccttttaaatttgttagatgggaacagagctgtcttattctaggacagggttgttcaacttcagcattattgacatttggggttggataattttttagcatagatcattgtcctgtgcgaataggatgtttggcatgattcgtagatctacctgcctaatgccaatagcaccctccacctttagttggacaagcamacatttttctacacatttctaaatgttccatggggttcaaaatcacctctggttgagaatcactggttgagaactaattactacatactcctgaggcaagaccattctgaatatgctacctggtctcc

SEQ ID NO: 900186 - DNA, 592 bp, Homo sapiens
ggtaactggaatccacaggaacaaaagaagagaaacagaatgatgaataagaagatgaatayaacaaaagttacaaatatatacttgttctccttctgttagctgttttaaaagacataaagtaaacaaatataacaatgtattattgggattgtaacatttataaatgtaatatgtatgataataataccaaagggggaaaaggaatacaattataaaggagtaacatttcaatatttcatggggattaacttaatataaatctgaagctatttctgataagttaatatgtatatggtccctagagcaaccagtaaggaaataactcaaaacatgaaaatacaaaaatcagtaaagctggatacatgacattatgcatttattaaaacccacagaacaatacaatacaacacagagtaaatgctaatataaactatagactttagttaataattagtatcaatattgattcataaattgtaataagtgtcccctagaaatgcaagatattaataacagtggaaattatatggtggtgaaagacaggttaaatgggaactcttttacttttggcacaatttttctgtagact

SEQ ID NO: 900187 - DNA, 592 bp, Homo sapiens
ggtaactggaatccacaggaacaaaagaagagaaacagaatgatgaataagaagatgaatataacaaaagttacaaatatatacttgttctccttctgttagctgttttaaaagacataaagtaaacaaatataacaatgtattattgggattgtaacatttataaatgtaatatgtatgataataataccaaagggggaaaaggaatacaattataaaggagtaacatttcaatatttcatggggattaacttaatataaatctgaagctatttctgataagttaatatgtatatggtccctagagcaaccagtaaggaaataactcaaaacatgaaaatacaaaaatcagtaaagctggatacatgacattatgcatttattaaaacccacagaacaatacaatacaacacagagtaaatgctaatataaactatagactttagttaataattagtatcaatattgattcataaattgtaataartgtcccctagaaatgcaagatattaataacagtggaaattatatggtggtgaaagacaggttaaatgggaactcttttacttttggcacaatttttctgtagact

SEQ ID NO: 900188 - DNA, 545 bp, Homo sapiens
gtatgtgaattatatatcaataaaattattgtagaaaattcaacggcattctacaaaatgtctgaccagtattctttaaaactcaaagtcatccaaaacaagaaaggtcagagaaactgtcacaaaccagaggaggctaagaaaacaccatgctcaaatgtcatgtggtgtcttggatggaatcctgtaacagaaaagaggcatttgggaaaaactaatgactcctgtataaaaggtggagtttagtcaataataatgtaccagtgaggcatctttacttgtgacaaatgcgcccccagtaaggtaagatggtaacaacatggaaactgggcgaggtgtatgcaggaactcttggtattattattgcaacttttctataaatctaaagctacctctaaaataaaatgtttatttaaatttcaaggaaaggaatccctaccctagctcagtgtttcccaactcctcttatttttaggagttagctatagawgaccacgagcctcctttgtggaggggccaatgaaaggttgttaggggtgaatgct

SEQ ID NO: 900189 - DNA, 590 bp, Homo sapiens
ccctcttacactggatgaagcactttctccataatgttcacttctttaatgacaggatagatgytgctgttctgacgactggagtattcagactgatgagaaccactggtgattctcagcagtcccaacatcacatgcttcctgtcctgatgacctgtgagtcaccactccaccacctccctatatgggtgagaggttacatcagtcccagtctatagatggaacaacacaggcccaattgagcagatgtgctttcatgagtctgtctcatactatctattgccaggaaacagggtacagttggagacatattgttgcgtcatctgaaggcctcatattacaagacacgactatgaagctaggcttcactctatcacaggagtgggagcctcagactttagcccctggttccaattctgacacctgcttagtatagaaatacttaggtccaggagtcagaggtttgagttctagacttagaattaccacttagcaatcactttcatcatgtcgctcacctgctaaaaatcttcctatggctccctattgcccttaaaataaaatcctaacccctcatcatggaattcaag

SEQ ID NO: 900190 - DNA, 627 bp, Homo sapiens
ccctttgaccaacatctcctcatttcctgtataccccagccctgacaaccaccattctactctctgcttctaggagagtaactattttagattccacatatacaaaagatcaggcagtatttgtcttgctgtgactggtttatctcacttagcataatgttctccaggtttgtccatgttgtcacaaatggaaggatttccgttttcaaatatcagttctcttcaaaccgtttgagtaccctgagaaagtttttggtttccagtggctgctcctttcagaaactatgctactttctaaaatctcatttaggagtagcaatactttactccagacactggccccagaccagtgtgggaggaaagccgtgaatccttaaagaaagtgatgctttaaaagtctgaggttaaattccattttgaaaagttttagcacaacttcccttctccccagagctgaacctcacttcgtgctattttttactcagttcaagagtgttttttttttttaaataacttgtctccttatgaattttaaataagttaattaataggatattgctagttkaaatcataatataaattcagaaaatattttataaatggacctatgccatttggacttaaaaa

SEQ ID NO: 900191 - DNA, 653 bp, Homo sapiens
caatctcatttctgcctcatgccctccataccctggcaactttgccaaygacttcctatttgtccaatctaatggataggtgtcaaactttatgacattttgggagcatatccagcttgctcttccctttctgaaactcttaccttgacttccgtgacactattcgatcgtggtatttttcctctgtctctgatcattcattcttaggctgcatagttgggtcctcttctgtcttagtctactagggctgccataacaaaataccatacaatgggtagcttaaacaacaaaaagtgattaaggtccagcaggattcgtttctggtaagagctctcttcctggtttgcaggtggtcgccttcttattatgtcctcatatggcccttccttgatgcgtgcccatggaaagagggagatctctctctctctccccccaccatcttatacagccaccaatcctgtaatattagaaccctacctctattatctcatttaacattttttacttcctagaagccctgtctccaaatacagccacattggggattaggtcttcaacatatgaattttgggggaatacaattcagcccatagcatgttcctttgctctagcttcaaaactttacatcctccagggttctgtcctactcctac

SEQ ID NO: 900192 - DNA, 579 bp, Homo sapiens
caactaactgttaagagggccagttctgagcagatggcccaggcagaacaatgctggaggcaggagctaattgaggctgatgaattaacagacaggctttaagtctacatgtcagaaactaaagatacttccaagtaattacagtggagactctgctgaaaatggagccatgaaactgatttcccccaggaagtcaagttgcaccagagaaacttcgtgtctcattttgcttttgtcaacaagatgaagcccaggttcatgagtatctccctactcaatagggcatgttacttccaggcctgagtagaccaagaatctaggtcttctgatttactgagtcaagcatgctgttaacttacctgaacacctggtgctttaaaatgaaaacacacacacacacacacacacaccagtcatatcttaggtacctaggcacatatcagatgattgaatgaaattagataaattaaaataataaaatwaaattaaaaagtacaagaccacaagtcttctttttcaaatctacttgttcacatttttaaaatttagtttttgcgctgaaaaactatttttacgttt

SEQ ID NO: 900193 - DNA, 608 bp, Homo sapiens
gctaagaaatatacagaagctaatagagttataaagagtctggaccaagaatcataagacccagtyatgagttgttaaaagtgagggtgaaacatgtcccttcagttttctcattttaaataagactaaatgatctcatcttttttattttctttaaaattttaaggccttatgcaaaaggctgaaaatctaaatggctaagatttaatggaatccataggatttcaatgagatttggaaaattcatcaactatgtggcacagaaaatacagacagcacacatgtactatattctgtatgggatatcaggaccaaaacaaaacaaaaaaaatcaccatccaggttgataaatggaaaaaagagggtagagatctcttcctgatacatcctcagagaagattttggcctccctaaaaattccactgaaagttaggtgtctctaatgttcatttttcttttttttttctctcaagcttcatagagatcctctatatttaagtttcagttttgtttatctttaaagatctcttcactgttcagaatttcttttccagaatcaacaatcactttccaaaaattgctcttatttttaaattttgtacattatt

SEQ ID NO: 900194 - DNA, 546 bp, Homo sapiens
tcagaatttcttttccagaatcaacaatcactttccaaaaattgytcttatttttaaattttgtacattattttttccatcaagaaagatgattatcaaaaggaagtttccttccttccttccttcctttttctctccctttctgccccctttgctcccttcttcccttcctttcttttaaaattactgatggctcagatacactttctattcttcatagaataaaagggaacatgtattctggcaaaaaaggaaacagactttactgacccagaaaagaaagcatgttttgaatctcatccatctcttccactggcattttaatgtcctcccataattacacactgcttgcttagcatgtgtgatcataggaccaactacagggatggcttctcactctttgatttatattctttaatggactccagccctggggccagcagagctagaacagaagacgcagtctgcccctgatatttcctggtctttgccaagagtttgcagtcaaaaactctcctagaaatcatttcctagagataatcattc

SEQ ID NO: 900195 - DNA, 612 bp, Homo sapiens
tagcttgtttccaccagatacattcatattaatagccatcaagctatactactttcaaattatatttatgacaataaatgattcctacaaattttagagaagactatcaaaagcaaaagaaataaatacaaaaattaactgggaacaaataagcaacccctggaggattcatctctatgaccctacagtccgaaactaaagaataatacatcctgatggacggctatggaatgaaataaaattctctattaccagttcactagaagaatttttttcccccaggtttgatctctttatttagtttatcctccaggttaaaagaaaattattcactattactcaccaataactcagtaaataaaaattttgcaaattcagccatttcaacatgccagggaatatctaaaggtgtatatatacaaatatttatatataaattttgcatatgtatataaaagaaatatatatataatatatatgaatataaacattcaggtaggatatttatatttatatataaggatatataaataaaaaatrtatttatatttctttttcaaatgcacagctcttatatacatatttctttttcaaaagcatggctacataaat

SEQ ID NO: 900196 - DNA, 583 bp, Homo sapiens
ctgtggaaaaatagaatctgagccttatgaacaggaaataataaaaaataacattaaactaaatagtaactgtgacactgggtctttgacagagctcaaagattctgcacctcatgaaatcatatattttaatgggaagtgtgtagaacatatacagtgtgtataaacattgtgacagtataggaagtaactaacaggaactctagagtgctgaatgtctgactcctccgacttcatccattactgaaaaatttgtaatggtaaaaacgtgccttcagtaagttatagtatttctgttctagtctgttcttgtctatttattggctttttggagtttacctagttacctattttctctgagtcttaattttctcagattaattagaaattagttatatttcatcattagatatctaatgatgagtttgctagtacaatgccggttagactacccacagtgaagaggaagatgaaccctacggctcagagtaccgcggcagatcatttgatgttacttctgtgaagcgtagcaagtcarctaaatactttgacgccagtggaaatggcgataattatagtagcg

SEQ ID NO: 900197 - DNA, 615 bp, Homo sapiens
tagaaacatgtattctagaaatcatatttctaaatattaaattttccttcattaaaaaaattctatcatcttagcattcaaaatatattttttaaaaaatatcaattgggtaagggtctgagatattacaagaataattttcttccatcctcccaatagttagtgacatttatttagaacattccactttcttttctgcccaatgcgtctgattttatcaagtcaccattctaaactaagcactgcatctggtgttttgtttggtaagacagatttgtggggcaagttcaccaacacattatgatcaagcattgtttagattaatataacacgaatacacaaggctgtattacaatttaaattttatttcacatgcaaaaaacttcccctttacagaatttagattaatcccatggtttgttattgactatctttagaaagaatcctattattccaaatgacaactttgtaaaaatgcagtgcagctataatggaaagtrcaaaagttatattaagataactcctttctgagtacgtgtatattcattttacatgtttcaactagaatcaactcttacaagtctgccttcagccatctgtatcactgaccagcat

SEQ ID NO: 900198 - DNA, 623 bp, Homo sapiens
acaggcacatgcttaacatggatcgggctacattgagattttcttcttggaagaagaagatgttactgtcagaagagtatgtggaaaagtagattcccaaggagaagattagtaatggggtagatactaaacaatgagatagataccaagtagggactccaggtgatgggataggttttgagcatggggagacatccctctggaaggattcttggagtatgggacaaaggctgaggtcctcccttattttgatgggcacaatcaagccagcagacaaacaggctactcagaatcaaagaagaacaccaagaagtaatgttgtctgtctttagcaaggagcaaggaagagagcataggcaaagaaaaatatctgaaaatgttttagctctcccagaatcaagattttagtgtggtttcattgcttccaaaaattacaaactttccaaacacactagagtaaagctcacacaccacatattaaaatcaatgagagatgatctgtgattactcactattgacatkgatcattgatgacagtaagaccctgcaaaataaattcccttactggacttacaaaaacctcacaaaaatataaaagtaaataaaattatctttattctatt

SEQ ID NO: 900199 - DNA, 618 bp, Homo sapiens
caattgggatcccaggagtccttggccaagatgcaacatgattcactaagracaattcttaaaggatgcaagcctaggccccactcccatggttccttttgataggacccaaggcatctgcactttacagaagtgtctcagtgattccagtgtgttaccagcgtcaccatacacgactgaacagtactaggcagcctcatggccctctctagttagaaccactggttttgacccagcaaggcaagtagcttctatgcagaaacgtatttgtataggatggataagggtatgatgaccctttaccagcaatgggaatagtcattgtcatttctatctaagggcatggagagggtggtaaggagagcttgggggcgggtatgtgcaggccacaccacccaggaacaactcaaaatattaacctgtggcatatcaaccagtcagcagggttctgcccaggattgacggacccagagaatctgagactcttgaactctttagaggagtgtcagattttcttttctctcttttttttcccgtaagtacaagcctcaaaatataatctaccaaaatttaggaggaatgatcaagaagacatactgcttattatcaataaccagc

SEQ ID NO: 900200 - DNA, 590 bp, Homo sapiens
ctagaggttgcccacattccttggcttgcggyccctcctccatcttcaaagtcattaatgtagtatcatcaaatctctctggtttctgtttctgtcatcacgtccccctctgtaacttggactctcttgcctctctcttctaaggaccattgtgattatattgggcccagccagataacccaggaaatctcacctgaaaatccttaactgaatcacatctgcaaaatcctatttgccatgtagggaacatatttacaagttcaggggatcccattgtggatatctctgaggggctactattcagccttccacagtgacccatgcatttgtttatccaattgatctttaattccattctggtgagatttagccagtagccagatggcctttcccaagtaatattcctccatattgcctacagtcatatagcttttcttttgaaacacatacatttccacatatgagagctgattatagggaaataatccaaatgaagataagctttatgcacaaagatggttatgaaggattatggattttgttataagaaaaaaattggaaacatctgaatgtgcaatggtataaggaaa

SEQ ID NO: 900201 - DNA, 581 bp, Homo sapiens
cacattccttggcttgcggcccctcctccatcttcaaagtcattaatgtagtatcatcaaatctctctggtttctgtttctgtcatcaygtccccctctgtaacttggactctcttgcctctctcttctaaggaccattgtgattatattgggcccagccagataacccaggaaatctcacctgaaaatccttaactgaatcacatctgcaaaatcctatttgccatgtagggaacatatttacaagttcaggggatcccattgtggatatctctgaggggctactattcagccttccacagtgacccatgcatttgtttatccaattgatctttaattccattctggtgagatttagccagtagccagatggcctttcccaagtaatattcctccatattgcctacagtcatatagcttttcttttgaaacacatacatttccacatatgagagctgattatagggaaataatccaaatgaagataagctttatgcacaaagatggttatgaaggattatggattttgttataagaaaaaaattggaaacatctgaatgtgcaatggtataaggaaatgt

SEQ ID NO: 900202 - DNA, 614 bp, Homo sapiens
taggggcttccaagggggaagaccgactgccaggtgcggaatccacagaatgacccaccggggaggcagaaggacatgcacaaatccctggggagtgtgttagaatttccccaaatactgtaaaatggaaaagtgcttgcactttatcacgtgaaagactaatgctatgtaggagctgacacagcacgggaggactatgaccacctaaggaacagtgagctgtgtcaggacagaaatgagcaagcttgagtctccgggcacatctcaggaaacagtaatgcaaggcgcacgtcagggctgtgactcactcctcagagcaggcttgggtccccagtgtaagaatgaacagacagccctcccacatcatgtagtgtggatggtggggctgcagggcatgtcgtgctcttgccggtgggctgccagagacatgtcagacccacttcttagtgagggcccattcatttcctctctgggttgcatttcatcataatcactcggtacccacgattcttcctgacagcctgaaacagcaggctttgcatccttttcaggcctggggtctggycctaccccaggggcttctgtttcacccacaacagattcgcctccatgcc

SEQ ID NO: 900203 - DNA, 206 bp, Homo sapiens
atacggactttaaacttttagaacactttttgttttgagactcttgttacttatgtgacattttaactattcactcttctagtgaatttttaatgtcattcaaagggtacatctttctacactgagaattaaacaaagttctcaaaaatattctcagataatttagaatttcaycttccactggcatgttaagtatgttctccttc

SEQ ID NO: 900204 - DNA, 612 bp, Homo sapiens
tattttcaaagcctaacttctttgcctccttgcccctagttatggtaaacaaccttccagccattgccaatctgtaacccacatctgttcccaatctgtaacccacgtccattcccaatttataacaatccacatctgttccttatttggcacccttagtttcaaaactgctcttcctgctgctgtagcccccaacccttgctccattagaagtagccaatcaggatcagcttagattgtgccatccaactccaggcagtggggactggacaacagtagcagggactgactgcattagggataaaaaccccttccctcctttgtttggtgtgctctcacagtgacaagagtgagcagcacccttctgcagaagtaaatttgcctcgagtggagccaagatggccaaataggaacagctccagtctacagctcccagcgtgagcgacgcagaagatgggtgatttctgcatttccaactgaggtaccaggttcatctcactggggattgttggacagtgggtgcaggagagtgggtgcagcacaccgagcgtgagccaaagcagggcgaggcatcmcctcacccgggaagcgcaaggggtcagggaattccct

SEQ ID NO: 900205 - DNA, 571 bp, Homo sapiens
cacagaggcggtttcccccatgctagtcttgtgatagtgaataagtctcatgagatctgatggttttattagggtttctgcttttgcatcttcctcatttttctcttgtcsccgccatataacaagtgccttttgcctcctgtcgtgattctgaggcctccccagccatgtggaactgtaagtccaattaaatctctttttcttcccagtcttgggtaggtctttatcagcagtgtgaaaatggactaatacagtaaattggtactggtagagtggggcgttgctgagaagatacccgaaaatgtagaagcgactttggaactgggtaacaggcagaggctggaacagtttggagggctcagaagaagataggaaaaatgtgggaaagtttgaaaactcctagagatttgttgaatggctttgacaaaaatgctgatagtgatatgaacaataaggtccatactgaggtggtctcagatagagatgaggaacttgggaaatggatcaaaagtgactcttgctatgttttagcaaagtgactggagcattttgcccctgccctagagatttg

SEQ ID NO: 900206 - DNA, 588 bp, Homo sapiens
tatttagcaaataactaaataggcctgttttgaactgttaactccacacaggaaggatagtcctttataaacaatgaggctatttattggtcacaagttgcacatagagtttcacttccaaaactaagcatagatgtggttctcagagtgcattgccagggaaagtaacatacatgcacattcttggaccccattcctgacataactgaattagaagctctgggggtgaggtccagcaacctgccctttaacaagctctgcaggagattatgatgcaccctcaagtttgagaaccactgttagattaagaattgaagcactataatgcatttcttgtcttgtggctgttgctcctgtgttgactgttcttcctgctgtcatgctcatcagatgcctttagctggttagaaacctaaaaggctcaacatagaattaaatgattgtgtcagatgtggggaaaactacttttttaagggttttcttataaggaagaaaaatcttttttttwaaattatacttgaagttttagggtacatgtgcacaatgtgcaggtttgttacatatatatacatgtgccatgttggtgtg

SEQ ID NO: 900207 - DNA, 669 bp, Homo sapiens
cagtgtaatattaaacttttcttaatttgtttttgtaattatctttcatcatgtgttttgaaaattttcaggactttcyttctgtctttatgtctctgaatcttctttctctgtgtttttctcatttaataacattttgttctttcctttttggctataacaattgtagactgcaaaaaggttcattcttctgccttcattatttctgtgtcatccacattcttattttttgttttcttttgctttgtttttctttggtctctgctttatgtgagagatgtgcctcaaatggtctccatttatatgtaggattgaaggctgaatgtttgagaagtgtgcatttgggaagtctcaatgcttgggaaggatcagatacttcttatgaatggggtagggcagggtaagcaggctattttgttaggagatcttcacattttaatctcaatgtcttttcttttactttagtcaatttccccggagaagactcctcaacctcctttctgaggtggtatgaatctaggattcacaggggtcagggaagtgtagtgtttactgtaccaaattcagacttgtgattatttactgaattttcaggaagagacctcagctatctatactcattgtcccccggttcagagactttttcatttagtctctccacaacacaac

SEQ ID NO: 900208 - DNA, 603 bp, Homo sapiens
gtatgtgtactgctattatcagattctcaattgggggagcttattataagagtgagtctcggtttgaatatatgaatgggggacttattttgaaaaaatatatgtaggtaattcaggtgaatttrgaccaagatgagatgagcagtctgactggaatgcagaggagatgcatgccttgatctccattggctgggccccaggcacaaatccatccattttctaagtgggatagtggtctggtaaggttgcagaagacattgctacatttttattcccttttaattatgagcagagttgagaagaatacactagagatgttactaatttacttcaagttatttatttgactgaattttgttaggatctaatgtattttgataaagattaacaacaatttggtactaatttggatctgcgtgttgttattgattaattgatctatttttgaagtaacagatgtgttctaggttagtgagcagcttgctttactgaaggtccactttggaacctcctgagaagcatactcaagttaataatgggatattaatgaagtcttatagtgactttaatgataaggtgggcaggataagactttgggcagtg

SEQ ID NO: 900209 - DNA, 633 bp, Homo sapiens
tactgaaggtccactttggaacctcctgagaagcatactcaagttaataatgggatattaatgaagtcttatagtgactttaatgataaggtgggcaggataagactttgggcagtgatatgatctgaaaatacaatatttgttctgagccagctcagtcaggtccaactagccatccactgtgtttaggaatctaagtaatttggagtcagggcgaggctgggacttcttagaagagatactacaaaacagagtaacggggaagatcacgattgaagctacaaatggacaacaaatatgcatataatcaagcacattaaatatttaactgacaagattaattcagcgttgcttggcccatctcatacacagtgtgtttggcctgcattaccaggtggtttttcacatttcttccatctgttttttactcagttgtaaacaccatcttaatcctaaagaaccagagtgttatgaaaagatatcaatcatttaccaaaggtgaagttcacastgtacctctttaaagtgctggctttccatgaagagataagattcccattaaagtaagttgtagaggagctttgtcaagtgttagtattactatattcactttatgatgaaaagaaagcatct

SEQ ID NO: 900210 - DNA, 597 bp, Homo sapiens
tacagagctatagtaaccaaaacagcatggtactggcataaaaacagatatatagaccaatgaaacagattaaagaacccagaaataaagccatgcatctacagtcaactcattttcaacaatggcactaagaacatacatcggggaaagaacatgaactttaataaatggtgctgggaaaactggatgtccatatgcagaagggtaaaaccatacccttgtctctcaccatataccaacatcaaatcaaaatggattaaagacttaaatttaagacttgaaactatgaaattactagaagaaaacacaggggaaatgccataggacatggtctggataaagattttttaggtaggacctcaaaagcacaggcaagaaaagaaaaaaaaaaatagacaaatgggattacatcaagctaaaaagcttctgtacaacaaaggaaataattaacaaagtgaaaataaaacctacagaatgagacaaaatatttgcaaattgttcattyaacaagggattaataaccagaataaagaactcaaacgagtcaataacaacaacaataacaacaaaaatctaatttaaatacaggcaaaagac

SEQ ID NO: 900211 - DNA, 618 bp, Homo sapiens
ctcagtcaaaatctcagcagatgttttgttgttcagacggacaaatcaattctaaaatttatttctaaatgcacaaaactagaatatctaaaactattttaagaaaacaaagtttaagaatcataattctactctctttctgtcagatcaactttttcagattccacatatgagtgagatcatgctgtatttgtccatttgtgcttggcttattttacttaatataatgtcttctaggttcatccttgttgttgcaaataaaagccttttattttgtaacattctagtagagggaggaatgtatatttttttgtgaatctttttatagctgaatagcatttcattatgtatatgtaccacattttaaaattccattcatctgttgatagacacttaggttgattccatatcttggctattgtgaacagtgctgcaataaatatgggagtgcagatatctcttttacatactgattttatttcctttgaatatatcctyagtggtgggttgttggatcatgtagcagttctattttttactgatatataatagtcgtacatatttttggggaacttatgatttggtgtatgtatacaatgtgtaatgatcaaataaggg

SEQ ID NO: 900212 - DNA, 585 bp, Homo sapiens
tatgaggccagcatcatcttgataccaaaacctggcgcaataaaaaaaaaataaaactctaggccaatatcctcaatgaacatagatgcaaaaatcctcagcaaagtactggcaaatggaatccaacagcacattaaaaagtttgtccaccacaatcaagtagattttatccctgggatgcaaggttggttcaacatacacaataataaatgtgattcatcatgtaaacagcactaaagacaaaaactgcatgattatttcaatagatgcagaaaaggcttttcataaaattgaacaccacttcatattaaaaaataaaccatctctataaactaggtattgaaagaacatacctcaaaatactaagagccatctatgacaaaccgacagccggcaacatactgaatggccaaaagctggaagcattctccttgaaaacctacataagacaaggatgtcctctcttaccacttctattcaacatagtaatgaaagtcctggccagaacaatgcggcaagataaagaaataaagggcatccaaataggaagwgtggaagttaaaatgtccctgtttgcagatgacg

SEQ ID NO: 900213 - DNA, 592 bp, Homo sapiens
ttttcttattgaggcaccaaggccgtcaatagaaggaagaaagcattagagttttaagggaaagaagtgggaaagagaaatgactagggaaacacagmgggactgttaggcaatagggaggcccactgagcatttgtagtaatgaattcaggatgaatctggtcaacctaattgtatgtttcttcttaaggcacatgcaacttttcaggcagggatgaggaggacagggagctagatttaagtagggttgggatttgccagtcttattggatgaaagagaagggtatggacatagagggtatatacaaagagtgatacaggttaaacatttccaattcaaaaaactaaaatccaaaattctcccaaatctgaaactttttaaagcactgacatgatgccacaagtggaaaattccacacctgtcctcatatgatgggtcatagtcaaaatgtagtcaaacatttgtttcatgcacaaagttattaaaaatactgtataaaattgccttcagttgatgtgtacaaggtacatatgaaacataacgaatttgtgtttagacttgtgtctcaaatccaaagcacttctagtccca

SEQ ID NO: 900214 - DNA, 592 bp, Homo sapiens
ttttcttattgaggcaccaaggccgtcaatagaaggaagaaagcattagagttttaagggaaagaagtgggaaagagaaatgactagggaaacacagcgggactgttaggcaatagggaggcccactgagcatttgtagtaatgaattcaggatgaatctggtcaacctaattgtatgtttcttcttaaggcacatgcaacttttcaggcagggatgaggaggacagggagctagatttaagtagggttgggatttgccagtcttattggatgaaagagaagggtatggacatagagggtatatacaaagagtgatacaggttaaacatttccaattcaaaaaactaaaatccaaaattctcccaaatctgaaactttttaaagcactgacatgatgccacaagtggaaaattccacacctgtcctcatatgatgggtcatagtcaaaatgtagtcaaacatttgtttcatgcasaaagttattaaaaatactgtataaaattgccttcagttgatgtgtacaaggtacatatgaaacataacgaatttgtgtttagacttgtgtctcaaatccaaagcacttctagtccca

SEQ ID NO: 900215 - DNA, 588 bp, Homo sapiens
gaagatctgccttcagtgtgggcgggtacatctaatctgttgggagcacagacagaacaaaaayagagaaaaggcaaatatgttgatctatctgctggagctgagatacactattcctctcctgtccttggacgagaactccaggctcccaggccttcggactccaggacttatatcagcaggcttctgggttctcaggcctttggccttggaatgagaattacatcatctgcttctctcattctaaggcctttggactacactgatccatgctgacagcatcccggggtctccagcttgcagatagcctatcatgggacttctcagcctccatgagtacatgagccaattcccctaacaaatcccatctcttatctaactgtctatctatctatctacccacccacccgtccatctgtctggtggttctgtctgtctagagaactctgactaatacagatttcttaatttgctgcatcttctttatttttatgtgttccttgaatcttagtgtaacaggggtaccagtttgatctcatgccaggtttaatcatatcttggcatgactgggaaactgttggattggtc

SEQ ID NO: 900216 - DNA, 626 bp, Homo sapiens
ccactcagatctcctgttgtgtgatggtcycagctgctgcccacaggctattccagtcagtgactatgcacgaatgcagccccattcgtgcaagacaagggactcttaataggtgactttggctaacagcctcactagcagcctcgccaaaaccttcttagacctctgctatagtctgggattctcccactggcttctccttccttctctctcctgaataggtatcagatcttgtggttgataaggcactttgcaccttctctggttccatcttctttagtcttcacagacatttccctaaaaatccttttgcatatctattcctagcttggagtatgctgagcagaggatctgaactaaaaaacacatgaaacaaaattgttagaaaaagcatcaggttttgaaggaaactgcataaatttacaggcgctaacccaaaaccaggcatgattacattcagatgatatacacaattgcttaaaaatttccaaattttcaaattttccagagagatatgctgaacaatagaagctaccaacccagttaatctaaaggctgccttgttcttgcagaatttgggggaaaaggatagatttaaaagacatagagaacagaccagagagagc

SEQ ID NO: 900217 - DNA, 560 bp, Homo sapiens
ttggaatgtagccggggagtgtctgtgacgtcaccgaggaactcctcctgcttgagcgcggcccgctgtckgctgtcgcctacagctgaccaatagagggcttgggtccggaagtgatggactggaggcttgactaatgtgaaaggggcgtctgaaaggtacagccaatgaaatagcgacaagaatacattttgtaaaagagggagggtgagttcagtcctcttgctgagaatcctcagaaatttaccagcgcgccgacagggggcgcgagagttgttgcgcggggggcttaaacattttcgagtactttagttcatttgaatctctcggaatttttttaatggattacatattatacaaaaatacaaatattcctcatgcacatacatttatattagtgcagctctaggaaattgtcattgttcttcacctttttcgcccattttctgttgggttcttctattttttatggacttcacttattgtatgtttttctttcatctgcttgataagagtcaatggcatgcttttccaggtcctacagaagtgagcccagtcct

SEQ ID NO: 900218 - DNA, 588 bp, Homo sapiens
tgaatttattctattccaaaatattaaatcctctatagaataataaaggcagggattgggggaactaggagtactaargttttggtgaatgggaaaatgtaaaaaattttaatggtgtggtcagggaagacctctgctgagagtgggctacaagagtgtatctgtatcctggcacctgctgagcactttcacattttttgtttcctggcatctctagaatggttattgcacttacttaaggcctcagttctatttctacttgagttcaacatcctttgccaacaactattgtatttacctgtttggatttgtagagtaatattcaatgtcagtggcagttctttttgttaaactcagcataattcatagatttacagaatgtcagttctcattgcacacaaaatatttctataatgtttgttgattaataaaatattagatgactaaataaataatgaaatattgttaactagcattttgaatacttgatggcttaaagttagttttttaactttaacttgccttattaggaaacttattcagttattcctgttcatgtgaaacttcagccaatcatacaagcccagg

SEQ ID NO: 900219 - DNA, 588 bp, Homo sapiens
tgaatttattctattccaaaatattaaatcctctatagaataataaaggcagggattgggggaactaggagtactaaggttttggtgaatgggaaaatgtaaaaaattttaatggtgtggtcagggaagacctctgctgagagtgggctacaagagtgtatctgtatcctggcacctgctgagcactttcacattttttgtttcctggcatctctagaatggttattgcacttacttaaggcctcagttctatttctacttgagttcaacatcctttgccaacaactattgtatttacctgtttggatttgtagagtaatattcaatgtcagtggcagttctttttgttaaactcagcataattcatagatttacagaatgtcagttctcattgcacacaaaatatttctataatgtttgttgattaataaaatattagatgactaaataaataatgaaatattgttaactagcattttgaatacttgatggcttaaagttagttttttaactttaacttgccttattargaaacttattcagttattcctgttcatgtgaaacttcagccaatcatacaagcccagg

SEQ ID NO: 900220 - DNA, 627 bp, Homo sapiens
ctgtcattagacgcttccataaatgtatatataaatatgagttgtatgtattcacatagttccattaaaaacttactaaatattactcttttatatcccagtgtctgaatagtaatgygcacagatcagacattgaattggtattggctgaacggctacctggcacataaaaagtacattgaaatgataaattaacagaacacccatggccatatgccatcagacatgtgtttttgtggcgatttcaacagtcagtgagttggatgtgggatactcgacggtggccaccctgcaaggtctatttactttgcctcgtttgaaattcagtctccatgcctcggttgtccaggtcccccgtctggtctttctgaatccacactagtgagaaggagaatgttatggttcagcaggaaatggatcgttttgttttaaatttccaggtcaccacagctgtgcatatagccgctacttattcccagatctctccttgctgccctgccagagctatgaccaaaattagggcgatggctctattttgaaggcctgagtttaaagttataaaaaaagtcaggggacagcagccattcccaagatttatgctgaagcagcacagaagtttaatgttat

SEQ ID NO: 900221 - DNA, 632 bp, Homo sapiens
tggttaactgtctgtgtaaatgtgaaatttctttttaagtgaaaggtcttgctgcaagaagaatggctttgggactgccaacttacagggccatttctgaaaacccagtcattatgttgccttgatattactgttaatcatgagtgtccttagaacttattgaaatgctaagaatttttggtgaggatgtacaccgtttcatcttataggcagataagtctcctttagagaccaaccttatgaaattgtctagcctgctagagctgaataattttgtaaaataagtattgaaaggtttagtgtattatatagccaatcacctcgagtacactgaaacagccagtaagaagcttaaacatactcttgaagaggcaaaaagagacatcattagacagggcttataactgctgcccccttgattttctcatttcaggacttttatcagctcagtttcaacagaaagcaaagaaaaaaaaatcttcccttttaacttgcttattgaaatagaaggaattttttccttgccagtctctgaaaccctttttcaccaaacaaaacctgctgggagaagttttcattctttgtttggagacaataattttggaaayagaaaactgtgaactttctatgag

SEQ ID NO: 900222 - DNA, 683 bp, Homo sapiens
ttctcagcccttgttcttgctgacagaagaattcaccccaatcagaagaagctgggatcccatctcaaagatgccactggtttaccctgtggtctcaagcaagacattcatactctgtggctctctttggtaagagccccctgaagctgtcacccccctccctggccactcacagaacaaatatgaaggtcaggcaggtggttcaatgaggccctacgtaggtatgtccaggggcgtctctgcttacctgaacccatgcacaggttttctttaacttaacaatgtaggatattcagatttacgccctcctccactcctttctgaatactccctccaacctctcaccctgagatgcactttacttcaccccaacttgcttaactctttttctcccgagaatattttccagacaccagggagatgaggaggatttcatgttagggagtgactggcaggtgggggagaggaaggttggagagggactgaggttgttgcccggtaatcctccctaaatcatgtatggcaggaggtagcagacaatcatttcctgtgactgagacaagatcaaaggattaagaggttttgggcaaagaasgcttggcatttggtcacgagaattacaaaagtcgatctactgaaaagaacagcttgctaggtgaacgtctgacaatacagcctgggat

SEQ ID NO: 900223 - DNA, 582 bp, Homo sapiens
tgcgatttccatgggccatttcttggataggtactatctcactcttccctccaaacacacaactcatgtcctgtgcgtgtttttttcttttttttcttttytttttggaggggtggggtggggtgggcaaagagtctcactctgttgcccaggctggggtgcagtggtgcgatctcggctcactgcaacctctgctgcccaggttcaagcaattctcctgactcagcctcccgattagctgggattacaggtgcctgccaccatgcccagctaatttttttgtatttttggtagagaaggggtttcaccatcttggacaggctggtctcgaactcctgacctcatgatccacctgtctcagcctcccaaagtactgggatttacaggtgtcagccaccacgcctgacccttttttctactctaaactctggatgaccacctcattgagcttttaaaaaaaaattgttgtcagagttaatgatgtctgttcatgggaagagacagtgtctggctcaggagataggcagagtctcattctacctggagctgctgctgtttctgattcaaggtacccagcatgca

SEQ ID NO: 900224 - DNA, 634 bp, Homo sapiens
gcaaaggttttgaaaaaattargctcatttaagtgatgtagatagagttgctttaatatatgggtttcttatgtaataacccctgcaagtacatgaggtttaggtgaggaaagagagggccagatgtgtggcaagtattttcatgaacgcattaatgtgccctgaactgtgtttcagattagtgagatcttcagaataattgctggagggatagaagaaaatatcttgtaattatgtagttgcactacaaaaacaatcagaggcggatcccaatgctgctggaagatgtagcaaaacctgagtataactttggttcagtggagtggccaagatgctctccccacctctgcacaccctcttaaggaaggacatgatgcctaaatatgaattcaattccaatcataagttcatgctcactgaaacttcctcctcactgcaaagctccagcttcagagaattttctctgctaaattctctcatgaggaacacagaaaactctggctgccttcctcacttggtgttgaggaagatagagtaaaccaccttagatatttccttccctttagacttcccattctccatagccatctccatagacatctcctctgttttcactccataacaatactagaga

SEQ ID NO: 900225 - DNA, 574 bp, Homo sapiens
gatgcctaaatatgaattcaattccaatcataagttcatgctcactgaaacttcctcctcactgcaaagctccagcttcagagaattttctctgctaaattctctcatgaggaacacagaaaactctggctgycttcctcacttggtgttgaggaagatagagtaaaccaccttagatatttccttccctttagacttcccattctccatagccatctccatagacatctcctctgttttcactccataacaatactagagatttctactaatatctcacgttctggacaaggaatgcactatcaatcttgtatttccaaaatgtatctagaagactcatttctctcccccaagactcaactcagctggatggtaaattcaggctccctacctaggataaacaccaggttcaatgtttatttccttaacatccctccttctctcctggtcccaaagggtatgtatcaaggtaagaaaggggaaaagtacctcattcaatgttatgatttgttttgttttgagaccgggtcttactctgtcacccaggctggagtgctgtggcgagatctcagct

SEQ ID NO: 900226 - DNA, 647 bp, Homo sapiens
cctgagctaaaactccattagttacctgacctccataaccccctactttaactggaggacyacagtgacattttgggtccctaagaatcaatgtcagctcagaggcagtgaccattagtccccgaattatctgatcttttcccttcctccaatgcacagttaccctagtaaaatgctggaggtttccttggggaagaatgggagaaagattaacagcataaattgtcagtagtgtagtggtgtccttcctcaagaggtcttggctcccccttcattcaaagggttctgtgtctgtaaactggctcaagtctggaatttcactgaggggccatgattctctgtttttataattcaaattcatcttttgtcccttctacgtagaagttttctgcttatataaattaagtagaaatacagtaggcttcctatcaatttcacttccaggaactccgtgattaattagccaatgctagagctctacttgagtcagactattctgattgcttctttgtctctgctatccattacggtacctatgctcaccttgcttttgatggttgagtgtcgccacttggtccctgccatctcaggatccaattattccaattgtgtttaaattttgtagatgagaactgcggttcctacta

SEQ ID NO: 900227 - DNA, 534 bp, Homo sapiens
agcaaagaagaagtagagaggaatgtgaggagaaccaggagagaaggatgccacattaggccaagagaaagcagtatttcaacccaatactgagtagtacagtaaaacaagtactaactagctatgagaaccccgcctaggaaataaggggcttttcagcattaaggttctcaggctacaaaccttagtttgcatcttttctaaggaagagtggcataacatagttaatagtgaattgaagctcaagatacaggaataaaagtaacttgctgcttcagatgaattcatatctctaggtccagataaatttcatcctagtataaggatgagagtgaaaacctcatgacaatgacaaaaactgctgaaaaccttcctcattaaatcttcacatccaacctgtgggtagcctgaaaagaacagaaggratacctgtcttccaagatctattcatgctaagagttgcctgaaccaaacccaaaccacagcatactcatacttcgtctcctcttttcctgctctgtgtctgtttctgtt

SEQ ID NO: 900228 - DNA, 638 bp, Homo sapiens
tcattcatggaaggagtggctgctgaaaggctttgtccttttgcttgaacttccacacaccaggtcaccccaggaagctcttaaccacatccattctcccactgccttcattccctagactttaaaaaccaagtataggctcagttaaaaatttaaatcaaccagagagttagtttatctactactgccaaaacttaaggcacatcattgaaagggcaggaagtacagtgagaaatctagtcacagtaatagacatcatgatatcacggcccaaactgccgaaagcctcctggtgccacaactgtgggttggcttctcttctcttggagtaagatttttaaatttgcctgttgtcttctctactcagtagccactgctctttttgggtagccacctttctctcttaggccagagtgaaccatccctcttttcaagattgtttgcctattttgtctttacagaagcttagaatttgcagcttttacttggccatgtggtccagatccaagtaagcaagwctcatcagacacttgtactaaaatctgaagctctctcaatctagtttcggttgctgaaaatactagcagaatttccagagaagagaaatgcgataaaggatagagaggctgaaatgtgcc

SEQ ID NO: 900229 - DNA, 562 bp, Homo sapiens
atattttatccatttatttcaaaagaataataaaccaattatatgtaaagtaaataattgtttatgaaaaataattatattttctaaaataaaaaattttagtgtagagaggcattgtttyatatttttggagtgttgtaaaacctggcttaaaagaaggcagctgggccgcgtgcggtggctcagtcctgtaaccccagcactttgggaggctgaggtgggcagatcacgaggtcaggagattgagaccatcctggccaatatggtaaaacaccatctctactaaaaatacaaaaattagctgagcatggtgacgtgtgcctgtagtcccagctacttgggaggatgaggcaggagaattgcttgaacccaggaggcggaggttgctgtgagccgagattgcgccactgcactccagtctggtgacagagcaagactcgtctcaaataaataaataaataaataaataaataaataaaagaaggtagctgaatatccccttctgcattaaatctactatgatatcacatatcatgtagcttctggaaatctccactgtcta

SEQ ID NO: 900230 - DNA, 623 bp, Homo sapiens
tcttttgttctatggactcagagcaattgagtagcctctagtgtttctcaagagacaggcatattccatgcaccgacaggctctcccattcgtattcctttgcttgcaagatagaagacagcctttcagkgtttcctttctgatttaggtgatttctctatcatgagactggcctttcctaagctctctccttttaaaggtcaggtaactgatccttttccttctacgaacttcattttcaacatatgtttttgttactcctacaactgttatggtgactatatatatgtgtatgtgtgtgtgtgtgtgtgtgtgtgtgtgtatgcatgtattttgtatatagttgacctttgaagaaactacaatttactagtatgtgctgttgtcaaattaccaaaataattttcacccactattttcattttatcttgggagcaaactatgattttaattaaaatttaggaaaaccagaaaatgagacacccctagtgcaaacactgttttcaagtctgtgtatcactttccagtcctcatccacataggcatttttatttttacatgttacatatgtaattttgtattttgtattttaccctaatgttatatcataagcatgagtctcc

SEQ ID NO: 900231 - DNA, 634 bp, Homo sapiens
aaatacctgtatgcaaatacactagmaaatataaaagaaatggatacattcctggacacatacatcctcccaagactgaaacagaaagaagtagaatccctgaatagaccattaacaagttctgaaattgagacattaataaaaagcctaacaacaacaacaataacaacaaaaagcccaggactagacaaattctaccagaatatagctgaatttttccagaggtacaaagaggaactggtactatttcttctgaaactactccaaacaattaaaaaggagggactcctccctaactcattttatggggccagcatcatcctgatactaaaacctggcagagacacaacaaaaaaggaatacttccagccaatatgcttgatgaacatcaatgcaaaaatcctcaataaaatgctgacaaaccgaatccagcagcacatcaaaagtttatctgccacaatcaggtctgtttcatccatgggatgcaaggctggttcaacatacacaaatcagtaaacgtaattcatcacataaacagaactgaagacaaaaacgacatgattatctcaatagatgcaggaaggccttcaataaaattcaacatccctttatgttaaaaactcttaataaacta

SEQ ID NO: 900232 - DNA, 609 bp, Homo sapiens
catagacatcaatgttcatgaaacttgctgtaagtaatttyggaaagtcataaataatggtatatttgttttctattttgttgatataacaaatcactacaaactttgtggtaatttgtggattaaaaacaatgcaaacttggccaagcacggtggctcacacctgtaatcccagcactttgggaagctgaggtgggtggatcacctgaggttaggagttcaagaccagcctggccaacatggtaaaaccctgtctctgttaaaaatacaaaaattagctaggcatggtggtgcatgcttgtaatcccagctacttgggaggctgaggtgggaggattgcttgaacctgggaggcggaggttgcagtgaaccaagatcatgccactgtactccagcctgggcaaccgagccagactccatctcaaaaaaaaaaaaaaaaaatccaaagcaaacaaaacccccccccccactcttattatcttacaattttataaagtaagaaggctgacacaggtctcactgtgatgatgtcagcaaggctgattcctctggagggtacatagttaaaatcaatttccttactttttccagcttctagaggccacatgc

SEQ ID NO: 900233 - DNA, 556 bp, Homo sapiens
tgttaaaaatacaaaaattagctaggcatggtggtgcatgcttgtaatcccagctacttgggaggctgaggtgggaggattgcttgaacctgggaggcggaggttgcagtgaaccaagatcatgccactgtactccagcctgggcaaccgagccagactccatctcaaaaaaaaaaaaaaaaaatccaaagcaaacaaaacccccccccccactcttattatcttacaattttataaagtaagaaggctgacacaggtctcactgtgatgatgtcagcaaggctgattcctctggagggtacatagttaaaatcaatttccttactttttccagcttctagaggccacatgcctcccttggatagtggctccatttcttcatcaactagcaaccattattttctgatcctttctgcgctgtcagtctctctggacacagctgggaaaggttcttgctcttaaggatccatgtgattatattgggtctgcctgaataatccacaataattgccctatctcaacgtyagctgattagcaaacttaattgcgtctttaa

SEQ ID NO: 900234 - DNA, 603 bp, Homo sapiens
ccttacaagttcattaatgtattttccagaaaagcttggtagaaaagtgtccagatcattcttttagtcacaagagaaactaataaagaaaactgctgacagtaaagactgcagggctaagtccaagaaacctggattttcacttcatggaagtgtcatctcacacaagatatttaatttccttggacttcattttacttgttttccaaaatattgaataatcctgtataggccgcctcatagattacaaaataaaatccatgcataaaagtcctttgcaattttaataaaagtttaaatcactttgttcagttatgatcaccaccattgctatcactattctttggattttattatttaaatcctcatgtggggtattgtcatttaggcctttaaaaaaaactctgaaatattatagatattttaagaaataatctaaatttggtgaaatttgtaacttaagactagctgggactatgtaactrtagatttttttcatacacacaaaaatgttctctgatattaatattatgctgagattaggggaggtataagagatcaaatcttgccaaactgataatgtatacattataaatgtgacta

SEQ ID NO: 900235 - DNA, 545 bp, Homo sapiens
caaacaggccccagcatatgaaacacagtcctcatgagccacggaccatgctgactcctgcaggaggcctgagtagcagggtctctggctgtgggagggtcttctatccttcctggacttcccttgctccatcccctgcctcacctacatggtctaaatatgagatgctagcatggctaagatgttacagggctaagataaaatgtggaggcagttcctccagcttctcccttcagaatagacattccaggttcacctgagcagactgcgagactccgtggctgcttctctcctttggttcccagagccaggaacctcactgggccagagtgagagtagggagtggcctgggattagagccacatctcctgggcccatctactgagtgtacttccagcttattgcctggacacacagcttctatctccctgctctgtttattctctaagccattttcagcttgtaaaratgtataaaagaccagcaaagtgtgaaggaagcacttgaaaggagttctctgaaaggagctttttatccccagtggc

SEQ ID NO: 900236 - DNA, 577 bp, Homo sapiens
ctggtggcatccccactactgggtttctcctaatgatcttttgatgaaggggcagtagcattaggggcttttttgcaagcatagagagaatgagggcagcttcactccagtgccctggcagaaaagtgggtgaatcactgccctgtttgagcttgcagatccaccagcttcttccttaacttgaatcaaactgatttgctggccagatgtggtgcctcacacccgtaagcccagcgctttgggaggccaaggcatgaggataatttgaggctgggaactcaagaccagcctgggcaatacagcaaaaagttgtctctacaaaaataaaaattaaaaaaaaaactacccaggtgtggtggcatacacctgcagtcccagctactcaggaggctgaggtggaagaattgcttgggttcaggaggttgaggctgcagtgagccttgattgcaccactgcattccagcctgggcaacagaacaagactctgcytaaaaataaataaataaataaataaaatttaaaaatatatctatttattgatttgcagcaatctgtccacacggtggcaggagtgaag

SEQ ID NO: 900237 - DNA, 645 bp, Homo sapiens
ctggtttccactactgcccccaagcagtctgatatcaatgtaatcattttctttagcttgttactgtttccccctgtccctggaagcttttaaacwtctctttatacctggttttctgatctttccaaatttcaatttggaaaccctacatcccgtgtttttggagttttattcttatactatttctttgattgttagatggcatctttcccttcatacacccttatggaattctctcattttctttggatttgtttctttgctttgttctctttcagcttggaagattttctcaaatttgtaatcatctatggctgtaagagtatttctaagaacaagacactaaaacaactgcaaatgctgtgtcctgattaggcagcacataccgtctggtgagctgaaccatagggtgatcgaaggtgatctggccttttcattggtgggatcgcaatagtcaatattcgtaggtgttcgctcttggtttctccagtttctctagcgaacaatctattggtttcctgcctgggagatttatgccaggcttgactttctggacataaggcagaagaatagagagaggttaccacattgcagaaaccacatttttgtggaagagaacaaataaatgcttttgataaaccaaag

SEQ ID NO: 900238 - DNA, 604 bp, Homo sapiens
tcatcaaatgtaaaacttatgtgcgtcaaaaggtattatcaagaaagtgaaaatacaatccacagatattgcaaatcgtatctctggagagaatttaatatccagaatatataaagaacttttattttacaactggacaacaaaaagacaacttacctgaaataaaactggaattaaatagacatttctccaaagaagacatacaaatggccaaaaagcacatggaaagatgctcaacattattaatcactggaaaaatgcaaggcaaactaccatgagataccatgcactaggatggctatcatatgaaaaattaattaaaaaaaagaaaataattattagcaaggatatgaagaaattgaaaccgttacacattgctggtaggagtgtaaaatgtcagctgctgtgaaaaatagtttggtggtttctcaaaaagttaaacatagagttaccatttgacctaggaatttcagccccacatatatccctgaaaaaaactgaaaagagctacttaaatacatgcacamacactttcatagactcactattcacagtagccaaacgtggaaacaattcaaacgtccatcaatggaagaatggataa

SEQ ID NO: 900239 - DNA, 562 bp, Homo sapiens
ttttgcccattcaatattatattggctgtggatttgtcataaatggctcttattattttaggtatgttccttcartacctactttattgagagtttttaaggtgaagggatatcaaattttatcaaaggccttttctgtatctattgagataatcatgtggtttttatctttagatctgtttatgtgatgaattacatttattgatttgagtatgttgaaccagccttgtatcccaggaatgaagccatcttgaacatggcagataagctttttgatgtgctactggattcagtttgccagtattttattgagaatttttgcatcaatgttcatcagagatattggcctgaagttttcttttgttgttgtatctgccaggttttggtttcaggatgatgctggcctcatagaatgagttagggaggagtccctccttttcgattgtttggaatagtttcagaagaaatggtatcagctcctctttgtttttttggtagaattcagctgtaaatccatctggtcctgggctttttttggttggtaggctatttattactgccc

SEQ ID NO: 900240 - DNA, 563 bp, Homo sapiens
tgggggcactgtggggaggggcgccagggggacagagacagtggttagggaagktggttgttccacagttgagccagagaattggcctgagctttgattccgacaaatacttgttgaatgaatgtttcagaatatatgaaagacacaataacaaagagaatccacatttccacttcagcaaaccttcctacattaatataatacaccatgcagtaaattaactggatggtgaagttttgagcattctggaggtaaaagaaaagtctcttacatctcttggtctctgttgctggtcttcctacccttagaccagaatctggaatgggttcgagtgaagacactcgaactgtcatcaaagtagccaaggtcctggcatcaggagacccgggtgcaagtttaggctcccccactttctggattctggacctcaggcaagtctctaaccttccctgagcattgatatgctcatctgcgaatgagaatgataataatccctttctcacagtattatttgaggatgaatggaaataatatataagaaaatgccatttggaccatgggat

SEQ ID NO: 900241 - DNA, 649 bp, Homo sapiens
caatctcatttctgcctcatgccctccataccctggcaactttgccaaygacttcctatttgtccaatctaatggataggtgtcaaactttatgacattttgggagcatatccagcttgctcttccctttctgaaactcttaccttgacttccgtgacactattcgatcgtggtatttttcctctgtctctgatcattcattcttaggctgcatagttgggtcctcttctgtcttagtctactagggctgccataacaaaataccatacaatgggtagcttaaacaacaaaaagtgattaaggtccagcaggattcgtttctggtaagagctctcttcctggtttgcaggtggtcgccttcttattatgtcctcatatggcccttccttgatgcgtgcccatggaaagagggagatctctctctctctccccccaccatcttatacagccaccaatcctgtaatattagaaccctacctctattatctcatttaacattttttacttcctagaagccctgtctccaaatacagccacattggggattaggtcttcaacatatgaattttgggggaatacaattcagcccatagcatgttcctttgctctagcttcaaaactttacatcctccagggttctgtcctactc

SEQ ID NO: 900242 - DNA, 583 bp, Homo sapiens
ggatcaactaactgttaagagggccagttctgagcagatggcccaggcagaacaatgctggaggcaggagctaattgaggctgatgaattaacagacaggctttaagtctacatgtcagaaactaaagatacttccaagtaattacagtggagactctgctgaaaatggagccatgaaactgatttcccccaggaagtcaagttgcaccagagaaacttcgtgtctcattttgcttttgtcaacaagatgaagcccaggttcatgagtatctccctactcaatagggcatgttacttccaggcctgagtagaccaagaatctaggtcttctgatttactgagtcaagcatgctgttaacttacctgaacacctggtgctttaaaatgaaaacacacacacacacacacacacaccagtcatatcttaggtacctaggcacatatcagatgattgaatgaaattagataaattaaaataataaaatwaaattaaaaagtacaagaccacaagtcttctttttcaaatctacttgttcacatttttaaaatttagtttttgcgctgaaaaactatttttacgttt

SEQ ID NO: 900243 - DNA, 618 bp, Homo sapiens
accttaagaacctgttgcattgtaacaactgcaacaccccctaaaaccaaatgacaagaccattcctcttccaatgattagccgtaaaagaagtatttttactccctcagataaccctgtytcttcaggtgcttaggtcacgtaagctactaaataataaagttaaattactacctcacatatttttcatcatatgctctcttaattagaatagcattcttgaaatagaataagcactaacattagaaaaaaacagacttaaatcaatgcaacagtttaatgctccctaaataaaaacacatctacatgtatcatgggctagagacgttaaaaatttctaggaagaaaagcaatatttgccttataaacactgcaactctttcctctcaacattaaaacccaaacatagaaaccagtaagttagctgcatttacagccccttacaggttttaaatgtcacatctcagtgcctaaaaaagttactccatcgtttcgagataagtttctgagaacaaagaaaactctttaaactactgaactgcattttattctttccttttccgtgtgaccatctgcaaaagcaacagttgtcagttaaacagaatcaacctctttccc

SEQ ID NO: 900244 - DNA, 519 bp, Homo sapiens
gtgtttaagtagaagacccccgtcttacccccaggacttctctacattaaggatattcaatagcaggcgggtgccagggctcacgcctgtagtcccagcactttgggaagccgaggcaggtggatcacctgacatcaggagtttgagaccagcctggccaacatgacgaaaccccatctctactaaaaatacaaaaattagccaagtgtgttggcaggggcctgtaatcccagctactcaggaggctgaagcagagagaattgcttgaacccaggaggcggaggttgcagtgagccaagatcgcaccacggcactccagcctgggcggcagagcgagactcagtcctgaaaaagaaaaaagaaaaggatattcaatggcccatgacaccttccactagcaacaagaaatgtgccagttcttgcactaaattttgtcctttgtccacacaacctggtaacagaggtgagtcacctaatcacmtaagttgattccaccgggtaataagaacatttctgaag

SEQ ID NO: 900245 - DNA, 539 bp, Homo sapiens
cagaacttcaagaccagcctgaccaacatggcaaaaccctgtctctactaaatatacaaaaaattagccaggtgtcgtggtgggcgcctgtaatcccagctacycgggaggctgaggcaggagaattgcttgaacccaggaggcggaggttgcagtgagccgagatcacaccactgcactccagcctgggtgaaaagagcaaaactctgtcgcaaaaaaataaaaataaaaaaaagaaaagaaaaaacagctggcaggccagacttaacccacaggtctgagggagaagaccctagacttcctccaaagttgccttctaccttgctcccctttggtgaccacagctccacatggcccttgggaacatcccttccacacctctaaaatggcccatctgtgcagcacctgctggctgttcaagctcttgtttgagtctctcttggctccgagatgggcatttgtgctcctgccttccctccagtcccattggcaattgattaagatcccatacttttctgacagcagtggctggcagaagg

SEQ ID NO: 900246 - DNA, 656 bp, Homo sapiens
aaaggtggctcgtcagttaagacaggtttattttagagaaaacaaacctgagaagagcttctggtgcagttaggtcagaggcacattcttttacagactaagagtttttaaggattcagggtgggggagtttattagaggcttaggctgcttttgtgtctctttgttgtgcttatctgggagggagagttgtgtgtctgttcccatacattgttctgcagctgcaggcatatccccactgcttttagcttccctatcttagtgcacctgaagggaaaggaatgtgcttattaaggcccactgttgtactggggcccattgtatgagggtgaaatttggcagttacccaagagactttccccccacctccctctgtgcctgagttgtcttacttgtgttttactgtctgctctttttggctgcttgtagttagaagtgatttccttgaaaatgcatgaggctagaaagggaactgaacttaaagtggtggtgtttgtccaagatgatgattctcctgctctgtcagtgtgttgcagtctcagctcctatwccttgtaggagcagtaccaccagccaggctgttggttccttgcagcaccagaaggaataccctgagctaccctagctccaggctacagaggactcagtaggcctgtt

SEQ ID NO: 900247 - DNA, 476 bp, Homo sapiens
aaaggggatttctaaacatggaaagaaggaaggctagaaaagtcctagcatgctggattggaattagaagtgtcagtatgtacatatatacatacatttttttcttaactccttcgtcygaaagcagtggaactccagtagcaatgagtgcatggtgagtactcagaccttggtttctttttttctttttcttttttttttgagacagggtcttgttctgtcactcagactggagtacagtggtatgatcttggctcactgtaacctctgcctccaggttcaagcgattcttttgcctcagcctcccaaataggtgggattacaggcatgggccaccacacctggctaatttttgtatttttagtagagatggggttttaccatgttggccaggctggtctcgaactcctgacctcaagtggtctggctgccttggcctcccaaagtgctgggattacagagatcttggtttctaa

SEQ ID NO: 900248 - DNA, 675 bp, Homo sapiens
taaatatatacacaaaagaatgatcaaacatgaattaatcatctaagtcaagaagctatatcagaataaaatgaaatattgcagaaggaaagcagaaaaaaataaataaaagagattaatgagttagaaaacaaagcagttaaaataaatttcaaagctggtttgggggtgtattagtccattttcatgctgctagtaaagacatactcaagactaatttataaaggaaagaggtttaattgactcacagttcagcatggctgggaaggcctcaggaaacttacaatcttgggggaaggggaagcaaacatgtccttcttcacatgaagcagcaaggagaagtatgagtgcccagcgaatggggaagccccttataaaaccatcggctctcatgagaactaattcactgtcacaagaacagcagcatgggggaaaccaccactatgactcaattatctccacttggtccctcccacaatgtgtggggattatgggaactaaaattcaagatgaaatttgggtgggaacacagccaaaccatrtcatggggaaaaaaacaacaataaaataaactactagttaatctaatcaagaaaatgtgggagcaagtgcagatgcatacaataaggaatgatatgtggagaacagtggcataaacaggaaactaaaggaatc

SEQ ID NO: 900249 - DNA, 571 bp, Homo sapiens
agccaaggaatatgggtgaacctagaaggtggaaaagagaaggaaacagaatctctcctaagagcctctagaaggaaygcacccttgctgacaccttgattttagctcagggaggcccatattggatatgggcctaatctaggcaggataataaatatgtcttgctttaagctaccaagtttgaggtgatttgctatagtagtgatggaaaactaatataggtaccatttctcagattttacaaatgagaaaactaggcacacagagagacttttcttgtcatatgtcttacagctactacgagaactttttatagggaaagtagttgatttgttgaatataatatattcaataaccattctatgggaatagcctgggaaagattaggacatcaaatagctggccttggaaataaattttcttctctctgtagccagcctgcactaccctcatggagggtcaaaagcttcaaaatttctttttcagtgatctagtgtcctgatgagtaggaagtgacttttttttaggacccaagaacatcttaggggcaagtaaaaagtagaaagtcaag

SEQ ID NO: 900250 - DNA, 688 bp, Homo sapiens
cctttcaggcagccaaatcctctttcatctcagtacatcattcccattagtatatacacataatctagcatcacccatcctaaacataaccccacccgactgcatattttcccttgtattagtcrcctttatccacaataattctgcacaaccaataaccacagcatcttagtggcatacaactagcatatgtttttgcttacaggtttgtgggttcgttagagttccacagatctaagctgggctccaagttgtgggttgtgtcccaagcctgtgccacacatcgctcattctccttcatccagaggctacccaagacatgttctcacaaagaaaggaaggaccacgagacgccaagcccaatcaggcaagcacatttcaaagtcctactcagggcatatctgcacatcccattggccaaacttaacatcagtgagatgggacatacactcctcccatggagactgagggagacagagtacttgctgaataataatctaccctgttcttccatcttgtgtcccattttttctgtttctcttgatagccagacttctagaagcggttgccaacacatcatgtccccatcatgttccttacccttcaatctctcttcatcccactccagtggcctctgccgcaatcgctatacctgtgcccctcttttttctctgagtttgtttgggct

SEQ ID NO: 900251 - DNA, 649 bp, Homo sapiens
actgggaatgtgtctggtcctagggttaaactttaaaaaaggaagtctccaaagtatcacatttttgagagtgttaaggtgctttaggaatacctgaagactgattaaagagaggacactgaggaattaaccaacagatgctgaaaatacaaaggccatcatgaatggctaaaaactgcagcatcacccctcagagaggaatcgtcctgtatttagcataacaccacattatttggttgtttgtgctgaggagttgaaagctatcatgtgccaggaaaatactcagcatggagcagtaattatggatcagctgataataaaggatgtattggattgactgctaattagattattagctgcaaaaacaaatacctgctattaaccataaataagctgcacttatgatattttctacgttttacacttagtcctttttataatgtgcatttcttttctttctgtgccaagacttcccattttccccagtcatactgagcatatttgtgggtcaataaacaytgagccacaattaaagtgttcttttttccttccattctcctgaagaatggggggtgagaaagctgatatgcattgagcgccacgtgtaaggtccttggtgaagtgtagtctgttttctcagggaagaaat

SEQ ID NO: 900252 - DNA, 621 bp, Homo sapiens
tcatgggggcagatttcccccttgctgttctcgtgacagtgagttttcatgagacttagttgtttaaaagtgtgtaacacttccttccctctgtctcccctgtcgccatgtgaaaactggcttgcttcccactcacctttctgccatgattgtaagtttcctgaggcctttccagacatgccgcctatatagcctgtggaactgtgagtcaattaaaatgcttctcttcataaattatccagtgtcagatagttctttatagcagtgtgagaatgaactaaaacagagggtgatcaagaaaatctgaatattaggtgcactaggttttactaaaagggcatatagaaaataatttgacattgacctttatatgtggaaaaccaaaagagccacattattagcacaaaattcagagacagggctattagatttaaacaatattttccttaagaaataatagcaccaaaaggaggttaaatcaaagcagaaactggttatttttagaaaggacaacaaatagtacaaataaagcccatggcagaytgatgcttcctatacagtaatgctatttagatgtacagggtatcaacatctttgacattaagtaagaaagataatcat

SEQ ID NO: 900253 - DNA, 621 bp, Homo sapiens
tgataattttgttctttggttttacatgtaaatggttttgggtttaaaatgtargaacaaactagaatatttgaaaaatatcatatggaaatattaaggtttataagaagcagacttatatagaggaaaatttggtaatataataagtaaaaaaatcaccaaatgtctatacacagtttcctacagggtgtcagttgaagaaaaagctaactttggagggagaaaaagcaaacacactgtgggtttcaaaattagcataaaggacttggtataatcaattatcttcagagatttagcagttatgaccagtagcttcagcttattttaacatgtctttttaaatcatctttacaagcttttgaaaatcaaagattggcccagtttgaaataagatactgaatctgtaaaattttgaatcttttggcttcaaaatttcagcagcattaattctataaacacaatgatctctttttcttttgttgatagtacttctattaactccttatttattgaaaagagaaatagagtcagcaaacgtttaattttagctagatatattgctaggaacagtttgatgaaattggaaagcaatttcttcaaaaattacccttactgtctata

SEQ ID NO: 900254 - DNA, 594 bp, Homo sapiens
tatgatttgtaaggtagaaagaatttcaaaagattaaactcctataaaacatttccactattataaatgtatttgactaaacataattttaygtttttatatgtctaagcaatttgtgtaatcagttacaacttacctactcctaaactaatgtaagaaatttagaaagttgattgacaaaaaacaaaccttagcaaactaagatattatactgctattatttttaggctctggtaaaatcgaggaagagatataaatgtttcctaaaagctaactaagacactataagatgtacaaatattcattttgacagatattttacatttgcaagcctctataattaaaatcaaattttaaagcatctttaaataatatttcaaaactcttgagtgccttgctttccccctaaccatgtaatataggaaacaaggtcaatgacatagcagcttaataatttttattttatagaactgtcttcttacaaaaaacaacaaatataagaataaaaatctatgtttttttttctgttggaatttcttgatatctctaatttcaaatacatgtgaacctttaacatataaaattgtttgttaa

SEQ ID NO: 900255 - DNA, 643 bp, Homo sapiens
aaaaaatgggcagtggacctaaacagacatttctacaaagcagaaatacagatggtcaataggtgtatgaaaaggtgctcaacattactaattatcacagaaatgcaaatcaaaacaatgacatatcacttcatgccttttatattgtctattatcataaaagacaagataatatgttgataaagatgtggaaaaaagagagcccttgtacactgttagtggaaatgtaaattagtatagccattatggaaaacagtatgaagattttcaaacaattaaaaatatcatataactcagcaatcctatctctaggtacataatcaaaggaaacaaaatcagtatctcaaaacggcatctctactatgttaatttcaacatatggaaacaaatgtccatcaatacatgaatgtatgaagaaaatctggtatataaatacaatggaatattattcagccttaagaaaggagaaaaattctttcatttgcacacgtgggtgtacttaaagttcatttttctaagtgaaataagccaaagaaagacaaatacygcaagatctcacttatacgtggaatctaaaaaattcaaactcataaaaacaaagaatagaacggtagtttctggggcttaggaggtcagggaaatg

SEQ ID NO: 900256 - DNA, 666 bp, Homo sapiens
agcaaaatttttttaaatattggcaaactgaatcccaaaatatatccaaatgatcgtatattgtgaccaatgatrtttctaccaagagtgcaatttggttttatatttgaaaataaagtaatgtaatttaccacattaaccaataaaaagaaaaacataattatcacaatagatttttttaaaaaccttttgtcaaactttagcatacatcctagggaaaaaaaaagaaaaaagtgctcagcaaaccacagttacttttgcgccaatctaatagtgaaaaaggagaatcttcagcttaattatgatcatttatggaaaatctacagctaaaattatacttaattgtgaaagactgaataatttttcctaaattcaagaatagacaaaggctttgtgctctttccacttaaatttgacaatatggtgaaggttctagaaagttcaatgaaaaaggaaaacaaaacaaaacaaaaatgcctagtgtttaaaagggaaaactgttcactgatgacatcattatgtacaaaatcaatacaatttactaaaagctactagaatgatacaagatcaatgtacaaaaacaattttattagtatttacaagcaaagaacaaatgtaacatgaattttacaaaataatgttgtattattatcaatatatttttta

SEQ ID NO: 900257 - DNA, 661 bp, Homo sapiens
tatctaaaaactaactcttcattcttctgaaaaatcaactttgcctcttgactcctttgtaatttgtggtctgacagcttttctctgactattcccacttccttattcgtttatattcaaatactgtgtctacccttaaccatacagtgtttgattaatcacaaacctcacagaatgtttccttatctgtttggactacatgacctttaagttctctcccaaaactaattttgcttcattctagaagctgccattaatatgaagctcacttgcactgcagtaaagattgtctaacttcatagacctactttatgaatggaaaaaggtaattaaactgacaattgctttctccccaagggaacttaaaaaacaattttcatttttttaaaaaaatttaggtcttctaacttcatcatgtatggtagtatacatatatattacattttatataactaaaatatctatttaagaatttgttttttccaaaaaaaaatcaccaataatttagccaggttaggtcagagaatattcagcaaatcatgaatgagttccctcaaggatgattttctggtgggaataattcatttgataaaatactcaaaagagcaattaagtagctgyaaggagaccccctgaaactattgctatggaataaaagatg

SEQ ID NO: 900258 - DNA, 619 bp, Homo sapiens
ggtctgtggtattttgttgtagcagcaaggatgaactaagacacacaaggatgataacaatggaaaaaaagtaacaagattgtgttggtgagagtgacagtgagctggtaactacaatcttagaacactaagaacgaatgacctggaaggtgtagctaattgcaataaggaggggaaagttggggatcacctgttgatgtgagtgcaaaagctgtttattgtttttttaagagcagaggagggagggacgagcatggtcttgaaacagcaaaaaacaaaaaacaaaaaaacaaaaaggactctaccttatctccatgcccagtgtggacagctggggagctaggaaatagccaccacttgagagggccatggaggaagcagatcttgggcagagcatgttttagtaaaataagcagtgaaggaaatattccaagaagggattttgattatgattgaacatgaataaagtgtcagtgaggccatagtgaagtgtttcaggagtcagggagaarcaggagatgaggtcagtgtgagctgttgagagctgtataaggcatgagattagttgggtgtcctggctgggcttggtggtactggatgcaatcaggcataaagggca

SEQ ID NO: 900259 - DNA, 626 bp, Homo sapiens
cccattagcagtcatcttccatcccttaggcccctcccagcccagggcgaccactaatctttctsttcctatggatatttctagtctgaatattttctataaacggaattatacaatacagcctttttgtctggcttctttcacttagcatgatattttcaaggttcatccatagcctgtatcagtacttcattcctctttaaatctgaataacactctattgtgggtttataccacgttttatttgtcagttcatctgatgatggatacttgggttgtttccacttttggtaattatgaataatgccaaaaacatttgtgtacaagttttaagaacatgtgtgcacaaatttttgtgtggatatgttttcatgactctttggtatatacctaggagtggaattgatgggtcatatggcacctctatggttagcattttgagggacttttaaactcttccaaagtcctgtatcatttctacatttctcccagcgatgcatgaaggtttcagtttctctgcacccttgccgacatttgttgttgtctgtttttaaaaaattatagctatcctagtgggtgtgaagtgatatctcattgtggttttatttgactaccctaatgactaa

SEQ ID NO: 900260 - DNA, 626 bp, Homo sapiens
cccattagcagtcatcttccatcccttaggcccctcccagcccagggcgaccactaatctttctcttcctatggatatttctagtctgaatattttctataaacggaattatacaatacagcctttttgtctggcttctttcacttagcatgatattttcaaggttcatccatagcctgtatcagtacttcattcctctttaaatctgaataacactctattgtgggtttataccacgttttatttgtcagttcatctgatgatggatacttgggttgtttccacttttggtaattatgaataatgccaaaaacatttgtgtacaagttttaagaacatgtgtgcacaaatttttgtgtggatatgttttcatgactctttggtatatacctaggagtggaattgatgggtcatatggcacctctatggttagcattttgagggacttttaaactcttccaaagtcctgtatcatttctacatttctcccagcgatgcatgaaggtttcagtttctctgcacccttgccgacatttgttgttgtctgtttttaaaaaattatagctrtcctagtgggtgtgaagtgatatctcattgtggttttatttgactaccctaatgactaa

SEQ ID NO: 900261 - DNA, 462 bp, Homo sapiens
cctgcaattttagtatattggcatcagggggcagtggagttgcatatgttctgagcagtctagcctgcatttccactgawgacattagtgtgagtccctaagctaaacattggacaaaaatatgatatgcttacttaaaaaaaatgtgatacaaactgaagaaaattggccttacagaaaatacaaacaaatcatataattttcatgtgttctttagcataatgaagctaaaacatgatcttaatgttaaactagcaaaaagactttatttcccactttctgattctcctagaaccattctcattaacatccctttttcttaattgcatttttcaagtaagggagttctctctctcttgtaatctagacacggttagtcttcctggttatctaaaatgtcctgaatttaaacttttctctttagcttcttgcaaaaattattctcttattcctaaaatattg

SEQ ID NO: 900262 - DNA, 462 bp, Homo sapiens
cctgcaattttagtatattggcatcagggggcagtggagttgcatatgttctgagcagtctagcctgcatttccactgatgacattrgtgtgagtccctaagctaaacattggacaaaaatatgatatgcttacttaaaaaaaatgtgatacaaactgaagaaaattggccttacagaaaatacaaacaaatcatataattttcatgtgttctttagcataatgaagctaaaacatgatcttaatgttaaactagcaaaaagactttatttcccactttctgattctcctagaaccattctcattaacatccctttttcttaattgcatttttcaagtaagggagttctctctctcttgtaatctagacacggttagtcttcctggttatctaaaatgtcctgaatttaaacttttctctttagcttcttgcaaaaattattctcttattcctaaaatattg

SEQ ID NO: 900263 - DNA, 663 bp, Homo sapiens
caggccttctacctccttcttccacatttaaaaggccctgtgtacactggtctcatccagataatccaggacaatctttttgtttaaggtcagtgaattatcamccctatttccacttgcaaccttaattaccccttgccatttaaaataacgtattcaccgtttctgggattaggatgtggacacctttggcaggctgttattctgtccaccggcatagtacaatgagttgaacctcacatatgttcaataaagacttgatgacattggagttcccttttaactctaagattccatgaaattaaaaaaaattataccaatacaacacacacacaaaatctaacctataagtgcatattcaatcttaacacagattcccattttacctttgggaaactgacattgtcactggtaacttgagttctttccttactttctattggttgccaagaaagaacacccaattgggaacaaagtaagcaggttttattcctggccagggaggaagaaggtgagctctcactctgaagataccctctaccaaacaacagaaggcatgaggtctttaaggactgggtatggggtgggagaggaatgttagtatgtgcaggttgggactccagacatgcagactcaattcatgaacatatatcttcatacaac

SEQ ID NO: 900264 - DNA, 650 bp, Homo sapiens
tttttaaaatcaccatattagtttactacattgaagaaaacatgttagttgcaccggataagcaaaaagaagcaagtatattggagggtttggtaagacacatgcttcagagggtggaaggtaaaactctatagagattcatagatctgtcacaacagaaatgtttagtatctagtggtctggcacatgctgggacattccatggaaagtaaaagacaaattatttcatcacatgtctcccaccactaacactttctgggtctctttggagtttggaagcagcattttccatagttggaaatgccaacctgacctatttactggctgacatggagagttataagctctgaataggttcagaataggaaagggctctgcagcaggtctgtcctgcagtgcaaacagccccgttgcctcagccataaaattggacagactgtaggttactgtggtgggagaaagtgccatgtagagtttatgacaagccccaacaggagaaacaaaatatagataccgaggattctggaataaggccatgccatctgtagcagagtagtatgtagcattcaaaaaacaagtctggcatgctgyggggccctggtaaaaatgggatgtctgaacacgagacatcaaatgagcctgtagccaga

SEQ ID NO: 900265 - DNA, 663 bp, Homo sapiens
tcattattttggccaaaaggaaggtggaaggttatattttgtgaggcaacgagcccataaatgtttataatgcagcttttaaagagtaaatccttttccatgacaccatttgggtragcagatgttccagttatttattgcctaacaaaccatcacataatttaatggcttaaaataacaatgattatttattttgctcatgaatcttgagtctggctggagcttagcagagacagcatgtctgtgctctatgagatgctggctgagtcagctttattgggggctggaggatctacttccaaggtggctcattctcatgggtggcaagtctgggagctgagccagactgtgtggcagggcctcagtttctctccatatgggcctccccacaggctgttgggctcgctcacagcatggcagctagtttccaagagtaaggtctcaacagcaaggaagtgaaagctgccagttgttgaggtctgggcctggacactggcacagcatttcttttgcctttatctattggtcaagtcatcaaggagccctgattctaggggagggaccctcgaccctacctcctaatgacagacatgccaaagaattttggggccatgttttaaatcccacacagcagatggtataaatcagaggttctcaaccctg

SEQ ID NO: 900266 - DNA, 500 bp, Homo sapiens
gtgagagtaatttggatctccttattagcttttctttgctgaatgacagaatgagggccatctcaccatctatcttatcagttctgagcatttacagttttttggtctttacttttctcccaaattctctcttttaatctctattcttcattcctttttctgcctaactcaaaggttcctttttttttttttttttttttttttgagacagagtctcgctctgtcacccaggctggagtgcaatggcacgatctcggctcactgcaacctccacctcccaggttcaagcaattctcctgccccagcctcccgagtagctgggattacaggtgtgtgccaccacacctggctaatttttgtatttttagtagagacggggttttamcatgttggtcagactggtctcgaactcctgacctcatgatctgcctgcttcagcctcccaaagtgctgggattacaggtgtgagccactgaacctggcaaagcttacattttcta

SEQ ID NO: 900267 - DNA, 534 bp, Homo sapiens
aaaacacaaagggagaggggagaaaggttatccatgaataatacatttcctkttgtggaagcaggaggagaagaaacaaatggatcattaatgggcttaacacaattaggcttcacagtggggcgggggccagcagaagctcttgccagcaatgccaccagcagaggaggctgctgtgaagtagaggaggagggcaagagttggtggtaacattattttggagttgctgctttttcttcccagtatccaaagcctcttcttgaattgaagattagttgtgttatctctatttttgtggggttttttttttttttttgagatggagtttcactcttgttgcccaggctggagtgcaatggtgcgatctcggctcaccacaacctccgcatcctgggttcaagcgattctcctgtctctgcctcccgagtagctggaattacaggcatgcaccaccactcccagctgattttgtatttttaatagaaacaaggtttctccatgttggttaggctggtctcaaactcctaacctcag

SEQ ID NO: 900268 - DNA, 388 bp, Homo sapiens
caggggccaagtggtggcactgaacagtcaaaggcaaggtgagcataactatcataatgaacagcagaggcaaagcagcaatyagaatagtctgattcctgtagagctctggcattggctaatcaatcacggtgttcttaagtgtgaaattaataggaaatctactgcattcctacttaatttatacaagcagaaaatttctaggttgaatggacaaaaaactaatttgaattataaaaacagagaatcatggctgttcaatcaatttccagacttgagctaatttacagatccagaaccccttgaatgaaggggagtccagctcccctggaggaaggaccccactacactaccgacaatttatgcagtgaatctttctcccatcctc

SEQ ID NO: 900269 - DNA, 622 bp, Homo sapiens
tcacttttggttgaatcttcaatgtggactgctggatatggagcaccgctgtacaaaatttcatttgatctctctcatcacaatctcactttctctgcttctcaaaaataacttctttttgctttcttccagactcttttacagtcaatttaaaatctatgtatatacatagaaaagaacacagaaactaattttgtttttgtttcagttctaaaataaatgagacactagaggccagaacagcacttggaacatagtatataggtgcaataaatacttgctggatgaatgtctactatttgctacatgttcttttcactggacgttaattcttaaagattctttactgacagcattctattcaatgtaatggctccataatattatatagtattaatgaaattatattttatgtattatttgcctactagtgggcaatgattttacttatgatttttgctgttatttacaaaaccaacaaatacccttgtgtgtrtattttgcatacctatgggatatttctctaaatagatatttaattggtatggcttttttccccttccctaaacctatgttatgctttttattttatatgatgctaattctttgaaacatgtctctt

SEQ ID NO: 900270 - DNA, 610 bp, Homo sapiens
cgccatatattactgttgtgaggactgaatggcattcamgtcctctttagggtaaaagactgagaatgaagcctagtcaaattgtgtgtaaagcaagaaaaagcagatcctgaacaagattctacctgtaaaggatatacgctttagtgtctgtccttcttatgcagagcttcactgctcaggtctttcacatgtaacacctctatctatgtatctgttaattatctactagttattttataatcattacattataattatctttatctttttacttacctaatagctagattagtaaaatgccctttcttcaagtgaagtgcttattaaagccaaatcaagaaccacctccctacctcttacttctttagaaattgtttaaaatactgtttactcctctctagatttgagaagcaaataaggacagaatatagagggacattaaagtttaaaaggatacaattcacaataaaagactcaagagtaaagcctacaagtaacttaaaaagcaagatggtgtagagttcaaataagtatttggtttatgtagtatctgccaaattaggtaaatgaaaattattcatataattacccaaatatgtgaacagca

SEQ ID NO: 900271 - DNA, 592 bp, Homo sapiens
aggtctcccaaggcccccacaaatggcctggaactgaatgcagcctcctttccctgcatgcactcagctgtgttttcagcactggcctcctcccaccccgcacgccctcgcatctactggtactctttcttaraatccttcaaggttgagaacctagactctgcagtcacactgactcagtccaaatctgggctcacaccactttttaaatgtagggaagttatttagcttctctgagcttcaatttcatctatacaataaagaaaagtatagcagctaacatttactgaatgtttaccatattcaaagcacatagtatcagactgtattatctcatttatttctcctaccagtgccaggaggaagttcctatcaatatattcaaaatggggaggggggcaggttaggtttacatgaccagtaagtgataaagccaggactagaagccatcagtaaaacatcagcatcttcacattattctgtgcctacctctcaagttgttgtataacatgagatatgactttgcatagggcttggacatgaaggaattgctcatttaatgctagctattattgtaatcatcactatcatt

SEQ ID NO: 900272 - DNA, 638 bp, Homo sapiens
gaatatgtagagttcttttcactctacacttactccatgaataaaatgtcattgacaaaatgagactagactctgaaattctcaaaaagactgtaaattcattatcatttgtaaaataaatgatactctctatagacataattcccttcttaagtcaactgtttggcatcactagcaaaatacatatgcagagcactccctctgtcatggttaatgttacgcgttaatttgactgagccacagggtgcccagatattcagttaaaccttatttctgggtgtactaggagggtgtttctggatgagattaacatttgagtcagtaggctgagtaaagcagactgcccttcccaaagtgggtgggcctcatccaacccactgaaggcctgactagaaataaaaagactgagtaagaaagaatctgtctctgctgcctgactgcatgagctgaacattttggtgttgtttgtttttttctttccagccttcggatagggactggaacatgagctcctcttgggtcttcaggttgctggcttctgcactggactttacaatgtcagatctcctggtactcaggctatctgaccaggactggaatcatatgtcagctcttckaggtctctaatttcctggcta

SEQ ID NO: 900273 - DNA, 611 bp, Homo sapiens
atactcattttcctaatgagtataaaaagatatcattaatgtttcgtacatttgatgccatccagccatataaatatggaatagtyctggagctgtgatgttttgtatttttctgggtatcacaaatcattgagatagtcaagggcatccatatttactctctgtgagttcacttattcatccagatatatgtactgagctctttggtctccaaggcactacactgggctacgggtatacactggtcagcagacatcatctctgcctttctgtggcttatgatctagcccagtggtcctcaaccctagctgcacaacagaatcatctgaagaatgtttaaaaacactgatgatgaggctccaacctgtgcttcaatttgtctagggtgatattgaggaatggtatgttttaaaatttccctaaatgattttaatgcacttccatggttgagaagccctagtctagtgaataagaaaagtatgagataaatgtacaaatatagaattttttaagtgttgaaaggaaaggtgtaagaagttataagagtgatcaatgagaccgaagaattgggaaaattagtcaagaagggcctctctgaattggtgatattt

SEQ ID NO: 900274 - DNA, 605 bp, Homo sapiens
aataacaacaaataagctgtcttgatccattcttcaagttactaatattggcrggtttgacgtttagattactgagaatccttaacattcaatgtcagtgaagcgtgtgtccactggcagattattcaactagcagtgaacactagcatagctgcatccaaaaacagcatgcttacctatgatatacatagtgaccttttattaacagcaaattcttttgagaagcatattgggaagaagtccatgtaatcatattgaaaatacttttggttaagttctggaatgctgaaatggaaaaaaaaaaagtattctggttaagaaaaccaactgcatgcaatagctattaaccaggatggtagtggtttagtgagttagaaccatttgcagatattggaaaaacaagttaaatatttccactctaaaaagggcaaccagggcagagaccatgcaggtcaatttgcaattccaaagtggagtattttcatctaagatactgtccatgggtggaaggctagcatgaccctcacctgctccattttgtcagttggtcagctacaatctcagccattccactccaactattgttattattaaggcaggagaga

SEQ ID NO: 900275 - DNA, 589 bp, Homo sapiens
gtgttagtattctggagattgtcaaagtgacttagacttctcacaaaccatatcatgagcatgaggggtaggaaattatcctctgctctctgcattagtagtctgagaaaatatgaaaggaggccatgacccagtgagctgttgtaaagtagaagggggaccttctagagttgcatatgtgctattattgactgtaaaactattttagtttaaaaaataattaatgtaattattttattgagttatattatgagttaacaattcctagacttaacaaagttgtaacatatgaaattggatttcagggagccaaatttttgccattgaaagtaatggcaaacactgcaattatttttgtgccaacttgatatataggcttttctgcaacgaggaatcaagccatatcttgaatgtggaggcaagaggtagaagaaacatctctgatgcagctttgtcstgaggggaggaattccttttgacatttttcagaatgacttaaattgattaaaatcatggacacaactcctctgccacctcctcatgacaattgggtaatgagggccagaagatactggcttatgttttgttt

SEQ ID NO: 900276 - DNA, 601 bp, Homo sapiens
taaaagaaagggaggaatcatgtccacaattgcagctttctatggcggcaagtccattctcatcacgggggccacaggctttctgggcaaagtgctratggagaagctgtttcgcaccagcccagacctgaaagtcatttacatccttgtgaggcccaaggctggccagacactgcagcagagggttttccagatcctagacagtaaggtatgccttataggaaagcgtgtgtgatgggcaatgccttagggcaagatgattcactacaatgttctcttatagtctcatattgcaagtggggaccaggctacctgcacaggtagaggaaggcagacaaaacaagacagcaacaagctgctggtggaaatcggtgttttcccaaaggagggaaaagagtgcttagtttcagtccagggcaggtgagattgtctatgtctggaaactactaattatcaaaatactcaaactccctgagtggatgcttcagccttaatatctgctgcaagttcatctgaattcttcactaattttcttttaaatttaaggttgatttcctccccaaattttttggatattcttctattctgttctattctattg

SEQ ID NO: 900277 - DNA, 613 bp, Homo sapiens
agaagactggagagaatggaattcaaatgtaagtgggggcataagccttctatacgaagaggaacagcttttccctctgttgaaaatgatgcrtgcagatactagtatatttatttgtatgcttcattcatttggcaaacataatgtacacctaccatgcactatggacatcctgaagttctggggatacagaaacaaaaaagaaacaatcctcaccatcaagaatctcactgtcatataagagaggttgcaacaggacagtatttgtgggaacactgggcacagttagatgcacatcccgaaacttttgcaatgtagattttcaaatgtttggagaatagataagcatgatattatggcctatgaaattgaaaaagaacatatctcaaaggggttgggagtctctcaaggacagaatttggattgtgtaattgatccctaggagagaacaagtgcagtttccaatataagatgagggtcccaagactgaactatttggtagcaatcccagactaacatttcttcagagacattttctcaccaactttccccttgaaaactagagcaaaggcctcagcctgtgcatatcgtcagcatctaacacctcctgagg

SEQ ID NO: 900278 - DNA, 575 bp, Homo sapiens
acaatgggcagaaggaagcacattgcaataaatttccccagagagagttcctttacattccattcaccaaaaacctctctggaactgtcaggttcagaatatcaaccaagaccatatcatttagaattcattggcatgtagaggtgactcgattcctaaaagaagcctctctcccatgaaccacgatgtacgttccacagaggcagaaaccgccgtaggttagcaatgcattttagtctttctctccattcacatttactgagagcacaccacgtgcatgttgctgcaacaggcatttccgatagagccgatccatgagctaacaatgtctgaaaacaaatgttatggaactgttggcatttctgagatttggcctttgccatttgatagactttgcttcccaggatgctgtcattttgtgattttttataattacaaggaatttggtaccatgttgttttcaaaaaacctcctagaaagtctccatgtatgctctagaagttgctctacrtaacagttcagcaagcaagtgttccttctcttgagctgcgtccctcaggaagctgtacctttag

SEQ ID NO: 900279 - DNA, 636 bp, Homo sapiens
ccctcttcgtatcctggacttcacagatagcagtttggatacctctaggggggtccaatatccttattttgtgcatggggtaactaaggcccagggaggagatgggatttattagaagtcaaacagggaaataagggaggagttggggttctccagggactttcttggccttctaggcttccttctggtaacctgtattagatcccatgtcaaccctatgtaggcacagtcttgccctaggttctgtagccagtaaatgctgtttttattaaggaaaacatcagtggggatttaggaagccctgggtcagtagctccaggaaatgagcaccaagccagcctggccacttgcccccttggccctggtgctgtggctcctctccctgtacttggaacctgggcccaattccattcctccttttcctgagccttgcctttataaaatctcttggaaggggccctactacttgttaatgtatacttaactttcttctcctattccccatccaaccagggcctggcctgccctgagcctggcccaggtatgagaatgtgtacctgctcctaggccccctgaccccaaattactgcttgaatctctactcacctgcctycaaccatgctgaccatgttcagc

SEQ ID NO: 900280 - DNA, 545 bp, Homo sapiens
atcagagaataagatcccaaggcacttcactggggctgacattcagggagcctcctggaagaatcrtttcaaaagcaattgcagtcaaaacagattttgagagcactcttagacccagaaatgtatagttgtctgcatgtaagtgctaaggctaataaaaatcagaagacatttggaagacatatccttgaattgaaaaaaataataattgaatatagcaaatgcaagttcccacttgttcagcaatctgtttaacttcttatcagagtcattgttaatacttccttttgttgtacatgccagtgcctggatatctaacgtacaatttcttgtgctgtcatttccactttccttttcaccaatatgaccagtaaatacagtaagaaatagacactattgatacagagcctggatagtcattaataacagtaatgttagtatcgtattgagcactcactatgtgtctaagcttttgacaggtatttggaagataggtaagcactggataagtattagttgtttgttgctacatggtgtcttcactc

SEQ ID NO: 900281 - DNA, 545 bp, Homo sapiens
atcagagaataagatcccaaggcacttcactggggctgacattcagggagcctcctggaagaatcatttcaaaagcaaytgcagtcaaaacagattttgagagcactcttagacccagaaatgtatagttgtctgcatgtaagtgctaaggctaataaaaatcagaagacatttggaagacatatccttgaattgaaaaaaataataattgaatatagcaaatgcaagttcccacttgttcagcaatctgtttaacttcttatcagagtcattgttaatacttccttttgttgtacatgccagtgcctggatatctaacgtacaatttcttgtgctgtcatttccactttccttttcaccaatatgaccagtaaatacagtaagaaatagacactattgatacagagcctggatagtcattaataacagtaatgttagtatcgtattgagcactcactatgtgtctaagcttttgacaggtatttggaagataggtaagcactggataagtattagttgtttgttgctacatggtgtcttcactc

SEQ ID NO: 900282 - DNA, 518 bp, Homo sapiens
aatgggagttcactcatgatttggctctctgtttgtctattatttgtgtataggaatcttgtgatttttgcacattgattttgtatcctgagactttgctgaagttgcttatragcttaaggagatttggggtgagacaatggggttttctaaatatccaatcatgtcatctgcaaacaaatataatttgacttcctctcttcctatttgaatatcctttatttatttctcttgcctgattgccctggtcagaacttccaatactttgttaaataggagtggtgagagagggcatccttgtcttctgccagttttcaaaggaaatgcttccagcattttcccattcagtatgatattagctgtggttttgtcataaatagctcttattattttgagatgcgttccatcaatacctagtttatgagtatttttagcaagaaggggtgttgaattttatggaatgccttttctgcatctattgagataataatgtggttttgtcattggttctgtttatg

SEQ ID NO: 900283 - DNA, 622 bp, Homo sapiens
gctctctgtctattattggtgtgtaggaatgcttgtgatttttgcacattgattttgtatcctgagactttgctgaagttgcttattagcttaaggagattttgggctgagacaatggggttttctagatatacaatcatgtcatctgcaaacagagacaatttgacttcccttttcctacttgaataccctttatttctttctcttgcctgatttccttggccagaacttccaacactatgttgaataggagtggtgagagagggcatccttgtcttgtaccggcacaaacggaatgcttccagtttttgcccattcagtatgatattggctgtgggtttgtcctaaataactcttattatattgagatacgttccatcaatgcctagtttattgagtttttagcatgaagggctgttaaattttgtcaaagaccttttctgcatctattgagataatcatgtggtttttgtcattggttctgcttatgtgatggattacatttattgatttgcatatgttgaatcagccttgcatgccagggatgacactracttgatcgtggtggataagctttttgatgtgctgctggattcggtttgccagtattttattgaggatt

SEQ ID NO: 900284 - DNA, 669 bp, Homo sapiens
gatcatggggtcaggggaaaagggaaatggttaatgggyacaagaatattattagaatgaaaaagatcttgcatttgatagcacaacagggtgactaaagtcaacaataatttgttttacatttcaaaatcactaaaagaatataattggatattttgtacacaaagaaatcattagtgcttcaggtgatgaaaaccccatttatgctgatgtgattattatgcagagtatgtctgtatcaaaagatctcacataccctgtaaaataggaatacctactatgtggccacaaatcttaaaaattaaaaatttaaaaattagaaaacaataatttcagaagtaagtataaaaatttaaagtttttgcaaagctcatggaaacctcaaattaaaaaacaaaaccaaacatgccacaggtatacaaaaaagaaaagggaaggaagtaaagcatactaccagaaaaaaaatcacaagtttcaaaacatggtgaggagatatacctaatgtaaatgatgagttaatgggtgcagcacaccaacatggcacatgtatacatatgtaacaaacctgcacgttgtgcacatgtaccctagaacttaaagtaaaattaaaaaaaagaacaattgataaatccgtttcatattgggtataaattattgatagtttgactc

SEQ ID NO: 900285 - DNA, 590 bp, Homo sapiens
tggttttataaggagaaacccctttctttcacttggcactcactctctttgcctgctgccatctatgtaagatgtgacttgctcctccttgccttctgccataatgtgaggcttccccagccacacatagaggtgtaagtccagttaaacctctttcttttgtaaattgtccagtcttgggtatgtctttatcagcagcatgaaaattgtctaatacagtaaattggtaccagtagagtgaggtgctgctgtagaaacccaaaaatgtggaagcagatttggaactgggtaacaggcagtggttggaacagtttggagggctcagaggaagagagaaaaatgtgggaaggttgggaacttcctagagacttgctgaatggctttgaccaaaatgctgataatgatatagacaatgaaatctggtctgaggtggtttcagatggagatgaggagcttattgggaactggaacagtggtgactcttcctatgttttagcaaagagactggtggcatttttcccctgccrtagagatatgtgggcctttgaacttgaaagagatgatttaaagcatctggtggaagaaacttc

SEQ ID NO: 900286 - DNA, 679 bp, Homo sapiens
tgagaagtggaggagggacacggcctccgcagccacctaggcgtggccggagtggagcgcggggtcggggcgggccccaccgcgaacgakgccagcagcgccttcagtgttgtcctcgcggtggacgcactgccagtccgcccagcaggcctcgtttccgggaacaggggcaggcggctagcaaagcttcccccgggggccaccaggaagcacccggagatttcctgaaaaggagtgcgcctttaaagtgtcggcttcccagacgttgctctggggagagcgaggaaggggagggacacaccttttcaaagggctgggaccctggagggacttttctacaactcgccgccggtgtttacgggaggctggtttctcctgggccggcgtaggctccacacagccccagagaccaccattgtttggggagggcagatgcgcccacccgggtccccgaccgcgtggcggaggcttgcttggcaggagtggagatggtggcgacacccaggttttctaactgcttttctgaaattcattagtaaatgaggacttgaactatggaagttctgagagcctgccccgggaaggcgcaccccaacctctcttccccctctcagcctctcgccccaccattagtggctgccttgagatctttgtatcaagaccaagccaacactaagga

SEQ ID NO: 900287 - DNA, 653 bp, Homo sapiens
tatttctttgttaccattttaagatcgrtaggatattttattatctaatcttttttccacttcacatcttttatttccccgtttttctgtgatgtttccatactgattgtaaatgactccacaagtgtgtgcatgaattcccttaagctcctctgcttcccatcatccaggcctgctgattggtatgagttcagtattgtcaagtgttccccatctgctttttgtcagtcgctatttttgcaaagtcttccttctctctaattatacaaatatgtctttttcatttttcttgtcaaagacaaattaaaaagaattagttcagtttcttagctagtttagtcttcattaattccaaaccccactccatttttagcaccatttttcttttcctagtctttgtcccgctttttggtaattttaaaagctcctcttctcttgtctgacttatttaagtagcatgaattaatttgctacctctgactcttttctataagttttagctaactctaacaagatactttttcactcttctccatatttagttcagatctgtctttgtctgtagatctttgaagagtcatttgtgaaactacattaggtgtttcttgttcattatcattttccccaagaggaattttaatcctatgtgtgtt

SEQ ID NO: 900288 - DNA, 653 bp, Homo sapiens
tatttctttgttaccattttaagatcgataggatattttattatctaatcttttttccacttcacatcttttatttccccgtttttctgtgatgtttccatactgattgtaaatgactccacaagtgtgtgcatgaattcccttaagctcctctgcttcccatcatccaggcctgctgattggtatgagttcagtattgtcaagtgttccccatctgctttttgtcagtcgctatttttgcaaagtcttccttctctctaattatacaaatatgtctttttcatttttcttgtcaaagacaaattaaaaagaattagttcagtttcttagctagtttagtcttcattaattccaaaccccactccatttttagcaccatttttcttttcctagtctttgtcccgctttttggtaattttaaaagctcctcttctcttgtctgacttatttaagtagcatgaattaatttgctacctctgactcttttctataagttttagctaactctaacaagatactttttcactcttctccatatttagttcagatctgtctttgtctgtagatctttgaagagtcatttgtgaaactacattaggtgtttyttgttcattatcattttccccaagaggaattttaatcctatgtgtgtt

SEQ ID NO: 900289 - DNA, 603 bp, Homo sapiens
ggatacaaaaatcctctaggagccgtaacttcctgtcaatcctaaaatttaataaggcaaatgtttggcttcgagccatactgggaataaggtaaggccttttgaaaaagccacgatgcccaggtgagggttgaattgatcactgagaaccctacaaatgcgctcatggcaaggctgggaataccctacacttaccctctcggtcatttacttcagagtctgcggggcattctaatccgcgttgtcatttgctttgtgccacattcctaagaggtaggcagggcaggttttatcatcctctgtttacagatgaagataatgaaggtcacatagctcaagtgagctacccagggccacagacatacaaagtggtagaaccagaatttaaatcttggttggtctgactccaagtgtagtatttgtttcactttttctttctttctttctttctttctttttttttttaactgtttctscattctgggttctgaccaggtgaccttgaatcataaagattcagggcctgtcttgagctgctcaatatggaaggcatcttttctctaaagagtgtgagctccctgccaagcagcacaggcgcttaat

SEQ ID NO: 900290 - DNA, 665 bp, Homo sapiens
atgtttaattagcagcaattttggccagacattgtgcctgggacaggggattccagagtgaatgagacacaagtactcctttccaggaattcaaactttaaggcaatgactatccttatagaaaggaaaattgggccaggcgcggtggctcacgcctgtaatcccagcactttgggaggccgaggtgggcggataacaaggtcgggagatcaagacctggctaacacggtgaaacctcgtctcttctaaaaacacaaaaaagttatccaggcttggtgatgagcacctgtagtcccagctactcgggaggctgagacaggagaatggcatgaacccaggaggcggaacttgcagtgagccgaggtcacgccactgtactccaacctgggtgacagagcaagactccgtctcaaaaaaaaaaaaaaaaaaaaaggaaaggaaaattgatcggaaatgttaacacattaggttttgtatgttaaaaaggcctggatataaatcacagcttaccatatttccacttgtatgacttgaaaagaatgactgaactctctgagtytcagtttcctctctaattactaatgatgcatttctttcctaagatcttagtagaatatagtaatgagaggacagagcaccagataattatgatgtgatcagagtag

SEQ ID NO: 900291 - DNA, 624 bp, Homo sapiens
gtagcaatcagatacattttgtcaaatttagtcacctaaaattaagtataatgaggctaagttcatcatccctttttcagcctgcaattatttaaraaaatcatacaagtagtttatgttcataaaataatcagaaaatacagaaaatttttaaggataattgaaaccctcagtcataatgtggtaacattttagccacatctttctagatttttacagcttcattttattttacaaaaacaaaaatgtattcaacaaaattgagatccttttatataccagatgcccaattagatatttgagaggcataagagaactcagacaaaaatttttgtcttaaagtcttaatgtttttcaaatttatgattttactttgttttgctacacatattttacaagccattacatatagattctacatttaatgactatataatattctctcatattcttgtacaaggtcataagtcttattaacttatgcttttctgcaccaagaaaagttaaagaaaaaccagcataaatttagtatttactctgggcaaatagttacaaatgttgtaagggagatgtgaacaacaaaacaaaacagcacaataacaaatacagtaagaaatagctcca

SEQ ID NO: 900292 - DNA, 597 bp, Homo sapiens
agtcaaatgtcaagaccccatattttcttcctggaaaatagctgaaaaatgatatacatgaatactaccataagagttactcatagggatagacgaagggcatgaaaggaagaaaataggtcagtaacagaatatgtgacacgggaaaggggcacacttagatttttccactcacatcaagagttctctctactatccctctcaatgggcttaggaaatctccttgtaagaaacttctagataaacccatacgcaactcaaatatctgctctgccactttttagatagctaatttggggcagatttcttaactcctgtgagccccagtttcaacagtttgcatggagatatctactttacagggttgctttgacgattaaattgactaacgtagtaatattatgcaatgtgcttgcagaaaattgctcaaaagatgtaatttttagctttttataatgtggatagcctatgtggytagagcagagttgctctagtgttcagcaaactcccccagccccattgccaaccctcagcccccctcaggtacaagaaaagctaaaaaaaaaaaaaaaatggatagcttcaatacaatggtgt

SEQ ID NO: 900293 - DNA, 644 bp, Homo sapiens
tctttgacaagttgcttcaactcttagtttcctcaattgtaagtttcatatgaaatttagaaagaataaagggaatgggawctagcaccaaattaaaaagtaaacgtgatgtgaacttgaggcattaaattacaaataagtggtttccaaaagagagtatgctttgtctcatcaaaggaagaagcagaggaaacagcaaaagaggaggagaaaaagaacttgttcaaagcacaagccttcataagttatgtcttagtccatttggtgttgctatgatagaatacttggggctaggtaatttataaagataagaggattatttggctcttgattctggtggctgaaagtttcaagagcgggcagttgcatttggcgagggcttcatgctgcttccactcatggaggaagacagaaggggaggtagtatgtgcaaaaagatcacttggtgagagaggaagcaagagagagaaaccaaagaatatagactctttttaacaacccactctaaagggtactgatctattcccatgtacaaagagaagtcactaacccctgcctgagggcattaatctatttatgagggattcaccccgtgactcaaacgcctcccactgagcactgccaccacaaaaaaaaaggaagca

SEQ ID NO: 900294 - DNA, 623 bp, Homo sapiens
gttctgcatctgcagattcaactawcaaaaaaattgaaaataattttaaaaaacaataaaaaaccaatataacaatagaaaataatacaaataaaaatacatataacagctatttgcatagcatgtacattgtgttaaatattataagtaatttagagattagagtataggaggatgtacatagtttatatgcacataatataagacaccattttatataaggaacttaagcatctacaaattttggtattcacaagggtcctggaactaatttctcatggacaccaaattaggaccgtattagtttcaggcacagtttatattttgaaaattaggaggtattatggtaaatttaaatggaaactgggcctgagaaatccctgagcagaacaaagccagttaggccgcataaatgaccttaaccttgctggatttgcaaataagagcaaaagttaatttgagctacagctcataaatacctatattcagagaaaacagaatgtaagctcaaccaatcagaagcagccaacaaatttataattatataactagggactttccaataggataggccaaataaggcaacagtgtaactgtaatccatcaaatattttctttgcttt

SEQ ID NO: 900295 - DNA, 634 bp, Homo sapiens
tacatatgggtggtggtggtggtggttgttgtcttgttattgttgttttgcatattctttaaaaatattttaaaaaatttttggctgggggccataaaaacaagtygctggtcaggtttagcccacagtgtgtagttgtttgccgcctgttctagaatgtggctgtccaatagaactttttgtgggtgactactgaacacttgaagtgtggctagtttacggaaaagaatctttaatttaatttgaatttaaatagtcacatatgactgagtagtcgctaccatattagacagtgtagatctagaaaattcactgcgggatgaataaagccttatgctttaaattttttagattgctttcatttatattttattttaaccacctattaatagggaattttcagcttgtgcttttcatttttcccttttccagcttgctctgttttcataataaaatctggtggaaagattttccagaatagcttcctgtctgaccatactttttctcctcatttcagtgaggctgaactggaggaggtgttgactttttatacccaaaagaacaagtctgctagtgtcttcctggggactcactctaaaatttctaagaacaacaacaattattctgatagtgg

SEQ ID NO: 900296 - DNA, 652 bp, Homo sapiens
cagccatatctgaattagggggcaatgcaattccagtaacgctgtggctcttgtaggcttgtagaggtatcaccttggtggtcttggttaagatctggaagaattctctgaattaccaggaaaagcctcttattctcttccctttctttcaaacaaacaaaattgctctgtgctgaactacctggagctagggacgcagtaacacaagcacccctgtggccaccagcactggtactgtgctgggtcagacttgaagccagcacagaaccaggtcttgcccaaagcccacagtaactactacctggctactgcctaggttcagtcaaggccctagggctctgcaatcagcaggtggtgaggccagctaggcttgtgtccttcccttcagggcgacaagttctcctaggccatgggcaggtccagagattctgtccaggagccagggcctagagtcggaaaccttagaaatctacctggtgctttattctactgcagtcaagcttgcacccaagccacaagaccatgttcttcccactcttccctcccctttccacaagaagaggagtctctctccatggctaacaccactttaggcctgtggygagtactgcctagctaccattaatattcactaaggcccaagggctcttca

SEQ ID NO: 900297 - DNA, 527 bp, Homo sapiens
gagtcaaaggagatcattttggaactttaaagtttaatgacttccctattggattttggacttkcatggggcctatagcccctttgttttggccaatttctcccatttggaatgggtgtatttacccaatgcctgtatttccattgtatgtgggaagtaactaacttgcttttgattttacaggtccataggcagaaggatcttgccttgtctcagatgagactttgaacttggacttttgggttaatgcttaaattagttaagattttggaggactgttgggaaggcatgattgtgttttaaaatgtgaggacatgagatttgggaggggccagttatggaaggatatagtttggctgtgtccccacccaaatctcatcttgaattgtaatccccacatgttgtgggagagagtcaatgggaggtaattgaatcatgggggcagtttccactatgctgttctcaggataatgagttctcatgagatctgatggttttataagtgtctgacatttcccctgctgcca

SEQ ID NO: 900298 - DNA, 580 bp, Homo sapiens
gtaggttcagaagataatagaaatggagagaaggaaaacaggcagtaagacattgatgttttgacccctaatctatgggttgatgtcttggagggggtcaaggagtgtactggatagtttgagaggaaccatttytatgtataatgctgatgtggtgacaaacatctaagttgacaccgcggcctgggatggcagctccttagagccctccagctctcgtaaggaatccagaagttcccacatgccctgtggagagctagggggagctggctgatggtgctgactggccagccagcagagagtgtcacagtggctcaagagaagggatcctgcagctctgctatactaggtagcacattcaggtttaggatgaaaaaagtgtctggcaattctccagagaaaccaaagcaaaagagaactaggatggagcctgactggctgatggattattaacagttaccaggtgcagagaaccagcagatgctgggagctgtagcagtgattaaggcaaaaaataccactgctgcagaggacagtgaggatcctataagctcctccataaaccaaagtccctctgtat

SEQ ID NO: 900299 - DNA, 699 bp, Homo sapiens
aattttttaacttctaacttagtctattagtacttgtcccacataaaaagaatttactttatttttttatctttttttgtatttgayaggggcaggtagctattgcagaggaaataatcattctgagaataactgagaggttaaaactttatttaaaaaaaaacctctgaatcaatatttggtgaggtgagaatgtccatttcatgctgctattttatccaaataaagttaaagcattgtagaaatgtatggctatatgttaggacttgagatactaaaataattaaggtgtatagagtttggcaacctctagatattattcgtgtattatttttagtttatgaggttacattcaacttgtatcaatctattctgttcatgtggtcactcattaaatagaaaaattgaatgccacgcacatttcactaagccctttgctttttctcatttaaactatttcgataacagagttatatgataagattattctataaatattgacttcttaacagagcatcttattaaaaagtatggcattatatatgcaagggtttttagcataatcaaacttctttacctcatcttataagtgaaggttacagttttctgctgtaagctggacaccaaagcatatgtgatcaaaaaccctacaaatattagtgactatggcatcataaaaataaaataactaacccaata

SEQ ID NO: 900300 - DNA, 642 bp, Homo sapiens
aaccaaattaatagacatggatatcaatcagggaagtgaaaaatatgcaaaaagagttataacatcacatcagctatcataataaatgtgaataaaataaattttcttactaaaaataacaatgccctcatattagccaatgacaaagaaattcaacaaaaggattagagattgttttactcctgaagagagatgttcatagatgttgctaattgagcagttttaaaacaaattttcatttctaatttgttatttaaacatactattatatattaagcctaacttttcaaactttaagataaaatactgatttccagagattctgtaataattaaaatatgaattccctcatacttgaaaaaaataaatttttttcacagccatcttggaaaatatgtgaatgttcaacttttggactgacacctaataagcaacattttattcctaaaggagagattttttaggttggtaatgaggaagtgaaaaaatagaaatttgtaggaaaaaaatctatatataacccatatggttatacataattgaaattccaaaatatacctgggtcttccaggatactgaaagctaattattaaggtgaagaagaactgacttaatagtgamtagaagtgacttcaaccttcc

SEQ ID NO: 900301 - DNA, 613 bp, Homo sapiens
tattctgttctgattatgcagctaaggctatacattttcctttaagcattgtttagttgcatctacacatttgatatattttctatagttattcatgttaattattttctagcttccacttgattgcttcttacaatcctagattctctagatgtatatttcttagagtccaaacatttgcttttcaaaaataccttttagttattgattttcaatttttatagtataaaacatactctgaattattataatttttttagatttatgaagatttgcttgactgagcatcatatggatgattttggtaaatgttctatgtgcacttgaaaactatatatatttcacactatagagttttaactgggacaaagtgataaatgacagtgttcaaatttttttataccatttcctgtttttcttttctacttaaactcctagttactgagaaaggtgcagttaaaatctcccagtataactataaatttatctagttctccttttggttgatcaaatttggcagagttccatatttgtaaatgataacatattttgaggctttttcattatgtgcataataattaakatttgaataatgtaagtagtgagaattaat

SEQ ID NO: 900302 - DNA, 642 bp, Homo sapiens
ttgagaaggtgtctttaacagatgccactttcaaacagaaggaagtgaggagactgatttattagccacctgacaacacatttctactttgtgaaaatgtattacgttgtcttgcagaaatacctcatgcaatcaccatcttaccatcatttttttctactttgaaccttcatgtgtccttttcactgaatcattaattaccaatccaattgtgactcccccagagctgcttttcatggactcaatggatatagctcttccttggaatccagggtcatctaaaagtcaactcttcttcgtgatgagatagttctatttttgtgttaacttaaagtgtctgaaaagctaatttatgtgatagattaaagcaacagaataaaaaacaccctaggcacagtcatttcacatggtgcaacgtatttccagaataaaacaacttttatttcgacacgatatcctcaggagcattggatactgtgtggctattaagtccttcacacatcattaatttccargcaagaaggtgataaatctcaccacaaaactagttcagtacacgtaggaaaataacagatatgatattatttttgacttgatcacagacagtagtttaaaagaaatacttaatttttatacaaattc

SEQ ID NO: 900303 - DNA, 641 bp, Homo sapiens
atcattctggaatactgaagaaaaaatgagctatatatcccagtctgattattttatttacctcgtatactgaatttctttcttccttcttttcagtgagtcttcatgcttaaagtatgcctaatctgcaagatatactttataagctaattctaattctaagtgttttcatacccctgtgtgtatcttctgcctcaataagttttcaaactttcatgtggttttaacgttggaaattggatagagaaaatgaataattaaggaattaaaaaaacacttttacaataaactggggtatcatttgctttactctaattacttttattaagacaaaatttcttaaaatatatttgtactctattgttgatagaggatgaataaaaatcatcatgggttgggattctagtcaaagcaattgttacctggttaaataattcacaagagattcttatctgtggtaacagctcatgagggggcattatatatgcctttttatatgtcttaatattgtacaagagatctcagaaattcatattcactaaaaatraaaatcaagacatttctctttaagttttcatgtcctcagtttgtaaatctttattattacagtttaaaaataaaatgactgttcagtaatttta

SEQ ID NO: 900304 - DNA, 632 bp, Homo sapiens
aaatttttacccaccctgacatcacaggcttgactggagctgaaggccaatacacygcacatctcatgacaatttatttgggcagctcatgatttcaactagtaagtctattaaatccatttagttgtagactactactcatctagaaatcttagcctaaacaattagtaaagaatgcttactttcttgtattagtgtcgggaaagaggtctctacaaaaatgtttgcaatgagaatagacttcagactttcaacataatattttaagaaactctcctcaaaatataagccatagatcacttccatcagaatctcctgatgcacttgctaattacgtatgtgtgtgtatatatatatatacacatatatatatacacacacactatatacttagtattatgttattagtattatattatacttacatatacttggtattatatttattgttgtaaacaagtggcatatacctacctatctagctagctagatacataaatagatatagttatagatacagatgtagatatatgccaaactctgtcctagatgttctaaatcagaatcactgattatggactctgagaatcttcattttattaaactccctttggtgactagttaatgtccag

SEQ ID NO: 900305 - DNA, 589 bp, Homo sapiens
atagatatacatatctatatatatatctatacctatatatataaaatatatactagtatatatggtgtgtgtatatgtatattatatatataataaagtggtgaagtagaaaaaaaatgtaatccacagagaagtgaataactcttataagacactttgccattgagttatatgaaaattcctaagatgtccatgtaagaagaaataaaacatcagagaagaaatgctcaggaaagaaatagaaagtagatgctaactggcttcatattgaagcagagttttaacagtgttatggtgttagaagaacaaaattagagcgcagggctgttgatgaggaggggttcagaattttaataggaacatgtagagggctgtaccccaaaagtataggcgaaccaaaaatcaacaaagttcaagtacatcatggttatgtgcctgtactctaattgcatattagaaaaaatatacccctttaggaagggaggagatatrtatatatataaaattccatgtctgtgtatgctcaattgaatttggagatactgtaccttttaaaaaattaatatggtgatatatatatattatatat

SEQ ID NO: 900306 - DNA, 614 bp, Homo sapiens
gatggtttttaaaaatttttaaagaaacctataaaaagaatgtgtttaacactgcaacctagtaaacactgtatcctacaaaacacagattttatgaagtaatatttatcttcattacctgtgagatcctctaatagttttcctcttttctcttcacatttttctcctctatgccattcccttgtattctttctactaaaagtagaaacaaacacaaaaacaaaatgaaaaatgtgtttggttgcaactcactaaattgatttcatgattcactaattatatgccccattgtttgaaaaattgccctgcagaaacaccttttcctctatgctcaacacatgtgctctggtgaaattcacaaaactcctagacctaatcatggagcatatgaagtaacacagtccacgcatagtgttcccctgcatatgggatgtattgcactatgtaaatgtgacttaaccctgttgaatcacactgaatctttgttgtgcagtaggtcattctctcctttctgctagacttgaggcagtgaagacatagtctgaggatgctgcagccatttcccacaaaagakaagatttctgtctgaaaatgaaacttaaggagaagagcaa

SEQ ID NO: 900307 - DNA, 628 bp, Homo sapiens
acaaaaaatatttcatgcttccatttattttatacctatttattgaatgtcaatcatgtgccaggtgatataataggttttagagatacctgacaaaaaatataaacatgtattctgacttcataagacatgtccattatgtgggattcagaggaagaagcaggcaattaaaacaaaacatgatttatgctgtaaagggagaaatacagagtcctaagagagaaataagaatacccataaccaagaaataatgatgttgaggaaggggcaataccagaaaatttcttagaaaaaggaatgtctatgctgtgacatgaatgattaacagaaactggctgagaacaagagtagggtttgtgtgtgaaaagggtattctggaatgatgaaacagctcacaaaaaaaaaagaggttagaggctagagagagaaagacatattcagaaaacaaaatttttccatatggttagtgtgagtgagggggtgggagggaaagggatttcgtgtaaaatcacrtaaaggagtttcaactaattctaaagtattcttaaaccattgtatgccctcatgaaatctgtgttttggaattaaggaagagtgatctatgatgggtgaaactaaggattaggac

SEQ ID NO: 900308 - DNA, 629 bp, Homo sapiens
aaagagaacaagcaatgcttctcccccgtgaaacacaaggtctctgatttcaaggcaatccattagaaaatttacacaatatttgaataactgaattgttatgaagtgaatgtttgtgtctccccagaattcatgtgttgaagccccaaaccctaaagtgatcatattggcagtaaggactttagagaggtaattgaggttaaatgtggtcataaagattggtccctggtcccttagaattgctgcccttgagctctgtggctctctccttagacctggtgcttaaagaagagatcctgtgggcacatattgagacgacagctacctgcaacctggaagagaggcctccccagaaactgacttggccaacatcttgatcttggacttcccagcctccagaagtgggagaaataaagttctattaagatgcccaacctggctgggcgcggtggctcatgcctgaaatcccagcactttgggaggccgagatgggcagatcacaaggycaggagatcgagaccatcctggctaacacggcgaaatcctgtctctactaaaaatacaaaaaaaattagccgggcatggtggcgggagcctgtagtcccagctactcgggaggctgaggcagg

SEQ ID NO: 900309 - DNA, 587 bp, Homo sapiens
ttggtgagaagtgggggaactgggggaatttcacggcagcaactgctgcattgaaaaaaacctttaagttcatttcatctaacagcacatcctccttaggggggtgctcagtgtttacttgagcactgctatgatggcgtgttgacaactttcccacaatggtcaaaatggtcccttttatggagctaagaatttacatcctatgatgtctatcagttggactttgtttggctctttagagccatccaatatgcctgtttcctcctctagcaagttactttcaaatattttaatacattttttgttaactcttagtattattattattgttaactctcagtattattcctccagttaaatgtccactcagttttcaattgtaccttatatgatacattggtagacccttaaatatttcagtccaacaccttaagacaggctgtcattaattttttccatcytagtgtccagaatgggatgtgttactctagtatatgagagggcttgcctaacaccttaatagatctgaaaattatagttgtgtgaattctatgagaagaggcggcgtctcacatcctattttaggt

SEQ ID NO: 900310 - DNA, 706 bp, Homo sapiens
atttctccccagactcagtgggktagtgattgaaatttgaaagcttatggggggaataaagtccaaaatagtattgaggaaaatgtgtcttgagtctgttggctgcaagaagcccttgctttcccacaacacccaatccaccttcatccatagtctcttgataaacaccatccagccaaaatgacttaaaaataaatttaaatacattgttccatgatcaaaatggttcttttctccctagccataaaatattttattttctgttgttgtagtatatgcttaatgctttggctaagattgtcctcctttgtaagacatcatttagaaatggaggaacctgatggtatagcctaatttgggaaataggttaggtaatttctaggtttctttttaattctaaaattctagaatttatatgcattaagcatataatcattgcttaatgactgctaaattattgctgtgctttaggtgaaataaggcatggtatgtagctatgcacagtattaggaatgttggcctttggaatcttcttgaaatggaaaggtaacactcatcctgttcccaaactggtttggcctctgaacacaaaaaagaacttatttctaataataattctagttaatatcatatttgccaaacttatgatttcattaattcaatgcaaaagcactcgccaagtgtatcagggatgatgaaatgagca

SEQ ID NO: 900311 - DNA, 655 bp, Homo sapiens
agaaacggaaggcaaaaaaaaaaaaagagcaggtgttgcaatcctagtctctgataaaacagactttaaaccaaaaaagatcaaaagagacaaagaaggccattacataatggtaaagggatcaattcaacaagaagagctaactatcctaaatatatatgcacccaatacaggaccacccagactcataaagcaagtccttagagacctacaaagagacttagactcccacacaataataatgggagactttaacaccctactgtcaatattagacagatcaatgagacagaaggttaacaaggatatccaggacttgaactcagctctgcaccaagtggacctaatagacatctacagaactctccaccccaaatcaacagaatatacattcttctcagcaccaccctgcacttattccaaaattgaccacgtaattggaagtaaagcactcctcagctaatgtaaaagaacagaaatcacaacaaacggtccttcagaccacagtgcaatcaaattagaactcaggattaagaaactcaytcaaaaccacacagctacatggaaactgaacaacctgctcctgaatgactgctgggtacataacaaaatgaaggcagaaataaagatgttctttgaaaccagtgagaacaaa

SEQ ID NO: 900312 - DNA, 658 bp, Homo sapiens
atatccctgataggagagccttccaagaaagagaaactccatttctggtaycaaagaaggaattgtagttcaataattaggaaaacaacttagcaattataaggacaataagaaaaaaagggccttaagaaatgtatgtgttttacaacttttactgaattctgctgtagtataaaaacacacccgaactgaaggtcgcagtcaaagcagctgcttttagagagtgtatgttgtgaatgaaattgctcagagtatttcacagagtaatactcatgaagtcagtctgatgaaattcctgttcaatcttactactaagaggagtcttagttcttcaatatttgcctatattttaacttatggtcatccttaattgatatactaaatttatttctttatctgttgctagaaaggttagggatgaccttgaggctctgatgtcacaaatgtgtgaggagagattgcaggcacgttagtctaattcatggccctgtcaatatcctcatgcttgtcttcctattttcgtttggctaacccttcagttaagctcagtgactgcattttgttaaccatgttggagcagaggatttcttgcttcatctagttcctctttcctggtcggggtaccagggcttctccttctggtttcttaactcctaac

SEQ ID NO: 900313 - DNA, 641 bp, Homo sapiens
tgttttctaatcacaatagaactgaattagacatcaattattttgaggttaggaaaatttccaaacactcgggaactcaggaacaaacaaataacccaggggttaaaaaggaaatctggaagcaagtgtcaaaaactgtgaagagtttgagatactaccctaattaaaaagctcacggaagtgttttgctctttcatggatactaacagaaaaggaacaaacaagagtgtcagacaaggacagattctctcagcatggcaagcactgtgagcatctaggatgtattcattccctttgtcctctaagtcccataggatgacgcagcagcccaggttgatgctgtgcatgatgcgggtgtagatcagagctgagtagccctaaggttagggaacttgaatattttgcaggggttgaaagcaaacctaccccttgccttggagggaggcattatctttattagactagagagcaaacgcacctctggagcaataggatctctagattttatggctgttygctatttaaatatacgtgaatacctagtctaaaacaaaggggcttacttacaagatgtataggaatataagagatccaaggcaaattttacctaacagaggaaccatcaccacttacataaaaca

SEQ ID NO: 900314 - DNA, 620 bp, Homo sapiens
ggaaagggctcatgtgctaaagggcctccaacatcctgcaaggccgtaagaaactcgagaattacaactcaccctgtgaaggcacacctgagctgggtccttctcctttccctctttcatcatggaggatctagagtggtcaatgggtggggaaggaggattagagcacaagttgggggagaaagagaaagccaacgatgttcttgcccctgtcctttcgcctcccccagcttccaggttaaacctgacccagggaggggaggtaggaagttgtggtatccggagaggtgtcccagtggaaacaagagcctctgcagaaaagacactctgtgatcacattgtaccacaaaatgtacacatgccataatgtccctacaatagagaaaactcactaaacagagtagaatagttagattaattatgttgcaaaaaaatttcacacaatattatgaagtcattagaaggtcacgcattgattcattccccagggatttattcaacttsccccccacccgcccccacccgccccgcccgccacaggcaagcacccaggcactatgccagtgctggggttaaagtgatgagcataaacaaagagggttatgaagcaaacacaaatg

SEQ ID NO: 900315 - DNA, 620 bp, Homo sapiens
gtggtgaatatctgcaggtggtctggtgatactgtgggccaagggcagaggatctccaggaagggcagtggtacygtggatgtgtagctggtgtggtatctgcagcctgagattttttttgcccagaagactgcactggggactgcccagctcaaactccccaaactaagtcttcctccagtatctaccccacgagtaagccagaccagctagtttcatccccagccttctgtgtccagatcacagtggagctgttccaggcattacaggctgcagtgctttatcaggaagaagctgcagctggctgacaggctatatcctccccagatcagtcttctggaagggggtggtgtccagctcccatgccagtgcatgaacttgtgcctcactcttagtgtgctgagagtgggcactgctcttccactcgaggccacagatttcatctcacccctgggcagtgtgctcaaatgctgggagtttgggtctaggcctgtggctttgtcctccatcccctcaagagcaagcactggctgtactggctgtactgcagggggagggacaaagtgttctcaggccactggctaaacactcagcagtgccaggagaggtggtgctatgtg

SEQ ID NO: 900316 - DNA, 644 bp, Homo sapiens
tctgatgccatccttacaatcttagcctgaaattattataatttttttctatttaaatattttttggtttcattttggccaaagcagttgttccatgataaactaagatcacatgtgtttaacatgatttaacaattggagtattttctgttttattttttggcatagctttgatactaagtttttatatgtcttggtaatcatgctgaatttatcctactattagcaagtaagtccagggacaaagtcaggaaggctcattgttaattaaagcagtatgaagtaatggtccataaatgtggttataaatacatgtactatatttgttaaatttatgaaatttatagacatttcctatacaccaaaaatctcaagaggttgacatgaacaaaaacattaatttagttgtgggaaaaggaaagcaaaagtaagtttaccagagaaagatcttaactgcagaatccatttctgctatctttgcctctattctatttctgtttatttttatgtaaaattctgtccttgaaatcttagtatttaatttactttgtgttagtaataatttatgtttataataaataagtaaagcttrattgtcagagttagatttcttgacatttgtgtttttatgtctcatctgtggt

SEQ ID NO: 900317 - DNA, 651 bp, Homo sapiens
tgttacttccttctggcccctcaggaagaaatttagaacaaagaacaacggtcagagttcaggtctcagctccccytttcagaggtctacatgccagtgggttcatttgatgggtgtccaggtttctgaaaaacagctcagagacccatgttaagatgttatctttagtttctataggtaaacaaacattttgtggctctgctttaagctattattaacttcttgcttatcaagttgtttatatacttctcaaggttggatagatgctttgaatttcccttgaaggaactcaagattttcctttatttcatgcctgtgcgggattggggggccaggggtgaggcaggcccctaagggagatccttgcttcatcccaatgcgtggaagcaggaataaaaatagaaagctcaggtaatagtacaggagaagaatgtggcttgaactaggagagtaggggtattgataaaagaaagaatttggttctgagcatatttcaatgatagaaatcaggatttcctgattgtttggatgtggagtataaaaataagccaggaggtttaaagtgttggacatccacaactatagaatggaattacctttttcagaaatgaccttacaattttctaaagagtaataggaaaagaagttaag

SEQ ID NO: 900318 - DNA, 651 bp, Homo sapiens
tgttacttccttctggcccctcaggaagaaatttagaacaaagaacaacggtcagagttcaggtctcagctccccctttcagaggtctacatgccagtgggttcatttgatgggtgtccaggtttctgaaaaacagctcagagacccatgttaagatgttatctttagtttctataggtaaacaaacattttgtggctctgctttaagctattattaacttcttgcttatcaagttgtttatatacttctcaaggttggatagatgctttgaatttcccttgaaggaactcaagattttcctttatttcatgcctgtgcgggattggggggccaggggtgaggcaggcccctaagggagatccttgcttcatcccaatgcgtggaagcaggaataaaaatagaaagctcaggtaatagtacaggagaagaatgtggcttgaactaggagagtaggggtattgataaaagaaagaatttggttctgagcatatttcaatgatagaaatcaggatttcctgattgtttggatgtggagtataaaaataagccaggaggtttaaagtgttggacatccrcaactatagaatggaattacctttttcagaaatgaccttacaattttctaaagagtaataggaaaagaagttaag

SEQ ID NO: 900319 - DNA, 624 bp, Homo sapiens
aagtcataatcttacataaatccctatgagttgtggtgaaatattcatttgttgcagttgcagagagattcccaactattgacttcaacagaaaaaaaaatgttcaaactcatttttataaaggcttaggagatgatcagaaataaatctgaaattaatttatgacttaaaattgaaggcaaatatcattttgttaaaaaaaaggaaaaatcctaatttggtatgtacagttagtgttctactcaaggttccaaaaactaagtaagacacagtaagtagaacttaaaaacaaaagttaattagaggcattaacttctccttacaggccagctttcacatggttttatagcatgcttgcctgcttctaagaacatgtcacctaaataggtaatgctgctgtctcctctcacttatttgaagtcacaatagactactgcagtgatgactgaaattataccatgtttttaaagagtgctttttactatttaaaaatgtttcccaaccaggcrtggtggctcacgcctgtaatcccagctatttgggaggctaaggtgggataattgcttgagcttaggagtttgagaccagcctaggcaacatggtgagatcacatctctaaaaaaa

SEQ ID NO: 900320 - DNA, 605 bp, Homo sapiens
cttcatcttatacaaaaattaactcaagatagaccaaagatttaaatctaggaccygaaaccataaaaattctagaagataacgttacaaactcttctggacattggcttaggcaaaaaattcatgaaaaagaacccaaaaacaaaggcaacaaaaaccaaaatggataaatgggacctactgaaactaaaaagcttctgcaaagcaaaagacatcatctctgtcgccagactggagtgcagtggtgtgatcttggctcactgcaatctccgcctcccgtgttcaagccattctcctgcctcagactcctgagtagctgggactacaggtgcccgccaccacgcccagctaatttttttttgtatttttagtagagatggggtttcaccatgttggccaggatggtctcaatatcttgacttcatgatccacccacctcagcctcccaaagtggtaggattacagacatgagccattgtgcctagctgctttttttcctaatctttttaaaatcagggaactgaatactttcttttaaaaaaaaagttttcttccactcctgtttctattcacacacacaaactaacagaagtatacacacacac

SEQ ID NO: 900321 - DNA, 610 bp, Homo sapiens
aaatttactaccaaaaatgagctagctrtgtagataaacagctggcctattttagacacacaatgacacttgctaaattcattcagtattgattgtggtctctcctgtgctaagcatgaatccaagcactggggacacaccagtgcacagacagaaaaggccctgccttgtggagtgggaggggcagtcaattagcaaattaacaaaacaaccccagtttcagcatttctggcagctagaactcagtctcctaagcatgggcccactgtccactttagtttgaaaaaaggaagacttcagtcacataccatactcttcgaaaacataattccaagctgggagtgttggcacatgcctgtagtccaagctacttgggaggctgaggcaagaggatttcttgaatccaggagtttgagatcagcctgggcaacatagaaagaccctgtctcaaaaaaaaaaaaaaaaaaaaaaagcaaattcacaaaattccaggttgtgtctaccatattatgtctccaaagtaatggatacaaactgaacaaatcactcacatatcagatgttttcctagatcagtagtctccaaaggttggtgcatgcaacccagtgag

SEQ ID NO: 900322 - DNA, 595 bp, Homo sapiens
tctcagaatagaactagtcttattaactagacaaacagcgatcagtcttgatttgaggaagrccaatctaaatcaatggaaagcctaaaattattttattttattttattttaaattttattttattttattggtgagttcttgctttgttgcccaggctggagtgcagtggcgcaattatagctcactctagtctcgaactcctgggctcataagatcctctcacctcagcctcctgagtagctgggacagctggacaccaccatacccagccaattttttactttgtagagacagggtctcactatgttgcccaggctggtcttgaactatttctttttaaatataagaagatgtattatttttacgtaaatgaagcaactgaaaggagggaaagatgaggaaggaactaatatttattgagtatctataggtaccatatgctgccatataatgaagtagctagatattctctgtgtgctaactcagtctttactagatccccagagggtgaagaaggaattggggcacagagaaatcaagtgatttgaaatcccttgatttaccaaagctcacacagctattaagtggtgag

SEQ ID NO: 900323 - DNA, 627 bp, Homo sapiens
gttctatagatatctatcaggtccacttgatccagagctgagttcaagttttgaatatccttgttaattttctgtcttgtcaatctrtctaatattgacagtggggtgttaaagcatcccactattattgtgtgggagtctaagtctctttgtaggtctctaagaacttgttttatgaatctgggtgcttctatatttggtgcatatatatttaggagagggatagttagctcttcttgttgaaattgatccctataccgttatgtaatgcccttctttttttttaatcattgttggtttaaagtttgttttgtcagaaactggattgcaacgcctgtttttatctactttccatttgcttggtaaattttccaccatccctttattttgagcctggtgtgtctttgcatgtgagatggatctcttgagtagagcacaccaatgggtcctggttgtttatccaacttgctactatgtgtcttttaattgggatatttagcccatttaaatttaaggttaatattgttatgtgtgaatttggatcctgtaatcatgatcctagctgtttattttgcagacttacttatgtagttgcttcatagtatcattggtctttgtacttcagtg

SEQ ID NO: 900324 - DNA, 568 bp, Homo sapiens
tttataaaatattttaatatttgcattgactaaaacaattgttttggccaagtttaaatacagcatgtgtataaagmctttgaactatacattttacatgatcataatttaaaaaatatgtgtatttgttccacttatagtaaaatataaatacttcccattaataattacctgtcaatacagacttagattgtttcccattttctttcttttttttttttttggctactataagcaacatggtcatgagcagtattaaacatcttttggtacacattttcaggtatgtctctaggcagtatacttgctaggtaataacagcaaaaattcattttataacctagtaccatatggttttccaaaattgttttaccaattcaaatgttcacattcgtgtacattgaatgcatttattcctaccactctagtagatgtaaaagtgtttttttttttttcgcattttccttaatactaattgagttacatatctttttatatgtttatatatcatttatatttccttttctgtgacacaactgtttgtgttttggcatcttttttcctcaga

SEQ ID NO: 900325 - DNA, 645 bp, Homo sapiens
gtaaacttgctttctttccatagtatgaatagcccaatggatatttttgtaatgatgaaaaatagtttatgcaattaataacccatgttctctttttatcaggttagtagcagggagtgacatcatgagagaaaacagtagccagggataatggaatgtttctaatgaccctttgaataccatcttcataggctggggcacaagggccatattcttgccttcccaccccttttctcagtgtcttctcatggagttgtaaaaataataaaaaataatttaaagattaagaaaattacgttcgaatattggtgtttttttttttttctagatatcaaaagggtggtcagtggcccagctaggaatctacgactcatctgacaacagtctctgtctccatgtttgtgttcctcactcgttccatgtatacacccccataggtacacctgctcagtttgcaatttacaagccatgcatttctatgaatctttacttgggttcattctagctccccagtagtaatagttgtctcctccttaaaacccatcatcactgcctgcttttaaacaatgactcctacttgacagstgcacaccacggttacagtgtacctaagagtaaggcacgatcttacccgtgagtacttca

SEQ ID NO: 900326 - DNA, 645 bp, Homo sapiens
ggaaagaggagctgttctaagttagacacaggcatggaatattgacttcacagagaggtacatcttatcatayaagaatttctttaacaaggaaccactaaaaattcagagacaaagaaaagtagaagtaaaaattaaaaaatgaaatgaagtaagtgcagaacagattaaatcagcttcctagcactcttccaacctgtgaaacttttatagctccctgaaaatggataagaaaccaaagaggtggcaaaaggagtttaaataaaaactgtaaagtaagtagggaatgtgggagaagctgcagtgaagaaagcctacagaataataaccctcatgctcttgactatggtaaggaagttgtctggttccagacactagaacctgtttaccagacagattctgcaagggaggatggactgtgtggaaagactgtttcgtgatggtgtgaaatatcttttatgatttttcaagtatcttacatttattccttaccaaattaattattctaatgagtgagtcacctctctgcatgttcagtacctaaaaaggagttctccatttgcagttgattatttattttaaatgatgcttcactttagaagaaatatacactgtatagatgtaggtcagtctttccatgacttg

SEQ ID NO: 900327 - DNA, 626 bp, Homo sapiens
cattgacaccaggcatctaaggccaggacaaagctctagtagtggaagtgaattcaagtcagcatgtttgccagcttgccccctttctgctattcgcaggttagactaaattagagatgtttaagatttacaaaaatgccttaaactattttttgtaaataattttgttccccccaaaaactataaaatctgcatgcatcagtaataatgtcttagagaaacagtcttactttgtcttccaacttacgggcacttagaatcagaataatgttttggcaaagaagccccatatctaaaatattttctaaactcctaataactacaatgtcagcaacaacaaaaacaaaatggtcttggtttttacattttgaaaaagtttatggaataggaaagtaagtcaggttcaagcaataggaaagtaaatgtaattaatgtgttcaggttttgacagaagatattactgacttaagtttccttcttaattttactttgacatgttattccataagcacattgatggggggcattaatgaaataaactacytactccatcagtattcagcacaagaaccgagttcagggagttgagaaatcctgatcattggtaagaagcttggtatagtggc

SEQ ID NO: 900328 - DNA, 584 bp, Homo sapiens
ttttgcccattcagtatgatattggctgtgggtttgtcatagatagctcttattattttgagatatgtcccatcaatacctaatttattgagagtttttagcatgaagggtggtttgagtacccagtgctcagtaagccaaacactgacacattagcacttaggagcagagaatgtttatttgatttggccaaagtgaaggggcaggaggcaaactctcaaattcaacctgcatttgaacataactggggattttatgagtaagataggaatgcgggacatgagatttctggatgatcaaagctgcttgcatcgctcagctgatcaaacttctggatgccatcaaggaggtctgcatgacctaaggatcattgttgtttaagagaaaaacatgttctttagtcttgcaagtagcccctgggggttaaaatatgaagttaatcaattattagtgtctaccctctacctaaatgactacatgacagcaatcatgaatgaaagacgaaaaggrcaaaaagaaaggaaaataagtaaaacaaacatcttataatttgtataatataggctcaattgcaatgcccttta

SEQ ID NO: 900329 - DNA, 582 bp, Homo sapiens
agattccccatataccccctttttttttttttgagacagggtctcactctgtcacccagtctggagtrcactggcatgatctcagcttactctaacctccacatcccaggttcaagtgattctcctgcctcagccgcctgagtagctgggattacaggtgtgaaccaccacacccagctaatttttgtatttttagtagagacagggtttcaccatgttggccaggctggtctcaaactcctgacttcaggtgatctatccttctcggcctcccaaagtgctgggatgacaggcatgagccaccatgccgggcctcatataccctcacattctcacatgcagtgacttccttccatcttccaccagacaggtgcctttgttacaactgacgaacctacagtgacacatcatcaccacccaaagtccacagtttacgttagtgttcattcttggcgtactttctgtggatattccatttcattatacatttgtccttttgcacattgtgacggggttgttccactcttttttctttttttttttttaataagagacaggggtcttgccatgttgctcaagcta

SEQ ID NO: 900330 - DNA, 622 bp, Homo sapiens
gatgcatccctcttctccctaaaatttagaaaactgaatggagtttgaagaatgtaaagatggtttaacatttaaaaatcaatgtaattcaccatattgacagaaaaagatgtatatgtatacatacacaccacacatatatatattcacaaacacgtataaatatatatacacacacatatgatcttcttaatacatgccaaaataaaagtaatattgaatacaaatttatcattttaaaaatgctctgttaagctagaagtgccagggaattttcctcaatgtgacaaagggcacctatgaaaagttgctttcaaaatcatacttaactataaaaaaactaaatttttcctctctaagatcaggaacaaagcaaaaatatccacagacaacttttattcagtattccattggaggttgttaccactgtaataaggtaggaaaaataaaacatacacattgaatattaagaagtaaaactgtccttattaatggattaaatgattgttattacaggaayttctaatgaattcacacaaaacaacattataactaataattagctttttcaaccttatacagggagaattttaaaaatcagttgtatttttatatgctagca

SEQ ID NO: 900331 - DNA, 620 bp, Homo sapiens
ctttctgaattgaaaacgaaactgaattttttaaaagatgagtaacaatacttcactattttaaagctattgtcctggtgtccccctttcatccacaacaaataaatttgtagaacacaaagagctaaagataatgcttttgactctacctattttttataatttttagaagaaaaacacatagcctaatctttttatcattttatttattcaacaaatatttattgattgaacactatatgcaagaccttatgctaggtgttgagaattcaatggtgaacatagcacatatactctctacttttttgaagtttgaaatctgaatggtggaacatttaacaaacaaataaaataatatatagaatactatacattgactgctgtaaggaaacaataggatgctgtgatgtgttgcatgagagatgacagctgattttttttataatgggtggaaaatatatttgtgaggaaacgaatgttccataagagccagtcaggcaaataaggaagagtactgcaaaaagagtgtatatgacatgcaataatcctgatatgggaaaaaataayctatctgaagaactaaagatgagcaatatggtgagttaggtcaatgtggtgga

SEQ ID NO: 900332 - DNA, 622 bp, Homo sapiens
tcaagagaaacctttttagttktaagaacaacataactttatacagaaaaagtaagcattaaagcactattattcaatgaacaaatatttcttaaacaactctatgcaaaggatttatttaagcatcctgttcgattactacagaggatagattttgtttataaggtttcagttttgttttttatatgtgtggattgaatagcttctaatctccaacttttcttagaaggatattgattcaccttttgaaaatcagagctattaaactctcagtttatgtgactggggcgttattgactttattgccattctaaggataagcacgtgaccaccctctcggtcaagaatagaattttatatctcctttccagagaaattggttcatagatttacccaagttagatctatggcagtcttttcaggcaactttgctgaaactattaagaaagaggcattgttattacttcttacatgaactattaagatacggtcatcaagcttctgggggtcaccattgggtagagtaccagcttggaaataaaaccaacatggaagagagcacagctgagagatgcaaagggagatctagccttgataataatatctaagcagctgttcttct

SEQ ID NO: 900333 - DNA, 662 bp, Homo sapiens
agaccatggactgatgccggaggaagatgggaaccttgcatggggtttccgagcaacaagactccttacagscctcaagtggttcctggggaaggtgtgagctaaataggcatggagtggcctactgtcgccatgaacctctggaatcctagctgcagaagacctcataacccccacagacatttgagctggcagggaaagctgcttggaaggttggcagggacagaaatcaagcctgtagggagcccaaagggtttggcatgaatacaactgcagtggagcacagctaaggatgcccatatgccaaggattgccatgctcctctaggtggctttggcttttgttgactgtcaaatatgaacagaacagggccatcttgcctgtgggacaggacagccactctcatagctcttttgctggcagatcccaccttcttattcaaattcatgaaattcaggtaactcctgtaagatactactcaagatgaccatccccaagacacagtcctcagattctgcaaggtcaatgtgaaagaaaaaatattaaaggcagctacagaggaggggcagatcatctacaaagggaatcccaccaggccaacagggggtctttcatcagaaactctgcaagtcagaagagattgaagaactgtattcagcatc

SEQ ID NO: 900334 - DNA, 642 bp, Homo sapiens
tctgagcctccagcgaactgtaatctaaattttgctggtggaaggttttacctcaatattgatggtkgctgactgatcagagtggtgatttctggcagtatgagtgcttgggacaatttcctaaagtaagacaataatgaagtttgctgcattgattgctcctctcatggaatatttcattgtagcatgaaatgctctttgacagcattttacccactatagaactactttcaaaattggaatgaatcattttaaatcctgccactgctttttaaaatatgttaatgaaatattttaaatcatttgtgatcatttaaataatgttcacaacatcttcaccaggaggagattccatctcaaaagaaaccaatttctttgctcatgcacaaaaagcatctctttatccattcaggttttctggtgatattgtagtaatcagtcacacctttaggctccatctccaattctagttgtcttgctatttctaccacatctgaaatagcttactccactgaaatattgagccccttaaagtcatccataagagttggaatcaacttctttcaaactcctggtaaggtggatattttgacttctcctccgtaagtcatgaatgttcttaatggcaactagaagagtgaa

SEQ ID NO: 900335 - DNA, 671 bp, Homo sapiens
ccctttcaggttagcgccttccctagagaaagctaactaagtgttttgacttaaaagatctcctgctgggtcacaggccaaatagtrgtgagtaaaagtaagcaaaagctagtgaatagtgttaaaaagatttttcaactattctgcttaattgtgtttaaaaggtctggcagttctttccccacaagaatctgtaaagtgaatgaaccacccattagtggtcagttgctgtgggcaggggttgggggagctgtttcactgcatcaaatacgtaggccaagggcagatgctctaaaaacgtgaaatacaatagaataaaataaatttgtataaatagaattataaaaatatgtaactctaaaaaatgaaaataaatatatacataaaataatatgtgtacatacataaataaaaagtcaaccacttttcagcacacacaactgaaagtactatttgagtctaaaaggccgctgtgaaacctttggcagagtaaagaaaacttgtttaaaattcctggtagaaacacttaaaaatatgttggaaactagaggacaaggagaagatctaagttaaggaagaagaagacagttgcattgcagatcccgagttacgggctgtgggctttctcttgcagcatggagggcccttctcccggatggtgctgtgagtgt

SEQ ID NO: 900336 - DNA, 566 bp, Homo sapiens
tgaatgggacttcactcatgatttggctctctgtttgttatcggtgtataagaatgcttctgatttttgtacattgattttgtatcccgagactttgctgaagttgcttatcggcttaaggagattttgggctgagatgatggggttttctagatatacaatcatgtcatctgcaaacagggacaatttgacttcctcttttcctaattgaataccctttatttccttctcctgcctgattgccctggccagaacttccaacactatgttgaataggagtggtgagagagggcatccctgccttctgccagttttcaaagggaatgcttccagtttttgcccattcagtatcatattggctgtggatttgtcatagatacctctgattattttgagatacatcccatcaatacctagtttattgagagtttttagcatgaagcattgctgaattttgkcaaaggccttttctgcatctattgagataataatgtggtttttgtctttggttctgtttatatgttggattacatttattgatttgcatatgttgaaccagccttgca

SEQ ID NO: 900337 - DNA, 707 bp, Homo sapiens
tctttgctttgttttatttcataattctttycacttgcctaatctctagggtttattattaacttcttcaggtgttcctccaggatacagcagaacgtaatttaaggggcactcttagccttaatgaatttcagatcaggaatgaaggaataaaagagacctcaaaaatagctctagaagacacttttgacagtttccacaggtatctattacattctttctttaaatgtaaggttgcctgttgtggtacacttctactaccaatgtttagaaagagaccaatgcttttaacaggatgtcagaccacaggaaaattcatggtgtgacgcatgcgcagcaacttgaatgtgccttataaaatcccaggtttttcatcttctggtgttccaggacatttcctgattcattgtcatacaaattgtgtttttgcccagatgatcattgccacgtttctattatgtactcatatctccaggttttcaattgcaaacaagtcactcttggcaggcagggtcttttcataattttttttttctggtttgttttttgtcttttttgttttttaaaccttgccatgtttttgattggtttggggctctcccatgaatctgtttttaaactctgaatagaattcacatatgttcccctaggagagttttgttttaaagggctaacacaaacagctatgcaaatttctgatctttgtg

SEQ ID NO: 900338 - DNA, 668 bp, Homo sapiens
gatggggaagaaatacagcccttgtgcctgggaggttgtcagagcagaaatcatgagatccttctctttttcaacaaacttgcaaaaaggattaagaaggaaggattgaaaactcrttcaacatggaaatgatcctcattgattaatacatcatctcacactttcatgagttcttccatttcaaagactcacttctataaccaccacaagttgaatcaaaaatttcaaatgtttttcaggagtgtaaagaagcatcgtgtttacctgtgcaggcactagtcctttacagatgaccatgctgatgtctctattcatctatttatttaaatatttatttatttaactatttttaaggtttaaatcatgttttatgtaatatcatgtgtacctttacattttgcttaatgtaacaatatatgttcttcatatttagttaatatattaacttccttttcattaaatttttactatacaaaaattttcttgtgtttgtttattttttaagattaaataccaagcctgactgtataacctgacttaaaaatagatgatttaagtaagttacctatcataattttattcaagttatagaaaaatatatttttctataccacgttatatgttgccttcaggatataaacttgaacataaaaaatacagttcttgtt

SEQ ID NO: 900339 - DNA, 605 bp, Homo sapiens
gatggggcttgttttttctttgtaaatttgtttaagttctttttacattctggatattagacctctgtcaactgggtagactgtaaaaattttctcccattctgtaagttgcctgttcaccatgatgattgatagtttcttttgctgtgcagaagctctttaattgatgccatttgtcaattttagctttggttgcagttgcttttggcaatttcatcataaaatctttgcccatgccgatgtcctcaatgctattgcctacattttcttctagggtttttctgcttttgaactttacatttaagtgtttaatccatcttgagttaatttttgtataaggtgtaaggaaagggtccagtttcagttttctgcatatggccatccagttttcccagcaccacttattaaatagggaatcctttccccattcctaaagtattgagaaagagattctcttttccagtttctaattttattttatgaaagaaatgtgtcagtttttactgacatttaacagagtattaatcacaataatgatcaattactaytgtaaataattttatattttatgctttaaatatataaaatattaaatgtatttatat

SEQ ID NO: 900340 - DNA, 658 bp, Homo sapiens
tcggttctgtatgtctgaaggccaattctcaatgaggagcacatccgtgattcttagaagctcatgctcccagaactaggagatgcattattgcccctgatatggggatctaggtgtagtgcyatagtatctaccagaaaaaagaaataattatttctagaatttttatgactcccccaaatcttaagttatcctgtatttttataaactttatgggtttaaaaaaaagatttccacttctggccaagatgggataacatgaaccataattatcctcctgcctaaaataactcccccaaaataaaacaaaatatctaaaacaattgtcatcaaaacactggatgctaggcaacaaaggatctgcagagtgtcccccccaaatattgagcagagttctagttagcacatttgtgtgaggaaagcacttgaagctggcgaaagaaccacctgaaaaggttaaagggaatagcacccagcactcaaagagggtgaggaatagtgcctgcctctaacaggcttgaaaaccttatgatgtgtgggccattgggtagagtactcaaaagggtttgtttgcctcagtagtggggaaaaaaattagttctggaataaacacttctctggtcctgtctcatgtatcttaaatccaagaactcaaagg

SEQ ID NO: 900341 - DNA, 693 bp, Homo sapiens
actgaatatgagaatgtcttaaatttaattgttttcaataacttatcaatggaattcagtgatacaaaatgttgagaaggatagtttatattatttttcaggtgttgttattgttgagayggtgaagaatctaaaatcctaccccacttgaaatcatctagttagcctgccataattttatgggtggtgacagaaggcatgagattcctgggtcagagacaaagaaatttacttcttagagtaatagtggtaaccagagtatcaacatttgtgagggttttctgagactcaatcccaaaaggcaatgcaagcgggatatatgacacctgttcatgcaatgggcagtgctactggggaggaattctgagcattatgaaagaaccaaactcttttataacgggcagtaagcttacctgacagtaagccccagaagaagatattatcttcattgtacttggcagaaacaaacttgccctttcctcggagagaagtattatatttatattccaaggctattttctttgcaaactttcttagaggattgtttagggaaaaaaaggcaatatttacttatttatttatttacttatttatttatttatttatttatttaatttatttttgagacagattctcgcactgtcgcccgggctggagtgcagtagcatgatcttagctcactgcaaactccac

SEQ ID NO: 900342 - DNA, 693 bp, Homo sapiens
actgaatatgagaatgtcttaaatttaattgttttcaataacttatcaatggaattcagtgatacaaaatgttgagaaggatagtttatattatttttcaggtgttgttattgttgagatggtgaagaatctaaaatcctaccccacttgaaatcatctagttagcctgccataattttatgggtggtgacagaaggcatgagattcctgggtcagagacaaagaaatttacttcttagagtaatagtggtaaccagagtatcaacatttgtgagggttttctgagactcaatcccaaaaggcaatgcaagcgggatatatgacacctgttcatgcaatgggcagtgctactggggaggaattctgagcattatgaaagaaccaaactcttttataacgggcagtaagcttacctgacagtaagccccagaagaagatattatcttcattgtacttggcagaaacaaacttgccctttcctcggagagaagtattatatttatattccaaggctattttctttgcaaactttcttagaggattgtttagggaaaaaaaggcaatatttacttatttatttatttayttatttatttatttatttatttatttaatttatttttgagacagattctcgcactgtcgcccgggctggagtgcagtagcatgatcttagctcactgcaaactccac

SEQ ID NO: 900343 - DNA, 645 bp, Homo sapiens
tctgggaattaggttcaggaactacacaatattaaatgaaggggaagaaactctatgaatttgtttttgtttcttttttttttcacttcctatgctacatacgcaaagaccaatggttmttttttaagatattataaaactattcccttagcttttataacttgtgtggtgaggagtagaactgtacatgcaatttttactaagcctgatttaaatcaagttttagaaattggatgcagcgctctttccaggcaatgaaacatgccttttgatgttaaattggcaagactttcatgaatccattaaaaatttctttatctcagatgacacatgttctgatttggattttaattcttacatatgcaggtaaggagctacttgacataaaggaaatggaatttttaccatcctagaacaccttctcagcagattctttttttcttttcttttaagtacttctgtgtcacataatgacattgaacttggttagaaagtgtcaattagccctagtgatgagtgtgtatgtctgtgtatgtgtgtgtttgtataatcaacataatagtgtccaagtacacagattgtagagtcagagggcttgtgcccaaaactgagccataccgcatgcttaagtacacagatcttaga

SEQ ID NO: 900344 - DNA, 658 bp, Homo sapiens
ctgcctttgctctattctgcccctccatttgctattgacaagcagtcttccatagtgagacagacaattttgcactctgcagctaygcttttgattgggcatattctagtgcagaattcagaggcgccccacccttgatccctagctttccgttgtgcttgttcacattcacaagtcagcccctgttcacaaaagcttggatctctaggcgctgtggatagcatgtgaaaaatctggaaagaaaaataattatccattttaggcatgtctgaattataaagtttaagaaagtatgtagcaatagatgagtctaaaagagttatgcagttgtcacgtcaggaagtatcttttaaagccatacataaaactttatacactattccgtgagaaatggggaaatttgaaatgttttaaatagtgcatcaacactttcaattttggttaataaagtgaacaaaaactgctgggtggaaaaaagattgaaaagagactaaagtataatttccagacaggaaactattgcagtaattcatgtgagagataatgatggagaaagggatatgtttgagcaaatgggtagcgcagtttactgaagcaaggagcacaaaagacaagtcaggtatttttctcagtaaagtgaatgtgaagagccattttc

SEQ ID NO: 900345 - DNA, 632 bp, Homo sapiens
gaaactattgcagtaattcatgtgagagataatgatggagaaagggatatgtttgagcaaatgggtagcgcagtttactgaagcaaggagcacaaaagacaagtcaggtatttttctcagtaamgtgaatgtgaagagccattttcttgagtcatggacgggaaagtaacaaatctcatattcatgcagagttatgaatcatgagacttctaatgtaacacttttaaaaaaaaaaccttcttcgcaagggtaatttgcagtgcttctgaataattacatacaacatgtcaagggttctaattacatatttggtcctcgcaacaagtcaataatctgcattgcacattttattctgcaggttttacaaatatctttacttttcccttgggaaaactgtatctgaggcaggttattttccaggcccaagaccacgcctccaaaaaacacaaaaatttcaaaccttgaatgcaaaatcaagttctcagatataaaattatgtgcttttcagtctccaatattgcattgcctctcaaaagcaactgttaaagactacccaactattacatattgtctgattcattcaaacagttaaatgttactatttaaaaaccatttctcactgacattaatcc

SEQ ID NO: 900346 - DNA, 601 bp, Homo sapiens
agaaacaaactaacaaatgaccacatattaaatgatcgtatttgtattaaatgttcggaatgccaaatggctaaagacagaaaatagattaatagttgctagtggtttggcagagaaaagaaacggggagctactgctaattgttatttagtttttttcagagggcggtgaaaatattctaaaattcgatgtgatagttgcataagtctgtgactacaataaaaaacactggatgccacatttcaaatgtgaatgttatgggatataaattatatctcaatgaagctcctaagaaaaatgtattagaggagtcgtagaacagaagctacaataaaggaaagcatgagttctgaggatggacatggcctgtaagatgagtaggacagaaggtttagaaatcacagaaatcactctaccccaggtgactgaagtataccaaaggctaatgggagaatggtctgtttctctgtaccaagtctgagtgtgtgctgatctgcagcttcaccagcctcagaggaagactagtttctcatgkcaattgttctactgcgtctgaaactttataaatcagacacagctccatccttggcctcagaatgtt

SEQ ID NO: 900347 - DNA, 577 bp, Homo sapiens
aactaaactcaaactccaagcatacaagagctgggtctacgcttgctcattctttaacaccagaaactggcatgttacctgcagattctatgattgcttgttgttgctgtatttcttagattctctgttggactcatctgttattccatttctgtctagtattttctcgtttaatcaagaagcacttgattatattttgccacatggaatagcaagtttttgcattattcttctgttttcaagattttgttggctattcttgcaaatatttttcagatgaacatcatcatttttactgatacgaaaatactaaaacaataaatgcagtgaaagaaatagaaactattaggctttgaataatcactaattttttatatgctgtattattttagtgaagacaatattttcaagcagtcccttagtatttggcatttgatttgtttacagtttttttatattatcaacattgtgaccatatgcatgtgtaatgtagatatatatatatatttatttatctatactttatgaggcttagatatattaaaaaaaaaytatatctggggagagactgcctctt

SEQ ID NO: 900348 - DNA, 613 bp, Homo sapiens
attagcatttaaaagattccactaaaagataatgaatataatatataattttcatgccaatagaaggcaaagtatatagtaaaacttgaataatcaaataaaaagttaaaaaatggactaaaacaggaaaaaacttggtgaatataaagcataaatatatatatgtatataaattacatcagggaaataagtaaatatactgactgaactattaaacttactaaactatagatcttccatattgaattttttaaaacttaatttacgggacatttaaaagagatacgtaaatgttaaagacataaagtagtcaagaaaatgctgaccagagaaaagagaggagggagcaggcagaggtgggttgagactcaggtttgagtggagatacctagcaaggaaaagagggaaacaaagtaaattgagaagatcttcggacagcaaggcagcccggagaaattaattgatggaagccttggaacaaagactgtccattggtgctacactgaggcactacactggggaagcctggcccagccyttccaccttgctcctaatcactcagcatctgggagccacatggcaagagcataggttcagcaggaatcctgtggtg

SEQ ID NO: 900349 - DNA, 619 bp, Homo sapiens
tgggttcatgtatccatccactggttttctccaagtgatgactgtggtactggaagctacactttccaatataatattttctccttgaggcaaactagcatgctaggcatgaacagagtgtaagccgtgatatcacatagaaataatgtagtacctccaattctctttatgttagtttaaacactaatagccccattttgatgcaatattaattatgtgtacatagtcatttaaaattccaagtgggacacaaagaatagttcacagacacttaacaaataagacaggaattacttttcagattgagaagttactcaacctctgttactatcaatttccttttctgtccaaagaggttcataatccctttctttctgagttgctgtgagcttagaaacgatgttccccacttgaatttttattccctctccctaaatttctcctgcagtactcctcattgccttgcagcactcaggtcagaaaagtggagccacacacttgtttgccttttccttctacaactataattctactcaaaatggccagatgtgaattgtatttcttatytacctttcggatatagtctcctcttttcatccgtgatgcccgtcctgtagag

SEQ ID NO: 900350 - DNA, 601 bp, Homo sapiens
ccacaagtgttcattatgttcactgagctacacattcatgtcgtgtgtaatttttgttgttatatttaaattttcagaaaaaaagtcaatggtgaataatcttggaatgtttctctcactataggatatacctttcgatatggagatttatatgtctttaagtttaaaaaaatatgttgcgtaatttaacatttattccattctttaaaatgtgggctttttcttcacagaattcaaatgtttacactggctctaatttacttgactttcattttatctatactcattttaaatttcttgttccttttaatacatttctcatatccatatttactgcctttattaagtatttcataatgtttattttcctatagttttcccatttgccataatatatacgatgaactttccctttcttttctctgttctaccggttccactgcataaatacagatgttttataatttttccctgattatttttgtatctstttagttgttgtattcacagatgtgaatgattgacttatgataattaaatttgagactcaatggttggattaaattttcatctcttcagtaattgtttttgaatatgttct

SEQ ID NO: 900351 - DNA, 605 bp, Homo sapiens
ttccacagaaaatttcaagtctatttccactttagggcttatacacttctatcttttcttcctggaatgcacttcctttgattcatctcgtgagtctttccaccagctcatcccagtatctgttcaaatgtcttcccttagagataatgttcctaaacaccctatttaataacaaacccaaatgctttttagcacttaagcctgatttatttttcttcacaatatgtgtctgttagcttttcctatcctatccatgatattacattgtactgtgatatattcctatatttattactctgtctaactctgtagcatatcatacgaactatgtcttgtatctccaattacaacgaagtgtctggcatacaagtggtagtcaataaatatttactgcatgactaagtggatttgacccatctgggttttgttttgctataaagcgtatgggaaatgtctagtttgtttgtttgyttgttttcacagagcaccaagctgttgccacagaccatcattaaataatcatgtcttaaaatgatttcaaattttacttatcaagacaaaattccacatatatatatatacataacacttttgtaaaatctaaa

SEQ ID NO: 900352 - DNA, 607 bp, Homo sapiens
tttggattgttttttctagttctgtgaaaaatggtgatagtattttgaggggaattgcattgaatctgtagattgctttaggcagtatgttcattttcacaatattgattcttcccatctatgagcatggaatttgtttccatttgtttgtgtcatctatgaattatttcaacagtgttttgcagttttccttttaagatctttcacctctttggttaagtatatttctagggtttgttgttgttgttgttgtttttgtttttatttttgtttttttcagctgttgtaaaagggattgagttcttgatttgattctctccttggtcattgttgctttatagtagttctacttatttatgtgcattgattttgtaacccaggactttgctgaatttgtttatcagatataggagactttttgatgagtctttaggatttctaggtatacaatcatatcttcagcaaatagcgacagtttaatttcctcttttccaatttggatgctgtttatttctttctcttgactgattcctccagcyagggcttctagtaacatgttgaatagaagagctaaaagtggacatccttgtcctgttccatttctcag

SEQ ID NO: 900353 - DNA, 612 bp, Homo sapiens
tactcagacaatttctatttattattatttttattaaccgcttttttgagatacagttcatgtaccttaaaatttgctgatttaaagtgcacatttattttyaatatatatgcagtaatatggtttgaattgtgtgccctaaaattcataggataaagtgttcacctccagtattgcagaatgttacctcatttggagacaggatctttatggaagtatcttcaaacaaggttattaggatgggccctaatttaataagatccgtgtcctttaaaagggggaaagttgaagacatattgtaggaaggacgctgtgtgcagatgaaggcagagattggggaatgcttctgcaagccaaggagagcaaagattggcagcaaagcaacagaagccaggtgagaggcataaaacctcttctcccacagccctcagaaggaagcaaatctgccaacaccttgatctcagacatccagctgagggacaaataactccaaaactgtgggaaagtaaactgctattgtttaagtcacttcgtccattatattttgtatagcagcccttgtaaactctaaggtacagatatagatatgcacaagaatcaccacggttttag

SEQ ID NO: 900354 - DNA, 608 bp, Homo sapiens
ttccttcctttttagggatgagaattacacatactacattttgttcttccattagtcagtgggtrgacattggggttgtttacgcttttggctattgagactaatgctgctgtaaacattcacatataaatttttgtgtggacatacgttttcatttctcatgggtatatgcctgagaggagaattgtaagttcatatgtcaaaaagtgttaaaccatttgaagatttttcagagtgttttccacagtgactgcatcattttacattctcatcactagtatctgagggctgtgattaccacatctactcaccaacacttattattatgtgattttttgattttagctatcctagtgggtttgaaatagttttcttattgtggtttcaatttgcatttccctaatgactaatgattttgaacatcttttcatgtgcttattgctcttttgtatgtcttgtttgaagaaatgcttgttcatattctttgtccattttcagttgtgatatttgttttttatgttattaacttatattagttctatataaattctatgtacaagtattatatcaggtatattattagcaattactttctcccgttctgtggg

SEQ ID NO: 900355 - DNA, 631 bp, Homo sapiens
gggtggccatagtactgtagtcaccatacaatttattcagctttgccctccagtgtggmgttccttctggctttgagctgattctgggccagcttcttctttgcttttctctccttctgtgcctcaaaggttcactgccacttccctgctgaatttcagtgttctgtaaaaatttttatttgtttttaaaaagtcttatgtaactatagaattgaaattattaatggaatagaaaattaaatgtaagaaaaagcaagaaggaagcaagaccaatatttaggaggcaatcatctctccagatgactcacagaagaggaaatctcaaggagtagattatttttaagaagtttctggtacagttcctctgaggtcctgtgactacccctcccccaggaaataacttttttatttaaccactacattgacatctacagaagttgacacctgtaagttttagacataaaattgattcaacttacagtgcaacaatttaaatgtatgcatcactgctatattgaaaatataatatgtcgttagacttaagactttcctttgttttgtcaagtttttttttctcatggtgggttagtttgctttgggaaccccagacctaaacctcagccatgcttct

SEQ ID NO: 900356 - DNA, 568 bp, Homo sapiens
ggaaaatggattctcccttagagcccccaaaggagtactacactattgacactttgatttgaggacttctgacctccagaaatgttaagtaataaatgtgtattttaagacattaagtttgtgataatgttttaatagcagtaatggaactaatgtataagaatttttacttatttatgtaggctactcttgtactatgctgaatagtacatacagtaataaccatatggtaatatctaaaactcataactgtgattttctaataattgggtggccaacagtgttgtccctcattaagccaaagcaattatccggtgctgacaagccagtcaaaatcattcaaattcatgtatgtgattgattgaaatggaagcactgaggatcattgaagaagtaccatggaaacagcatttgccattccaagatatttagatgctttcatgactactcatcaatgaagtaatgaaaattttgggracagatgatcataattttgagtacggttcaaagaattttaaagtaatgacaaatgtctatgcttactatagggagatttgccagaaagaga

SEQ ID NO: 900357 - DNA, 726 bp, Homo sapiens
ttctttcttttggtatagctttttttctgcaagttacttttgctgctggttycctttcttgtctctttttcattttaaggactttcctcagaagtgagagagttcttggctgtctcttcatatttaagagaggaacattaaaaatcaatatgtagctctaagtaggtgggaggaactgtccactgaacacttcacattagaggatttatctggagagtttgatggcatcaaattttattatctgtatgtctttcttgttgggtttattagatgccctgagaaggctctttcaaactcctgcctggaggattggatggtctgaggcccagttatcagggttccagcagtcaaatagggaagaggcctcaagggagggaatgagtcagcactgcagatttagtttcataggtttgtgtgatgtgtgtatatactctgcatagtcatagagatggtagagagagaataagtcacataattacctcatgcactttctgattttcaaacgatgacacgtaaaagagatgggtaataggaactggtatgatcagtggttgactatccctacaagatgtctaagatcatgaaacagggacaagcaacctcataaccctctccacaattattattgcctagcatgaaacctcagagtttaaaaatggtgaaatatttggaggagaatggggggagactaaaattgtatgaaattatttgtctccaacgaagata

SEQ ID NO: 900358 - DNA, 589 bp, Homo sapiens
aaaattcttaatatgtacagtaaatatcagatattaaaagcttatatgatttggtttttaacctctgaacagtcaattctttggaaatctgagaagcccaattattctttggtctcttcaagggctccaggttgaagcagctgttctttgaaattgccagtcctgattcagttgactaatagcaatcgatagatacggaaggctaagtactgctttgcggttgtgcagccaaatgagtgaactgtacctactgtttctctcctttctgcctcttcccctgatggcttttatgtggttgttagtattcagttgatgtttatggtaacataaatctaaattggttttcagagacccaattcatgttttactatatcccataaattatgtcataaattaccatggctgaccatcttatttacaacccttgagtaataatctatcacttattatattattacatattactgtaatattacattaatattacttattagtaaacaaaaatgagttkttgatgtgcttttgtatgatatcagccaaagcaaaacctacatatggtaggaactggaaagcaagcatttattaataa

SEQ ID NO: 900359 - DNA, 594 bp, Homo sapiens
gagataaaactttacagctcttgttctgtgttcgattattaaacagcaatattgaaccatttatttgcagaattctaaagacatctagcaaaaaaaaaagcaagtatgttaactttcaatagggatgaatacacccatttaaaaattgatacaaatcaccctccacaagggaactaaatctgaacaggaattcacagaatggtttaatagaaggtgaggtttaggcatacagcaatgtggcaaagactgctgacagttcactaaaaccaatttttttttttaattttctgggcattgagctagactctattttccagcctacctttcatttatgtgtggtcatgtgactaggttctagctaatagaatgtgagcaaaagtgttccgtgccatagcaagctgtggtccataaaatgacgacaagaaatcatctgttctccttcctttcatttggccaaatattggtacyacaagtaaccctgtaagtctgtattaaaaatagcacaacctccatcagtctgggtccttgaaaagctgcagggagcaaagcttctgtttgcccataaaattagaaaataatacacttgttttgtaa

SEQ ID NO: 900360 - DNA, 638 bp, Homo sapiens
ggtgagtcataaatcttcaataattgttcattcctttctgctccttccccttatcagttgccacaataaatcacttaagctacctgaggctattccttcatctttcagatagkgataatgatggctaaccttatataacctcacaggatgtttttgataatcaaagagtcgatgcatgtatggcactttaaaaaccaggataagctattaaacaaaggcaaggcctgaatattaacacctcataattattattgttattattacaaatattcaaggctgcacctggctcacctgtctttatgaagtttaacattaagtcataaaagtcttacaggacaatccagcctgagctatttttcaaaccaaactggtcatttaacttgcttaaacgtttttttcttcaataatcaaagcttttgtctccaagaatctataagacatgtcaaaagagttttcgattgcgattcctcaatttcatgagcctgcgctatagaggattacaaacaaaaaagttatggttttcctcaccctcccaccccaaaagtagaatcttttagtcttatgttcaaaaataccaatactttgcccactctctaccgcctaccaattcagatgatgttacatcattaagcatataa

SEQ ID NO: 900361 - DNA, 654 bp, Homo sapiens
catttaccagcagatgccatttatctaggatgtattctaatttaggggacatattcaaaccatagcacctgctttcaaagtacatctacaatctgtccattccttgcatcttcattgcctccatcctggtctaaggcaccatccatgctcacctggacaaaaacaactgcctctggaccagtatctcaatttcttgccctgcacaatctgttcttgacatagcagccaaggtaatcttgaagaaattgtaatgagtcacatcaccacttgctgaaaacattccagttgcatctcttacttttctccatcctgaactatagcacttggtcttcttactccctagaatgttcttctttacataactgggtccagtctcagctactgttacctccttcaagatgtcttccatgatcacagtgtctataaagaagtctctctgccaggtacttattatcacaacacacagttttattaaaaacattcatgtctacctgaaagtgttttctgtatttgtctgcttacttttatatgtctgaatctcacaactggaattaaattccttaagakcagtggcctttcttctttgttatcttcttttttttttctttacttctttacacccaattaatagaacagtatctggcatatagtagg

SEQ ID NO: 900362 - DNA, 612 bp, Homo sapiens
ggccagagttggtggaaagatgatttattccagttctttttcctactttagtgcctgttccaagaaaaacctttaagttgaatttggggagaaaatgcaaacatacagtgaagaaaatgtgaaacagggaaagtatactgagctaagagtctcaagtttgattttcaattccaattttccatcaggaccgaaattggttgatataaaaaagtgtaagtatgccctgggcaacaactttctttttatcatgagcacccttctccctctacatggcctcacagaaatcatcttcagagtgctgagaagacctgaaaacattcccaagagttggcctgcagatggacacccgtgtgaggtagcctcagtatgccctgtagcagtgaggcatacacacctgcacagacctggaagccaacccacggtcactgaaataggcaatcccacagttctaagtgcctggacctgaagcatgtcaagaagaggactgggmtgtatgtgggcacatgcatttggcccagcagactcttgccccataggaaggacacaaggagagttggagggggccctctaatgcctgggaccaggccagagcctgtccttctctcatttcag

SEQ ID NO: 900363 - DNA, 585 bp, Homo sapiens
gattcaatccagagcaattaggcaagacaaagaaataaaaggcatccagtttggaaaagaagatataagactatctctatttgcaaatgacatgatcttgcttattgaaaagcctgaagaatctacaaaacagctatcagaactaataaccaagttcagtgaggttgcagagtataagatcaatacacaaaaatcagctgtatatctatacactagtaacaaacaatctgaaaatggaattaagaaagtaatttcacttacagtaacatcacaaaataaataatttaacaaatatttaacaaataaaagtgcaagactacatactaaaaactacaaccatgttggaagaaacgacactttttgaaaaagatattctgtgttcatggattagaagacttaatacagttgaccaccaaacaacatgggtttgaactgcatacgtccacttacacacakatatttttcaataaaatgtatgtattacactgagtgtgtctgcctcacctgcctccccacttccactctctccacctcttccacctctgccactcctgagacaacaagatcaaaccctcttccttctat

SEQ ID NO: 900364 - DNA, 593 bp, Homo sapiens
acctggcatagctcacgctgcatggaagctgaagatgtcacccacgataaacatgaactgctgtgacaatgggaagcggaaggtgaagaattgcctctccaagcagggtgggggtctgaatgcgtgagaaagggaaagatgcatttgattgtgtttacaagattcattcacagcacagcaggcagtattcacactataatactcaccctaacacagataatttgattttcaacctggttatcatgcattcagacatagcaatacatgaaaatatatgctttagcagtgcattttaaacaaggttgcacactttaagtcggaatatattagaggtgagtgttaaagttagcaattgtagaagtcctagaaatctccattcagcacatggcatgtgttttgaaattactaaaaaaaaatgttatattatgttccagctgttgaatatatatacacacatgatatkcagtgaaaatgataaacttggttgctccttaaatttttcacgatttgaagaaactttaactttctttagactcctaaagaaaaatggaagcataactccatccacacacactgaaattataactattact

SEQ ID NO: 900365 - DNA, 620 bp, Homo sapiens
tttaagtgtgttgttgatgctttcatcaaagcgtcgtgctcccacctcatgctaagtaaagcagctggtgaatgttatgtcgtgcactgcagatggattggtggtggcaggcccagagctcrccacatctacttaaacaggtgtttgattctgcattttccaggtagccagaaggaacctgattattcggtgagagtaggagccacgcgggagaggaattgctccccagcattggcaaggcaactagccagccgcttggctttaattcatctgttcaccagacatggtcttaaagccagaatatttccttttggggcccgtgcttactttgaattttagtggacaataaggggattctgctcccagctcatactcttttgttgagtgtggtcttttagtctggggtgggttagaactaggtcaccagaaccagtggccactgcagtttgcagtcaaggcatctctgctataccagccctgctaccaggtacagcatgagaagctgaagttgcttcacagtgttgtatttctccagaaccacacatccaccttcatgaacagagggcagtgtgagggatcctttctagtcaccgggaatgacagacataatcaacagttag

SEQ ID NO: 900366 - DNA, 611 bp, Homo sapiens
ctttgtgtttctttccagacttagaattatctataacacagttggacccattaggtaactctccctttcattcaacctatgcakcccattttcagcagaggatcaatcaatgtgctctttctctgcttcaattctactatcctaaaagtattagccatcccacagttctactgtattcaactgaaaaccacagaagggtcttcagtaccagaacatgctagtaagcctggtatttgactgccaaagacaacataattccaaggtaaagaatgtgagcagagatgctgcctgccttctggaaagaggctttattttaacagagctcttcagatgatagttccatgtcaacccaaagcaagtttaaaatcaaacctaagagagatataggatgatagaatctccaagatcttgaggaatcttgccaacttcttcccttccagatatgcttatacctgccccactcctatcaaagaaagctgtgagcatagaattaagattccttcttactcagcaatatggatgacatgactttcttacttctgatttaagaaatcctgcacagcagaaaatctttcagaaaactcaagactataggacccaatttaaaaaca

SEQ ID NO: 900367 - DNA, 643 bp, Homo sapiens
atagttaatacaataagctgcatgttttatggtataatttgataagttttgaaatatgtgtatatccatgaaaccatcaccacaatcaagatggtacatatatccatcatgctgaaaagttttcttatgtcctkgcgaagccctctcttctgcccttcccacttcccatcccatcctcaagcagccattactctgctttcctttcctttagattagcttgaatttttttttacagtttcatataaatgtaccagtttttgatcaacaattctgatggaaaagcacatggctaaatataagcatgttttttctcagtctagagacctaatctgtttcccagattttgaagatggcaaactattctgctattgtttgttttttcataacttacaggattttatctggattagctacatatagataagaaaggagtcccttgatgttcaccctttccattgtatccttgatcaaagaaaaatatttttacttgtgggtatggatggatgccaagctgagatttaaacatattacaggattgctggaacagagaagttactttaaaagatccccatttaattcaagatagttactggcttctagactctctatatgcatcttagggaataaagaaagaacaccccca

SEQ ID NO: 900368 - DNA, 677 bp, Homo sapiens
tattctttatatactttgtatacatatatagtatgttttatatacttccactgatatctttaagaaaragaaaagataaaggtggaagtatataaagcatatactaaaaggaaaagaaaatcacaaattcttttaccttccaaaaattcattgacttctaaaaacttactgcattttaaaataatgtatctgttgaaaatgataactttaatagggccttgcagattaactaagtgcttagtaagttttctaaagctttacaatgaactgtactgagtctatgataagttccaagactttcttcgtggaagtaaataacattcaagtaaggtcttgaagcatcaagtgtaggtgagaaatgcattcagggcagaagctaaatgaccatgggcccagaggaaagaataatttagaggcctttggcaagtcagaagtcctgagtagagctaggtatgtagaggttataggatgaagattctttaaggtaagcctgttttgctttgttttattgtatatatatttaagctgtacaaatgatgtttggaaacctacacatagtggttgtatacacttatatatagtggttaaccacatccaagcaaatttacatatccataatctcatatcttttagccatgtctgaaaagttggatgatgaggttgtgaaaagccttgag

SEQ ID NO: 900369 - DNA, 655 bp, Homo sapiens
ataattatattcttgagtgctttaaaattagactaatttctacaccattaaggagcaaaaatatttctagtttttgatgcattataagtgggagatattaatttccgatgaaattatgcataagcaggggaaaagctttctactgagataatatttaaacataaaatgttaagcatctcaggatttacaaatgattaaaagcaaataagaaaatgcaatcatattgtatttggattgtggaaccctctcccatccatgcaatgttttagtccccaaatcaaaaagcatctttctattttaaagttgtttacttgccaagctaaatggtttgaacggtagcagagactcgaaaccaaagaaatggcatacttgagtaaacatgtttatgctatgtcatataaatgaattataaacagtagtagtctctttggttttttatccttaatacattgttatttgcacaacccgccactaagcaatgtaatctctaaagcaagttttgaaaacttgaaggaaataaactcatgccaarttatagatatttactaatatagtactaatcaagctttactatttggggagcatagcttttttaaattatcctgaaaggatggaagtatcccactgcaagtagaaatttccacacaattagtaa

SEQ ID NO: 900370 - DNA, 597 bp, Homo sapiens
gcaataagctggaagaatctcactgaagaatgtataagatgtcttcaagattgragtgaatggcatctgttttgctgctcaatcatcctaaaaccagtgattctgtagtttcattatccatcttaatttcaaatgaatgataaccgcagaccttgggaggaggcatcagttactttgcttcttttctaaattggagcagtcaaagcaatctcaaaaacaatttcaacaattcatcccgtcttctccccaaatctattcaagtttcagccctgattgctgcatgagtaaatgaaataatttgtttacctctcaagaaatattccatacattacagttaggacacctacataatgacaatgggcctgtttgtgaaatacctcatatcaagggaaacctagaaatatgcatcattttatagcttaatattccatattttctgtcatgcatttccttaagaactgcagaggaatgcatgtaatttagttactagcacattctggctcaatggtaatgtgtcttgctttacataatatatatgctgctaaaatatatatgtaaattatctcacttttggtaaacttggtcttgattttatat

SEQ ID NO: 900371 - DNA, 546 bp, Homo sapiens
tcagttaaacctctttcctttataaatcacccagcctcaggtagttctttatagcagtatcagaatgaactaatacatccagtaaaatcaaaagaaaacaagcaaacaaacaagtaaacatttttcatgttatctaggagtcctattaaaattctcacatcccttattgaatccatcagcaaatcctgtcagctatatatctcttcaaatgccagaacccatcaattctgtcactaccttcctcttccaattattcaaaatctcttggttggactctcaccactattatctttgtactttcctccactttattctcaatgccacagacagtatcatcgttctgtgatataacccacattatgtacatcactgccctaaaccctttggtggcttctcatcttatgtaggaaaraagacaaagatctttcaaggcatcccagcattttctctgttctttgttctttgttccttgaatactccagacacctcacaccagaacttgtgaatttattaattaggttacaaatgatactttttcagaaattt

SEQ ID NO: 900372 - DNA, 632 bp, Homo sapiens
ttatgcaaaggaaggattcaattttgtttagctctgtttggtcaagatagtcaagctctgattgggtggcttcccaaaccctaaaccagaagtctgtgacagatgctttattcaaaygactggttggggtgctttctggctgcagttttccttggatccagtcacaggaactgttctggctcaaaggcataaagtagtatgtttgtcaagagcttcctttccaagagcaaataatgtgtgattactctacccttaccctgccatgaccacttagttctgctgtctaaatttgggtatctctgccatgaggagtccatgttgtacagagagcttggggccttatttacagttttatttcatagcaaaaaagtgctataaagtaatagaacaagaaagaaagaaaagaaagaaagaatgaatgaaagagagaaagaaagaaaggaaggaaggaaggaaggatctcttgaagtttgcagtgatgggagtgttcaaggtagttgtcactgagaaactgagacataacaaagccttgaaagaggcaagggatttaggcaagtgaatatctagagtaagagttttccagggaaagggcatggctagggtaaagggttagtacctggtaattccaaaaa

SEQ ID NO: 900373 - DNA, 585 bp, Homo sapiens
aatagcacctttgtactgaattttgttgaaatgatacattatttaccaaagggtaatgtgaaagaaaattttgccaatgtctcattctgttttctttccaaaaataactttgtgagrgttgtaaatgctgactagaagcatctactgtgcaccactcttgtggagaggaaacaaagtggtgggtaaatattgactcttcaagggaatcatgtaagaaactagttgggatccatcagaggcgttaggggacacatggaaaacggagaataacaaagctgggaaggcacccacctgggatcactgtgaaaccaggagaagcttcctaacacagggtaagagtgagagattaagagcccccaggggatctacccttcctacagggacctgtgcaactctgggaatgagagaaccccctgaaacttccaaccacaggcctcaactaatacagagagcctgtattaatggaatttcttcagaggaaccactcaagactatgggaagccctacaggctttggatccctgaggagcccagcactagcttccattacaccaatagagtccacagtcacggtgccaggagaaag

SEQ ID NO: 900374 - DNA, 595 bp, Homo sapiens
atgaccaagcacccaaaagcaaatgcaacaaaaacaaagatgaatagatgggwcttcattaaactgaaaagcttctgcacagtaaaagaaataatcagcagagtaaacagacaacccacagagtggaataaaatcttcacagtctatatacctgacaaaagacaaatatatccagaatctacaaagaactcaaacaaatcagcaataaaagaacaaacaatctcatcaaaaagtgggttaagaacatgaatagacaattcacaaaagaagatttacaagtggccaacaacaacaacaacaaaacaaaaacaaatgctcaacatcactaattatcaaggaaatgcaaatccagagtcacagtgtgataacacctcacttctgcaagaatggccataaaaaaaaaatagatgtagtgaaaagggaacacttttacactgttggcaggaatgtaaactgtagtcaaggaatgaaacaaaggattgttttagactttttaacacataaattcagtctaggatatgccatacagtctttatagttactataaatgtatactttcagtagtttttttttccaatttgtgtgagattaaaga

SEQ ID NO: 900375 - DNA, 652 bp, Homo sapiens
acatttctactttctgtagttaagccataccttacagtttggatgcctagaagaagcaaatagaggaagagagagagagagtgtgtgcaggcaaactgattcagtgactgtgattactatacccartatttgattctctaattgggaattcatgtaatagggaatccattctgttgtattcactgtttcatatttatgaagtcataaagaacagcttgcttatatattcagtagtcatttacaatgaataaaatatgttagaattagaataaagacagggcataactttccagagccacagacatcaaattgccaaagtttgtgtatccttattgaatatacacaaggtttagaacagccagattcacatttgaatggtccgattctgcagtgcataacattggttaccaaggctaatttacttgtttgaagctttatttttgaacaatgaaaattggagatgataacaagtctttcatgtgttgtggataaatttgttgatagtgtctcccacaatgctgggtacattgtaagcatacagagaataaaagttatgattttacagaaggtcttaagagttgaattaaacattttggaagctagtaattattatattagagtaaaaagtaaaagattactgcataaaagaaca

SEQ ID NO: 900376 - DNA, 614 bp, Homo sapiens
ttaccattgtaggagagattcagtctgctactattgatgtattgcctttgaggcagcaaatatcttcacacactcttttacctctgcctaaaatttgttccctgcccctcttattaagatttaacacaaatgttaggtcttctaacaagtcttccctgaactgcagttctctttctcaagagaaccgggcctagactggactctgctatttcaaatacttatttgcatatctgcctcactgctaaacagacagttctataaggagtacattctttaacttggagtttccttctcaaactaagcagtacctggtaagtagcaggtgctacttgcaaatttaaaaacaaaacaaaacgtgtttcaattaatcaacactagctattgaagagctatcatgaaccgtaataaatgttatgaacttaccatttgtatttgggccataaagtgtatatatctattatctcttgaaatgacacctaagcatataagagtacaaagcaataactgtcatctataaaatgmctaaaaccaacaagaagaataataagctatataagaatctaagagatggtctgctggggagagcagaggctgtttcaaggaaaggagaagat

SEQ ID NO: 900377 - DNA, 557 bp, Homo sapiens
atcttctgtagtttcatgtagtttcctcctttcttgcttaaagattttcaccataacctctgtgtgtgtgtgtgtgtgtgtgtgtgwgagagagagagagagagagagagagagagagagaggcaacattttcacaaagtttggtggttaaggcagaagaatcgcttgaacctgggaggcggaggtttcagtgaaccaagatcatgtcactgcactccagcctgggcgacagagtgagactccatctcaaaaataaaataaaataaaataaaataaaataaataaagatagaaaaaagaaaaaaattaaaagaatgtctaagatgatactaggaatgtctttctttggtcggttttatttgaaaatagaagagacataattaggattgttggcaagtgaagaaaggctaagtggaagagtatggattgaagatgatagaatgaaataatgtttgatggatcagtacaaaaaatagaagaggagaaagggaagagaacacaaaaaaacactgcagaaaatacagtagctcagtgaactatggcatacaatattcagtc

SEQ ID NO: 900378 - DNA, 647 bp, Homo sapiens
caccctatccttaggaatgggcttatgggaagatattcttttctactctcagcctgatatggccctttcttttctcattcagggaattggcctttctctgtcagggattgattctcaacagcactaaagagctttaacgccagactgaatgggtggtcttcatggaatgacagcccacttctgaaattctaggcaagtcaacactggcttagggctgattctactacataaggataactagaatctgtattgcccaggagtagcctatagattttccttttttcattacaatagtctgttaaattagtatcaagattttatgaaaaccagtttttgcagagcgcctattcagtgtccagcattggaggagaaggcaagacttaaaaagaaacaggccgggcatggtggctcacacctgtaatcccagcactttgggaggccgaggcaggtggatcacctgaggccaggagttcatgaccagcctagccaacatggtgaaaccccgtctctactaaaaatgcaaaaattaactgggtgtggtggcaggcgcctgtaatcccagctacttgggaggctgaggcaggagaatcacytgaacccagaaggcggaggttgcactgagctaagaccatgccactgcactccag

SEQ ID NO: 900379 - DNA, 651 bp, Homo sapiens
agatgagtagataggaagagagatgattattaggtacataagaaattgcttttcctttatgcacttscttccaatatagctaaaaattagtcttaaagaattttctttaccacattttgtccatgagtctgaggctgctttctgtcctttagagtctgaggcctctttctgtcctttcaagtggtgtcactggtgatttgcaggcctggctgcacctgagaggccagtatgggctattctggcgaggctcctgttagaccaagagaggcagacccaggcttggcaggtgccacgctttattaggaaggctaatcatgtggttggctgcatgttctcaaaatgtaggaaggctgaagtcttcaggagaaacaactcaataaaaagaaaacacctgactcaaagcaggttatttaaattgtgtgggcaatttgctaatatcacagtacaaatgacgcttttcttatgctaacccagatagaataaaagacaacttagagagtctcattaaaagcaccataacttttatatcaaaaatattgctgcaatctaaatgcaggatgattccatctacattagcatacttttataaaagcatgagaaaagcctcgaacctataaatctagcatgatgatagggtggcatcccataatg

SEQ ID NO: 900380 - DNA, 639 bp, Homo sapiens
aatttgtttttgtttttaatatttaattcaaagtattctggaaatgttcaatggaacgaatcaaaatttttagaactatttcaataggtggccaaatcttcawattatgccattatttaagacagagtttcctattatcttaagtgggtttggattctattgtttggtttcacctttcttgataattttaatgagtgaagtctagaccttttcctttcagggttcccagggtaagatttggggttatttctgaaggtactttgtcagtaaaatgtgtgtgtgtgatgtgatattagatgaagatagctctggtctggcactcattccctggatgaccttagctaagtctcttttcctgtgtttgcctcagtttcctcatctataaaacaagggaccataaccatagcattgggaagaagcatgtacattagatagttcaactctagggtgtgaatcccttattcaacatcctaggaaactagccatctcatttcaacatgaatctacccagtgtgttgcaccaaatgctttccaaaacagcccattcccttttgtggagagtgctaacttgctctgctagccaaagtgccagcttgaaattttataaatggagaaaagatagttgtttatttgcttgct

SEQ ID NO: 900381 - DNA, 639 bp, Homo sapiens
aatttgtttttgtttttaatatttaattcaaagtattctggaaatgttcaatggaacgaatcaaaatttttagaactatttcaataggtggccaaatcttcatattatgccattatttaagacagagtttcctattatcttaagtgggtttggattctattgtttggtttcacctttcttgataattttaatgagtgaagtctagaccttttcctttcagggttcccagggtaagatttggggttatttctgaaggtactttgtcagtaaaatgtgtgtgtgtgatgtgatattagatgaagatagctctggtctggcactcattccctggatgaccttagctaagtctcttttcctgtgtttgcctcagtttcctcatctataaaacaagggaccataaccatagcattgggaagaagcatgtacattagatagttcaactctagggtgtgaatcccttattcaacatcctaggaaactagccatctcatttcaacatgaatctacccagtgtgttgcaccaaatgctttccaaaacagcccattcccttttgtggagagtgctaacttgctctgctagccaaagtgccagcttgaaattttrtaaatggagaaaagatagttgtttatttgcttgct

SEQ ID NO: 900382 - DNA, 635 bp, Homo sapiens
ctcacgagatctgatggttttacaagcacctggcatttcccctgcttgcactcactccatcctaccaccctggaaagaaggtgcctgcttctcctttgccttctgccrtgattgtaagtttcctgacgcctccccagcaacgtggaactgtgagtcagctaaaactctttcctttataaattacccagtctcaggtatttcttcaaagcagggtaagaacaaactaatgcaatcagtatacgtgagagtgactatcagttatcttactctcacaaatttggcctcaggataatgcctcaaaaactctttccagaagaaaggatatgacagagagttgtaacctgcctttctccttgactcgagtctctgaagatctggagtcaggcatggctaaggctggcatttctgggtcctttctgtgtgggtgccatctgattaagcatctgtaggtgtcaaagcctggctgacatccagacctttccttctggctagacttcattggccaaatgtggcctttcagctcacatctgtcctccaggctggtcacacactgggtactagcagtttggcagactgtacaagcacaacaattacagctgtctctgtgtggtcctgcacatccaatcctcttaatt

SEQ ID NO: 900383 - DNA, 612 bp, Homo sapiens
atccaaaggcagattgatattgagtagttgctaattaaacttaacttaggagatatatctccagaacccagcccaaagtttgtagaaccatgaccatatagggctataatttcactgtgacctattctgtcaattctacctaaaataaatagggcactaagccactgtatcctgcccttgaattctgagcatcccatcgggaacataacagagaagctgcgcttataggatcaagcaacataaaatctgtgcaaccaagactttctgtagcgtagtagccagatcaattgtgtgtttctttgttttgtttgcaagcagtaaaactggctctggctaactgaagcaacgcagctttagtggtaggacataggatcatttgaaaacttaaaaaacctctaaagagccaatcttaggggaaaaaaagaagcagagatccaagcagcaggaactaatcaacaattaaggtgacaacactacaaagaatcagctccaatcatcttttcatcctggcatcactgaactctataatatttggagtcctcaaaatgrgaaatgagttggccttatttggttctcttactgatctcttggctagggcaacttgattgacag

SEQ ID NO: 900384 - DNA, 670 bp, Homo sapiens
ctgccccaaattacagtgtttagaagtgatggaaccaggattgagccaatcttggtctagatctactactttaaccacaagcaatactgcctctgcttatgagcatgtgtgagacaccttctaaatactacctagatggtcagaaagagctaaggaaggtgatgcctgacctgagtccttagggtaaggagaaaccaaccagtctgagaaagagaaaaaaggtgtttagagagcattgcaaggaaaggggaatggaacagacagagcatagaagactttttgggcagttaaattactctctatgatattacaatgatggacacatcccactatacgtttatcaaaacccataaaatgtacaacaccaagagtgaaccttaagataaactatggactttgggagattatgagtcagtgtggtctcatcagttgtaacaaatctaccactcttttgggggataataatagtaataataattatgagggaggctatagatgtgtgggggtagggagtcgatgggaactctctgtaccttctggtcaatttcactacaaaaactactctaaaaaaggggggttgaaaagttacgtgttgggtacaagtttcactattcaagagatgagtaygctgaaagcccagactttagcactacgcaatatacgcatgtaa

SEQ ID NO: 900385 - DNA, 565 bp, Homo sapiens
atttgggtagggataaaggccacatacacccccaaattcccttgaccttcctgccactattagacaccctatgttaagaatgtaggttgtgttcctctatatgatagcttccagaatgtgagtatactcagattagagttagttgacactgagtcctgagatgatagctgctaggtgagaaaaactgtcagcatgcaatgaaggcaagcctaagtcagattctcataggacacaagacagcagtggaaagagaaagcaacactgcaataaattactgaaatttgacaacgttgggtccagtggcagagtgcaaggaaaaacaggggttctgaatttgctgctggctttgtttcctacacactctatgaccttggacaagataatgttacagaatctttggggtgtcgattttcttcccggaaacctctgtggctgctcatgcctttgcttgagttcttgtcctgcatccaggagaatgaggtacacagacaagtgaagggwgaacaagatgaagatgagctttattaagtgttacaacagttcagaggagatcagcagtgagtag

SEQ ID NO: 900386 - DNA, 575 bp, Homo sapiens
tgcttccaaagttgaacgaattgagctacraagttttgcctcatccaccataatcacctgacctctggccaatcaactaccacttcttgaaggatcttgacaacattttgcagggaaaatgcttccacaaccagcaggatgcagaaaatattttccaagagttcatcaaatcctgaagcactaatttttacactacaggaataaacaaaatcatttctcattggcaaaaatcttaatggtagttgtgcctattttgattagcaaagatgtgtttgaacctacttatagtgatctaaaattcatgtctgaaacctcaattttttttttttgcaccaacctagaagaatagaagtagagagtagaatagtggttactagaaaataggaagggtaggggaaagggtggatcaaaagtgattggttaaaggatacaaaattacagctaaataggaggaacaagctttagtgttttataacattgtagagtgaatacagtcaacaattattttcaaatacttggaagagaagaaattatgtttccaacacaaatgatacatgtttgatgtaatggataat

SEQ ID NO: 900387 - DNA, 575 bp, Homo sapiens
tgcttccaaagttgaacgaattgagctacaaagttttgcctcatccaccataatcacctgacctctggccaatcaactaccacttcttgaaggatcttgacaacattttgcagggaaaatgcttccrcaaccagcaggatgcagaaaatattttccaagagttcatcaaatcctgaagcactaatttttacactacaggaataaacaaaatcatttctcattggcaaaaatcttaatggtagttgtgcctattttgattagcaaagatgtgtttgaacctacttatagtgatctaaaattcatgtctgaaacctcaattttttttttttgcaccaacctagaagaatagaagtagagagtagaatagtggttactagaaaataggaagggtaggggaaagggtggatcaaaagtgattggttaaaggatacaaaattacagctaaataggaggaacaagctttagtgttttataacattgtagagtgaatacagtcaacaattattttcaaatacttggaagagaagaaattatgtttccaacacaaatgatacatgtttgatgtaatggataat

SEQ ID NO: 900388 - DNA, 654 bp, Homo sapiens
tggtgtaaatggaaaatttcccccacagtcagaattggttggagagtggtcagtcattcggacatttgttaataatttatggaggtctaccagccacccaacatayatatcagatttgcatctttttacatgtttatttttactttttttttctttttcttttttctgtcggggggtgggtggtggcggtgaggagaatgtctcactttgttgcctaggctggaattcagtggcatgatcacagttcactgcagcctcaacctcctgggctcaagcaatcctcccacctcagcctcccaagcaactgggaccacaggtgtgcaccactgcacctggctaatttctaaattttttgtagagacagggtctccctatgttgcccaggctggtcttgaactcctgggttcaagtgattctcctaccttggcctcccatagtgttgggattacaggtgtgagccactatgcctggcccaatttgcatattgtcatggccacaggaagatctagttttagtctagtgtctgtggaatgggatgggaaatctaggtaacaaaatctattaagtgtctcccatgtaccagtcatccctgtctcaatggattctcacaataatccatctgggtaaatattattatcctcattttattgacaa

SEQ ID NO: 900389 - DNA, 638 bp, Homo sapiens
tcaaaaaaggatatgttaattagcttgatttaatcattccacattgtatacatacatcaaaatatcacatcatactccgtaaatatctgtaattattatttgtcagttaaactctctgaaaactgcaaagcaccattaaaagaatatatgaccagagatgtaaatgaggggaatcaattttatcttgtttataataaaaaaatacttgttgagagcatactatgtttcaggtactgtgctgtgtgaactttatatgcgtgttcttatttaatcctcaggacaaagtgaggaagtagattctattattatcaacccatttttcagatgatgaatctgagtcttagtttaagtaacttgctcaagcccacatagctaagaagtggcagggccagcattgagctcaagcagtcagcttgcagtctccttgctggtttactcctacgatgtactgccgtaatacagtttcctcagaaagtgtaaagagaaatctctgcccataaacacaggttctaccctaactcccctaatcactgatttttcaaaagccttaataatgataagaaaaaaagcattttatcaagtgcttactttttgtcaracgtggcaataagaactttccatggattatgctatttatt

SEQ ID NO: 900390 - DNA, 610 bp, Homo sapiens
tgtttgtgccagaaaataagcatatcattatctaaaactctttgtgaccatttcgctctgacattctatcactgcattctgtagcaaagaccctgaaacatgtcacttttctgtagaccagtgtgacagaatttgaacaggcctgacacaagtgttgtgacttgtgatatggttttctggttagctggtagctagcacataggtaatgatatggctttaaagttagatttttaaaactacttttgatttgtgaccatgaaagagcaactcgttttcagccagctttttgaaattttttgctagttaatctaaaggaggttactcttaattaaatgtgaatagtgatttttaagggcacttaacgacgtgtaagtagcacctagtaagcacatcaaaatcctacactgtcacaagttgccatcgcagatacttactcagaactttcttaacccaaatattggactttttaagagttgaggatcaagggcaattcgggaggggagtgacatttgtataaaargaattgacattacatattttttagaaatatgtatttattgaatgacaaattaattttataatattggtggacctataaaatagttctatt

SEQ ID NO: 900391 - DNA, 579 bp, Homo sapiens
tggttgatcaatttatgaaatgaaacatattttgaccatagtaacaaaaaaaaaatgggtgtcatggggatttatgaaagtctcagtgaagtgtttgtacctattctgatgaaatctgtataaatggtatacgctgaagcatggtactactctcttttagtaaacattgctttggacaattatggcctaaaaatggtgtaaaatagattgttgaacaagttgggcagagtacaccataaatctaactttctcaactaaactggcagtgacactgtagctcatagatttatacattagaaaagttcccttataaattttataatttcataacatctgtactcctacagtaaatctgcaaacaaatgttccatagtaaagaagtctgagtaatccacaatggttgttgctcataaaacatgcttcagaaatgtgtttattctcagaaacacctaataacmcaatattaggggggataactttctgttgaaatgaaagcctgctcttctgtgggcaatgtagttgtgatccaagaacacttcatggtcccttgctgataataggtactcaataatgtttatt

SEQ ID NO: 900392 - DNA, 688 bp, Homo sapiens
ctgccttacctcttaattggtttgcttgcatctccagtctttcccwttcaaatcaattttccattctgtagaatgatctttctaaaatgcatattggtcatgcatcaaagaaaactatttaaaaaaagagaaaagacaacctacaaagtgggagaacgtttttgcaaatcaggtatctgataaaggtctaatatctagaaaatagaaaggcatgtgtggtggcacatgcctgtaagcccagcactttgggaggccacagcaggagaggatcatcacttgagcccaggagttcaaggcctgggcaacatagagagaccctgtctctacacaaacacacacagaattagctgggtgtggtggcatgcacccgtggtcccagctactcaggatgttgaggtgggaggatcaccgaggcccaggaggtcaaggctgcaatgaaccgtgatcataccactgtacttcagcctgggcaacagagcaaggctctgtctcttaaacaaaacaaaacaaaacaaaaatgaaaagaaagtatacaagaattaaaaacaggaaaaaaaaaaagaaactataaagaactcttgcaatgcagcaacaagaagacaatccagtacaaaattaggcaaggacttggatagaaatttcccagagaagatatgcaaatggttacaaacacataaaaaagatgttc

SEQ ID NO: 900393 - DNA, 641 bp, Homo sapiens
gggtgaacaaattatagccggggccaaatctgctttttttaaataaagttttattggaccacagccatatgtattcatttacatatgggctatggatacttttatgtagttgtgacagagaccatgtggcccagaaaacctaaaacatttactgtctcttcttttacagataaatgtactgacacctactctggaacaaagacaggcagtttgggtacataaatgagtatacatgtatagtttatatttacatttatattcatatttttaggtacatgcttacctgtatataggtctatctatagttaggtgttctcaaataatctcccagtacatttcaaaatatacttaggccacctagaatgcagtgtccactgaagacatgtcttgggaatgcttactgtttgctgcctttgaagtgtgtgaatagcatgaatgttttaaggttgcctgttttggggagttgtggtcacttataatggggctggacaacttgaagaaagaatgataataraaattttttaaatttttggcacaaaagatggatcattcacagggactttctatacaacttttaaaaaaattttctatattttagagctttaagaccaagagaaaataaaataagtttcatcttgcag

SEQ ID NO: 900394 - DNA, 593 bp, Homo sapiens
gttaaaatattcaaagacccttactttgttcacaaggatatctaaagtataaataagcattttaaagctaaccgggcatgatacatgttaaaggtatctgctttaaaaatattaagttataaatataaaggtaaaattggaaaaacagacgacatagctaagactaatattcaatctaaaaaaaagactggggaaaaaaacaaaggtataaaaaaggaaacaaatgagaagtaaaaagaagacggtagaaacaattccaaatatagtatgtcagcaatcttgccaatgtggctggactaaatccatcatttaaaagacagagatggccaggcgcagtgagccacacacctgtgtactttgggaggccaaggtgggggaatcacctgagcccaggcgttcgagagcagcctcagcagcatagggagatcctgtcactacaaaaataataaaaaatattatccaggcatggtagtgggsccctgtggtcccagctacttgggaggctgagatgggagtattgcctgagcctgagaggtcaaggctgcagtgagctataattgtaccactggactccagcctgggtgacagaacaa

SEQ ID NO: 900395 - DNA, 564 bp, Homo sapiens
aggaaagggaaagtctggatttacaaactagactgtacatcaccatgagaaagaagtaatgaaaacagtgtgctgcctgagctaaaacttgcctggatccaaatgggcatgtatgtccygtgagcaaagcgttatcattatttcaaaataaatgccatgacccttcaacattcaagtgacacacagaggagcttctcactacacataggtcatgagaggggcctctggctttgccaaatcaggttcgtcatttgaaatagcagatccattaggaaaccctggcagatcatgtggtgacaaccagacttctctttctgggtctcatcttgaggggagcatctgggctcctttcttgcttatagaagattggccaagatttattcacagccacagaatattctctgcaatagcaggtcaaaggaaccacagaaagggcctggaattccaactattaaagatgtggtttcagagcattttagtttggggcgtaaatacatgtgcaatctaaataataattaatacttgccatttgaaaaactctgcaacacagggtgatctaatgcc

SEQ ID NO: 900396 - DNA, 618 bp, Homo sapiens
tattcttaaaacacaaatattcctggaaatagtgaataaccagcaactcagtatgaattarttcattctcctttctagttccaactggatggaacaaggttttaaagaagggatgggggagataaggatttttcaggccattccaattgtacagtcaacaggaagaataaaactcctgggagctttggacaaggaggaggagagaaaaagggtctgagtcacagtgctctaccatgtgttaatggctgtggccaggatgatattcaaaatatttaacagctggtaaagcatgtgcatgaccaaatcagaaggacagcaagtagcctttgtgctggatcagggactggaggtttctgctgtaccacacattaatgcttttgttgctggatcttggggcaatccagatgcaagctgggtacagggctggaaagtgagtggtcgtgtttattacaaggcctaaaatttcatgtgctgccttgacgtgttttagcttcacaggacccaaaaaggcctaactgtgaattctcctggtcttgtaacatataccccttcactcacctctcatgtagaccagctgcacaccacgtggccttcaacctagtgaattttagttccctg

SEQ ID NO: 900397 - DNA, 595 bp, Homo sapiens
ccctgtgtgcaccagtctggtctttctggctcttcactcactcattgggttgggttcttggctggtgatgcaggaagcctttggggcagaaaaagtgatcacaccaaacaggctttagtccttcctcagattcctaaggaggccaggcatggcacaaataccaagtgactagaaatgactgctagcaagataatgccagaaccagcttagctgggggattctggcccggtgtccctttcgagcccttaaacgtttaactcctgaaattcctccccctcacagagccctcacggaagaaccaaagggaaaaagagagtgtgggactcctgttctttaaatgtgcttactctcaaaatatatggcatgtatcattgttggttatctacccagttggcaagactgactacgtgctacaaagcaccagggtgagcaggatataaacaaaaaatagaaaacctcatctctaatgaacttttgcagaattttgcaatcaaaacatctagggggcaacartttattttccctttagtaaaatttgtaagtctaatctttgtaagtttaatgttgtatttatttttaatgttacatctttttt

SEQ ID NO: 900398 - DNA, 595 bp, Homo sapiens
ccctgtgtgcaccagtctggtctttctggctcttcactcactcattgggttgggttcttggctggtgatgcaggaagcctttggggcagaaaaagtgatcacaccaaacaggctttagtccttcctcagattcctaaggaggccaggcatggcacaaataccaagtgactagaaatgactgctagcaagataatgccagaaccagcttagctgggggattctggcccggtgtccctttcgagcccttaaacgtttaactcctgaaattcctccccctcacagagccctcacggaagaaccaaagggaaaaagagagtgtgggactcctgttctttaaatgtgcttactctcaaaatatatggcatgtatcattgttggttatctacccagttggcaagactgactacgtgctacaaagcaccagggtgagcaggatataaacaaaaaatagaaaacctcatctctaatgaacttttgcagaattttgcaatcaaaacatctagggggcaacagtttattttccctttagtaaaatttgtaagtctaatctttktaagtttaatgttgtatttatttttaatgttacatctttttt

SEQ ID NO: 900399 - DNA, 607 bp, Homo sapiens
acaaaataaaggtgcctggactgaaaaatttttaatgtcccttctggctctgatattctctcttctaacattatttattcaattttagagtttatagtccatttctgacaatcyctatctatctatctatctatctatctatctatctatctatcatctatcatctgtctatcatctatctatctaatccatctatctatctatctatctctatatccatatgcttaacatgtttttgcatgtgtctctatgtttcaaaagcctatttaaataaatctttcatggccttttagtctttagagggaaggtgaggctgtttatattacaggaacatattttatttgcccacagcagccagagcacagcatgctattactataaatggggcatgatagtgttttgttatgaaacgtcttttgatgtaggacagctacagcccaatgacttccaaatatatttcatcctactgtaaaaaataaaatgacagatcttctcatggccacggggtctctgcacacatttccaggaacttgaggccatttactaaatccaaacagataaacattgttttaatggtgataaatgtgtccactcacctttgaacaag

SEQ ID NO: 900400 - DNA, 694 bp, Homo sapiens
cacataaatttgcatatatgagtgtatgtgtgtatatacatctactgtctatctctgctgacaggccctagaaacaatggcaccctgtagcaatcaatcaaaatgccatttgccactaaaaggaatcaagcccttttgagaaatggctgattctggaaaaatgcaagatgaattgagaatacggtgttgtgccagaaaagtgagaacgtgttaaaagaatgatgtagatatgtcaaacagacacaggaaccagcttgaaagggcttagactgaacaaacctggacaatttgcaaatcaaaataaataagcatagtaaagaaatacaattcacagaaaaagaaatacaattcacagaaaaaaataaaattcatgacataaatggataaatgaatgaataaataagaaaacaggtgataaggaaatgttctttcttacagtagaaagccaaccaataatcatagaaataattccaggggtcaattaaaatgtcactctttggtaaccattataataacaattgatttaggcaaaaatcttcaacagatgctaaaactagcagctggaagtttaagragtaacaagatacttacgtaatcttaaggtacccttccacaagattctcattaattattagctaactaactagtaattttattattgaagaaactgggtagacaccaccttaatcaagtg

SEQ ID NO: 900401 - DNA, 629 bp, Homo sapiens
atattaaatgacatatccatattaaagtcttttttctaaattgtttcatcacaattttaaactaagcctgaggaaaatgccctagaatgaccctggtgaawctacaaataaaggaaaattcaaagtatttcccttgtgttaaatggaaaattgttagggatgaagatgccagattgaaagatgaaaagagaaaaaaaatctaatcaggaaatgcaaaagctaaggttttagcaaattagctcaccctgatgactcatcccagatgtattaagttcacatttaacagcctcttcattgaagatacaaaataccatctgtctgttgccgatgagttaatgttagtctcaaagccttaaagttcacatttcctaattcttttgtttggaaataaataacctttatgttgcagtgggaatgtaatttttctttcttttttttttttttttttgcccaattgagaggaataaatacaaaaattccaaaacgaagctctcaggttgtgaaatgttctgtgggtcaaagacgcctggctctgtgtacaagctgcctcgcctggatccatccctgggattctttttaggattatgttacttgcctctttagccaaatctcaattcttcattcaagtt

SEQ ID NO: 900402 - DNA, 571 bp, Homo sapiens
attacaattataattatgagttagtgtactctcttctttgggaggttgtgaggattaacaaatgtgaagtacctaacatggtgcctggcacatggtaagactcagtaagtgtcagataagatacctctactgttgttgctgttgccacctctactgggcattgatcctgtttagattggttgcccagcaattcatttcctcactttcaatagcacgctggcttcctttcggggtaattgtcattccccactctgtgtaacgctgctgggattgtgaattcaggtgcctggtttcccactaaggaagcccgtggggtccctagaaaagtcctacatcaaaagcttcctctcactgtcccatacaggtcagaggtatgaatgtcccctaagctcactgagctaccctctcacaggagttttaattctgagcatcacacagatagggaaccatttttaaaaacagtygttcttttgttttatcaggagtggctctttgtatctctctctcactgaaggtgataggtttaccctctccaccttctccttcctcctctactctggcctggggttag

SEQ ID NO: 900403 - DNA, 650 bp, Homo sapiens
caccgcaatgccttttccctagagagcaattattctatggaacaatatcccttacctggtgcattgaagtcccaaaggttggctgttaaacttgcagttgtaattcgtgaaaaagtccagaatgccaagttttgaactgctggggattttatgcacagtttcattttactagaaacaacttgtttcttttctgcctttccttgcaaagattttgaataagtagctgaaaaggcagaaacttgaaatagaagttttcatatttaaacccaaagttacctaactgaaacctgtgtatcttctagcttcttgatttgtgaaattatactgctgacttggaaatgtagacatttgggtgtttgtatgtattcagatgatcatctattttgatatcccaatgaggtaaaatgattagaaaaaaggagaaaacacaggcctcagagttacatttcaaagtagtagagaatttcaatacataatacaattgtgcatatgaatctctgggccttgaagtaaaggaktctttctgaacacttctcttatctgcagaatatttggaatatttcactcagcatgtacgcaaataaagctaccatcattagacgtgtaaagtctaaagaagtcacttacctccttgaggtatttgatattga

SEQ ID NO: 900404 - DNA, 605 bp, Homo sapiens
tccaggaaatcaataggtgattgggataggctaaataatggtcccccaaaaatgtcctcattgctgtccccagaacctgtgaacatgttaccttcaacgacaaaagggactttgcagatgtgatgaaggatcttgagaaggagggttattttggttatgcaggtggtcacaatgttatcataaggacccttatgagagggaagcaagaggatcaaaatcagaaaaagatgtgatgacaaagccagaggtaagactgatgcactttgaagatagaggagagagccattagtcaaaggatgcaggcaacatctagaagatagaaaaggcaaagagacaaattctcagatggtttctaacaccctcaaaaagaatgctgctctgcaacatcttgattttagacttctgaccaccagaactataaaataatacatttgtgttgttttaagtcactaagttggtggtaatttgttacagtaataattggaaacttgtatagttattcacraaaagagtattaccccaaataaaacactttctatagacatcaacttcaatatctcttattattgtaaaggatcctggagcactaggagcgaagtaaattg

SEQ ID NO: 900405 - DNA, 604 bp, Homo sapiens
gaggtaattgaatcattggggaggctagctccatgctgttcttgtggtagtgagtgagttctcatgagatctgatggttttataaggggctttcyccctcttccttctgtatttctcctcgttgccaccttgtgaagaaggacgtgtttgcttcccctttgcctcccgccaggattgtaagtttcctgaggcctccccagcactatggaactgtgagtcaattaaaccttctccctttataaattacccagtctcaggaatgtccttatagcagtgtgagaatggactgatacacatggcatgaaattctatcttatttcgtgcttctcagtagttttatactttacttctacaaagatggattctacagatttctcaagttgattttaagctattttattctcggagatggcattgtaaattagatattttatttcattttatcttctgatggttatattttgtatctaagaaaattttattggaatattaactgtatgaatttattaaaatgtcttttttgtttttaatgggttttatctggactgtcttgtcttttgtaaaataacaactatttcatcatccacaaaatagtggaaacctt

SEQ ID NO: 900406 - DNA, 599 bp, Homo sapiens
ttttgtggtgttaactcctctagccctccacctccttaggctctgtttcacctggcagcatgctgagcatasagcaatgctcagcggatgcactgcttgatggagtgagctccacttgaggatggggactgcctgctctttcctccagccccatgggaggccttgaagacaaaactataggggaagtggcagggcagaccaatctctagtcccaagacgactttcctttgcatattttgttgttctcttgtccacctatgtcacctttgactttccaagtgtttcccattgttcaagatcagcttaaagcatttttagacatcttttatcatggtctttcattgtctgaaatgctacagcccctggagctggcatcccacaattaacaattatattgtcgatggttatatgtgattctgtggtggctccagatgtgaaatcctgtttccttaatgacactataactgtctccagcaaatcagcatctgctctgctgggcttagtcagggctagacacatggctctcgataatttgctttttggttcatatcactcattcagagactgaggtttgtcagccaaatcaatcattacaagga

SEQ ID NO: 900407 - DNA, 599 bp, Homo sapiens
ttttgtggtgttaactcctctagccctccacctccttaggctctgtttcacctggcagcatgctgagcatagagcaatgctcagcggatgcactgcytgatggagtgagctccacttgaggatggggactgcctgctctttcctccagccccatgggaggccttgaagacaaaactataggggaagtggcagggcagaccaatctctagtcccaagacgactttcctttgcatattttgttgttctcttgtccacctatgtcacctttgactttccaagtgtttcccattgttcaagatcagcttaaagcatttttagacatcttttatcatggtctttcattgtctgaaatgctacagcccctggagctggcatcccacaattaacaattatattgtcgatggttatatgtgattctgtggtggctccagatgtgaaatcctgtttccttaatgacactataactgtctccagcaaatcagcatctgctctgctgggcttagtcagggctagacacatggctctcgataatttgctttttggttcatatcactcattcagagactgaggtttgtcagccaaatcaatcattacaagga

SEQ ID NO: 900408 - DNA, 585 bp, Homo sapiens
ttggagttttactagtattcattttattgtgcttcataacttcataacaaatcctatccttatcaacttgttaaaaatattttcatgcacctacaatgtgtcagttaccattcttgtgcatagaagtggatataacaccaaatgtgcttgcataaccaccatttgttttaattaaaaaataaattaaacaaacacaagaaaaactttatcttttacctctcctctaactccaaaggactggaaaatagcaaccactttcagtctccctgcttctaaaactttctccttccagtccgttctcaaaactgcgtcaacctaaataataaacaaagagaggctctctaaaagaaaatgatatttattcagtaatggacattgcaatgggaatacacataccatagtaaactatgcaagtgttcagggaggcaaaaagaagaaaaaaagtttttaaagcaaaacggagtaggattacatamttgttttcagataattatctttggctacatggatcaataacaagggaggaactagtccgaggttggagaggcagttgctgggcagaagtcctcccagaaatattttttt

SEQ ID NO: 900409 - DNA, 545 bp, Homo sapiens
cagtatattctctttttaactgtgaacatattgtattttccccactccagtctgtcaaaatatgcttrcatattttctcctctcacctcaagggaaggagctcagtgccctctgactccattactaggcttccttccccaggaccatgagggaactagcccagcaatggtgcaaagtggtgcaaccactccgacatatgaatctcctgggagtcaagtctcttggtaaatatatgccttagacttgagaagtctaattttaattctctcctgcccagtcccctggtcctgctagatttgtaaggacctaatagtctaagataatacccaaagtgaaaggtcaactttttttttaagtagtagatttgtaaagaattcagggtcaagaactgtagatactaatccttattcaatcactagtttgcaggcctcttcaagcctcttaattgttgtgcctttgtgtgtggaagaactgggactgccctaccttacgctaatgctgtgaggattagtaagtgtcggaaaatccctctgcaaatacgaaat

SEQ ID NO: 900410 - DNA, 682 bp, Homo sapiens
acttgtaccaagaataaatgattttcccctggaaatgcctgaagaagaaaattataaagagagatttgattctaaagtccagaacccttgagcsctgaacttcagggatattgttcttgctttgatcacagatacagaaaagaagaaacaaaacctcatatgttcttatctgtttcttgcctttagaagggaaagaccacactgggtttctcccaagaagtgagaaaagatatgcataatttaaaggtaatttctggagggatatatggtttaggaccaactttcccccagtcagctgacttaggactgcattgtccccaatcagatggcttagtaccatcccttctaaatcatcaaaactgcccacagatgtctgggagtatccagcagatatttatctaattactacagtgtagtgagaataaattcgatgctaaaggaagggagagataatggaagatgtggcgtcgtatgtcaggacttctaagccaatctgacagccatggttatgccaagggcatgtgcggtccagagcaggccactgcatgcactcccttctccatgctgcagaatgtttattcaggtgaatccaggtaaaaaatgaatacacccttaaatggtgaaatcgtaagcaatggctgtaagcagaagtggttcagggccaaagaagctgtttgaggta

SEQ ID NO: 900411 - DNA, 632 bp, Homo sapiens
tatagaactacagatataatctaggagttragaagaacttcctaagactagaaattcaaaggctagataaaaaaggatagacacatttgaatatgtaaatattaagagtattcctatggcaaaagatccaataaataaaatcacagtcaaatatcagagctagagaaaaaggtttatatcagatttaaaacaactggcacctgtaacatacaaaaaagcttttaaaattgtcaagagtaagtcaatccagtagaaaagcaggtaaaagacacaaatggacaaatcactgaaaagtaaatctaaatggccaagcaccttcttttaaatgctcaaattcatttatagtcagggaaatgcaaattaaagtaacaatgagatgccattttatagccatcagatagacaaattagtaagaattatcacatccagtgacggtgagctggtggggatgtgatagaaagggtactcacacatataatggcagaaatatggtgtcttacagctgtttagaaaagcaattgagcaataattataaaaattgaaacaacatttactattcaattcagcaattccactcttgaaaatttagctcatagaaatgaaagaaccaacacatgaagctatttaagtat

SEQ ID NO: 900412 - DNA, 582 bp, Homo sapiens
agtttatgaagctgttctcctgttttaatattcctaaaagcttttcttctaaaagctgtaattttagctttcacgcttagatttatcatcatctaaatttttgtttgtatggtatgaggaagggattgagattcttttttaatttttcttgtagatattcatttgtcccagcacctttattaagaacactttcctttcccccactgaattgccttgacattattgtcaaaaatcaattaaccatgtaagtacaggtcaatttctggattctgcattatgttctattgatctatgtgtctcttcttatgccaataactcattgcgttcattattgtagctttgtaggaagtcttgaaggcagatagtatatgtaaatctatgaacttggtttttctttaaaaaaattgtttagctgttctaagttatttgcatttccatataaattttgaagwcagcttttcattttctattaaaaaaagcctggtgacattataatttgattgcattgattctataaattaatttgaggaaaattagtattttaacaacactgaatcttccaacctatgaattggtgtgtct

SEQ ID NO: 900413 - DNA, 582 bp, Homo sapiens
agtttatgaagctgttctcctgttttaatattcctaaaagcttttcttctaaaagctgtaattttagctttcacgcttagatttatcatcatctaaatttttgtttgtatggtatgaggaagggattgagattcttttttaatttttcttgtagatattcatttgtcccagcacctttattaagaacactttcctttcccccactgaattgccttgacattattgtcaaaaatcaattaaccatgtaagtacaggtcaatttctggattctgcattatgttctattgatctatgtgtctcttcttatgccaataactcattgcgttcattattgtagctttgtaggaagtcttgaaggcagatagtatatgtaaatctatgaacttggtttttctttaaaaaaattgtttagctgttctaagttatttgcatttccatataaattttgaagtcagcttttcattttctaytaaaaaaagcctggtgacattataatttgattgcattgattctataaattaatttgaggaaaattagtattttaacaacactgaatcttccaacctatgaattggtgtgtct

SEQ ID NO: 900414 - DNA, 662 bp, Homo sapiens
tgttttgcttacttttaatgatttttgttgagtttagatatttccctgcaagtgtacacctttctacttgttctcacagtgtgagcttcacttcagtttctcaagacagagagaggacctatatttaggattttaggagtcatgactggccagagggtcattcctggtctccacttgtattccctttgcaaacctgaactgacagatactggttttttttttggtttgttcttaatttctaacaaaatgattgtggaaatctatcagtgctggtgacatgaccacaactgacaagtgaattcagggttttcatgagaatccctgggaacctgacattagtctcatgcttattacaccagggagaggtgtgatatttatcaagggaatacgtgagaagggtacagtgctttgaaaaaaatatcaattttttgaaaaagcactgcaaatttcctctttatcgacctcagaaatagttccaaaaaaagtactacataatatcaagtactatgtttctcaatcatctggaaatatttccaactaactcttatttcttatttttaaatagaaatakcaaatatggcatgcttatcccatccttagactagtagaacaatacttttctaatttaattccaaacctatggtcctaaataagtgccttta

SEQ ID NO: 900415 - DNA, 631 bp, Homo sapiens
aagactgagtctatactgggtaagatacagcacaggtaatcaatttcttaatgtagaagaatatataggttggctaagttagctcttctgagaaattttgataaaaattcaactggttgtgcaggtttttagtattccatgacagataagagtggaattaaatatgactatgaatcaaatgtggggtcttggaaaacagaaagtagattgaaagaagagaaaaggaaaaaatgactgtgccagagcagtggttctcaatgctgaatacacagtggtatcattgggcacctaaaatatatctatgcgagggcctccaatcccacagattatgagttaattggtttgtgtaggactagggcatcatgcagttttaaaaagctccctggctgactctaatgcacagctagattgcgaatccctgccctagagaaaaaataaggtgagtgttgcctgacactgggttgtcaaatgaaacagattcttctatgaaggctaattccttaaagaacagagaatgaggaggttgtgtccaacacaatgttgttagtttaagggatttcgtgttcaagtcagggccccattatctcaatttgctcayaggttgtctaggctgtccacagaagcatcctgt

SEQ ID NO: 900416 - DNA, 630 bp, Homo sapiens
cagggctagaaatactctgatctctcaaggaggaacctatgctgtacatggagagaaatgtaataatagccctgttggtctgagcactgtccttatcatacccttaaacaaaccactgttcatgtaactacacgataatcagacgttgcctactatctctgccctataattacaagttaaagattggctagttagagaattgtgaagctaactgcaaaatttgcatgagtcagtgtctatgtttgtgcactgaaactacaattgggcaaatcgtatgtgtctgtaacccatctggaaatcaaattaataaccttgagtgagaaaatcacaaagcaaacttacttagtcaactctgtatctcaaaggaatgaataaggaacttaaaggggaaaaaataaaattttgtcctatgtttcctcagcctggaaaagctttgcatttcttaattaaagagattggtttccaagatgagtatgagtaaaatgaacttcctaatactagctatgaattacaaaggcatccaaagaacagatgcgtttgtaattgggtgacagggmaatctcacaaacactgggattattgctattattttatctgccataggaccaattaggctatgcacatagaagg

SEQ ID NO: 900417 - DNA, 635 bp, Homo sapiens
tgtttttgtaaggtacacaaatagaatttctcttttcatagtagatatacaattttttccatgaaaataaaattaagaaaagttttgtagttttgcaggtcttcataattgtataggtttggtaacctttgtgatttataaggtgatgtgatccaaaaacctcaatagctgtgtgtgtactggacttttgcccctggtattgggatacatatagaaagagcttcaagggaccttgaacatcaactaaacaatcatcttttaacaaaaaagaaataagggtcagcctttcctatttcccaaaattctatgtcaggtgtctattttttatagtgttttgtgtatcttttatcatagcagtatattaaaattggtttttacttgcctgcttttcactataatgaaagctcactaattgcttagtaagtagattgttagcattgaattcccagaacatataaggcattttaaaatctagaattataataacatataacatttactgaacatttactatgtttcaggaaatctaagttttatgtatgttatataacaagatatatatctgtgtatatatgtataacatttccatatatacacataygtacaacatctatatctgtcatacatacacacac

SEQ ID NO: 900418 - DNA, 612 bp, Homo sapiens
aacatccctgcttgttttctgatttattactgccatgacaatgcaaagaaaattaaaaatgaatctgaaagtgtgccagatcatttasactcactacaggaaatattttcactgaactaatcattattttttgggtttggtggtaatgatcagttgctgttttgtgacatctatttccatattgataaagtcaatttgtttatcagatttgtgctcctactggtgcaattttaaaaaattgaccaccagcaactggtgtcatccaatgcgcttggaagcattagtcaaaatatgaacatccaaacttcattattgatggagccactggagaaaaagacatttagaaatgactgagagtatattgattatcatatgttattatgatattgaagggactaactgttctcaatttgctgtttaggctgttgggacatcaatagagttatcagcactgaatcagatgatgcattattcatttgctttcagccttgacccattacttaaatataagtttgagattttctaaccacctcttatgttttatcttaacatttgccttgagtgaacgtctgctcttatagatttattttaatggctttcaaatctagatca

SEQ ID NO: 900419 - DNA, 613 bp, Homo sapiens
caatgaactatttttaaaatcactacttattttaaccattacctagctctaggcttcatgagattataaactttaattctaagaaaactgtttgggtaaaagtcctctggggaatatatatakagagagagagagtaattcaagtataaagttctctgacactttgaattagtttactaaacctttggtactacaatggctacatctttaatagaatacattactgcctgttcacttctcaagaaaaagtatgtccctcagatttccttgttcagtgcagtggctcacacctgtaatcctagcactttgggaggccaaggtggaaggattacttaaggcctggagtttgaaccagcctgggcaacatagcaggaccccatctctaaaaaaaaattttttttaattagccagacacggtacacgtgcctgtagtcccagctactcagaaggctgaggcaggagcattgcctgagcccaggagttagaggctgcagtaggccataatcacacctctgcactccagcctggatgacagagtgagaccctgtctcaaaacaaacaaacaaaaaaacttaatttccttgttcatattctcttttgtggaaaaacataa

SEQ ID NO: 900420 - DNA, 641 bp, Homo sapiens
gtccaaagttataccttttccctcaagaaatgctgagcattactgtactgtatatataccattatgtactgccaaaatcttgacagagtgctaagactttgaatgttttgttaacttaaaataatcaaagttataatagttcaaaagctctcatctttttattaggctacctatttttatttgggtagctttaaaaccacgtacacacctagttatttgtaatctacaccctacttcctatggttgtgagataaatcacagtttgagaatgaatttttggatcatctataactccaactaccatatatctgaattctggcattacagctaattatcctgccaaaaataatgatgcaaaacctggcagagatgctgatttgtctgtcaagaaaatctttttcagataatataacattttaaaatttcctagtcagcacttaaaactttcaaatgtttctaagcagaatagcttccttaacatggaacctataaattaattacagcaaagagcaattacagcaaacagcccatttgttattacactttcacaactggtaagctaagaaaataatgaagactaaatttaatagtctaataatatattaaaattcatacrtaacatagttctctaatttagaaca

SEQ ID NO: 900421 - DNA, 562 bp, Homo sapiens
tgatgtcagcccgtctcttttgctttatcctttaagctcaaggctgtaaagtataatttgcacaaaggatatctaagtgtcttttttttttttttttttttttttgagacagagtctcactctgtcamccaggctagaatgtaatggcacaatcttggctcactgcaacctccacctcccaggttcaagcaattctcctgcctcagcctcccaattagctgggacaacaggcgtgcaccatcatggctggctaatttttgtatttttagtagagaaggagttttaccacgttggacaggctggtttcaaacttctgacctcaagtgatgcgcccgcttctgcctcccaaagtgctgggaatacaggtgtgagccaccgtgcctggtctaagtgtccattcttaaagccagacctccgtgagactgacccagtgggatgggaagaagggaagaaaacatgaaagattaaaggaaaaaaaggcatcaattgattattaaaagggttagaaaacaaactcattaaatcagcttgttacctgtacccccagctgccctggggagct

SEQ ID NO: 900422 - DNA, 702 bp, Homo sapiens
caagagctcccaataacacgtgacagtaatgcaagatgttccctgcgaacaccatgtcagtcagacataaaggttgattcatgacatctggaaacagctgccttttactgaaagacaaagaaatttcaaattgcattaaatacagcctgctaatatgcttaccttccatccacaaatcattggcagacatttggggctgagatttcctcacattgtcacaaaaattaggtcagagtaataaatagaaaagatgttagaatttggacaaggaggtaacaagcagatccccaaataggtcaaaaacagcaaagccaatcaaaaccatttaggactgtgactgtggttatccaaaagtgacagggtctgggagtacatgtggatgaactgaactataacattattcttgaaagattgtctccattcaacaacatcaatatatatcacccggaaacctactattaaattagtgtactcctgtctcatctaaatctagatcattgctaattatacatgatgcttttttcagagcttaaatgtaggagtcaggaataacaggattcaaatataggcccttcaatgtgatgttcctaaaatacttttttttttyccccacaaagtctactgtttgtcatctttagcatgggagatgccaatggtaccaacatctttggattattataaggtttgaatcagattaaaatc

SEQ ID NO: 900423 - DNA, 551 bp, Homo sapiens
tacccagatagcagttcagctcctgtgttcaacagttcttgaaaagttgatttattctactttttccagtgtatgattgccagaatagtggtyatagatctctttggagaagaattagtgaaattattaccatgcaaacttgccttggtattgcagggtcttttcttctaggtatccagcttttccttcagtcaatggttctgaatttaaaaactagctcaggttcagaaactagacaaaggatcatgccttcttattacagtgtctgtccttagcctccttatcatctatccatgatttctttggtttagactgagcaatgggcttattggctgtccacctattttgcccctaccgtgccttattgtgttaaccatctacctagctcttcatgaatcagatactcctggctgccacttgggctttgcaatgtatcacagtcactgtgcctgcaatggactgaatatttgtgtcccctcataattcatatgttgaaccccaatccctaatatgatgtattaggaggtgtggcatttaggaggttattagaa

SEQ ID NO: 900424 - DNA, 589 bp, Homo sapiens
cttgttaaaaaaaaaacacagatgttttatatttattttatcatttttgttttatcaccttgcaaaattttacagcatggaattttattcaatgcagtggcattttgaacagcaatattagacagatgtatttgcaccatatttggggacttttttttctctttggcaggatattaaaagtgaaactaatgtaacctggtgttttgggaaatgtggacgaggcattttgcttattggtaattgaaaacaacaaccttctcctctccaaatgtacccctcaaaaaaataagctttattgcttggataagtgattaaacgtttttagaatgccagaagttcaaatgaagccactttaaggaagacttggctcctcaaatgcagggactgtgtcttttgacttttgctggatggtgccagacaggacctaaccaatcatcctgttgatttgttgcttttgttgttttaggattttgtaaggacatatggcacagatacagatcacaatacagctaagaaatggaattattttcaggcatagtataaataarccaaatctcacttttttccttctactttgtaccccttagct

SEQ ID NO: 900425 - DNA, 648 bp, Homo sapiens
cttttaaataaggacatatacaatgaatatattgataaggtaagttgcagactrgaagaatatatttgcaatgcataagctttgaagaatttgcatcctttgaaacagatgcagaaaactatgatactctggatctggattcctgggtctgaatcttggctctatcacttattaacagtgtgtgaccttaggcatgttatttaacctctcttaacctcaatttattttcactttaaaaaatgtggataacaaccttgactgtgttgtagggttgttttgaggattaaatcagttaatgtgcatgaaactggagggtagtgtcttgcatttagtgaacacctccaaaatcttagccattattaataatattatccagaatatataaaaattacttaaattggccaggcgcggtggcttacgcctgtaatcccagtactttgggaggccgaggtgggcggatcacgaggtcaggagatcgagaccatcatggctgacatggtgaaaccccatctctactaaaaatacaaaaaattagccgggcatggtggtgggcgcctgtagtcccagctacttgggaggctgaggcaggataatggtgtgaacccgggaggcggaggttgcattgagccgagattgggccactgcact

SEQ ID NO: 900426 - DNA, 576 bp, Homo sapiens
ccctgctgtgtgccacctagggacttggtcctctatgtctcagctgctctagccatggctataagggaccaaggtacagctcaggccatggcttcattgggtacaagccccaagccttggcagtttacacatggtattaatcctgtgggttcacagaaatcaagaattgaggttttggaacctctgcctagatttcagaggatgtatggaaatgcctggatgtccaggcagaattttgctgcaggggcggggccctcatggagaacctctgctagggcagtgcagaagggaaatgtggggttgaagcccccacatagagtccctactggggaactaactagtggagctgtgagaagagggccaccatcctccagaccccagaacggtagattcaccagcagcttttaccacgcacctagaaaagctgcagacagtcaacaccagccagtgaaarcagcctggagggaggctgtaccatgcaaagccacaggggcagagctgcctgaggccaagagagcccacctcttgcatcagcatgactgggatgtgagacatgaagtcaaaggagatcatttc

SEQ ID NO: 900427 - DNA, 552 bp, Homo sapiens
gctgaatatcacgtacgttgccaaactacttgttaatattcaagcaaagagcccttcctggaatgtcagagctgaagcactctcataaagccattctctaccctaaggtaaaaccattctggcaaattataatctggctcagggcttttcattcagactctgctttgtttttttgtttgtttgtttttgttttttgtttttgtttttgtttttgtttgagatggaatctcactctgtctgtcacccaggctggagtgcagtggtgtgatctcggctcactgcaacctccacctcccaggttcaagtgattcttctgcctcagcctcccaagtagctgggactacaggtgcatgccaccacacccggctaatttttgtatttttagtagagatggggcttcaccatattggccaggctggtctcaaactcctgaccttgtgatccaccygcctcagcctcccaaagtgctgggattacaggcatgagccaccatgcctggcccagactgtgctcttaggagctcatagaaaccatgatggcttggattctctg

SEQ ID NO: 900428 - DNA, 508 bp, Homo sapiens
ttagagagaatattataaaatattcatgaataactaagttgatatcctttccacttggggttgtttggttatttcctcactttcatttctaattttgtatatgttaccaattgtgttttgctaaataaactttatgtaggttcccagttgtgttatgtataaatttatgctttcattttatcaataatttcctctattttccttagctcctatttgttaatctttataaaacacttgatttgaataattaattcatttactattaatctttattttgtaagtttaaaactatgagaattatactgtgtgaactgtggatatagctcatagattctatagcttactgttttcattttcattattgtatgaacatcacacaagcaaagttttattttatttttgaactatgggttgtttaacataaaggtgtaatgaattgttawcaaagatatttgttacattttgttgctttgattttatatttcaagacggctctactggggtttta

SEQ ID NO: 900429 - DNA, 611 bp, Homo sapiens
agacctcaaatagccaaagcaatcttgagaaagaagaacaaagctagagacaacatccttcctgattctaaaatatattacaaaactacagtaattaaaacagtgtaatactagtataaaagcagacrtaagttcaatggagcagaatagagagcccagaaataaacccacatgtatggcatcaacttatctttgataagggtgccaagaatgtgcaaggggaaaaggatagtttcttcaacaaatggtgttgggaaaatggatatccacatgtaaaataataaatttggacccttatcttatactgtacccaaaaataaactcaaaatgaattaaatatttaaatgtaagacctgaaactataaaactcctagaagaaaacatagggaaaaagttttctgatgttggtcttggcaatgatttcttagctatgactccaaaaacacaaacaacgaaagcaaaaataggcaagtgggactatatcaaacctaaaagcttctacacagcaaaggaaacaacagactggaaaggcaatctatggatgggagaaaatatttgcaaaccacatatctgataaggattaatattcaaaatccataaggaactcctat

SEQ ID NO: 900430 - DNA, 611 bp, Homo sapiens
agacctcaaatagccaaagcaatcttgagaaagaagaacaaagctagagacaacatccttcctgattctaaaatatattacaaaactacagtaattaaaacagtgtaatactagtataaaagcagacgtaagttcaatggagcagaatagagagcccagaaataaacccacatgtatggcatcaacttatctttgataagggtgccaagaatgtgcaaggggaaaaggatagtttcttcaacaaatggtgttgggaaaatggatatccacatgtaaaataataaatttggacccttatcttatactgtacccaaaaataaactcaaaatgaattaaatatttaaatgtaagacctgaaactataaaactcctagaagaaaacatagggaaaaagttttctgatgttggtcttggcaatgatttcttagctatgactccaaaaacacaaacaacgaaagcaaaaataggcaagtgggactatatcaaacctaaaagcttctrcacagcaaaggaaacaacagactggaaaggcaatctatggatgggagaaaatatttgcaaaccacatatctgataaggattaatattcaaaatccataaggaactcctat

SEQ ID NO: 900431 - DNA, 634 bp, Homo sapiens
atcatcctgctgcccatcttgtgagtagaaagtcttgtctcatcttacaggtaaagcagctgaggttcagagaggctgatatttgccccagggcaaagagctagggtgtgacagagccaggctagtgtgagtctaaaattcatgcttttgaccagtatgtatgctacctggacagaatgtttttacttttcatgcatcagctaacccgcactcccagactgcagtggaaaggagcactgaggcattttctatttaatttcccaatctttgagcagaaaaaggacaaaattgaggggttgtattctcacaataaagtagggattcttaacctggggtccatggatgccaagaaggggatagaatccaagaaaatctgtgaactcgtatgggaaaaaaatcctctttatttttcctaactgaattgtaccatttccttcaattatgagtagagtaatattagtagcacttaagattttgtcacccataagagttagaaatgttttcatatcatattatataatagtttgacagatatstcaagatattatgtatcctcaccactactgcaaaattagggaagctgttagactcattgcagggtcctgttatttaatgcattaataaaaagtaatat

SEQ ID NO: 900432 - DNA, 599 bp, Homo sapiens
atatctctttaacatactgatttcattttcttcggatatatacccagttgtaaaattgctgaatcatatgataattckatttttgaggaaccttcatactgttttccataatggttgtactaatttacattcccacagtgtgcgagagttccctttttccacatcctactaaatgcttgttattttttcctatttttgatagtagccattgtaacaggtttgaagtgatatctcattgtggttttatttgcattttcctgttgattagtgaggctgaacatttttaaacatacctcctggccatttgtatgtcttcttttgaaaaatcccgtttagattctttacccatttttaaataggattatttgttttcttgctattgagttttctgagttccttataaattgtgtgtattaactccttatcagatgtatagtttgcaatactttctcccattctgtaggttgtctcttcaatttattcattctttccctttttgtctgcataaggtttttaatttgatgtagtcccatttgtctatttttgcttttgttgcttgtacttttggggtcatgttcaaaaagccattgcccagacca

SEQ ID NO: 900433 - DNA, 641 bp, Homo sapiens
tctctattgaattctccaatatsctgtggccaggctattgcatgatggaaccagttgctaaagaaattcaaattgttcgtatagctgccaaacatacagcctttcttattgtattttataatgtcaaggctcctacatactttgggccaagcctgatggtgcttcatgcaacaccaaatacaggcaacctacagtcctctcctcgctctctgttggaatattttctgtatttttcaaatcgttattaattcagcaactgtgtgcataccagttgagtgcctatcaggttccaggtgctgcatcctgccacttctagctgcagcaggttcatttttaacctggctttgctgcatctataaaatagagatgataatgttgtctttgcagagtttttgaaatgattatatatgtgggatgttctgtaaatggtttatttttattgcataattgaggagacaaactccttcctctcactttccttggcaatacccttctgggaaaaatgtttgtattttattctaaaatgtcagacatagactactttccaaccctgattccatatcaaaatcatgtgtgcacacaataattatacttggatttatgtgattatctgactatctcccccactggattggagcctc

SEQ ID NO: 900434 - DNA, 644 bp, Homo sapiens
ccaggcacggtggctcatgcctacaatcccagcactttgggaggccgaggcaggtggatcacctgaggtcaggagatcaagaccagaccgggcaacatggtgaaactgcgtctctactaaaatataaaaattagttaggcacggtggcgcgtgcctataatcccagctactcgggaggctgaggcagaagaattgcttgagcccaggaggcagaggttgcagtgagccaagattgctccattgcagtccagtctgggtgacagagcgagactcagtctcaaaaaaaaaaaaaaaggaactgaaaaaatgacttgtgcttggggatacacagcatgaacgggtggcaggaaaaaaacaaaataaggaaaactgtcttttgaaagcatgaaagagtcatgggaggtgcttagagtaaaacagtgctttactcccatgtatcaacctagaaaatcttcttcaaaaggaaataactttctttgaattgatgaagctcagaaaaagcttgaggtatatgttattatcaagagaagagtttaaacaacaacttatttcactgctagtttccgagtaaagattcttatagcaatttattgtcagtagactctaataccacctgygaaatactactatttttactcattatt

SEQ ID NO: 900435 - DNA, 646 bp, Homo sapiens
gtctgtctataattatttccctagcactcaggtcttaaaataaatggattctatgggttttaagaaatcagcctgataataaaataatgccttagaatctggaaatacttgaatttatactttcatttcggcctggggcaaccatatacttttctacaacccaataaaagatatctgctagacttgcagttgtccaggcatatagttgaggggcaaagatggaagattctgcctttttgtagccctcttcagcacccagtgctacaggcattcccttcactcagaaacatcctcctgaagctatgccagcttattttttcttattttgcattaaactacaatgaacatagttaaaatgagaatttttgttaccatggataaagtataaagtgaatctgaaatgtcattgtctttctgaccttttacatgtgccattaatatagtaatcttattaatagagagcttcatcagagcagggaaaatggagttcaacgtctgagaatgttagcaacttcttacccatatatctgcaaaaaaggaaatacagtttctgcaaaataaatactggrttcatttttttgcctaaggtatctttctcgctataaaggatttaacatgtttatttcaaaccaatatactttctctc

SEQ ID NO: 900436 - DNA, 569 bp, Homo sapiens
tgggtgagatagtggtagaccacagactaaggagaagaaaggccatgagaaattaaatccttgtacagcatacaactaagtgtcttggtaaatgtcatatctagttgctttccttctrtgaccctgccaacttgcagtaaaaagtttcataagcagcttttagtagttggtgttttagaaaatgaaatgtgagcaaggctatccacacttgggtcacaacagtgtgtcaaggtagataggagcctctgtaataagattgaaaagattagatggtgcacttaatgtgagtaggaatccagaatgagacttgtccaggagattactagatccacaaagtactccctagaatattagaggaaaactgtaattttctaagcacaaaagatgaaggcttgagccattttgcttttggattagtgaaaattaatatctagaaagttatatattaaagacacatgaatagcttaagtaacagctattttaacagcctgaagcacccttaggtgaaaatgcaatgagtattttggcactataggtatataaacatgatccagaagacagtgtggtgg

SEQ ID NO: 900437 - DNA, 660 bp, Homo sapiens
gccagcagcccacctgtgacaggagcctggctctgctcctagctggccgtgtgaccttgggcaagtcactggcttcttctgtgcttctgtttattgtgaaatgaggatgttaatgctaacgtatcccagaggatggtttcaagggttaaagaaaataaagcactagagagaggtctggcacttagtagggccatttcctcaatttggcttccttgacctctcaaagtatgtccccacagtcactttcctatcacccagttttcttcacagagcttggcagtgtgaagtaaccttggttattcaactttttttttttcccccaagacggagtcttcctctgtcacccaggctggagtgtagtggcaagatctcggctcactgcaacctctgcctcccgggttcaagcgattctcctgcctcagcctcctgagtagcagagattacaggcgcccgccaccacgcctggctaattttttgtatttttagtagagaccgagtttcaccacgttggccaggctggtctcgaactcgtgacckcgtgatccacccgcctcggtctcccaaagtgctgggattacaggcgtgagcccccgcgcctggtcaactattttatgcaatcagtatttattatgctcctactatgtgccaggcactggttgt

SEQ ID NO: 900438 - DNA, 615 bp, Homo sapiens
ctactgctttctgctgggttttcacccgccgtggtgagtttcctttcatgcatgtgcttatcagtacttagcccaagcttcaagaagacattgctacagatcgctagagatcgctctctgggcaagtccatactctgccctgcaaattcaagttaccttgttctccccaaagtctgatactgtcttctcaactgaacaagattaacaagccacatttttctcccctcaccctcacctcacactgtggcttagaaactgcctccaggattaagctggtacaatcctaggactcgcctcttttgttttctttttcttagagctcatattcctgtgctatctgctgtctgtaaactattgtttcatgcattttgttttgatggtttagttgtttaaagtgagagcataaattcgatcccagttactctattgtggctgttgctggaagtcagtatctataaggaattttaaaggatagatttccacattttccacgctgatctatcctgttatcccatttaacctcactattatcccttctgaacagccatattttagatcyactggaaggggtttggcacaaatacagtcttcaggatactgctagggctttaccag

SEQ ID NO: 900439 - DNA, 696 bp, Homo sapiens
aaaacattgtgtgtgtgtgtgtgtgtgtgtgtgtgtgtgtgtgtgtgtgtggttttccctgaagcagagtcagagacccttaatttgcacrgggccaaatgtgtaagttatcaacaagttccatgaattgcttttgaccagaaaaagtttacaaaggatgccaaagttcataaaagatgccatttaagggagtggcaagctaagtgtttgcttccctttcctgccctaacacccttataacaatccattctttatcactctgcaggactgaactcgttgttggccacctgtttggaaaaccattctcttgtggttggatctaacacatacagcatgtgaaggtcagcatgttaagttttcagttttttcccacatctagacattagctttctagatagatccaggcatatcatttatcaatcttacttcttcagttttccatcatttattttcaaaaagaacaacaacacttgttagttaaaataaacaaaaaagaaagtttgtttttaaaaagaccaaggctactaaacctaaaacaatatttcaaaaattctacatgtattgtgtgccgatttttattactatttttggtctagttttaagtattactaatgagaatataagcagagagtaaataggacttgatatcttaaaaataaaggtagagaatagggaacagttaaataagtttacatg

SEQ ID NO: 900440 - DNA, 665 bp, Homo sapiens
agtcttaggtttctcgttaacagctgtcatcctgggaaaatasttgcctgcaaccttatttattcatctgtaaaaggaattcctgaacaagagtatctccaaactcctttctagttttaactaggagtttccagaaatctagcagagaaagatatggggataacaaagtagaagtctatattgcatagtgttatttaggaccatgttctctggagtcagtcaaacctgggtttaaatcctggctccattatttacttactggaaaaactgggataagttaccaccccaatcatctgtttccttgtccattaaacacatgcttataatagtgactacctcttatataattattattacaacaagcaaagagctaataataattcaaagaaaaggtcacgtatgaatgagggctcacaatgcacttacaagaagacagcaattgagaagatccttgaagatgaaggagggtctcagtaggtagaatcagcagacgagagataagagacaaaaatgagagaagttctttctaaaggagggtaaaactcacaaggttttcacacatgtagagaacaggatatacagtacaatagaaccttctacctttcatgagtgatgcttccctgagggctgatcactcatgatcactcatgattgaaactacttca

SEQ ID NO: 900441 - DNA, 571 bp, Homo sapiens
ctcttggtaatttcctaaaatacaattgattagaacttgtttttattaktttccccatacctggttggtgggagttcactctggtttaaaagtgtaagtagatggaagtttaagtttacaggtagcagtaaaaaaagatgctacctaatctgttgcttgatcactgttactctcttgtctaaaaccttcagttactctcaaagataagttcaaatttatccatgctccttcatctggaactgaagatcttccacaaggttaccatcacctgccactccagcttcattttcttatgctgacctaaacatatgctaaactctggacataccaaagtactcactcactgcttcttaatttaatacttactcctactgcctctaggcccttgataatattatttctatccctgatgtgatttagcaccagtgtattggaataaaatagaaagttagtcatctaactttctattttattgtgttaggtagggactgcttttgtatatttgtcactccagaatgtttaagtgagaacagatgtgctgagttaagaacacaccagttaagctaactgg

SEQ ID NO: 900442 - DNA, 691 bp, Homo sapiens
agggcaatcccaatcccctttatgcctaaggaagggaagaggattggattgccctattctgggttacatgctcactgcttggctatgggagagaggagtgccttgattgacaatctcttttattgtacacaaaatggaagagatattggtattttcccacaacccccttatgacgatgacatcagaaggtgctgtgtgaacatgaataacacgtgctaacaggtatgcctttttgtccccagtcattcattcattacaggtgttaagttatataatgtatgactaagaataaaaattagaataagtaattgaagaatacgtacaacatttgagggatagtataaacctgggtaataaattgactgaagcatatctatctcattaccattgggtgctatgaatgttccattgataaacttcttggagactataagaagcttcttatttaaagaaaaactattttaaagaaaccattttaaagaaaactattattttacttattagtttaacatgccccctcccactgcggtagtatagtttttaggcttcttgacattcattgcactttcccatggcagcattacmccagttttccatttgtctcaggggaaaacaacttcatctccagcaccatggttgggccctgatgaactgaagccaagatttttcacctgacctcaaggattaggtc

SEQ ID NO: 900443 - DNA, 625 bp, Homo sapiens
caaattgtatgatactgtgtctgtgcattgcttctttagtacttcctgggatttagcttggaatggctagagaaaatgagcaaattagattattttagtaaacaaactcagagatgaattaggcttttaagagaggaaaaacacttacaggtgaaggtattttaacaaatcgctttagcatccatggaaagctttcaaatcacaaacaaagggagaatacttatcctatcccatagagatttaagctacatgtctcatgggcatatattagcctgccaataatactagggtgcgagtttgattgtatacatgagaaacattaaaaagaaataataagaaatgtttaggcataacatttgtggctgaatcttagtctggcttctatatgatcatcagacgtgacagatgatttcagtgatatgagttgagacagaatctcaaatgtgttatgaaatttttaatagaaagagaaaaagatgagtgggaaggaaaaagcacagactgtggagtgaggcagatctgagtctgaattttartttcatcaattacaatgtggaaaagtgagttgcttgaccttgaacattttacagattgagaaattgaggtttagagattaatttgccca

SEQ ID NO: 900444 - DNA, 646 bp, Homo sapiens
ctcacatctcaatactatggttaaatgtaaatggtctaaatgctccacttaaaagatacagaattgcagaatggagaagacctcaccaaccatctgctgtcttcaagagactcacctaayacataagtagtcacataaacttaaggtaaaggcgtggataaagacattctatgcaaatggacatcaaaagcaaacagtagtagctattcttttattagacaaaacaaactttaaagtaatagcagttaaaaaagacaaagagggacattatataatgataaaaggccttgtccaacaggaaaatatcacattctaaaaatatatgcatctaacactggcgctcccaaatttacaaatactaatacaaatagcaattactaatagaccaaagaaatgagatagacaggaatacaatatagtgaggggcatcaatactccactgacagcactagacaggtcatcaagacagaaagtcaacaaagaaaaaacgaatctaacctacatcctggaacaaatggacttaacaggtatatacagaacattctacccaacaaccatataatatacattctattcaacagtacatgaaactttccccaagatagaccatatgataagccacaaaacaagcctcaataaattaaat

SEQ ID NO: 900445 - DNA, 631 bp, Homo sapiens
catattcataaaacaagttcttacagacctacaaaaagacttagactcccacacaataatagtgggagactttaacaccctactttcaatattagacagatcaacaasatggaaaattaacaacgatattcaggacttaaactcagcttgggatcaagtggtcctaatagacatctacagaactctccaccccaaatctacagaatatacattcttctcagtgccacatgacacttattctaaaatcaaccatataattggaagtaaaacacttcccagcaaatacaaaaaacatctgaaattataacaaacagttcctcagaccacagtgcaatcaaattagagctcaagattaagaaactcactcaaaaccacacaaccacatgaaaattgaacaaactgctcctgagtggctcctgcgtaaataatgaaattaacgcagaaatcaagaaattcttcgaaaccaatgagaacaaagagacaacataccagaatgtctggacacagctaaaacagtgttaagagggaaatttatagcactaaatgcccacatcagaaagctagaaagatctcaaattgacaccctaacatcacaattaaaagagctagagaagcaagagcaaacaaaacc

SEQ ID NO: 900446 - DNA, 631 bp, Homo sapiens
catattcataaaacaagttcttacagacctacaaaaagacttagactcccacacaataatagtgggagactttaacaccctactttcaatattagacagatcaacaacatggaaaattaacaasgatattcaggacttaaactcagcttgggatcaagtggtcctaatagacatctacagaactctccaccccaaatctacagaatatacattcttctcagtgccacatgacacttattctaaaatcaaccatataattggaagtaaaacacttcccagcaaatacaaaaaacatctgaaattataacaaacagttcctcagaccacagtgcaatcaaattagagctcaagattaagaaactcactcaaaaccacacaaccacatgaaaattgaacaaactgctcctgagtggctcctgcgtaaataatgaaattaacgcagaaatcaagaaattcttcgaaaccaatgagaacaaagagacaacataccagaatgtctggacacagctaaaacagtgttaagagggaaatttatagcactaaatgcccacatcagaaagctagaaagatctcaaattgacaccctaacatcacaattaaaagagctagagaagcaagagcaaacaaaacc

SEQ ID NO: 900447 - DNA, 638 bp, Homo sapiens
ggatcaaataaacctgatagacacctacagaattctccaccccaaaacaacagagtatacatttttctcaccaccacgwggcacatactctaaaaatcaatcatataatcagaagtaaaacactcaacaaactcaaaacaagtgaaatcataacaaaaaatctcttggaccacagcacactgaaattagaaatcaagactaagaaattcactaaaaaccatacaattacatggaaattgaataacctgctcctggatgagtcttgggtaaataatgagagtaaggcagaaatcaagaagttctttgaaactgaagagaacaaagagacaacataccagaatctctggaacacagctagggcagtgtgaagagagaaatttctagtactaaatgcctacatcaaaaagctggaaagatctcagtttaacaacctaacatcacaactaaaagaactagagaaaggggccggacacggtggctcatgcctgtaatcccagcacttttggaggccgaggcaggcgaatcacaaggtcaggagttcgagaccagcctggccaacgtggtgaaaccccatttctactaaaaatacaaaaaattagctggacatagtggcaggcacctgtaatcccagctatttg

SEQ ID NO: 900448 - DNA, 645 bp, Homo sapiens
gtaaaatacagtgaatcaaatcacagaaataacctcaggatctctcccttgcccaatccaacacacacacacacacacacacacacacacacacacacacacacacacacacaattagacttccaacattatggatggtttgtgggaaaaaaaaaaagtctttttttaaaggcttaattctagtttcaacaatctgtccagaattactacccctttctgatgaaaagaaaactcccctccctcctttcacctatatctctagtcttcagattgtcacactcaccacagaagaggggaacagataaaataacatagtacttagagtcaagagaccaaattttgagcccatattccactattaccctcaaggtgactttgggaaactgtcagaatgatctaaacccttgtttatttccatttaaaatggataaaggtaacattgcccaacaaataaagattttcagtttattattgatgcagattaaaaaaaagctgtagcgacaatccagatatcatctgatagaggcaagctagccattcagacagattgctmaagcatttttcttagccttatagaggagactcaaaaatctggcctatcagtgtacacagagaggatctctttctctctcaggggtagcctca

SEQ ID NO: 900449 - DNA, 666 bp, Homo sapiens
tgtttatttttgaagttttgtagtttttgttagtgaagggatcttccgcatctatttctktttgtatttttggatttcatcacaggtttttaattgttaaaaattccaatagtcattgttgctggtacatataaaaaaactgaattttttatttgacagttgggtcctgtaaacttgctaagtttcttattctaaccatagttatgtctgtagattctttagggttttctgaaacactatcatgttacctacaagaaagggtagctcattaattcgaaagatataggagtgttttagtttttctttgtacatttcaggaaggttgtcctttccctgcattttgcctaatgcatcttagctgtcaactttactgaaataatgtatttcacaatcatacttttctaaccttttaaagtctaaaggctctgtggaatgattatttgttttataatttatgatactggcaatttgaatttatctttgttttctcttgaacattcttgttaacagtttatcagtttcattataaaaggaccaattttgggccattttaattttctctattttatgttttacattttattggtttctgatctgaaatttatgtccttttgtttacctaccttggcttttttttactcttcttattctagcttcttaaggtga

SEQ ID NO: 900450 - DNA, 485 bp, Homo sapiens
tccatgtgttctattgttcaactcccacttatgagtgaaagcatgtggtgtttggttttctgttcctctgttagtttgctgaggatgatggcttccagcttcatccatgtccctgcgaaggacatgaactcattcctttttatggccgcatggtgctccatggcaaatatgttccacattttctttatccagtctatcattgatgggcatgtgggttggttccatgtctttgctattgtaaatagtgctgcaataaaaatacatgtgcatatatctttatagtggaatgatttatatttctttgggtatatacccagtaatgggattgctgggtcaaatggtatccttggttctagatccatgaggaatcaccatattgtcttccacaatggctgaacgaatttacatttccaccaacaatgtaaaagtgttcstatttctccatagcctcaccagcatctattatttcttgaatttttaaataa

SEQ ID NO: 900451 - DNA, 571 bp, Homo sapiens
tgagggcagtgaaactcttcygtgtgattctgtaatggtggatttatgccattatacatttgtcaaaaaccataaaatgtaaaacatcaagagtgaaccctaatgtaaactattgtatttgagtgattatgatgtgtcaatgtagtttcttctattgtcacaaatgcacaactctgtttgggattgtggatagtggagaaggctatgcatatatggggacagagagtatatagagaaatctctgtagattctgattagcttgctgtgaacctaaaattgctctaaaaagtaaagtttatttaaaaaaaataagaagcagcagaagcagctaagcacctaagaggacagattgtatcatccatttatatgaagttcaaatacagtgagcactaatctgcagtgtgagaagtcaggatagttgtgaggttagcagtcagactagttaccttgaggagagtatggtctggtaggggataccttgaggagagtatggtctggtaggggacacaagaagaacttctgggtttaacttaatgttcatttttttttatttgggtattgtttacttgag

SEQ ID NO: 900452 - DNA, 604 bp, Homo sapiens
ataacgtaaagtgttcagtgcagtgtctggcaaataaggaacacttaataaaagtagctatttatattgctaacctaagagatggggcatgctgaatcaacattaatagcccgtaaatgagaaaagatatggcttattctctcaagcccctggaaaggtatcaatctgttccaaggatctgtagaacatctatcacctttctagtacagtaccaggcagaacgggaagatgagggaagggcatgtccactttctgagtgcctgatgggtgaggctctttacatataatctcatttcatctttacagaaacacttaaatcaggtctgatacatccattttctatgacagtaacaacatggtaacaataataacaatggtaataatggccaaatccttatatatcactttctatgtgccaggaattgttctaaggactttacattaaaaactaattttattcttattacaatcaaatgagataaatgttattatccccattttacacatatgaaaactgaggcaaagaccagtttggtaactttgtragtagcaaaggtagaattagaactcgggcagtctggcactagatcccatgtctttaacc

SEQ ID NO: 900453 - DNA, 491 bp, Homo sapiens
tcccggggcccaaatgtgttttagctctactccctcaactgagttagcctcagagttgctcaagtcccctcgaaactaattgatatttgtacagcaattkgtaattcacgagttttcacaacagtataattaataataatatcaatcgcaagaatgttaacattttctgagtgcttactctgtaccatgcatttgatgtatattatttcaattaatccttacaacaaccctaagggcagatatgattgttatacccattttacagatgtgggaggctctggctgggagtgaggaaggtgaccttcacactaaggccctttggtgccaagtcctgtgccccttctacccaccctgagagccttgttctggcacatcagaaggcatcagtcttcattcctcagctgtttgatttctctcatttagcttcttccctgtcccttcctcctcgatccccctccctgctccagtctggcctcataataagaatattt

SEQ ID NO: 900454 - DNA, 647 bp, Homo sapiens
tattgctttgtggaaatcacatgtttatgtgtgcatagaaaaaagacctaaaggctattctaacaataatttgactttttaatttttcatttytgtttatattgactaaatgtcttaaaatgagcatgtgttatttttgaaataagatttaaagtgactgtttattagctttaaaaggtacaatttcccaaactctccttaattaaatgtttattgatgtttccaaccccacttgtgataaagttttggggaggaatgaggaaaattgcagattagctaggtgaacttataacagctcattggtgtgtctggatgaggggttgtgaagtccagtgaggtaggcctcaactttcttctcctcgcaggcctagggcccctgtgtaccacaggccaggcccttccttggtttaacagtggcctttgtgcttgctagagttcatattagcctgactaccactcacagcctcttcatcagaatgtcagccccatattacaatgtcaggcggtagcctcaggtgcaaactgcttccctggtgatgacagatttattgcatttgaaggcaaaggttctataaatttcaattagggccagaaagaattctaccagaaagctttataataattaagcagaaatgtgagtcacttga

SEQ ID NO: 900455 - DNA, 647 bp, Homo sapiens
tattgctttgtggaaatcacatgtttatgtgtgcatagaaaaaagacctaaaggctattctaacaataatttgactttttaatttttcatttttgtttatattgactaaatgtcttaaaatgagcatgtgttatttttgaaataagatttaaagtgactgtttattagctttaaaaggtacaatttcccaaactctccttaattaaatgtttattgatgtttccaaccccacttgtgataaagttttggggaggaatgaggaaaattgcagattagctaggtgaacttataacagctcattggtgtgtctggatgaggggttgtgaagtccagtgaggtaggcctcaactttcttctcctcgcaggcctagggcccctgtgtaccacaggccaggcccttccttggtttaacagtggcctttgtgcttgctagagttcatattagcctgactaccactcacagcctcttcatcagaatgtcagccccatattacaatgtcaggcggtagcctcaggtrcaaactgcttccctggtgatgacagatttattgcatttgaaggcaaaggttctataaatttcaattagggccagaaagaattctaccagaaagctttataataattaagcagaaatgtgagtcacttga

SEQ ID NO: 900456 - DNA, 589 bp, Homo sapiens
tggcttagactgcatgagagttccctaggttgggtgtcwacagtggaactgctgtgtttggatgcatgtgttcagctggggtagggcttgccaactttgtttccgaagtgattctccttcccatcagcagggttttaccgtgtgcgtgtcaccgcatcctgtgaaacatcagctgttctcaaacttccctttgtgtgccaatctgacagatgcaacagggcagctcactgtttcactttgcgtggcaatcagtcatttccagttttcctgttctgtgaattgtctgttcatagcatttgcccatttttctattgagttgttttttcatattgagttgaaggacgtcttcgtatattccaaataataaccatttggctgtcgtattggttgcaaatattccctccaactttttggcttgtcatttaactttttaatggtcttttctctcgtagaaagttctagcttctcaagagcataagaatattctcttatattcttttctgtaaattttaaagaattgctttgcatgtaggtctttaatatacctggtatttattttagtgtgtagtatgaggcagaaatccaattg

SEQ ID NO: 900457 - DNA, 612 bp, Homo sapiens
cagagagaaacagttattacttttattatgtccccattattcaaaggtagcccactgagcatttggctcctcctacttctggatgaattcatgcatatgtatgaattccacataggtttacaaagtgagtttaattctggatgtgcctgtattaaggtacttgtagacagcaaataattgatggacacaaatggacttaagaagtaaagtcaaaacaattaaacatggtatacaaaggtgcctaatccatcatattatacaaccaattacactttaaaaagttaattgatggattaaaaataggaaattttctcactgctgtcctaacaactccaatctcttatgatgttgtgtggggtaggtaaaaagagaatgagtttacagtcagacagattggattcttccagttactagatgggttatagtgagagagttattgatttctactaacatcacctttttcttttctaaaataaagactaacagaagttcatgagrtaatacatgctgtattagtccatttttatactgctatgaagaaatatccaagatggggtaatttataaagaaaaagaggtttagtggactcacaattccacatggctggggagg

SEQ ID NO: 900458 - DNA, 499 bp, Homo sapiens
agattgtgtgctccttatgaaaatctaatgcctaatgatctgatgtagagttgaagtggtgatgctagtgctggggagaggcagcaaatacagattaacattagcagagaggctgactgcacaaagaccataawaaatcaattcctcgcagactcatcaaaagcctatcagtgagtgtcaaatgacaataagctgcatctggtgacaggctttatagtggcaaatgaggtgaagtacttcagctgtaccgctgcgtttgttgcaggctttaagtcagaatctgacacttattttagtccacatataacccgcctatgattttatttactgtctgcccctctttcccgcactgtgcacttgtcttaatcacagttttggtaagctcacaggcaaatcccagcaaaaatgagtaaaaaccaaacatcacttaggagcttacttgaaaagggggaagacttaatgatgagatagcagaagactaagcccatcgacaaaagaa

SEQ ID NO: 900459 - DNA, 602 bp, Homo sapiens
ccttttaagcagcaatagcagttttaaataaagtatagcaaaaaatttacaagcttggacacattatcttgaacatacatatcttgaacatattaacctctcttaactgtagctttcacatctctaaaatacagtaattcttatttcttacaattgatatgagggctaaatgaagaaaatccatgtagagcagcttacgcatatcttagggccaggagtccttttcttgttcaccaacgtatatctgaaactagcatgactacatatagtaaatgtataatgaaaatttgttggtaaataatcttctttcctacaaaataaaaacatatttcaaattatttttccagaatctattgtcatttcagattctcttctaattgtgacatctctgcagtatcatgatatatgtgagctatttgactgcaattttttgagctcctcttgatataaatgtagccattctgtgcattgggataatattttttcaggctctggaggtaactccctgatggcatgtacaacygcattctcattttcagtttcttgatgtgggatgattctgttctgtgttcttaatgacaaaggtcatttgggccccacca

SEQ ID NO: 900460 - DNA, 534 bp, Homo sapiens
tcattaaatacaattctcatcttaccaagagacctaccatggcttaccagattgacatggccttaaccttactcccagttttaaacttaggacttcagaactgaagacccaaggttggcttcctgctttcactccaatggtaggaggaagaaattcagttatttatgtaattaaaattgttttgagagtatattttatgtcagtcattatacaaggttctggagatactgttatgaataagacatggttttggttataggacagtgagaggtacagagaagtaaggaacaattgttatgaagtaaatgtttgttcccactaaaattcatttgttgaaattctaaccctccgtatgatggtattaggagatggggccttttggaggtaacttgggtcatgagaggtggagccctcatgaatgagaactcctataaaagagacctctggagagttctctagtctttttttttttttcttccacctraagatgcaccaaaaagttggcaatccagaagctagaagagggtactggcc

SEQ ID NO: 900461 - DNA, 445 bp, Homo sapiens
tgcttcccctttactttttgtcatgattgtaagtttcctgaggcctccccagccatgctgaacagtgagtcaattaaacctgtttcctttataaattacacagtctctggtagttatttatagcagtacgaaaatggcctaatacagtacattggtaccaggagaggggtgctgttataaagatacctgaaaatgtggaagcaactttgggactgggtaacaggcagaggttggaacagtttggagggctcagaagacaggaagatgtgaggaagtttggaacttcctagagacttgttatatggctttgaccaaaatgaaaagagtgatatggacaatgaagtccaggctgaggtggtctcagatggagatgaggaacttctcrggaaccagagcaaaggtgactcttgctatgctatagcaaagagactggtggcattttgcc

SEQ ID NO: 900462 - DNA, 649 bp, Homo sapiens
gggttctttaagacccccaaaacatcatactagctcaccagcaatggatccaaactaagaagaaatmcctgaaatgccagaaaaagaattcagaaagtcaattcttaagctaatcaaggaggcaccagagaaaggtgaaatccaacttaatgaaatcaaaaaaatgatacaagatatgaagggaaaaatcttcagtgaaatagatagcataaatttaaaaaaacacaacttctggaaataaaggacacatttagagaaattcaaaatgcaccagacagtctcagctatagaattgagcaaatagaaaaaaaaagttcagggctcaaagacaagggttttgaattaacccaatccaacaaatacaaagaaaacagaaataaaaaaatgaacaaagccttgaaaaagtttgggattatgttaaatgaccaaacctaagaataattggtgttcctgaggaagaagagaactcttaaaagtttgaaaaacatatttgagggaataatcaaggaaaacttccctggccttgctagagatctagacatccaaataccagaagctcaaagaacacttgggaaatttattacaaaaagatcatcacctaggcacgtagtcatcaggttatctaaagtcaagacaaaggaaacaatct

SEQ ID NO: 900463 - DNA, 672 bp, Homo sapiens
agtagatgctttttactttgamgttccattttcctgaagagctcttttaaaaaataaatacaccaggtagaattaattgcttaatccttattgttaacaagaaagggatcatgcatttgattttcttctacattactatgagcaccgagggagtccttgggattttggagattttagaggtcacattgcaaaaaggagatggtaaaggcaaacttcaccaacaactgaattttatcaagtggttctcaccagtgttatttgtttattaaataaacacacagtctctaggatactttctttgcatgttccttcttcgaggacatgtagaaaatgttaaatacccaaatattcaaaatcatgatacccagaaacttgtttgctactttaattgctaatttcatggtcgtcattcttaaacagtagtaaatttgaagactatactttccaattttgtatttccaaaattgttgatatctgtgaagaatgagtgctagagcctctcagatttgattctaacaagaagtcttagcgaagtcacagtctttaagcataagctgctaaggtgctttcttcagtacaggcactggcatctgttattcaaacccttgcttgagttgatttctgcttattattcattaaaatatatgtgttaaaataagcatgccctgatct

SEQ ID NO: 900464 - DNA, 571 bp, Homo sapiens
ccatatgccaaagagctaatatccaaaatctacgaggaacataaacaaatttacaagaaaattacaaaccaccccattaaaaagtaggcaaagaacataaacaggcacttctcaaaagaagacatttatgtgaccaacaaacatatgaaaaaaaaccccacatcactgatcattagagaaaagcaaatcaaaaccacaatgagatatcatctcataccagtaagaatggcaattattaaaaagtcaagaaacaacatatgctggtgaggttgcagagaaataggaagacttttacactgttggtaggaatgtaaattagttcaatcattttggaagatagtgtggtgcttcctcaaaggttgagatccacaaataccatttgacccagcaatcccattactggacgtatacccaaaggaatatacataattctatcacaaagatacatgtgcatgtatgttcactgcagcactattcacaatagcaaggaaatggaatcaacccaaatgcccatcaatgatagactgaataaagaaaatrtggtacatataacatcgtggaaaattatgca

SEQ ID NO: 900465 - DNA, 663 bp, Homo sapiens
atagatgcagaaaaagcctttgataaaaatccaacatcccttcatgttaaaaactctcaataaactaggtattgaaggaacagacttcaaaataataacagccatctatgacaaacccacagccaatatcrtactgaatgagcaaaagctagaagcattttccttgataattggcacaagacaaggatgccctctctcaccacttttattcaacatcatattggaagttctggctggagcaatcaggcaggagaaagcaataaagcatattaaaataggaagagaggtagttaaactgtctttgtttgcagatgacatgatcctgtgtcttgaaaaccctatcatctcagcccaaaagcttctgaagctgataagcaacttcagcaaagtctcaggatacaaaatcgatgtgcaaaaattgctagcattcctatacaccaacaacagacaagcagagagccaaatcatgaatgaactacagttcacaattgctacaaagagaagaaaatacctaggaatacagctaacaagggaagtgaagaaccacttaaagaactgcaaaccactgctcaaggaaagcagaaaggacacaaacaaatagaaaaacattccatgctcatggataggaagaatcaatatcgtgaaaatggctatactgcccaa

SEQ ID NO: 900466 - DNA, 652 bp, Homo sapiens
ccaaataatctcaagaaaaatttagaacagataggcttatacattaaacaggttgctacctcaattacctaggatgctagtatgcactatgattttcccaaggaagtatttagtatacagtttttcccaaacctgtttgaccttagaagcagttatttcactgaattttgaatatcagggaagaaatctcaatggagttaatacataatgggaaaacattaaaaacaaaacagaacaaaatcttcaaatatattaaccacagcaattaaaaactcaaatgccttcacaggcaaggcaacacacaaacaaaaagaacacaaagagggtcaagaataaaaaaacagatacttatttgtactgaaaataagtctagttgctttccattaaaaaaagaaatacatctagatcttctagtttgctacctttgtattaagagataattatatccaactccttttggtgctactttctaagctatttggaaagttagtactagaacagcagcttatgagagaaaaaattacaatcagagctgcagcaatcyaggtaggcttcagtataggttaaaaaaaaagttgtagctcactaaataaaccatgtgggcaaaaaagaaaagccttagaaaatacagcaattcttttcaagttttatt

SEQ ID NO: 900467 - DNA, 713 bp, Homo sapiens
ttcacatggtaggaccattagaagccactgtggaagagatgacagacgagaattttccaaaactgaatatagcagtcctatgattgaacttatatttcaagtggcatgtaaaaataattcaccctaaccatgtggaaggagaaacttaggaatattcaaagattaaaaaaaatgttaggaaataccagagggaaattataatggaaagtactttgactgaccgttgtctcacctacaacaatggtgccagaaaggcccagccctgatttgtacatgtcttagaggcctctaattattacttatttattgggaagtagcttatttgccattttctccctgaagaatgtgtctttcaacagtggatttcatcaaataaaaacaatagattgcacaaatgtttaagaaataacttgaataaatttttacttaacagacagaagattatgaaaaaaatgattaaagaagcactcacatcttttgaagaaatcaaaaaccaaaatatgaatatttctgaacatatctggattaaatattcaatcagaaggtttaaagaaatgaatcaaatgctgtggaaaatctgcttgtcatactgagaattgaagaacaggatgcaagcaaactcaaacagcacttggcaagacagacatctattgaatatggtasggttttacaaagcatgtcataatatttgacagagaagatgaatttaaact

SEQ ID NO: 900468 - DNA, 562 bp, Homo sapiens
ttttggaggtaagtgaaatttccacatgatgaggacakgggttgtacaaaatgtatacaattgccaaattctatcatactgtgcacttgattttcactgtatataaattatacttcaatgaaacatatgaaaacatacaagctcagagattctataaaatactcatcacgaaaattgcactacaatgagatttgtagaaaagatgaagataacaatttaaatttccaaagctgaaaattttcatagctgaaaaagatatgtcttgagattaaaaagttccactgatactgactagaattagtgaaaacaaacccacatgtatatacaccagggcaaaattaaaaatctcttaaagagacagatttttaaatggtctcaaacctgagacctgctatgccttatccattgttacagtacttaggatgctctctaaactactctggctgggaagaagcttgctattcttaacaaaatctccttaattcaaagctcccttctctggtatagtccatggaacccagaagaaatctattatgtttgtccttctctggccagctgggca

SEQ ID NO: 900469 - DNA, 507 bp, Homo sapiens
ccccattttgaaaacacatctaagctttttttggaacattacatgccccctgactcaaatggtaatctcctttggcaactccctcacagacccacccaggataaatactttgcatccttctagccaatcaagttgacactcaatattaaccatcacaattggagactgagagtcagacatcttcaaaaatctgaacagaaacgcttattatctattctctctgagagaggcttcatctatataacaatacaaactttgctagccaagcttctttctctctctcttaaacagtcttgccactcaatgtgatttacctgtttctggccatgctctcagtctgcattcctcactttggcctcaggatagtagataagtttctgtaacccattgggaacttaggtcatcattctggaaactactgtgtatgcatgttaaatatattcgtatgccttttctcatattaatcaatccaccayatgtctgtgatttttagtgactctttagtgg

SEQ ID NO: 900470 - DNA, 594 bp, Homo sapiens
ttctcaatgcacacaaaatgtaaatctctgcttcctctcccacctcttgcccttgggcattttgtttcagcctcttgcagttgcrttaatacaccaggtgctcctaaagctctgtggctttgcacctgctgttcctcctgcccgtgtctcatactctctccttggtctcccgctcttgagcctcaactcaaatactgcctcaccctttggctccactggattggctttggagctcctgatcaaccttgctctgctctggacacatctccattgaagcagatgtcacaggtgtctttttgtattgcaaccatttatttgcatgtctgcctccctcctggactctaatgcttttacaatggggtttgtgtctagctcactgagcccagcctgctctgctacacagcaagcagcagctaaacatttgttcaatgaatggtcactttcaatgccctgggttgcctatttttgacttgtttgttttgtttagttttttttttttttaacagattttagatacttagaattttcagaggatatgaagtgatacaaaggagatagttatggctgtggttttccaatctcagtgtgcctaag

SEQ ID NO: 900471 - DNA, 591 bp, Homo sapiens
gtagatccactgacagcttgcatagtgcacctggaaaaaccacagacactcaacaccagcttatgaaagcagctggggcrggggggcaagggagtagctgtaccctgcaaaaccaccagggcagagctacccaaggctgtgggagcctacctctcacatcagtgtgacctggacatgagacatggaatcaaaggaaattatttcagagctttaaggtttaattactgcctcgttggattttggaattgcatggggcctgtagcccctttgtttttgccaatttcttccatttggaatgggtgtatttacccaatgcctgtacccccattgtatccaggaagtaactaacttgcttttgattttataggctcataggtggaagggacttgccttgtctcagaggagactttgaacttgaacttttgggttaatgctggaatgagttaagactttggggaactgttgggaaggcatgattggttttgaaatgtgcagacatgagatttgggatggaccagggatggaatgatatggtttggctgtgtccccacccaaatctcatcttgaattgtagttcccataagtcccact

SEQ ID NO: 900472 - DNA, 659 bp, Homo sapiens
cttgaatcatcctgaaaccatcccccaaaacgtctgtggaaaaattgtcatccatgaaaccagtccctggtgccaaaaacttggggactgctggcctacagggaccaggaaggaccaggaagaggagtaaatacagaggggtgagggaaaccaggaagagttggatgaggacatctgcttatggaggagggaattgcaccaggaaaggaaggctgacatgttcaaggcctgcagtgaactgaagaaatgggggccatgagagagagtgactggcgaccctcagagtggcttgtaatcaaacaaggcagggaaaggctgcagtgcagggtaagagaaagacaggctgatgaggaaacacacagaggagaagcacacacttctttgggatgcttctcactgaaaggcagttcaggtccaagagggtcaggcaaagctttctcaagtcacaggaaatgtgtgcatttgtgaaggagatagcagagacagttggcattcacttctacatactcactcccatttaccagccttctttgcaaacagatgagggccatgtagttatttctggccagaggattgcgagcaggagtgatgtgcagagcttttggtggagctaggaaaagctgatgtgccttctccrtcaccttctttccttgacttgg

SEQ ID NO: 900473 - DNA, 557 bp, Homo sapiens
ctttagatctgcctttcttttcttccttaaaaaaaaaaagttcttaagagccatcttcgtgatctttgatctctccataagaagaaagaccatttacttcctgcttatggctcatcaaggaaaaaggtcttcaaaaatttcctgtccttctttgcttcctctcctgtctcctttctggctcagcagagagaaagatgtcagtttgatacctttggcctcttttaaaaacctaataatggtctttatcctgtcagcagttcctgggtatttagtgttttacctcttgatccgaggaaaagtgcttaactttccctattcctttctaatgaatagcttaggctacagaagtttggtctccttactaagagctacagagcccctgctgtttttataggctgacttttgacacagagtacttctgttcaaggagctcattgttacaaagttagtgccagtttatactagaacttaacttttaaagcrcatgtaaatagatttcttaatgggtttttgggtttttaaaatcacctagattttttttttcctggtggccaaat

SEQ ID NO: 900474 - DNA, 521 bp, Homo sapiens
acttaggctgaacaactactttaaaactacatattaaagtgtctgtgtmtgctacatcaattatatatttaaaagatttctgaaattttgcaaatccaattgtaaaatcataaagccatagtatgggtttggctgttatttctgggaataactgaaagtggtggctcgattttcaactctgaagaatttactggcaattttgacgcgccttttcttttcatttttactttggttaatggctgcatgtggtctgaggttgtgtgggggattaaggctgctggctggttttgtctctaaagaaacatgatcttctttgtatactggactaatctggcctagtgaggctcatcctggtgctgcagctatttagagttactgaagtaatggtagaataataatttttcatttcatttattcccttatttataaaattttggcatgtttacttaaagctctagaagtacatttttttttttgggacaggatcttggggttatttatgaggctttggatgttcagaa

SEQ ID NO: 900475 - DNA, 521 bp, Homo sapiens
acttaggctgaacaactactttaaaactacatattaaagtgtctgtgtatgctacatcaattatatatttaaaagatttctgaaattttgcaaatccaattgtaaaatcataaagccatagtrtgggtttggctgttatttctgggaataactgaaagtggtggctcgattttcaactctgaagaatttactggcaattttgacgcgccttttcttttcatttttactttggttaatggctgcatgtggtctgaggttgtgtgggggattaaggctgctggctggttttgtctctaaagaaacatgatcttctttgtatactggactaatctggcctagtgaggctcatcctggtgctgcagctatttagagttactgaagtaatggtagaataataatttttcatttcatttattcccttatttataaaattttggcatgtttacttaaagctctagaagtacatttttttttttgggacaggatcttggggttatttatgaggctttggatgttcagaa

SEQ ID NO: 900476 - DNA, 629 bp, Homo sapiens
atttcttggcttgtagccacctcattcggactctgcttccttcatcatctctttttctctctgtgaccctcatgcttcccttttatacggatccttataattacactggatgacccagaataatctcctcatctcaagatctcaacttaatcacatctgggaagtcccttttgacatgtaaggtaatgtattcacaggttctggacatttttggcagcaattattctgcctcccatagtgaaagtagcagcgagagacatttctggagtaggcctccaggggcatgcaactacagccaggtcttccctgatcatagtgaaggcccccggcatggccagctgtttatatggccttgtttatgcagcctggagaacgaagatagtttatcatttccctaaggtcttcacgcagcttgaatagattgtcttcagctaggaactgattttgatacatgttaaagccatgatttctcaaagatgataaggagggttatctcctttttcccctcactctaccttcatcttcccacctccaaacaagaaaagaaaatctcagtgcactgttaggctttcagtcatgagagagatcttggggaragaattctaagtaagatggtgacacctactcat

SEQ ID NO: 900477 - DNA, 408 bp, Homo sapiens
ttctgatgaggtcttctaggtatcttcagagtgttttatgatgttttctctccctagttattgttaatatattctgtgacctttccacaacagaaagtcattttaacatgtggctcacgtagtttctgaatttttctttctttttaaaggatcatgctgctgctttttgggatgattactgatgtttatagtgagccccatcccccactttttaaactccataaatatttaagacaaataaccctaaatatttgtccatgatagagatcctgggtcccctcctttgattggtgcatgctttgtttaacattttgccagtgcttcccagtagcaaacaatcaakgcacattttgaacttgtattcttaaaaaatctgcagccacaaacatggcccatgtcctaaatagt

SEQ ID NO: 900478 - DNA, 592 bp, Homo sapiens
actcttgaattttcaatgacttctctggtgatttctcttcagtttcattttttttttttgtaagtgcctcctcttcaatctttgtatgatgtaatttcccatatttaaccctgtgaaatattttctttcatttgaaattctctaaagttagtcttatcccttcccgttattttacataccatatttctgctgatgactcaaaacattttatctccaggaaaaaaaaaaaaagcaaagcaacttctttaatttggactcatctatatgagcacattctttgcatttttaaatgaatttctcacagccattttaaacacagcatgatcaacctagactcttgaaacccatcgccctcacatacctaatccaaccttctccttaatagatagcaattccatctacccagtaatagaagtcagaactttagacatgagccttgacttcttttatttacccccacaaaaaaaagtttttatttcttcaaagtatgtgtagcccgctcatctctccttcatcagtattrtcatcctataacaaatagaagaaatatttatcatgttaaatattctgatgagaaaataaattacttttt

SEQ ID NO: 900479 - DNA, 566 bp, Homo sapiens
aaccactcccaacttaataaagatgaacctggaggagcatttgctatccctgatgtacagaagcagaawagaactaatgtatcaccagttttatcagtagtcaacatagagtatccccctaaaatgagatacgacaatgttgaaaatgacactcctctgacttatggaaccatgatatagttatagagctgccatagtgatctgtagttcagaaaagcctgacttcctttctctatatttagtaactccttaagtagacaggcttaggtattttttcaagtgaagcagaatcccacatctactccagggaatccgacatcctaaccagagctggaatgatgtcaaaatataactttctcttttcatgagcaaaacactttatgtgtattttaattaatattttctgcaagttcttactttgtggcacaagaaagtcaaatcagataaactgtacataattttacagctgtggcagaatcgttttgccatttctgtgagatatattccttctgagcatagtatatagacatataattctgattatattattactttgtatcgttccc

SEQ ID NO: 900480 - DNA, 612 bp, Homo sapiens
caattaagtgtgacatgtggaatataattatgcatccattttacaatatgtccacatgccaacaggggcctctctttttagtagtttcattgttgtttccaataaagaatagagagttttcctctcttgttgcagcatattgagacagtgaggtaaattcaacgcaaaaaaatgcatagaaaataattaaaggcaacatgtaaatgggggcttgatgtggcatgtagtactctataggtgctgaggatatggccagagtgggttcccattaagacagagtctggctgtaagtctaagaatgcatatttaacttgtattcaaatagcatatgacagatgaaaagcacatttcatacattattactttttcctcacaacaacaccatgaactggagattttggctaaaatgttctcaagcaatattccctaaagcagagaatatttttatattcaacaaacattttcaagattttactcactgaaaggcaatayaggtggctctaagaacacaatagtaagtaaaaacatggtgtttactcctatagcctagtggaggagattggcattaatcagtttcacacaaatgtaacatctcaaaccataataagggat

SEQ ID NO: 900481 - DNA, 655 bp, Homo sapiens
  misc_feature 199: n = A,T,C or G
aaatcttctgtgttcaaaatcaacatcaaccggtttgatcatgtaatggaaaaaaggtagatgttcagagaaagaaaaaaaatgtatatgtatgcttaaagcggtatctttcttattattattagtgaaaacaccctctggaaatatcatacttccaggttctaaaattacattaacagaattggaacctatttctcanagtattgatgtatgtgcacaatttagaatgcaccttgtttacacatacaaattaaagcacaatattcttacatttaaatgtattaatcccaagagaaatcattgcattactgtggctcacattttcagtctctctattttaatcactaaataaatgctgtttccaattaagtttagtggtgtgcttgttctaactgaggtttaactgtcctgttaccattctacttcttagctactgcacatttggtaaatatgagtgcttctgtttccaagtaaatgaactttatgcaaaagcatttccactgtcacaggattaattcccctttagcttaataatctattatatttgtggataataggcagaaaatgaaacraaactttactttctgacggagctaaatccattagtaaaatttcaaactgtgtagctaaaaggtcattttacttcattgtaata

SEQ ID NO: 900482 - DNA, 586 bp, Homo sapiens
gtttaattatgagaaaaacatcagacaaatctcaattgagagacactctacaaaataattgaccagtcctaaaacttgtcgtagaaaactggaaaagtctgagaaagtcagagacaagaggatcccaagragatacaatgtctaattgaaagaaggtgtgtgggatggaatcgtaaaacagaaaaatgaactaagaaaatctgcataaagtctgaactttagataataataatgtatcaatgttcatcaatgtagataataatgttcctaattataacatatgagccatatgaatgaaatatgttgataagactagaaactggccatgggatatatgggaactctctttactatcttaacaattattctgactatctagaactgctctaaaataagaagatatatttataaaaatgttgttgtaaagaaaagaaaaaaaaactcatattctcttttcctttatacttgttccctgttataaaaggagagtacagggcatatagaataagaagggccaaggacagaacctataccctccttttcccccataggtttctaaggctgagaggcgagagctggagaggga

SEQ ID NO: 900483 - DNA, 665 bp, Homo sapiens
caggtttgctgattcaatagagagaagttattgtactaatgattaccgttaaccacagcaaaatgatacaaagcaaaatcagcaaagggagaatggggagaaatctggaggaaagcagatgttagcttccaagagtcttcccccagaggaacagctcaggacatacttaattcctctagcaacaaataatgacaatacatgcaaaatgttgtctaccaggaaagtttatctaagtgtagaagtccaggatttttaaaaatcagatatcagtcagatagacacatagtgtcttcatgactatttgcagttactgaagctccaagtccctgcagaagaaaagcacgtgtttactataaatcacattgtgtgctcaaaatactcaaattagttcaagccctgagcatgcaaaatacttttatcacttagaacattccaagatctcaattcccagtagccagccaagagccaatcatggaaacaaacccctcttgggaatatgcaagtttgagcaactaaggtttgttgagttactcttgaccggaaagaaaacctgaagatactccaggatccaatttaatttctctattttctgcctcctaaacataataaaagcttcagtaawgttttgtagttctatttcattacatttatacctagaatatttt

SEQ ID NO: 900484 - DNA, 559 bp, Homo sapiens
cctaatgctaaatgacgagttaatgggtgcagcacaccagcatggcacatgtatacatatgtaactaacctgcacattgtgcacatgtaccctaaaacttaaagtataataataaataaaataaaataaaataaaaaaataaaaaaataataatttttctctattatgtaaattttcttttattaattttattttctaattgtttctaggctgtgaaaataaagtggtttgttgatttagattttttaaagcataatgttaattatacttgttgtccaataactcatctatagattcttttgaattttctatgaatgtaatcattttatctgaaaataatgactttatttcttccacttcaacccttttacatttttttccccttgttgcacttgtcagaaacttcgatgtaatgttcacttgtcattgtagaacttttctaatttcagggagaaagctttcattacttcaacataaatataatgtttgctgtgagccagcctccaagcctctctgcatgcttgtctrtcatgttttttttccttccttcctgtcaact

SEQ ID NO: 900485 - DNA, 593 bp, Homo sapiens
gctcaccacttaatagctgtgtgagctttggtaaatcaagggatttcaaatcacttgatttctctgtgccccaattccttcttcaccctctggggatctagtaaagactgagttagcacacagagaatatctagctacttcattatatggcagcatatggtacctatagatactcaataaatattagttccttcctcatctttccctcctttcagttgcttcatttacgtaaaaataatacatcttcttatatttaaaaagaaatagttcaagaccagcctgggcaacatagtgagaccctgtctctacaaagtaaaaaattggctgggtatggtggtgtccagctgtcccagctactcaggaggctgaggtgagaggatcttatgagcccaggagttcgagactagagtgagctataattgcgccactgcactccagcctgggcaacaaagcaagaactcaccaataaaataaaataaaatttaaaataaaataaaataaaataattttaggctttccattgatttagattggycttcctcaaatcaagactgatcgctgtttgtctagttaataagactagttctattctg

SEQ ID NO: 900486 - DNA, 593 bp, Homo sapiens
tcattctagggttttaaactatttggtgatcagagatcattttcagaatccaatgatgatactgaatctcattctgaaaaatccaaatatacatgctatgaactgtattagtccgttttcatgcttctatgaggaactgtctgagactgagtaattcataaagggttttaattgacttacagttcagcatggttggggaggcctcaagaaacttacaatcatggcagaaggtgaagcggaatcaaggcacgttcttcacagggtggcaggaaggagaagggccaactgaaggggaaagatccctttataaaaccatcagatcttgtaagaactcattcactatcttgagaacaacactggggaaacctcccttatgagccaattacctccacctgatcttttccttgacacatgggcattatgggaattatgggaattataattcaagatgagatttgggtgggaacacaaagtctaaccgcatcattccacccctagcccctcccaaatctcatgtccctttcacatttcaaaaccaatcatgmcttcccaacagtcttccaaaatcttaatttattccagcattcacccaa

SEQ ID NO: 900487 - DNA, 662 bp, Homo sapiens
ctctttttatttctgcccaaacaagtcacccagaaagaagctgtctataaataaatagctattcataatttyaatataaatttaaaacttaaaaatatctgaacactaaataacaaccctaaggaagagtcaactacacctcctggttctagctgtcttttactaactaataggagttccccaaaacagctattacattttgagtatatacaatataccagcagggtctgaaattttccatacataatctcatgtaatactgtctttcatcatgctaggtagttatatgtaatcttattttatagttggcaaaagttgttcatatttctttcctcctacaaacaataaggaaatcaatgtgattcaatgaattcacataaaaggtatgtctttttaattattattataatttctatttgttaattcaaataaatccttaatacaggaatttcaggtttgggggagaaaatgggagatgcaagaactttctccttaagctgcaacaggtattgctggtatggtcaattgctaaggtcagccaaaatacatagaaagaaacaaagacatgcgtatgggccttgttctttatattttatcatagttagagggaagatgaaaccctgaaagataactggatggttgtgactatcctagactaacac

SEQ ID NO: 900488 - DNA, 611 bp, Homo sapiens
gaacattgatgcaaaaatcctcaataaaatactggcaaaccgaatcaaacagcayattaaaaagcttatccaccacgatcaagtcgtcttcatccctgggacgcaaggctggtttaacatatgcaaatcaataaatgtaatccatcacataaacagaaccaatggcaaaaaccacatgatcatctcaatagatgctgaaaaggactttgataaaattcagcaccacttcttgttaaaaacactcaataaactaggtactgatggagcatatctcaaaataataatagctatttatgaaaaacccacagccaatatcttactgaatgggcaaaagctggaagcattccctttgaaaaccggcacaagacaagggtgtcctctctcaccactcctattcaacatagtattgaaagttctggccagggcagtcaggcaagataaataaacaaagcgtattcaaatagaaagagaggaagtcaaattgtctgttttcagatgacatgattgtatatttagaaaaccctatcatctgagcccaaaaactacttaagctgataagcaactttaacaaagtctcaggatacaaaatcaatgtgcaaaaatcacaagca

SEQ ID NO: 900489 - DNA, 625 bp, Homo sapiens
acactcgaggagtgttcaaaactattttatgaaagttttggacacttaacccaaatagattatgaggagcacagatataaaagttaactagtagtcacttatagagaaggttgttcagtggtgtgcaaagaagtcagtgttgtgcatactatacagactacactcaaggagtgttcaaaaactattctttgccagttttggacacttaacattgagggtaacttttcagcacttccagtgattctatgacctattcaaaataatttcatgtaagtgcattttcaggtatctcacccacattgtttcaagtgaccatgttttatcatttagattttcaggtctctgatctccttgtagtttgttatatacactccactattcatacatttgaactttattcatcattcttcatcttttagaataactttccttgcctattcatgttactatctttaataggaaataccaagggaagttttctcagataggcctccctgtttcctgggctgaaatcagtgtctatataagtttcccaaagcaccttacgcaacttctgtcatgaattagycactgtattatgtacttttattatgtattaactacgcttcagttttattttagtcat

SEQ ID NO: 900490 - DNA, 560 bp, Homo sapiens
atggccatacttcccaaagcaatttagacattcaatgctattcctatcaaactaccattagctttcttcactggagaaagctaatttaaatttcatatggaaccaaaaaagagcccgtatagtcaagacaatcctaatcaaaaagaacaaagctgcagacatgacgctacctgacttcaaactacactacaaggctacagtaacgaaaacagcatagtactggcaccaaaacagatatatagaccaatggaacagaacagaggcctcagaaataacaccacacatctacaaccatctgatctttgacaaacgtgacaaaaacaagcaatggggaaaggattccctatttaataaatggtgctgggaaaaccggttagccgtgacagtagatttctcatcagaaaacaaggaagtgagaaggaagtggcaaaacatttttcaagtactgaaagaaaagagctatcaaccatgaattttatatcaygtgaaactgtccttcaggaatgaagaggaaataaagacattctgaaaggaaggagaactacaagagtttgcagcta

SEQ ID NO: 900491 - DNA, 603 bp, Homo sapiens
ttcatttaaggaagcaaggagaccaagagaccccacccccacaatttgcasatggtgccaaaggttgcaatttgcaatcccctttaaattcacgattaatcggtactttgctctaccaacgccaactcctaccccatttcatcgattaaggggttttacactttacaagcagtcgcgctgtaagtaaaagatctgatcactggaagcccagttcggaagaatctaattgccaaactgtccctccacccccacccccacccccctctcactgcccttgaattgatgcaatgaatattttggacatgtggtgacgcggtgacaagagccagggctgcggccaccacacacagatgtacctacgcacacctatgtttggacaaatacagtcccaccacacacacggtctcacacactctggattcatatatgtacgcgaacctgcgttctgccattgccatctgtctaccaagttgctactatgctttccactttcatgcagcctaatgcactttggctttttaaaaaaaaaaaaaaaaaaaaaaaacctataaactaaagccaacttaaactgggcttctgctcctaaacgcgtttaattgatga

SEQ ID NO: 900492 - DNA, 632 bp, Homo sapiens
agacccatcagtatgctgtcttcaaaagacccttctcacatgcaaagacacacataggcaaaaaaaaaaaaaaaaatggaggaaaacttaccaagcaaatggaaatcagaaaaagcagatgttgcaatcattgattctgacaaaacagactttaaaccagccaagatcaaaaaagacagaaaaaggggcattacataatggtaaagggttaaattcaacaagaggagctgactattctaaatatatatgcaaccaatactggagcacccatattcataaagcaaattcttagagaccttaaaagagacttacacccctcacaataagagtgggagattttaacaccccactgacaatattagacagatcatcaagatggaaaattaacaaagatattcaggacacgaactcagctctggatcaagtggacctgatcaatatttacacaattttcctccccaaaacaacagaatatacattcttctctttgccacatggwtcctactctataattgatcacataatcagaagtcaaagacttctcaacaactcaacaaaatgaaaagaaatgaaattatgtaaacagttgctcagaccacatcacagtcaagttagaactcaagattaagaaa

SEQ ID NO: 900493 - DNA, 560 bp, Homo sapiens
aagtgactagcctggaatcaccaagtaaactaytttggagaaaatactatagtcaagacttctgatctctcaatgaaaatactgtgattaaaattagcaatggtcacaattttaaatttctggtaaaaactgcatatgtaactgtgaatattactatttggtaattgcattgcattgcccaaggagcaataatcaaacaaaataaagtgatatgtggatatattatatcctcagatgagctataaatccctttttatccacatatgttgaccattgtgtttgaacaagttataattgaattaaaagggagaaatggggcagttatttaggaagctttttaggcactactccaaaagaatttagagatcacaaacaaacctatatattctataacttatatcatgcttcctgtttaaacctcaagattttacctcattaaaactgcttgtagtaaaacaatgatttttgttcatattactcaaatattatcataaataaaacaacctggcagatggtatctgatcctttaatttttaaaaaaatcccagcttaaagaaaag

SEQ ID NO: 900494 - DNA, 667 bp, Homo sapiens
tttcttattgtacttttcttttggcttgaacaggagctcggttaattatgtgtagttatcacaagccttgcagtgagagcgaatgttggttaacagggtaactaaatgtttttgcatttcttaacctggactagcttccacaggcaccaaatggttgtcttctgccaaaggccaaaacctagtgttcagagatctacttttggaatctgactctgagtttctattccacttttaccttagcagatgtgtgattttaggcatgtcccttaatttttctagacttcaatatcttaatttataaactggaataaaataagagtatctacttcctacagttagaataaagattaaataagataatgatataaagtgttcaaacaagtgcctggcacattgaagtattcaaaaatgttaatgataattattacaacaatctaaggtatatttttcatttactcatctctagaagtactagcttaaatgataaattcaagtgccaggtcaagtactttgtcatccttggctacgaaggccaaatgatttgcaaactagacatggatgccactgttcagtattgatmctgctttgaggtagaatcagaattttaacttaaccctctacttttggtttatacttactgctttttgactaaatgaagggtagaaac

SEQ ID NO: 900495 - DNA, 572 bp, Homo sapiens
ctaccaatgacattcttcaaagaactagaaaaaattattttaaaatttctatggaacaaaaaacaaagagcctgaatagtcagagcaatcctaagccaaaagaacaaagccgaaggaattactttacccgatttcaaactatattacaaggctacagtggccaaaacagcatggtactggtacaaaaacatagaccaacggaacacaatagagagcccaaagataaggctgcacatctatgactatctgatctttgacaaagctgacaaaaggaaacaatggtgaaaagactccctattcaataaatggtgctgggataactggctggccatatgcagaagattgaaactggaccctttccttacactgtatacaaaaattcacccaagatgaattaaagacttaagtgtaaaacccaaaactataaaaaccctggaagacaaccaaggcaataccgtcatgggcataggaaagggcaaagatytttatgacaaaacactaaaagaaatagcaacaaaagcaaaaattcacaaatagaatctaattaaatttaagagcttctgcacagcaaa

SEQ ID NO: 900496 - DNA, 650 bp, Homo sapiens
atgttattacacttcatgttttacaaaaggctttcagatacaccccttctttcaatcctcacaatttccctgttaactaaaaattttatgctcattttaaagcctgaagaaactggaaactgacatttagagggccctaactactcaagatcatatagacactcaggagcaaagatggacccaaaaccagaccctgcactatctctacaaccacttctctaatcctagacaagcagacagatggacagatagataggcagacagatagacagataaagaaccctatactttttgcataaagagtgcttagtaattatctgttgatttattggactaaatgtgttttcttttgaatcaaatgtgatgccactgactcaccatcacatgccttagattacttgcccattagaggaacaggtttaacaactatttgtttgagtacctactatggacaaggcactgttgaaagtgttgggggaatacaaagggcgtcctatatcacttatattcttaaagacagtgaagagtgratgagacatacactgtgcacacaaagctataagcagagtgtgataaatgccattcatttattcaccaaatatttattgccatcaactattaatacattccaggcactgggaattcaatga

SEQ ID NO: 900497 - DNA, 631 bp, Homo sapiens
aaatgctctgaatgagagtcactgtaagttcatgaggacaagaatataggccagctgaaggctgcaggtgcaagagaataaaaagttcccataggacagagatgaaggctggtccaaggacagattaccattagaacagagatgaaggcaaggttaggggtacctggtaagactggttcattgtggaaccccaaggatgaatagggggcttctgttcattccagtatctcctctgttctcgagtaattgtgatgagatgggaccaaagttaaggtacacggtaagactggttcattctagaaccctaaggatgaatgagggtcaccctgttcaggaaaggataatagggagataacaggcaacatcttttttcctttgttttctcctctattctctctttgcagatgggtaatcgtgtctccctaccacataacatgctccttggatgcatcctcaagaagtgggagaaaattataaaagtcggccttagaaaccagtgcccctatgatggaaatcctcaagttagcctcttcagtattttataggtgagagtagaataaggaggacagggctaaagagaaggagaaacacagaaataagaaayaggctcaactattggctgttttacaag

SEQ ID NO: 900498 - DNA, 439 bp, Homo sapiens
ttaaacacaaacaggcataattaaaacaatgaatgagaacagactgtaaagaacacaaattcatsaaaatttaattgctggatgataaaatatccctgaaagtttaaatgctggggagtcttagaatcaacaggatgctgaatgcaaaatgctagtctattgaacttccaacaaaaagaaaaatcttgcttcaaatttttgtctagaaataagatttctcatgagccaaattcaagacgatagtcttcctgaacattgtgcagaaattaggctgatctgaccccagttttgacttacatgaagaactgtaagtgtactttaccttcacaacaaacaaactctcctagcaacagtatcctgaaatggctgagcacattcttgacttgtctgcatatgccttttacttagagaaatgtgcaagatggccaactaaaaatta

SEQ ID NO: 900499 - DNA, 664 bp, Homo sapiens
tgtgttagtctaggatagtcacaaccatccagttatctttcagggtttcatcttccctctaactatgataaaatataaagaacaaggcccatacgcatgtctttgtttctttctatgtattttggctgaccttagcaattgaccataccagcaatacctgttgcagcttaaggagaaagttcttgcatctcccattttctcccccaaacctgaaattcctgtattaaggatttatttgaattaacaaatagaaattataataataattaaaaagacataccttttatgtgaattcattgaatcacattgatttccttattgtttgtaggaggaaagaaatatgaacaacttttgccaactataaaataagattacatataactacctagcatgatgaaagacagtattacatgagattatgtatggaaaatttcagaccctgctggtatattgtatatactcaaaatgtaatagctgttttggggaactcctattagttagtaaaagacagctagaaccaggaggtgtagttgactcttccttagggttgttatttagtgttcagatatttttaagttttaaatttatattraaattatgaatagctatttatttatagacagcttctttctgggtgacttgtttgggcagaaataaaaagagg

SEQ ID NO: 900500 - DNA, 594 bp, Homo sapiens
gatttggtctcaatctatggtttttaaactatttggtgatcagagatcattttcagaatccaatgatgatactgaatctcattctgaaaaatccaaatatacatgctatgaactgtattagtccgttttcatgcttctatgaggaactgtctgagactgagtaattcataaagggttttaattgacttacagttcagcatggttggggaggcctcaagaaacttacaatcatggcagaaggtgaagcggaatcaaggcacgttcttcacagggtggcaggaaggagaagggccaactgaaggggaaagatccctttataaaaccatcagatcttgtaagaactcattcactatcttgagaacaacactggggaaacctcccttatgagccaattacctccacctgatcttttccttgacacatgggcattatgggaattatgggaattataattcaagatgagatttgggtgggaacacaaagtctaaccgcatcattccacccctagcccctcccaaatctcatgtccctttcacatttcaaaaccaatcatgmcttcccaacagtcttccaaaatcttaatttattccagca

SEQ ID NO: 900501 - DNA, 635 bp, Homo sapiens
catgagccaaagcagggtgaggcattgcctcactggggaagcataaggggtcagggagttccctttcctagtcaaagaaacrggtgacagatggcacctggaaaatcaggtcactcccacccgaatactgcgcttttccgacagccttaaaaacggcacaccaggagatgatacactgtacatggctcagaggatcctacactcatggaatctcgctgactgctagcacagcagtctgagatcaaactgcaaggcggcagtgaggctgggggagtggcacccaccattgcccaggcttgcttaggtaaacaaagcagcggggaagctcaaactgggtggagcccaccacagctcaagggggcctgcctgcctctgtaggctccacctttgggggcagggcacagacaaacaaaaagacagcagtaacctctgcagacttaaatgtccctgtgtgacagctttgaagagagcagtggttctcccagcacgcagctggagatctgagaatgggcagattgcctcctcaagtgggtccctgacccctgacccctgagcagcctaactgggaggcaccccccagtaggggcagactgacacctcacatggctgtgtactcctctgagacaaaacttcca

SEQ ID NO: 900502 - DNA, 568 bp, Homo sapiens
tcagtgttagagtattctgggtttyctgtgtatattttaccaatggtttttataccatatgttttgtttttgcatgctagtggttctttttcatcggattgaagaaattcactcagaatttcttatgagacagagctggtgttagtgaattctctcagtttgttttttttaatttttggtctgggaaatagtttatatctccatatttgaagaacagctctgctgaaaacagcatgcttggatggcatttttttttcctttcagtactttaaaaatgttgttccattctcttctgacctatatactttctatttagaagtctcttgccaaacaaagtagagctcctttacatgttattcgcttattttcccctgctgcttttagggtcctgtctttgccactggcctttcagagtttgatcattgtgtcttatgttggttttattgaggttgaaactgtcgtgtgttttctgaccttcctgtacctacatatttatctctttctcgagtttttgattattttctgtggttatttgtttgaataagctttatatttcttccttactctt

SEQ ID NO: 900503 - DNA, 522 bp, Homo sapiens
ttgccagattttttgacatgcttgaccaactcttttggcttattaaatttatgtttgtttatttattaagagatarccagaacactagtaatttgaagagttaattgaggccagaataaccacagtgctaaggcttagaaaacttacagtctaattatgaagtttacaatgaatgttaatgattgatatatagttgaggtcatacaagttagaagactgaaaaaaaaaaagaaaagaaaacagaaaaggcttatgtgtaaaagctacaattgccaaaatattggttacatttttattgtccaaaataatgagaggtatccgatatgaatatacaaattaaatgtagctcctaccttcaatataatataatagattaagttgataagcagccataactgatatcatggcactaataatcaaataacactgggtttttgacagataatgacacacattctcatgtaattgttacagttactctgtagaataagtatcattatggcctacactgttgggatcctg

SEQ ID NO: 900504 - DNA, 613 bp, Homo sapiens
gtcaactcatctttgacaaagtcaacaaaagtggattatattgtttagctcagtgtccccacccaaatctcatattgaattgtaatccccatgttttggaggacggaccttgtgggaggttattgartcatgagggaggactttgctcttgttgttctcgtgatagagagtgggttctcatgagatctggttgtttgaaagcatgtggtacttccctctcgctctctctctctctccttccaccatgtgaaaaaggtgcttgcttttccttccccttcggtgatgattgtgtctctacacaaatctcatcttgaattgtagtctccaatgttggagttggagcctaatgggaggttattaagtcatgggagcagatttctcatgaatggtttaccaccatccctttggtactgaactcatgagagtgagtgagttctcatgagatctggtcatttagaagtatgtggcaccttccttcctcctcttgctcctgctcttgccatgtgatgtgcctcctcccccttcagctttcaccatgattgtaagtttcctgaggcctccttacaagcccagtagatgccagcatcatgcttcctgtacaaactgcagaact

SEQ ID NO: 900505 - DNA, 582 bp, Homo sapiens
tcaccttccaatcagttattaattttaaaagaaataaatctacgcttcacaggggatacagcaacacatcctgagtttcattggtaactgagatgtttttatgtaataatcattttgaatatgttaactgggttagtgatgaggatgagtaccaggatttgaggaaagacatctcagcttaggcggaccttacatatgaggaggtgggtaaaccagatgaaccacagttatggttctactgcagcaccagtggccaggcccctggagtttccctaataccacaggacttatactagtagtgtgcagagaggggacagttcttctctggcaggctttgaaggaatggtcagatcagaatagcctgttccttttccctcaggcaagtgaacagcatagctctgggtgactcaaactagatgaaatcagactcattctatcctcttgagggacatgaaagatggaggaaatattcagacaagatgggcagatccaagaaagtttctaggagccattatgattctggggagccttttctgtgtatgttctttgctaccrtgaaactttccatctcttaagaattgc

SEQ ID NO: 900506 - DNA, 575 bp, Homo sapiens
gaccctgtttatgcaaagtttctctctctaaagtagcaaattaagctcctagtagtaggcaagaatcaagagcaaattgcaaaagtgtgatgctttgcttatgtaatgattttaagtaaacagaaaacaattgaaagccataattatgggtatcttaggtaaagaacttctactgttttcatagttaggactcaccattcttttgtatgatttggttcttgcttccacgcatccagttaatattagtgaaatttattagagaaagcattatatatgctgtactgaagacaaactatcacattaacgttgcgtttatgtctatgcgtgagaattgtatttctgtgcctaagaactttggggtaggattcattattcctgctctgatattgacactctctctttcaacagaaatggaccttttacaatattgaatggatctcagagaagacaatgagggaggctatagttctctaggactgagagaacagcttagcacatgggataggattggattgaacatcacaggcatgagttctcagcccaacmctgcctcaactggctacaaggctttggac

SEQ ID NO: 900507 - DNA, 603 bp, Homo sapiens
tccaatttacaatagctacaaagagaataaaatacctaggaatagagctaacaagggaagtgaagggctcttgaaggagaactacaaaccactgctcaaggaaatcaatcagacaagacataggcaaatggaaaagcattccatgttcttggacaagaagaatcaatgtcgtgaaaatagccatactgcccaaagtaatttatagattcagtgctattcctattaaactaccattgacattcttcacagaattagaaaacaaactattttaaaattcatatagaaccaaaaggcagcttgaatagccaaggcaatcctaagcaaaaagaacaaagctggaggcatcatgctacccaacttcaaactatactacaaggctacagtaaccaaagcagcatgatactagtacaaaaacagacacacagaccaatggaacagaatagagaactcagaaataaaactgcacatctaccgccatctgatcttcaataaacctgacaaaaacaagcaatggggaaattrcttcctatttaataaatggtgctaggagaactggctaaccatgtgcagaaaattgaaactgggccctttccttatacctta

SEQ ID NO: 900508 - DNA, 702 bp, Homo sapiens
ctttgtgtgatcacttgcttaaggtcttcctcyctctcctcactgcaagctccaagagggcaagaatctcttctgctttttcctttcactgtatcctaccacttagcagttaactgtacctgatatgtagcagttgaggtatccacacatgtattttttaaaaggatgaatgaataagcatcaagattgagaacaatgttgaggtgtgaggtagcatctaaactgatatctgaaggatgggatgatgagctggacatgaaataaatgggaaaaagacaactccaaccacagtatgtgtgaaaggtttgcaaaaagatataatctgacatgttacaaaatatatgtattacatagtgccatataataattgaacttaatatggcaacaagataagactgtcttttgtttcagatattcatggatatgctgggaaaatgtggaagaagggcctagcaatatcctataaagctaattactttggggaattcaaataaagatgaaccaacaagaaaacagcagagacgaataatccctaattttccccaaatctcaaagtaggaaagtatctttctcaaccggaggtaatccccctccaactcccaggtttcaaagagtagcaactgtcaatctgcagaaattcagctaccacacataccctatgaatatattaagactttattatgattttgcagctaaattgca

SEQ ID NO: 900509 - DNA, 626 bp, Homo sapiens
cagcctctccaggttcccagtctatcctagctgagcagacctccttgattccctctttttccttgttttagagggctgtatgtgaaggggtatatgtttgcatgggcatatctggttctgaatttctgctgttttagcttatggattattttgtacccttcatgttgtctctcttttgccctgtattgacccagaaaggtctgttagtttttttatattctacataatactccttacatcaagcaatgtatatgtttaacagacttatacattgaggaagcatgggagatttaacaaaacaacttcaagaagaattgggtactctgtttataatacatttgatttttctcttcatagggttttttttttcctccctcactggccactgtacttcacttggtcttcaagttcacatgatttcactagctcccctctaccttatccatcccttcttttacctcttaattctctcaagaacaaaagacaaatgcctcttattaccttayggttttctctttgttcccttagctcttgctcacacccacaatcccaagactttaccttcaatcctaaagattttgcaaggtattttttctgacaaggtcagttcttttcctaagagaaat

SEQ ID NO: 900510 - DNA, 621 bp, Homo sapiens
gataatcaagacacccatttttcttgcagrtatttttttggattaattataaatattctttatatatcacagacaccaagtactggtgttttagtgaggaatttcagctcatcaagatataaacccaaatggtttcactttttttctgttaactagtaccagttgtactgtattgaaagctccttttccactgggacagtatcttggcatcttcattacttttcagccatattccattattagaacagacttgttgcattttctgagatttatctctgtgtattttaaagtctaaatctcctatttgatttaaaaattctccatattttccttctatatagatgagacttgcagctctaggaatttggagtggtgtgtatgtgcaagacattgcctaattttacacactgtaggatgttggggcagacgggagtgataaatgaggcagattctgccctgttctactgctcctgaggtgttgaggtttagtttttttttttttcctggttgggctctaaatggcatttgaggtgggctccacagggcaaggaataactccagcaggttgagctgatgatggcctcactcccaagcagctttagaaggcattggatgctcctt

SEQ ID NO: 900511 - DNA, 564 bp, Homo sapiens
agaaggaaaaggttggggaaaggttgtccttccgaactgggacagcctcttacaacctgggccctctgcaggacacagtggtggagctgcgagcttcaccaggtgctgacttggtcctcgcccagtgctatgacttgtcggctcggtttcagttaggaatgctcccaatgaatgtttcaaagaccctgactacagtggcttaagcaaatggaaaaaaacgcctttcttctataatgtgcactcccaggtgaatgggtggatgttcacaggctcaactacatcggcacccaagtctttcaagtctctctgttttgttttccccattttatgctttgagccacatgcccttactccaggagaaagagggccagagaaaagggcagctcctaatatccggatattaaaggctttcttagaaccccacagcaggcatctgcttacatctcactggccagactatgccacatgcctgaagagggcagaggaactgcrtgtgacttgagccactcaatgaagtcagcctcagagcacaataaatacctggggagagtcaggaagagaaag

SEQ ID NO: 900512 - DNA, 645 bp, Homo sapiens
cttccgagcccatgccaccagggctttgggtccaatacacaaagctatatggagtttcagcagagcagctgctcactaactccagtcccaggatctggcaaagtggaaaattcatctgtacatattcctaggaagagggctgaatccagggagccgaacagcacccctctgcaggccccacttccatggcacctcacaacttaatacccactgacttggaaccccagccagccaatggcagcaggctggagtccacctgagatgggagtgagttccttgggggaggagtggaccccatctctatggttcaatagaagcagccattccagcttgccagctgtggagaatacaggtggtctggttgaggagggaccacaaacaatgcagtacagctgccttgtcagatcatagtcagactgcttcttgaagcagggcctcaacccatttctcctcactgggtgggaccttggttccacagatagagctctgatctctccttgggatgatgctattgtgggaaggggtggctgtcatctctgtagttttatagayttagcaattccagcctgccagctgtggaaaatacaggtggtctgaatgaggaaggatgccccccagcacagcattactgctctaccaagaagc

SEQ ID NO: 900513 - DNA, 603 bp, Homo sapiens
gccattctcctgggaaaaggcatcatttttaataaatggtgctgggagtgctggctagccacatgcagaaaattaaaagtaaacacatttcttatacatatacaaaaaataactcaagatagattaaagacctaaatgtaaaacccaaagctgtaaaaatccaggaaaataacctaggcaataccattccagacataggaaagggcaaagatttcattaagaaaatgacaaaagcaactgcaacaaaagcaaacattgaaaaatgggatataattaaactaaagagcttctgcacagcaaaagaaactccatcagagtgaacagacaacctacagaataagagaaattttttccatctgacaaaggtctaatatccagcctataagaaatttaaacaaattcacaagaaaaaaacaaccccattaaaaagtgggcaaaggttctaaacagacacttctcaaaagatgacatacatgtgaccagcaaacaycaaaaaagctcaacatcattgatcattagagaaatgcaaataaaaaccataatgagatatcatctcacaccagtcagaatgcctattaaaaagtcaagaaacaacagatgctg

SEQ ID NO: 900514 - DNA, 663 bp, Homo sapiens
gggaggtgactcccagtcaggaggcacaggggtcagggacccacttgaggaggcagtctgtctgttagcagaagtaggcttcagaaagtgggtaaygacaaactcctccgagctaaaggagcatgctctaacccaatacaaggagctaagaaccttgaaaaaaggttagaggaattgctaactagaataaccagtttaaagaagaacataaataacctgatggaactgaaaaacacagcacaagaacttcgtgacacatacatgagtatcaagagccaaattgatcaaatagaagaaaggatatcagagattgaagatcaacttaatgaaataaagtgtgaagacaagattagagaaaaaagaataaaaaggaacaaacaaagcctccaggaaatatgggactacatgaaaagacgaaacctacatttgattggtgtacctgaaagtgacagggagaatggaaccaagctggaaatcactcttcaggatattatccaagagaacttccacaacctaccaagacaggacaacattcaaattcaggaaatacagagaacaccacaaagatactcctcgggaagagcaaccccaagacacataattgtcagattcactaaggttgaaatggaagaaatgttaagggcagccagagagaaaataatg

SEQ ID NO: 900515 - DNA, 522 bp, Homo sapiens
cactctttaggttgtctgtttattctgatgatartttcttttggtgtgcagcagctctttagtttaattagatcccatttgtcaatttttgcttttgttattattgtttttggtgtctttgtcatgaaatctttgctcgttcttatgtccagaatggtattgcctaggatgtcttccaaggttcctatattttgggttttacatttaagtctttaatccaccttgagttgatttttttatatggtgtaaggaaggagtccagcttcaatcttctgcatgtggctagctagttaaccaggcaccatttattgaataggaagtcttttccccattgcttgtttttgtcagctttgtcaaagatcagatggtcataggtgtgcagtcttatttctgggctctctattctattccattggtctacgtgcctgtttttgtatcagtactatgctgtcttggttactgtagccctggagtatggtttagagtcaggtaacatgatgcttccagttttattctttttgc

SEQ ID NO: 900516 - DNA, 627 bp, Homo sapiens
agagagggagacattcaggaacactcagtgaatagcattcaaggcagaacaaatataaaatttgtgatatgagagtaagtttgtcatgtttgaaaaataaactatagaatgaatggctcagtagtgggagggacagccataaaagacacatcagagaggtggccaaggcaagatcacacagggctttaaaggccattgaaatcatgttggcttttattgtgaatgaaatgggaagttattggaaggtttttagtgggagaattataggacctaccttaaattttatgcagatcactgtcatagctgtgttgagaataggcaacaggaagacagagatggtggctaggtgactggatagatgcccactgctgtacccaggctggtgaagacgctagctcagacaagagaggtcacaagaagcacttgaattttaagtattttgaaagaagagcatgcaggatttcctgacgattggctatggaatttgaaaaaaaaaatgtcaaaaatggctccaatgtttcagcaccagattgcaaatcctaacattgctttagtacttggttatatgctcttttatagatttcaaattgttttatgtgaayagatatttatctctaatgacatagc

SEQ ID NO: 900517 - DNA, 607 bp, Homo sapiens
acattttgcttaggttgtcttccaggaattttacactttttaggtttcatctttaagtatttaatctatctttagttgattttggtatatggtgtaaggaatgtgtccagtttcaatcttctgcatatggctatccaattactccagcaccatttattgcatagggactcttttccccattgcttgttttggtcagctttgttgaagatcagatggttgtagttgtgcagctttatttccgggctgtctattctgttccattggtctatgtgtctgtttttgcaacagtaccatgctgtttggttatgtagccctgtagtagtatagttggaaattgggaacatgatgcccacagctttgttctttttggttgggactgttttggctattctggctcttttttggttctttgtgaaccttaaagtcaatttttctagttctgtgaagaatgtcataggtagtttaacaggaatagcattaactctataaattgctttgggcagtatgaccattttaatgatattgatkcttcctacccatgagcatcgaatgtttctccatttgtttatgtcatctttcatttctttgagcagagttttgtaatctc

SEQ ID NO: 900518 - DNA, 532 bp, Homo sapiens
ctgtagaatttattatatcaaaatataaattactttgtcctcttttctgttggacwgtgatatccttgggggcaagagagaggatagcatttatggttgttctcttgggccttgctctaagccagaaaatataaatagccatggaggaggagaggaaaggtgagtaatatggtttggatctgtgttgctgcccaaatctcatgtcaaatgataatccccagtgctggaggtggggtctggtgggaggtgattagataatgggggcatatttcccctttggtgctgtttttgtaattgtgttttcagaagatctgattgtttaaaagtgtgtggcacctctgccctttctctctcttcctcttgctctgaccatgtgaagtgctggctcccccatttgccttctgccatgattggaagcttcctgaagcctccccagaagcagaagccactacgctttctgtacagcctttgggacacagaggcaatgaaacctcctttccttattaattacccagtctcaggtatttcttta

SEQ ID NO: 900519 - DNA, 555 bp, Homo sapiens
ctaaactccagcctgggcaacaagagcggaactctgtttaaaacaaacaaacaaacaaacaaacctgattttaaaaaaagttcttggaataatgtctggcacacagtgaatactcagtaaatattagcttttattaccttttctattctggaagcagaaaaagcatggtaaaaaggtgaaatactttttctcccttttattagaaagtccttgaactttagaaaagggattccctaattatatctaactagctcccttcacctcacccacaattgctctctgggaatcttttcactccaagcccatttcaagaagcacctcttctgggaagtcttccctgatgcctgacctctcctcttcctcctccacattttctacagcattttgatacctgccatggaatacttctgaatatggccaatacctgctttccagtttctgggtgtctctttccaatcacctaagtcagtggatctcarctaccttcctgtggaatatattgaccctagagctaaacaaagatgttttgctgctgagattaaataatgacattta

SEQ ID NO: 900520 - DNA, 667 bp, Homo sapiens
ccagccaggattataagcttttcttttcttcttttctttccttttcttttcttctcttatcttctctttctgatacgagtctcactctgttgccgaggtctgagtgcagtggcatgatcatagcccatttcagccttgaactcctgaggtgggagggctcaagcaatcctcccagtttagcctccagaatagctgggaccacaggcacatgccacatctggctaattttataatttttttttgtagagacaggagtctcactgttagatataagttctaaatttcttttcaaataatcaatatgccagtatgttcaattctttgccttctacttttaaacttaacttcctcataaagcaacctttttcgattacttactccaccctgactcattccaattacctgctctgtcatagccatttttcccgccaaaccactcaccccatcactctctttaaattagccaattggaattagtttagcctgtgtggtctaaccctagccaataagggaaggatacagcagcagggtccacatgagtcagggataagaactctttcccctcccttgtccaagtgtgtgctcaccattgctccatctgtaaagttgcacccttctatagaagtacattgmcttcctgagaatcaaaaagaaaattttatatttg

SEQ ID NO: 900521 - DNA, 600 bp, Homo sapiens
ttgagagaggcaagcagaatctgtgatgggctgaaggggctcatcaaaacactgaaacactgaagctataggcggaatgttttccttacctttatgtgtgttagagttcttctttgcaaacagcaaaaactaattctggtgaattcatgtgagaaaggaatttaacaatacattggatagttcactgaatttactggaaatatattacgtatcccagaaatcagttataaaaccaagggaggccagcgattcaaaacaataatgaaaacgataccacaggcaagactggttaagactcctctgctatcggacacggcatttcaccactggaaacagctgttgctggcctagaaccttgaatgctgctccagctcatgcctggagaataaatgctaagctgtgccgacttctttgcaacactaactctggtttcaagacctgggactaagcaggatgaagccacgtgccagcattctatctgtgcaggtcacagactgcaaattggcctctgcmgattctgggttccatgctggtgctgaggattgattgtccctaaaactcatgcaatgagtttgacactgagcagcttaaaagaaaata

SEQ ID NO: 900522 - DNA, 653 bp, Homo sapiens
tctgtgacataccttttatataataccatgtgaaaaatgaggaataattaactatctacttcatgggtatgaatccatgaagctaagattaataattttaacttcatatggtaatatccttctccaataatactttataacttcaaagccatttagaacagagaatgtaaaggcacaacagaaatctgctaagcataatttcattactctaattcatcataattaacacacaactttaaataattaaattacctttgctcagcctcagttttttttcttgaacattttacattagagacaatatgatatgcaccatagagaagctgagcaaagtttttactgaagacaaatttaactccagctcaacagaagaaagtcaaaataaaggctcaatgttaactattagcgtggagttgctcactgtcctttgcacttctaagttgtctttcaaaagtgtaagatggaaaggaggttagagtatggtctctgatttgtagtatttgttctgaattgtctggaattctayttgttttcttgcctagtgctgacatgggtttgatggatttaagttttttgtcattgtccccacaggattctttccttatcagctcttggcagattgcaaccatttaaggaaaaacttctttactggc

SEQ ID NO: 900523 - DNA, 623 bp, Homo sapiens
tttatttagagatattgctaaaacttgtttcattagaastacaccattttttctcccaccatctatgtatgaaagaacctgtttctccttagtttgggaaagaatattttctcatcattttgcatgtttgttaatcataaatataaaaaataaatcttgctttatttctaatttgcatgtctcacgagtaagtttgaagactcacaaaaattattttttgaaaacatttgaatttatttttctgtgatttctctcttcaatatctcatattttatgtatctgtgaagtatttgcatgtcttagtccatttatgcttctataacaaaacacctgagactggataatttacataaaacagaaatttattttctcacatttctggaggctgggaagtctaagattaaggtgccaacatatccagtgtctggaaaggactgctctctccttccaaaatgatgagttgcatgctgtgtttgtgagaggggaggaatggtatgtccctccatgacagaagatagagagcaaaaaggggtgaacctcctctgtcaagcccttttataatggcattaattcattcacaacggaagggccctcatgacataaacacttccagaaaggcccca

SEQ ID NO: 900524 - DNA, 560 bp, Homo sapiens
tcacccaggaagcacaaggggtcagaatacatcctcccatagctaagggaagctgtgaggggtggtgctgtctggcccacatactaggcttgtcccacggtcttcacaacccgcagaccaggagattcccttgggtgcctacaccaccagggccctggatttcaagcacaaaactgggcagctgttggggcagacactgagccagctgcaggagttttatttcatgccccagtggcacctggaatgccagcgagaaagaaccattcactcccctaaaaagggggctgaagccagggagccaagtggtcttgctcagtggatcccacccccacgaagaccaacaagctaagatccactggcttgacatcctcgctgctagcacagcagtgtgaagtcaacctgggacacttgagtatggtgggggaggggcatccatcattactgaggcttgagtaggcagttttcccttcaacatgtaaacaaagctgccagtaagttcagaatgggygaagcccactgcagtgcagcaaagctgctgtagccagactgcctctctagat

SEQ ID NO: 900525 - DNA, 687 bp, Homo sapiens
tacgaaatcaatgtgcaaaaatcacaagcattcatatacaccaataacagacaaacagagagccaaatcatgagtgaactcccattcacaattgctacaaagagaataaaatacctaggaatacaaaccactggtcaagggaataagagaggacacaaacaaatggaaaaacattccatgctcatggataggaagaatcaatatcatgaaagtggccatactacctaaagtaatttatagattcaatactatccccatcaagctaccattgagtttcttcacagaattagaaaaatctactttaaatttcacacggaaccaaaaaagactccgtatagcaaagacaatcctaagcaaaaagaagaaagctggaggcatcatgctatctgacttcaaactattctacaaggctacagtaaccaaaatgcatggtactggtaccaaaacagatatatagaccaatggaacagaacagaggcctcagacgtaatgtcacacatctgcaaccatctgatctttgacaaacttgacaaaatcaagcaatgaggaaaggatttcgtgtttaataaatagtgttgggaaaactggctagccatatgcaaaacaytgaaactggaccccttccttacactttatacaaaaattaactcaagatagattaaagacttaaacataaaatctcggatt

SEQ ID NO: 900526 - DNA, 609 bp, Homo sapiens
aatgtggagaaataggaatgcttttacactgttggtgggagtgtmaattagttcaattattctggaaggcagtgtggccattcctcaaggatctagaactagaaatacattttgacccagcaatcccattactggtataaacccaaacaattataaatcattctactataaagacacatgcacacgtatgtttattgcagcactattcacaatagcaaagacttggaaccaattcaaatgcccatcagtgatatactggataaagaaaatgtggcacatatacaccatgggatactattcatccatataaaagatgagttcatttcctttgcagggacatggatggagctggaaaccatcattctcagcaaatgatttcaagaacagaaaaccaaacaccacaggttttcactcataagcggaagttgaacaaggagaacaaatggactcagggagggaaatatcacacaatggggcctgctgcggggtggggggataggggagggatagcattaggataaatatctaatgtagctgactggttgatgggtgcagcaaaccaccatagcacatgtatacctgtgtaaaaaaaactgcacattctgcaga

SEQ ID NO: 900527 - DNA, 610 bp, Homo sapiens
aaatagtacatataggaagggagaataacttcagtaatcaaaagagtcttccctttattttaagaacattactggcttttctactttcaacgaacacatatacttaaagagagttttaaccaaattacgcttaatcttatttcctaagggtaagttaaaatgttcattattatcattttaaaaataaggctgaatttaaatatttttgctatctttacttcttattttggggctaagtttattccttggtattattatttcaatatagaaagaatagagtagatgggctgtaaagaataaagtttaattataatcactcatttaattatttaatcaatttgaaataaatctttctaactagctgtattatcaattaaataacactgagagtagattttttttaatcccacaagacaatttgctcgttaatattaacacagttttctatgttgaggcaaaatcgttccctccaatcaattcctcgttgcgggtccgtgggtgctgcctgctgtgcgtgtgaggagtgtgtgtgcagyaccacacacacatctggtggtgtgtgctagtgggagtgtttgtgccatatcattcaataagcaaaatttctaat

SEQ ID NO: 900528 - DNA, 600 bp, Homo sapiens
gcttccacttgcaagtcagaacatgcagtatttgattttctcttcctacattattttgctaaggataatggcctccaactccatccatgtccctgcaaaggacataattttgttcttctttatggctgcatagtattccatggtgtatatgtaccacacttcctttatccaatctgtcactgatgggcatttaggttgattccatgtctttgctattgtgaatagtgctgcagtgaacatatgcatgcatatgtctttatggtagaatggtttatattcctctgggtatatacccagtaatgggattactgggttgaatggtagttctgttttttgctctttcaggaattgccatactgttttccacaatggttgaactaatttacctcccaccaacagtgtgtaagtgtttccttttctctgcaacctcaccagtgtctgttattttttgactttttaataataaccattctgatwggtgtgagataatattttgtatgtatataggtctgcacatttttccggggaaaagttcattgctttcatcagattctcaaaggcacatgtaatgcaaagtaggttaagaacaagggatcactt

SEQ ID NO: 900529 - DNA, 580 bp, Homo sapiens
ccaatctgaagtcattctgtataccaacaatggcattatggtacatttggggaaaacaagtgaaattaaaccattacagtgagaactacaagggcatcttgtctagcaccttcctgagcctatgaactccaagggcatcttgtctagcaccttcctagcctatctgtgtcacatgacatctacctgttcagctctcaccccccaggtggggtctctaccttggacctccccgtagtgagccttctctttattaagcatttacttatttattgataaactagggactttcagtaaaaagttaaaattatcttttacatagtgaatgacctctttgatctggcagggttattacattttaagcaaaggatgcatttctgaaggtgtcagacaatttaaaataagtaaatttcaagacctagggataaatatgaagtaagggggcgggtcctagaaacacctaaatctgcaagcacactcttgcatatttgattttaaggctgcttttcattttctcaacactgggcctaatattccacagagtgctcccacytacgccaccatccagcatatcatggcagcc

SEQ ID NO: 900530 - DNA, 507 bp, Homo sapiens
cctctccatgtagctctctttagtctcctgctcatcagcacttttagctccatcaggaacacacctgtgtcttaattccctggcacatcaccctgagccacccattccacattraacacacatttatggagtccctcttgtgttcccagcacagttccaggccctggggggcagcagtgcacacaacacaaagccctgcccctctggagctgtcagccatctgggaatcagaactaacactcttaggacacttatcatgggtggttccaggtagtttttgtgcatttgctcacttaatcctttcccataaaactttgaggcaagagctagtatgttagctaaggaaaccaaggcacagtgaggttaggtacatttccccagattgcacatgcaggacgcagtggaactggggcttgaacccagggaatctgatgacagagcccacaccccaacatcacatactactgccatgggtctttacatgcctaacttctgctaattgggtgc

SEQ ID NO: 900531 - DNA, 575 bp, Homo sapiens
ggcttgactggggcatggaatctgcttccaagatggctgactcatatggctattggttgaaggtctcagctccttgtaacatggaccaacccatagggctgcttgagtgtcctcatgacatagtggttagcttactccagtgtaagtaattcaagagtgagcaaggaggaagccatgatcccttatatgacttattagaagtcacacatattatcctatttccatcttattctacttgttcaaattgttactaaatccagatcatactcaaggagaggagaattagctctgctttttgaagggaatatagacagaatttgttgacattttaaaaacaatcacctatatattgatgatccctttgtgtttaaaaaaaatttgtcctgtggtattttttatatattctggacaatcatttttgttggatatttgaattacaaatattttctcctagtctgtggcagtcctgctgagattgtggttggaattgcaataaatttacatctgttcacctagaaggaaactaatacccttacaatwttaagtttttctatacatgattataatatatctat

SEQ ID NO: 900532 - DNA, 609 bp, Homo sapiens
catttgcctctcaggccactacttcttgttatctttgcattcttccccttaatctggcctctaaatgtaggagctcttaggactttggcctgggctttttttttttttccaatttacattacacttactttattagaaaatcttgccctctaacaaactcttacatatcatttatatgccaataagttaagcattttttttctatctctaccttgagtttctcttctaagtttcagatctatatatacaactgctgacttgatagccccacccagatacctcacaagcatctcaaactcaacatgtttgaaactttaatcagctccctttgatttgtgctatgttaataaatgctaactctatccacctagttgcttgtgccaggatcccaggagtcattctttttatttatttcctcttttaaatctgtaatttaaagtttattttagctataatgcatgcttctctggcatgcttcggagtccattgctaagatattctgttgtgctcatctgtctgatttatggatctatgcgatytctggcactaggacatcatctgagtttgggctatatagcagtgacaaaatgagtagaataactttagaaa

SEQ ID NO: 900533 - DNA, 611 bp, Homo sapiens
tgtgaattcatggcagcctagactagagatgctgccctcggagtctctccctgatcttaccctgaaattccatcactgggccaacttgtctttcctcaggrtagtaataatattgacagcttattctcacatagcacttactgtgaactagatactgttgtaagaactttacatgggttaacatccctatgagatagatattattaacatctctattgtacagaagagaaaactaagggccaaagaggtagagaaaattacccaaggtcacacagcggtggggcagaattgaaatagggaccatgggtctccagggtccatgctctggaccactcccaagccaaattttcactccatgccagagattcttgacatgtatgtgctgctgcccatcaaacatgcccagccaggtgagacaacctgaagccaaagttgggcatccaatgcagaagcagctttctccctgaagaaggtttctagagtggcccaaagggcctattttaagggcacccacaactgggcagctctgtggttgagcctttacatattcctgttcatcaggatggtggcttgggatcttttgaaagcagtcgcaccctcagaactgatga

SEQ ID NO: 900534 - DNA, 685 bp, Homo sapiens
agggcctattttaagggcacccacaactgggcagctctgtggttgagcctttacatattcctgttcrtcaggatggtggcttgggatcttttgaaagcagtcgcaccctcagaactgatgacctggcagactgtgagttgtctctgtctacaccatggcacttccagtcaaagtcactcatctgacaaccaccaacttaacagcaggacactccaggctgacccttcccttgtcaccaggtccatacagcagctgtaatgagacagtctatactactgtcttgttctcccactagccatttctccctcagcatttggacagaatttgctgcaacaaacaccactgagaagagtgttgaaaagttcacatcagtcataagccaagtgttgtcaggtagtgtgagacacaaatgctcactgccagccactgtgccaagacattcagaggtttgacatgagaaaccaaaaaactgctctgtgtatttctggaatatatgttaaaagttttaatacaaagttgtggatttcatataaaacttagtttcttatacggactttgagagagcaggagaaaagattagggaaaccaccagtagataatcgctaaaatgccagggtttctggaaaatggccaccatctcaggctacaacggtgaagtgaatggttctcaagagctcactggaaa

SEQ ID NO: 900535 - DNA, 602 bp, Homo sapiens
ttcaagcattctgtattatgtttatgtgcttccctaggtcatttctattcatggccatcttgcatctcttcccatttctttgtrcactgttagcttaaggcaccatctttggcccacagtgggtacttaactcatgtatttaatgttgaataaacaaatatacttttagcttaaaaaagattaccagaattttttttttttttagcctaatcattgtcctaaaaaagtttccacacagctgactcaccacctattcaccttggaatcacctgctccagttcttacctgagtacctactcctatgattacatctatgatcccacctccccagccccctgcccttctcactgtgcacttgaaagtccccatcagtgaccaaggtggttagttggaggagagttcttttaggaatgaattagtccattctcatgctgctaacaaaggcatactcaagatggtaatttatatataaaaaaaggtttaatggactcacagttccacatggctggggaggcctcacaatcatggtggaaggtgaaaggcatgtcttacatggtggcaggcaagagagcatgggcagggtaacttctttttataaaacc

SEQ ID NO: 900536 - DNA, 563 bp, Homo sapiens
tttcatgcaagttacttgctctagcatttaaaaggtcagaaaagtggggctttagcaagcttacactataggttgtgtgactgcttttattccttcttactgaagaacatgtgtaagtgtsgcagatttggtctataacttgatttcattataaaatccacataatagacagattataaaggaaaagaccaatagttcttacctacctctagtcatcagaaggttccaatagagcctaataatcagaaataatcaaacaggtttaagtcagtttggcaatacactgtgtaagacagcctgctttagaaggtccttggttccttggtagatgagtatgtgttctctttttctgtgtagcattgattaccaccttgtagaaacacaaatgctaattctggaagtgaattatagaatcatatagtccgcttatttatggagaaattaagaaagattaagtcactttctcaaggttaatccatcagctagatagtggtgaaagaaagaacagatcctggatcttgtgatacagaagtctcattgccacagaaatggagccatgtttt

SEQ ID NO: 900537 - DNA, 361 bp, Homo sapiens
tcacccctggtgattagctgatgttttctgggcacatagatttcttgtgagaaaatacggatggagagagaggaatatgttgttggggcaatgcagagattagcacgagtggtcagaattagacaggctacagrtaaacaagtccaggaaagtatggtctgtagttgaagtttagcaaggaaacagtcaattttagcaagttcgatgagtatatgccatgattttgggtttagcaagataactgagttcaagagctttcaaaagtattgcagaaaatatctgaagcagttttttttttttccccccacaaagggttgtagggaaagaagggaaagtccgacatcatcaccaaggatgtaag

SEQ ID NO: 900538 - DNA, 632 bp, Homo sapiens
acaattgcaagtatttgtatatctaaacctgttacaacatagaaaaggtacagtagaaatatgatataaaagataaaaaatggtacatctgtgtatagtccattctcatgttgctataagaaatacccaagactgggtaatttataaagaaaagaggtttaattaactcacagttctgcatggctggggaggcctcaggaaacttacaattatggcagaaggtacctcttcacaggatggcaggcgagaaaatgaatgccagcaggggaaatgtcagatgcttataaaaccatcagatgtcataagaactcactatcacaagaacagcatgggggaagctgcccccatgattcaattaacttccaccagttccctcccatgacatgtggggattatgggattacatttcaagatgagatttgggtggggacacaaagccaaaccatattattccacccttggtccctcccaaatctcatgtcctcacatttcaaaatmtaatcattcccttccaacagtctcccaaagtcttaactcattccagcattaacccaaaagtccaagtccaaagtcttatctgagacaaggcaagtcccttctgcctatgagcctgtaaaatcaaaagcaagtta

SEQ ID NO: 900539 - DNA, 604 bp, Homo sapiens
cctctactgcaatgatgaatatactggaatgttcactggagaattacagtagtcaaaacaggaaaccatgtaaggaaccataaacggtggaagcgttaaataaataatgggttaatcatactaaggaatactacctagttattttcttttaaagaatcaggttatctagatgcactgagatgcatagctccctaaaagatgttaagcagaaataacatattgcagaaaaatatattatcccagttatgagtatatacattttttatatgcatattcacagaaaagggcccagaaaactgcacaccaactgtggacacgtggttaggtctgggaaagggatctgaaggaagtgatgggggacaaagagagatcaatgttttgctcagtttattacctcctgcataaatcttgtaaaataaaaatgaattaatgtattctttaggtaatttgaaaagaacatgttacatttaaaaaaaattttaatattttttatttccatattttggtacattgtactcactctaagtggactactctcctttattattttttaaaacaatgtaatggaaatgatgrtgctcttttctgtcccactctccattct

SEQ ID NO: 900540 - DNA, 639 bp, Homo sapiens
accagagagtgggaagggtagttgggggttgaggggaagagcggagggttaatgggtacaaaaagtagttagaaagaatgaataagayctagaatttgccagcacaacagggtgactgtagtaaaaaataatttaattgtacattttaaagtactaaaggtatataattggattgtatgtaacgcaaagggtaaatgcttgaggtgatgagtatcccatttaacctgatgaaattataatgcattgcatgtctgtatcaaaatatctcatgaaacccataaatacatatatactatgtacccacaaaaattaaaaattaaaattaaaaattaaaagaatcaatcatgccagctaacagagtaaaccctttattttttcctgtaatgaaaatttcaaaaaggtcaggaggcattcccgacttcgattttaccagcacctttatatcttctggtggaagctctctttatttatataaaaagacctcccaagcagcagagcctaaagtcactgggacccttctgttgattcccacacatattactcaggtgtttcatgatatctataagaaaagtctggagaatctttgtgcatagttttcacaaagacttgcttctataactggcacaaggatcaagctag

SEQ ID NO: 900541 - DNA, 689 bp, Homo sapiens
aggtctcagcttgctgatgatagaagtttgtggtccaatattaattttaaataagtgcctactgttctctagaaactcccattcccttaaggaaaagtgtttcatatgagcctctcattgccaggaatagctgtgtaagcattgtggaagttttttccacattaaaatgtagtccaccagttcatttattccttttagggttgtgacagtcgcttgtgtttatgcacccctgtagagctgtctttaaactcattcagcaaattggaaacatttagcttggatgacacctctttaatcttccagtaatctcaccatagagaccactgtactctcaaatacattgttaatacttttagtaagaatggcctgctttcattctcttattactgagccattattctggactctgtttattattattattattattccagagtcgaaataattatcccgttgaaaagaccaagcatgtgcacaccctgttgtgacacagccggttttgtcctatctgaacttgcctgctttgtgaactgttagggtctcagaaaaacaaaaaacaaaatcttttatttttaacatttaattttttatagtttttatattttttaattgagacaaaatatatgtatataatttaccatctgtaccatttgaaatgtacacttccttkgtaataaatatattcttta

SEQ ID NO: 900542 - DNA, 623 bp, Homo sapiens
  misc_feature 570: n = A,T,C or G
aaaccatgttccttctttaattcttagtcttttctatccaaatccatctgactctattaatgctagaagtctttttgattgatgtatgtgcaatatgagaaatatttatggagtacctactacattcatacttgaactgcaagctgggaataaaatgtaaggcagtctcctattctagtgacactatttctagccaagtacacattctagtgggttggataaactatcatctttatttcttaagccctcctgattggaccataagctccttttccacaccacaatgcctccaaataaactaaggatacaatgggtgaaatttcatcctgttaataagttcccaatccaaaacttttatcaagaacacatttatatatatatatatatatatttttttttttttctgagacagagtctcgctctgtcacccagactggagtgcagaggcatgatcttggctcactgcaacctccacctcctgggttcaagcgattctcttgcctcagcctcctgagtagctgggactacagacatgcaccaccacgccrggctaattttatattttttgtngagacagggtttcgctttgttggccaggcgtggccgtcgactcctgccccaag

SEQ ID NO: 900543 - DNA, 555 bp, Homo sapiens
tagtaaaagtatcgaaattatcaaagattacaaaaaggaatcttggattatggacaaaatggtgtatactcatgtcccccttgcccatcacccaaatacaactaaacaccctggacataatcacacaaacmatcataagaagagcctctgaaaagtaaaaagaagagaaaagactggctaggaacctcagaacttaaggaacaatatagtggtgggttcactgggttttcctttcacattccatatgttctggactgtgtgctagagaacaatgcaactcataaatgccaacaagcagagacaaaaaggaaataaaagcctgctctctccagtcaaaggactaggagacagcccagcacaacaaacatctttttgacaataacccccttacatcagccaaacaccatggatgccttccccaactcctgccctgcaaagagtgaaaagtctgaatttctacaccctaataaatggtagtggacactctgggacatgctaccctcccaccaatggtggcatggtgtcagcaaagaccaagtcaggattttggactcc

SEQ ID NO: 900544 - DNA, 658 bp, Homo sapiens
attcttcttttggacagggccttttaccattacataatgttcctctttgtctcttttaactgccgttgctttaaattttgttttgtctgatataagaatagctactcctcttcacttttggtgtccatttgcatgaaatgcctttttccaatcctttaagtttacatgagcccttatgtgttaggtgagtctcctgaaggcagcagataatttgttggtgagttcttatccattctgcagttccacatcttttaagtgggacatttaggccatttacattcaatgttagtattgagatgtgaggtactattgcattcatcatgctatttgttgcctgtgtaccttgttttttttgttgttgtttttgttttttaaattctatgttagttttataagtcctatgtgatttatgccttaaagaagctgtattttgatgtgtttccaggaattgtttcaaaatttagagctcattttagcagttcttgcagtggtggctgggtagtggtgaattctctcagcatttgtttgtctgaaaaagaccgtatctttccttcatatatgatgcttagttttgctggatacgaaattcttggctgataattgttttstttgaggaagctgaagatagggccccaatcctttctagcttgtagggttt

SEQ ID NO: 900545 - DNA, 622 bp, Homo sapiens
ctcagccacacccttgggccaactttacaaatgccgaggagaaagaaaaagaaaacagagttgagagcgatttctcctggggctcagggggtccccgccattcttgcagcccaagcagctgcgctcctgcagaacctttttggagctgagtggcggtgagactttctccagctagcaaacattcagcaagtgtctgctcttagaggagcagaaattttggggtttcagtggctaaagatttccatcctgggagcctgtattagaaagaaagagaaacgccccagagcaccaacagtggccactttgtttattgtttcgccacatgagagagaaggggagaagtgggctgatgtaagagaatgagaatgccgtggaagatttgcttttaagcatataaaaccctgcctacgccataagaccaaaaaaagatattttgtctgtcttaacagagtccaaactaatcatccaaacaaagccacctttcttcatcaactcctggccactacaacacttaagttataattcttctgtgtttttaacccttaaacagttaagctcctctggaagcaatgtcgccacacacacacacacacacacacrcgcacacacttttttttttttt

SEQ ID NO: 900546 - DNA, 608 bp, Homo sapiens
tacactgcctcgagactcttcagagagttccctctagcaacatggttctcactttcttcagatgcacgttctctaccttggacttaccaacctccatcactgtaagaaagaaatttcatttcttataaattacccagtttcatgtattctgttacaagcaacagaaaatgaactaatgaaggttgtctcacccatttatctgtgatatataccatatacagtcttttaaatatagtaacagattatatatgtcttctttttttgtgtgttttgtcctaacatgaatcaagtagatttctctctttttttatgttctgcagtggattatattatatgggaaatttctatacctgaaagggttgatattcctttaagtatttaaaggtttacccataaatgtataatttatatgaaatatttttggggggaatgttttataaatgcatgctactttgtaaaagatcttgaataacattttccaccctgacacacagggcttcagtttctgcaatacttaatgggtctctaggttttctgcttgcattagccakgacaattcatgtttttcaggaagatgtcatttttatttggcctttctaatcattagc

SEQ ID NO: 900547 - DNA, 555 bp, Homo sapiens
ataacccacagatgactcatctccactgtacttcctaactttcctcagatgccatctttaataaccatcaaaacacaatccctttgaatgaacggaggctttggaacctgtgcagtgcatacaaaggaagtatgtttaccagaaatatatcttcccagctgatctatacttatcctctttcatctttatccacatttcatacaaagaaaataggcattgctgttaccacagaaaagcatgaatgctacaattctcaaagattctgtgctttcaaagatagctctaaaagaaccctgacaggatataaagggttaactctctattgggttgggcagaaaagaaggtttatccaagggggtaagctcagccatcctccctcccttccatagacacatccaaccacgactccctcactggattacgctgcccagttcacagccaggggcatttccacagctgttaaacctgcatcaggaaacaaacggccttatttttagctttcagtggtttgtgtaaaaccccrtaataattaggcctcattactctgtgcagctc

SEQ ID NO: 900548 - DNA, 619 bp, Homo sapiens
tggtaccgggggttgtctgcacrgagtcttgtgatgtgaaccatctgtgggtctctcagcatggataccagcgcctgttctggtggaggtggcagggatgtgaaatgggctctgtgagggttcttagttttggtggtttaatgttctatttttgtgctggttggcctcctgccaggaggtggcgctttctagagaacatcagctatggtagtatggagaagaaccggtggtgggcagggccctagaactcccaagagtatatgccctttgtcttcagttaccagggtgagtagggaaggaccatcaggtgggggcagggctgggcatgtctgagctcagactctccttgggcaggtcttgctgatgctgctgtggagggtgggcatgaggttctcaggtcaatagagtttcgtacctaggaggattatggctgcatctgctgagtcatgcaggttgtcagggaagtggagtaaagctggcagtcaaaggcctcatccagctgtcatgcaattcaaagggccccagtctcactgccaccatgctccctccaacagcaccgagtctgtttccaggcagtgagcaagcagggctgagaacttgccccaggctacctgcttcc

SEQ ID NO: 900549 - DNA, 571 bp, Homo sapiens
ttaaaatagccagtgggaattagcttagactgtgccctccaacccyagccgatactggaacgacacggcagtagggggaataagaaccccctcccctcccttgtccaaatgtacacttgccattactccatccacaagttgcacccttctccagaagtaaaacttgccttgctgagaaaattaaatttctgttcgagtgctatttcttcaccacacagaggaacaagcattttgttgctaacactccttaaaatcagagtaggcttctgctactttgtatccaccatgatgtgctttgcacagtatgtgctcagtacctgttttagaattggatttggaaggctgaaatgggaggattgcttgagctcaggagttggacaccagcctgggcaacacggtaaaaccctgtctctaccaaaaatacaaaaattagccaggtatggtgtgcacctgtagtctcagctactcaggaggctgaggtgggaggatcccttgagcctgggaggtggagggaggttgcagtgagctgtggtcgagccaccacactccagtctgggcaatggagcaagac

SEQ ID NO: 900550 - DNA, 529 bp, Homo sapiens
ctctgtacacgaaatcatcctggctgcctgacaaattctcactgtgcctttaagagctaccttgatcctcacttcctttgmtaagccttcttttcctatcattaggaatccgctcccagtgcttctgtggaaatttgtacgtatgtctactacaacactttttaaactggcgagtggtctgtgctttgtcttcaagaacgcgcccaggctcagaggacccggaagcctatatctttccaaagtccaatttagccagagccagcgtaaacgtcgctctcaaatgtcacaagggaatcggggtccattttccacaatgttgtgaactcaggattaaaaacggattggtacaataaaacaaactccccttgccgtgccattgtcctcacaatgccgtgactcggattcgaaccgaggttgctgcggccacaacgcagagtactaaccactatacgatcacggcgagctactagggacacaggacctcggcttgtcgcctgaactcttctctgttgaaagccccgcccccttg

SEQ ID NO: 900551 - DNA, 577 bp, Homo sapiens
gttaactcaatttatagtatttaaatcattaatggctaattcattatgagtgttatgattacgcttccttttgaccatttttctctctgaagttagtaactgcctcatgtttcatatgctgttttctacatacctgaaaataagttgttttaaatactccaccataaatgtaaatctcagtgtctatagacccacaggtaattgatctgtttcattagtatttttctgtatacactctcccttcctggcgccttatattctcctattccagttaggactggttatactctaggccttcagggatcttaattcactattctcagggaattcacttacttaagtattcactattgatatggtttggcagtgtccccaccaaatttcatcttgaattgtagctaccatcattcccacatgttgtgggagggaaccactgggagataattgaatcatgggggcgtgttyccccatacttttctcgtggtaatgaataagtctcaccagatctgatgattttataagtggttttcccttttgcttggctctcaatctctcttgtctgccgccatgtaagatg

SEQ ID NO: 900552 - DNA, 485 bp, Homo sapiens
ttaagactttacattatttaagctaaaaaatatttatttcaacaaatgtgcagcctgyatgtttgctaccatttataagcatatattgatgaataataaagataaattcaattataatgggaatattttgaacatattaaaaccttgaaacttaaacagctatgaagcccaaatgcttagtttttctgtcacgttcttatttctcatagtacatactttaggaatgtgaacagctccaataatggtgtatttccaatatcataggcaggattaacagagtcaactcattggtcaggtaagagctgattacagtaaagagtccatcaaaacccagagcactgttatacttttctaattcactatagcacaaagtatagtactggacatgtattcatagtaaatatgtaattattagtctgattggtgtagggattagttgaataatggcaactggttgagaagatgttagcaaataaatgcatatc

SEQ ID NO: 900553 - DNA, 659 bp, Homo sapiens
tcccatatttatttctagaaaaaaaactagccagaaaacaacaattatgtgttaattcagatttatttctgggaggcttgaacagttattgtggcagagcagcatgcctgtttgctagttttcagttctgtcttggataaggtcctttctgtcttctggaaggttgtcaaatatcattagggggtctctcagtgatgcttcattgtgcattctgtatcttttatttctctagtaaaattttggttgcctataaagtgactatgatgcttcctgtttttctcataacaggtagaaagatctgtagctttgtatagtatgaaatgacaaagaaagacctgttattgaaatacaattgaattttaattagccataccatctaaagcctccattatggtgaagctagtagaataaagactgggtattttgttacttttccagggtatgaggaggcaaagattgtatgtagttacttggtagaatactactgtctgccatcttaaaaatacttttaataagaagatccctattatattttactctggctgaattccctgtgaaaagcattgaagggttggagtagaggaaggactaagtcataagctctctctctctctcttctattaataagtmcttcatccctagatagtgctagtctttct

SEQ ID NO: 900554 - DNA, 672 bp, Homo sapiens
aaagagctgagtgcggtgggtagctcatgcctgtaatcccagcacttagggagggggagtattgcttgagcccaggagttcaagaccagcctgggtaacatagtgagacctacgtctctccaaaataatttaaaaaatacagaataagttagcagggcacggtgtcacatacctgtggtcccagctacttgggaggttgaagtgggaggattgcttgaaccctggagattgaggctgcagtgagccatgattgtgccactgcactccagcctgggcaatagaatgagaccctctctcctgaaaaagaaaaaaaaaaaaaaatcccgagctaaactgatcaagaaaaagacaaattaccagtatcaggaatgaaagcgggtataatattacagattctgcagacatgaaaaagggaatgttatgaacagttttatggcaataaacctgacaaatgcaacagacaaaaatctttgaaaaatacaacatactgcctggcatagtggcacacgcctgtagtcccagctactcaagaggctgaggcaggagaaccgcttgaacccaggaggcggaggttgcagtgagccaagatcgtgccactgcactccagcctgggcgacagagcaagacttcgtctcaaaaaaaaaaaamaaaaacagaaacaagatgaaatgt

SEQ ID NO: 900555 - DNA, 600 bp, Homo sapiens
cgccagaggccgttagtccaagtcacgtgatcgtcgactcagctgacctggcgggaccggaaaaagaaattcccgggcgatgatgaggcaccaggggtgaagcggrcatgggctgctggagcgggaatgagggggcgccagtggctccggaaacgggttgaggttgtctgcactggccgctccgcaaacacagtgtgtgcgggcgtcagggcagcaggtctggtagagaaaagtccaccgccatccctctcccgagtggggcgggtaagacagagcaggccggccggcttagagttccctgcttccctggcggaaggaagggcccctgactcctggggcaggaactagggcttgtctggagctgggagtcctttcaggtcttctctagctccaaaaggacctcccaaggacacccccttccccagccctgctgtgggacttggacaggaaagtgctagaatcaggctcactcttgcacactgttaggaagccactccgctcttttcagatccagaaagtagtagttttggggctgatacttatccatccattcatccaatccatccatccataggttcaaagtgcctagtctataccatg

SEQ ID NO: 900556 - DNA, 699 bp, Homo sapiens
ttgcatacatttatgaaagtccctaaggagattttgcccattaatggacttaaaaaaaagacagcatacctcttktatgaataataattggtggtgtacagtgacatttttcttttagggttttcttttttaaatttttttaaaattttactttaagttctggggtacatgtgcagaacgtggaggtttgctacataggtatacgtgtgccatggtggtgtgctgcatctattaacccatcctctaagtttcctccccttgccctgacgtgtgttgttcccctccccgtgtccatgtgttcttcttgttcacctcccacttatgagtgagaacatgcagtgtctggttttctgttcctgtgttagtttgctgaggatgatggcttccagcttcatccatgtccccgcaaaggacatgatctcatttctttttatggcttcatagtattccatggtgtaaatgtaccacatttcctttatccattctatcattgatgggcatttgggttgttggttccatgactttgctattgtaaatagtgccgcagtaaacatacatgtgcatgtgtctttatagcagaatgatttatattcctttgggtatatacccagtaatgggattgctgggtcaaatggtatttctggttctagatccttgaggaatcgccatactgtcttccacaatggttgaactgattta

SEQ ID NO: 900557 - DNA, 580 bp, Homo sapiens
tttttcttttttaagacagggtctcactctgttgccaaggctggagtgcagtggcacgaccacagctcactgcaacctctgcctcctgggctaaagtgatcctcccacctcagcctcccgagtatctgggactacaggtgcatgccaccatacccggctaatttttgtatttattgtagagttgaggtttcaccatgttgtccaggctggtctcaaactcctgagctcaaatgatcctcccacctcggcctcccaaagtgctgggattaaggcgtgagccaccacgcctggccaaaaaagcctatttctttcacacaagaattctggctccttctttctttccagggctttcaggcaaggctcattcctgcaagcagtcttccagcttttctgcatatgtgagtcttagaggaaaatctgctcagctaagctcctaggctaataagcacctcttttcttctaattcttgagagcttttgtctatggctgttgtcaggactgctttacttcctgttttctggaaacatacrccaaactgtggcagctgaatgaccaaagctatcagccagactcactctat

SEQ ID NO: 900558 - DNA, 585 bp, Homo sapiens
agatcaccagatgactactaatgactrcaacaaagtcaaaaggacaagtgtgtgcacaaaacctgcctccacacatacctagcctaaccctgaaataactcatcctgtgtaaatgaggtggctaagggcatgagctctggggccatatttccttggttcacatcctgagtccaccacttactggctgtgtgaacttggcaaatcatccagcttctctgggactcagtttgccatccatggaatgggaacaataacagtatctacttcatagagttatttagaggactagacacggttgatatatgtaaagtgcttagaacagtaccaggtatacagaaagccctacataaatgtttgctctttaatcgtatgaaaactgaatgttgcattctaagttagacagagctagacacttctaccatctgttaaaaaattgcctattaataagcttggacaacgtcatgagcatgccaattgtgatccctattaccgtatgtttgtttcaatttatagttctgttgttctctaaaaatttatttcactgtttccctggagagctagagttatattctgaaagtatttttt

SEQ ID NO: 900559 - DNA, 626 bp, Homo sapiens
ttctatgccaaaccagggagggcaagacatttctaaatctcctttaaggcaacaaatcaaagggcttccttggaaagggtcttagattatcacccaagaaccamacacaaaaaaaactagctgtgcattttccccttctgcattaagtctaagttgttcttctgctcaattctagaagaaattaggggactaaaatatgatggtataggaaaaaagggtgtcaagatgacagggataagagatactagttttctcattgtattagaattctattttttaaaaaagtacatgtttcatgtattatgtaacaaacctgcatgttctgcacatgtatcccagaacttaaagaatattaaaaaaaaaaaagaagaaaaagaaatctactctttaaggaccattaagcatcccttattttccatggcattttcattaattaaaagaattaaaaggaaaaaaaagtacatgtttatttatttaatcttctcaccatgttgccaaccaatgtttcagtcccagtcaaaatccctaccttctagtagggtgagaaagccagtaaacagagaaagagctaagataaccttagacttcaataactgttacagacaaaataaactcagtgatacaat

SEQ ID NO: 900560 - DNA, 348 bp, Homo sapiens
caactccacataagtgagcagaaaaattgtgtgcaactggacaggaacctgagtacagcaataccaggctgtccatggatgaggttctttgtggtgcaatgatcaacatctggaagtcagatgaagctgtgttcaatgctgtccttcgggttatctcaccagctgggccaccttgagcaggcgatgtcacctctctgagcctccatttcctcctctgtgaaaggtggaataattgttaataatgattgaagaatttttggtaattatcttaataatgatcattttggctttttattctagcatttaagatccaaagcctgttgsgaatagcagaaagaatttttaaaa

SEQ ID NO: 900561 - DNA, 567 bp, Homo sapiens
atctcctcaacagttgccaggtaaaatacaggatgcccagttaaatttttagtataagtstgaaattttacatgggatatactttcactattttttttacattgtttactcagaacccaaatataattggatgtcctttattttattttgctgcatcttgcaatcctaactccataattaccagctgtatgtcctaaagtaaatgacttagcctctctggccttggttgcccaatcggtaaaataggactaaagatttcttctaatgttgacaagagaatgaaactgattaaagtgggtgggtgttcccagcagcacatgttaagccctccacatttgttccgtacacttcctgtcaatcatctccctccctcctcttcggttcttcctctttatccctacctgtcttgaggttgccagggctctgcacaagcattgtttagccctcttgctggccttcaaaactagcagattataattagccataaaaaaataagcagtaaagttaggattttcatctaaaacacacacacaatcaattttgctaagaagggatgaagtctgtttt

SEQ ID NO: 900562 - DNA, 670 bp, Homo sapiens
cgtgaccaagttatttcatcttaaggagcctcagtttcctcatccataaaatgggaacaatgataatacctactggataggtgatataaggattaaagggtttcaagcaaaatggcagatataaagcttgaggcctgaactcaaccagtatctgctggtactgatcacatattctacagtattatatatgtcccatagtaaggggtgtctgggaaataacaaagagaactgaatttgaatctcctcaacagttgccaggtaaaatacaggatgcccagttaaatttttagtataagtctgaaattttacatgggatatactttcactattttttttacattgtttactcagaacccaaatataattggatgtcctttattttattttgctgcatcttgcaatcctaactccataattaccagctgtatgtcctaaagtaaatgacttagcctctctggccttggttgcccaatcggtaaaataggactaaagatttcttctaatgttgacaagagaatgaaactgattaaagtgggtgggtgttcccagcagcacatgttaagccctccacrtttgttccgtacacttcctgtcaatcatctccctccctcctcttcggttcttcctctttatccctacctgtcttgaggttgccagggctctgcacaag

SEQ ID NO: 900563 - DNA, 588 bp, Homo sapiens
tggaatgtcatcagtgctataactgaagaaggatcacagggtgatggtatcactgagaagggaaggaatcattctgattagcagaataaggaagggtccaaggaaaagtgacaattgagccgggtctaggagacatcaaagttcaacaggcaaggaggcaaagagaacagaaaaaaaaaaaaaatcttcaccaggagggaaggattatcaaatttatcttctgtcagattgatcatacatgttcagaaataatttaaataaacaagtaaaaataagagaaatgataaaaaatacaaataagcatgtaagtaaataatttaaaaaataatatcaaatcaaatagtggtaatgactaaaggtgtagagaggttaatggcatttaacaacacatgtattgacaattcaaacaaaaaccttgcaaaattataacatacaatttgttgctatttcatgtcttgagacaaatgaaaaatgagactgatgattgaggtcagctgtgtacttgagttggcaaaaataaagtccccatcakctgtgaaataaagacattacccatctctaaaatgtttacagatattcttattacgc

SEQ ID NO: 900564 - DNA, 620 bp, Homo sapiens
atgcatagtagagagtctgcgccaggtatgaggcagctagatgcatctttgggaccaagcttgagccaaggggaggtgagtggaagtgtcctttccaggtgattgtcacatgaaaggaaagccatttttctggaattcctctttccttaccccataagctcaaacacaggtgctagatgtgcctgtgacttggctttgaccatacagccgaggactgtggagcagtaaggtggagggaactgaggttctgggatgaccacgtgaagcaaagctgctcacccactcaggactgttacatcagagagaaaatataagctttttaaagccaaagcttcttgggagtctttttattacagtggcttaacctttcctctaactaattcaaaagccaattccaaaacaaaccaaccaatcagcagaaaatcagaatgttgaaagtgacatattccaactgatgacaaaagcctgcaggatcagaaacttttggtgagtatgaaatggcaggaacccaagggaaaagggrcatccagtagctggaagcacccacagaaggccatgattttaggtgggaatggtggagacagatttatactggcaaaagtgagtaggaagacactggg

SEQ ID NO: 900565 - DNA, 581 bp, Homo sapiens
tttctcttctgctcacttatcttttttttttttttttgggtggggcggggggacagagtttcgctcttgttgcccaggctggagtgcaatggcacaatctcrgctcactacaacctctgcctcccaggttcaagcaattctcctgcctcagcctcctgagtagctgggattacaggcatgtaccaccatgcccagctaattttgaatttttagtagagacagggtttcaccatgttggccaggctggtctcaaactcctgacctcaggtgatccgcccgccttggcctcccagagtgttgggattacagccatgagccactgcgcccggccatccttgtgtttcctataccttctcagtgcagcttatatttataacatgccaaagatatgagtgttttttgcttatgccagtttttcttcattttaacagagtagcaagatttgtatttatgtttatacattttccctaccaagaggtaatttattctggcctttttgtagatcacggtagtgagatagtcccaccatagtttgtctgtatgtatacccaatccatagcatttatgtgaagactcacagt

SEQ ID NO: 900566 - DNA, 623 bp, Homo sapiens
taggtgacagatctaggtttgtctcagcttgtgaccttgacaaggcacttaacctctcckttctttgaatggtttcttgttgtggggacaaaaatcccagtccttcccacctcactgggtggggtgatccaatgagatcattgaggaatcactctcaatgttattgttgctcaattattaaccattaataataccaacatatcaataagtcctcttatcactggtcttggagcttgctattcttctgccatggtcctgagaaacgaagttggtttttacagtagcctctaagtcttttaacctgaaataactctacatgggagcccagtagctcttattgagactgtattctggtcacattccctttcttcccacagagacacacaaatcttccatcagttatcctaactcttgtccctcagagacaagcacttgcctctcacacctggagtctccagaacatattgggttgaggtggacttctacacagggcttgcactgtgaaaatctgaattaagtttagcagacacaggctacatagagatggtgatccagacttgaagttcacaagcttatattaggaacgtcattgtggaagataccaggctgtgttagggaaagat

SEQ ID NO: 900567 - DNA, 567 bp, Homo sapiens
acagggcggaagacgccctgtaggagagggctgcctcctccttttcttcttcttcttttttttttcatcgttttgtagtgcgtcactcaaaaactgtaagaaaagtaagtatagaagctctttgggtggagccgcagttggttgaattgctttcatgaaaggttgaaaagaatgaaaagtagttagtacttgggttctggtttttagacaaaagcaggacaaatatgtagccaccccccaacttttttttttttttttaaacggagccggaatctgttattggtagtaatgtgtcatgtgagaatactttgattccagagcctgtaacacgagcaggtatatggtggcgcttatgccttcccctcgcacagcactttacaactacaggggtgttgctgccagagtaatattgtattcttaaggctctctggggccgggagagtatgcggctgttgggattctgsggtgtatttccgtggagtatgtctccccaggattaaagttaagaagctgccggaaaggttgttgccgctgacttcactttgtgtgcccaccagcacaggcaca

SEQ ID NO: 900568 - DNA, 587 bp, Homo sapiens
atggatgttctcctcctccttcacaagatgaccttcccaaagttgctcatctatagaaatagaaaagaatgatctgcttatagagggctctatcccactccaacaaataaacrtatattatttttcaaataataattacatttaggaataacagtgctatttgtttttgacataaattactgaacttccaaaagaacattgaaagatttagtttttgtttagctgttttgtttcctcttcttttggccattttcccatttgcaagaataaagagaagaaagtttgttgcctgaaagaaagattacagtttgggtgcaaactcagagacatgacctgttattgaaaaacaaaaatctttgtatcccagataatgtgggtctttcagccatttaaaagaaaatttgtgccctcctgtgtttgttgactttctatttatttttaataaatgtaaattccaaatgattgctatatttgcatattcacatataattaaaatatgctaaataaataagaaattattatgattgcaaaaatatgagctatgacagtacatgagctctgtatgataaaatatgtatcattttcat

SEQ ID NO: 900569 - DNA, 576 bp, Homo sapiens
gttgcaaagttgtggtgggtaaacccggagccttgagttctttcatcctgtccccaaaaattcttgaaggaggaggagccaactgggtgaagaaagaatcccaagtgtgggctcacccacttctggatgctttttagaaggtaaccccagaagggctttatatttcttaggagaatttcccttcgcccctcaataaagacagccaccatgtgagagatgggggatggctaagacatctaactagagtctaatttgggactctaacaaagtgcttcatgctgccactaaggtgcaaagctggtgttagagtaccagcctggttacagtactgaagttcactccttctgttctgcggcattccccctggtgtgtcaggagacactgcaatcttctctcagagaagtcaagagagaaaaatctgcaacacaaaacaaaggcacctaggtcagattcckcagttgtatcttaattattcaggagttgcttccatatttagcagtgctcagctccaaaatatgaatactatcttatgactgctaggcagggtaacccacaattagccaggctgtttacagt

SEQ ID NO: 900570 - DNA, 576 bp, Homo sapiens
gttgcaaagttgtggtgggtaaacccggagccttgagttctttcatcctgtccccaaaaattcttgaaggaggaggagccaactgggtgaagaaagaatcccaagtgtgggctcacccacttctggatgctttttagaaggtaaccccagaagggctttatatttcttaggagaatttcccttcgcccctcaataaagacagccaccatgtgagagatgggggatggctaagacatctaactagagtctaatttgggactctaacaaagtgcttcatgctgccactaaggtgcaaagctggtgttagagtaccagcctggttacagtactgaagttcactccttctgttctgcggcattccccctggtgtgtcaggagacactgcaatcttctctcagagaagtcaagagagaaaaatctgcaacacaaaacaaaggcacctaggtcagattccgcagttgtatcttaattattcaggagttgcttccatatttagcagygctcagctccaaaatatgaatactatcttatgactgctaggcagggtaacccacaattagccaggctgtttacagt

SEQ ID NO: 900571 - DNA, 606 bp, Homo sapiens
gttccaaactttcccacatcttccagtcttcttctgagccctacaaactattccaacctctgccagttacccagttccaaagttgcttccacatttttgggtatcttttcagcagcaccccactcctggtaccaatttactgtattagttggctctcagactgctgataaagacatacctgagactgggcaatttaaaaaagaaagagatttagtggacttacagttcctcatggctggggaggactcacaatcacggtggaaggcaaggaggagcaagtcacatcttacatggatggcagcaggcaaaaagagagcttatgcagggaaagtcctgtttctaaaaccataagatctcatgagattcgttcatcctcataagaacaatgtagaaagacttgcccccatgattcaattacctcccactaggtccctcccacaacacatgggaattcaagatgagatttgggtggggacacagccaaaacatataggtttatatacatacatactwaaccattgtgttatacttgcctacagtattcagtacagtcgcttcctgtataggtttgtagcttaggagcaataagctctaccatatagctta

SEQ ID NO: 900572 - DNA, 594 bp, Homo sapiens
tgtggtgagatagtaatgtctactatcttatgtgtgattaatgaaatctgctaatataaacagtgagaggacaggcactctgattctgccaatggctaccaattaaggaggtgctgctcattttcaggatgaaaagggaactgctctgtcttagctgtctgtaataatttatcaagaagtgaaattttaaggacatgacccagaaagaacatgagaatttaaaaatctctctttcccttataataataatattaaaaatcatagcaatagtactataatgtactagatgcttctatttcccaggtacaaattaagtactttgcaggcatatcccggtttaatccactcagcagccctctctagtaaatatctatgctgtgttcaactttcagatgaggtaagtagtgttatagcaaacaagggatggagtaggaaaatggcactaaccatgacctagttaaagaagcaagtttgggatttggagaaaggaacatctgtggaattgtccacattttgtgacatgtgtatacggggcactatgcgagtaagggtggcagggaaacckaaaaacacacatgttcccagacacgtgtg

SEQ ID NO: 900573 - DNA, 664 bp, Homo sapiens
gaattgctggacttgggaagcagaggttgcagtgagccatgattgcgccactgcactccagcctkggcaacagagccaccatctcaaaataaataaataaataaataaataaataaataaataaataaataaataaagctctatggaaatgttttcccttgtgttttagcttgttccatgtgaagcaacctttctgctcagatattccctggcctgcaatagaagctccagtttgggctttggaaactcaagtctcaggtacattgaggtccaaatcacttgccacttctttcgtttaccagaaccttttgttgcaacaaaagagtaggaggcatacaccatgtgtttttcattcatttatgctgaaatcattgtaacgtttcattttttatgagccatttgatgtccaaaaagccttttgaatcacatttataaccctataaaaaactcattcctcttcgaaacaggaagccactttgtgagcagagtaaacacactcaaaccctggaaggtgggagttgagaggctgcaaatgcctctgggagcctctgccaggggtgaaatgccttgactgcccctgagggaacctccttgtggccctggcaggtcagaggggccttctcggctaagtcagaaagcagaggcctgaatgggctctccaggg

SEQ ID NO: 900574 - DNA, 550 bp, Homo sapiens
ggactgtaggcagagaacacctcccccatgactctttaattcatatttgttaaaggcagaaactgtccaagcctcagtttctacatctgtgaaatgggaattataccacctacctctcagaattgctgtgagtactagatgagattctgcaggtacacctttgctttgtgaatgatgaattgtgtaactaacataggatgttttctgtagtcatgcagcaaggtcgtcccagcaatgcccttggcaaagcacagagtcattcagaattttcccctctaaaccttaattctcggtcaactgtgcctcttcctattccctcctctgccacctcctgacaccactgcctcctccacccagtaaagacaatcacagagcaattagtcctcaaagaggaagaagaagaagaagaagaagaagaagragaaggagaaggagaaggagaaggagaaggagaaggagaaggagaaggaggaagaagaagaagaagaagaagaagaagaagaagaagaagaagaagaagaagaagaagaagaagaagaagaagaagaag

SEQ ID NO: 900575 - DNA, 636 bp, Homo sapiens
ctcaacggagctgcccagcagtggactgacaagctttgcaaggtggggagtctcccgtcgactgggggcaatcaagttcagatgccctaaaaggaattcccgtcttgagggtgaatgaggattagattctggagttcgactgacctggatttgaatcccaactctgccagttgtgtggcaaagaaacttaagcctgtttacctcagtcttggctataaaatgggtgtagttaaacctcacagggagagtgagttcaagggctaaagagagtttctgcaaaaggcaaatcatctgcaaaaagcactgctcagtacacggcagtgatcataattctctgtcttttttcttcttgccgacctccaatgagctaatggaggggaaggtaaccaagactggctccagcagctgatgtgggtctctaactcagctccagcctcccatttgcccagtgatcatgcacctgctgggcctcaatttccttatctgtaaaatggggatgattgcgtagctataaagactgtactcacacaaagggagaataatcagcaggagtaatataaacagttaccattaatagtacaggggccagggatttgcagatgcacttaagttargggtacaagccctgggttcaag

SEQ ID NO: 900576 - DNA, 558 bp, Homo sapiens
gctacatcgtctttttaaggtgtctcaagctaatactgagcgaccatgagcctgggccacagttgctagcttggaccaaagcagcccttcatcatttctagcaaaataagtgtttcctacttggctggagagcattgctccaccattctggggacctctgggtctctttccttccagctgaggcatcaagtaccttgagtaccctagcttggctactaatttcacccatctagacttcatcaggccctgcacctgaaaaaaaaaaaaaaagacaaaaagcaaggaataaggaacatcagacaaagcacaaaatgtttcccttctcttactccaaaccacatctcaaaaatggatcttattaatgaggcatatttctctgtactgacttgacagataaattaagtgaagatatattaagtaaagaattggaaaatgccacacactctgctccatccacctccactttctaaaagtatatacctagaatmaaatgctgaggaactatgtcttagtctgtttcctgctgctatagcagagtaccccagactgggtaatttt

SEQ ID NO: 900577 - DNA, 596 bp, Homo sapiens
ttcatttcctgaccctccccttccctgcagkgtcaggtgtcccagaggtctagtgacagaaatgatattatggctatacctgacactcgagttgtacttactacatttctgccttattatctctattttgaagatggcaaaaccgagacccttggagattgtctgacacattcaggtttcacctccaggcaaacaaggagatggaactaaatccaggtctcctaataccgcaaggtgaaggtgaggattagatgattaaatgcctccgagatgctcaccttcggctttggcaactttaagttctgtgatttttcaggaaaccaaagtctccagatcacaagttagaaggaggggctggggtggtagagacccagcttggtagctcccagctcatctgacatttcactgtgccccaggaagcctcatcaggaggggcagacaaggggctgaacagcctaggtagccgggggccaggctagccagccctacactgccctccttcaaacctctccccagcctaccaaaggaagtggtggtttcaagctgcaaaataagcaaatcagggccccggcttctgggggacggatgtttgcatc

SEQ ID NO: 900578 - DNA, 628 bp, Homo sapiens
gctgaatcagagtttttggacatcctctttttaaagcatagccaataactaggacactaaaacaaggactttgagaagcagagtagtcttgaatttttctgttgtaggagaaataaactgatgatctcagaaggcataatatgaactccctgtcctaccccagattaaactttacccagagtgacacaggttatacctgctctattgagagaatgcactggggatcagtcgagtgaagaaacacaagttgcctgggggatcctcatctggaacaggctaatgaatgtcctttgtgaataactttgggaacaaactttaaatagacagctgagagaagagggtccagggagactagtttggagacacattggtggtggtgggggaggtatccagagaacattagccacagagaagaagagtatggagtaattatatttttctttctcaggtgggtggtcatagctggacttggctatggacaaacaggttaggtggaaaaatttggaggtcctaaaaagccacaytttcttttcttaacttttatattaggttcaggggtacatgtgcaggtttgttatataggtagacttgtgtcatgaaggtttggtgtacagattatttcatcacc

SEQ ID NO: 900579 - DNA, 635 bp, Homo sapiens
tgatgttgagcctgtgggagcacagaagtcaagaactggggtttgggaacctctacttagatttcagaggatgtatggaaatgcctgaatgcccaggcagaagtttgctgtaggggtggggccctcatggagaacctctggtagggcaaggcagaagggaaatgtgggctggagcccccactcagagtccctactggggcactgcctagtggagctatgagaatagggccaccatcctccagaccccagaatggcagatccaccaacagcttgcactgctcacctggaaaagccacagacactcaatgcctgactgctaaagcagctgggagggaggctgtatactgcaaagccacaggagcagagcttctcaagaccatgggagcccaccttttgcatcagcatgaccttgatgtgagacatggagtcaaaggagatcattttggagctttaagatttgacagcccctctggatttcaaacttacatggggcctgtagctccattgttttggccaatttttcccatttggaatgagcrtatttccccaatgcctgtatcctcattgtatctaggaaacaactaacttttgattttactggctcataggcagaagggacttgccttatcttggat

SEQ ID NO: 900580 - DNA, 564 bp, Homo sapiens
acagacttcatcccttcttagcaaaattgattgtgtgtgtgttttagatgaaaatcctaactttactgcttatttttttatggctaattataatctgctagttttgaaggccagcaagagggctaaacaatgcttgtgcagagccctggcaacctcaagacaggtagggataaagaggaagaaccgaagaggagggagggagatgattgacaggaagtgtacggaacaaatgtggagggcttaacatgtgctgctgggaacacccacccactttaatcagtttcattctcttgtcaacattagaagaaatctttagtcctattttaccgattgggcaaccaaggccagagaggctaagtcatttactttaggacatacagctggtaattatggagttaggattgcaagatgcagcaaaataaaataaaggacatccaattatatttgggttctgagtaaacaatgtaaaaaaaatagtgaaagtatatcccacgtaaaatttcasacttatactaaaaatttaactgagcatcctgtattttacctggcaactgttgaggagat

SEQ ID NO: 900581 - DNA, 617 bp, Homo sapiens
gatgatttaaagtatatgcgagggctgggcacagtggtttatgcctgtaatcccagcactttgggaggctgaggcagtcagattacttgaggtcaggagttcaagaccagcctggccaacatggcgaaaccccgtctctactaaaaatacaaaaattggccgggtctggtggcacacgcctgtaatctcagctactagggagggagaggcagggaaattgcttgaacccaggaggcagaagttgcagtgagctgagatagtgacactgcactccagcctggtttgtttttgttgttgttgtttttgtttttctttttcagatggagtgagactctaaaaaaaaaagtaggaggatatgtgtaggtttcatgcaaatactatcccattttatatcagggacttgagcatctatggattttgatatccatgggggtcctggaacccccaaggatagcaaggaatacctgtactagccaaatgaatgcaaaacatctaattatgagaaaaatatttggctcatattcaggcactgggttgaccctgctcaaagaaatrtcattctgcattggctatatccaaatgtcctttgcccactttttaatggggttgtgtttttc

SEQ ID NO: 900582 - DNA, 565 bp, Homo sapiens
ctacttaatctgaggaaaaggttttctgataatgtttgaaaggccagtaaatataacttgagtcaacattttatcactgaarctcactacaagctaatgtttacccatttttataaacttttaaagaacagcatctcgtcacccccatagtgccaaatattatctctgtctacattctgttcatcttagaacagtttcttttctctctgtgtcgatttcttgtcatgctaagtaattattgtatagacctcttagtttcacatgaacatcatcttcctttagctctgatgaattttaattatctcctaaaacttccccttggcttcagtttctcaaagagatcaataaaaggtaatttgaattctttacataattgacagtgcctcatttctcttagagatgagctgacttgacattagacctaagtcttatctatttgacatgcacgagatgaatgaaaatcatttagtctgtattattctcaaagccatctcattattgctatgttaaaaaaaataggatgaaggatctgtgataaaaataaagatgaaatatttatttcatc

SEQ ID NO: 900583 - DNA, 579 bp, Homo sapiens
tattatttataacatgacacattaacaacatgacacagttgctaaggtagcataattgtttgtctaatttttatcaaagcagaaataaactagcttgaggtttttaaataacagtttacataacaataaacattcagttggctcatgattctgttgtgttcagctgacttgtgctgggatagacaggtctctgccaggcttctcatgtatttatggtcagctgaagatttactgaatggggctgggcatgctcacatggagggctggaaggctattggctgatcgaggctggccttagctgggacgtggcggtaactgggctgtattccagtcaagctagcccaggcatattgttttggtggtggaggaggttgaagagttcaagagttttaaattaaacaaaacaaaacaaaaacagtgcagagttataattatcctaatcaaagatgyctcaaaatttaagtgtatacacagatacgccagagggagattcattctaatgtctgccaaaaaacaagttaaagtgacagtacaagttaatgagttgatagtctctaatatattacaatttggtgtatg

SEQ ID NO: 900584 - DNA, 589 bp, Homo sapiens
cctctttacacttcccaaattaaagactgtttagtctcttttgttcatttttgtgcaaaataatgtatctctttccctgcctcaagttttattgctaaagagcccttctgtcggccgggcgcggtggctcacacctgtaatcccagcactttgggaggccgaggcaggcggatcacaaggtcaggagattgagaccatcctaaccaacatggtgaaaccctgtctctactaaaaatacaaaaaattagccaagcgtggtggatggtgcctgtagtcccagttactcgggaggctgaggcaggagaatggcgtgaatccgggaggcgaagcttgcagtgagccgagatcacgccactgcactccatcctgggtgacagagcaagactccatctcaaaaaagaacccttctgtcatctgcctgtgctgtgtacaaggccaaggggtggcagggagctttctgtctcacagacaatggacatatgtttaacaaaaaagagacagatgctcagtcagaaagctataaagataattatgtcctccaggycagggtcacagagctgctgcaagtgattcacaggtcacttgggaa

SEQ ID NO: 900585 - DNA, 585 bp, Homo sapiens
aaaaattgtcaataaaataccagcaaactgaattcagcagcacatcaaaaagcttatccaccacgatcaagttggcttcatccccaggattcaaggctggttcaacatacacaaatcaataaacatawttcatcacataaacagaactaaacacaaaaaccacatgattatctcaatagatgcagaaaaggccttcctatgttgaataaaattcaacaaccctttatgttaaaaactctcaataaactacatattgatgaaacttacctcaaaataataagaaccttttatgacaaacccacagccaacatcatactgaatgggcaaaagctggaagcatttcccctgaaaactggcacaagacaaggatgcccctctctcaccattcctagtcaacatggtattggaagttctggccagggcaatcaggcaagagaaagaaataaagtgtattcaaacaggaagagaggaagtcaaattgtttgcagatgacataaacctatgtctataaaaccccatagtctcagcccaaaagtttcttaagctgataagcaacttcagtagtctcaggatacaaaaatcaat

SEQ ID NO: 900586 - DNA, 667 bp, Homo sapiens
gttccacgagacacactcatgaaacartaactactgtctcagtagcagggcctgaagaggtaggtacaagaccaggtcatccagaacaggctagaagccactagctaattccagcagggtaaggggagataaccttggaggttgagcaactgtatttcagggtgattgtatttgtatattcataggccaggcaaaataggcctttgaaatttgagaacaaaagaaacaaaactgacccaagtgagggtgttttaaaagcaactatgtcttctgcgggattggatggcagacctctccaagactgtgagcagcggagcagtccaagaatactcttctggttttttgaagccctatttcctatcaagagctctatttccagcagactaatgggcagaaatctattctgaggtctgagggctgcccagtgttagccaggagctgggccttgggcagagccctggagagaggcatcctccgaagtagccttgctgccacccctcctgacacagcacatcagctgttgcatgggcaggggtgagtcctggccaaggccttgcttgtgcccaccccacccccacccaaaggttgggctggagaacttcttggggagctgcctcctccatcacattgaggcagtgaaccagggatctttggaggggagagattc

SEQ ID NO: 900587 - DNA, 707 bp, Homo sapiens
ttagcgtagtatcaaatagatgctgtcaggaccccaaatccctactccctgaaaataaacaccacttgcttgtctggccagctaaygccatatttttgtagttcacaagtttcatttaactataatttttaagtattatatttgctaagtttttacaacatgaattgtttttagagaaaaaaagagtgagataagtagccatgtattggctgtgttttttctagtacgtgttttgcttttaatagtaatttccagatctaattccctcttggcctatttccattcagagtgcccagctagaaaatactaagaaaagatcacaaatcaaatgtcttatgataatatcctcagaaattttaaacagctctaagagatttggcctcagacccaaacatttacatgatcgctcaattttaatgaggtcaaacaagctgcttggcatctggccagtgctcaaggtcttggcctgagtggggagggccatcttgttcttacagagaacgttaagacatagtgacaggtgataatgtaatgcatgaggatgctgcccttggccatttcatcttttcacccctctggattcccagaggcaacgttttggccagatgtaaacacttttaccagtagctaaggatctgaagaagaaccacattttgcagagaagcattttaaaggatttaaataaccccctaacatttgtcacaatg

SEQ ID NO: 900588 - DNA, 562 bp, Homo sapiens
tggttattttgctcattagttgatgcagtttcttcctagcatcaatggtctttacaatttggcatgtttttgcagcggctggtaccggttgttcctttccatgtttagtgcttccttcaggagctcttttagggcaggcctggtggtgacaaaatctctcagcatttacttgtctgtaaaggattttatttctccttcacttatgaagcttagtttggctggatatgaaattctgggttgaaaattcttttctttaagaatgttgaatattggcccccactctcttctggcttgtagagtttctgccaagagatcagctgttagtctgatgggcttccttttttgggtaacctgacttttctctctggctgccctttacattttttccttcatttcaactttggtgaatctgacaattatgtgtcctggagttgctcttcttgaggagtatctttgtggcattstctgtatttcctgaatttgaatgttggcctgccttgctaggttgagggagttctcctggataatatcctgcagagtgttttccaacttggtcccattc

SEQ ID NO: 900589 - DNA, 643 bp, Homo sapiens
tttttttttgtatttttagtagagacggggtttcaccttgttagccaggatggtcgttccacccaaaacctattaaaaaatgtrtctacggctagataatgcaaagaggctctaataacaaaccaatgaaatatattaaggattcaagagaatttatggtgttacttctcccatggatatattaataggaatagggtgtctaatttggaattttaggcaaaagatgcttttggactgggatagaggaagattcgctacaacccttttatttcatgtaggtggctacctactcagcccaccaattagattgtccctgctttgggtgtaatattataagtcaggccaggttctgtttggctgttctccttctaatcaggctccaactcaaatctctaccactgtagatttggtgctctcataactggcttttaaacaattgtgtctaatttctttttcatttttacgtatactcttgatatatatctttggcaagtcagtgaaaaatgtttctttgtaaatttggccaaagtctctgcctcaactaaagggaattgttagtctaaaaagacttcttatttttttgatggtgatcccttttggacagagcaggtaactcacctggaagaatttcagaaagatcaat

SEQ ID NO: 900590 - DNA, 613 bp, Homo sapiens
gaaagtggcagattatgttctggagatggtcagtgtgtggcattccttgtatatattaatcttctgagttttttaacattagaaaatctaggaattatgttaataaattatatagtaagccttgagtaattaatattacatattaaaacataattccatgtcttaaaattaaacattggacctctaataaattaatcttgcctagttaagtctaactttttttttcttgagttgagaacagaatagagtccaacagactctagttaggttgaatattgaatacatttcaatatgtttgaggttgaatatgtttccgtatatgacccttaatctcttgtatttctgaagaattccaagtaaaactgattgaggataaaagactgcaaaactactaattttctcaagagaaaataggagaatattagaatacacacaaagcaattcttttttgtaacatggcattgagccagcaatcagatataaaatcatcattgattcttatatattattcatggtattgtgagaakgtgatatacatgcaatgcagcaatgattgctatattctgaagtgttttaaacccactctaaagaaaatagaaaagtgtctcacaaa

SEQ ID NO: 900591 - DNA, 669 bp, Homo sapiens
atggtgcggaaagaaattggcaaactggaggagggccctcatgaaagcctgactgtgctggcaccctgatcttgggcttccagcctccagaactgtgggaaacaaatctatgttgtttatagtccactcagtctatgtctatggtggtttgttacaacacccccaactgattaagacaggagccacgaaggaaaccttaaaaggaggctcaggtggaggatactggtggcatctgtgggcaagcagactctaatagtgatttggtcagacagccagttgcaggcaatgctggaccaggagaacatgaggagccaaggagaatggaccggctcccgataaaaagaaagagaaggagctggcatactcatgatcactttctctttccaaaccctccgattagagaagccacaatctacctgctctggagtgaagagtgtgaggatatgaaaagggaaataaagtcaggaatgttattctagtggaacttcctccctcatcatagaaacaccagactagagaaagaaatattccctaacattgcgcaaatgcacagacatgaaagagtgtggcatgacatgggatagaagccttaaataagttgatatggctgaaataaagtacatataaacaratgtagctgacgatgaggctgttagaggtcatctcata

SEQ ID NO: 900592 - DNA, 630 bp, Homo sapiens
tgattttaaagacagactgcttgggttcaagtccatattattttcattattagttgtgtaattgtgagcaagttctgatcctcagttttcttacttatcaaataggaataataatagtagtagtaataattaaaaatagtaaaaaataatagtagtggtaaaatacttataagaataacagtagtagtaacaataatacaaaaccccatagtgcagttatgaaaattaaatatattaattaatatgaagtacttagaacaatgcctactgccagtaagttatgttagctaagagtattgctaagatgtaatcaaagacagtaacttaatcaaatcacaaaatagggccactgtatctatctcaaaagaaaaagtcaatgatgttcttaagaactgatatatttgattggagatcattcagtaataattgattgaaatattaactagaatcatcaacataaatggtggcattctacatagggtgccactagttatatatatgactatactggagaagatgatgaaatttttctttgaaaacaaccaaaacgcttaagtatcactgaccaggaattgaaacattwcttttgttataagcctttggaatttagttgagtagtgatcattttat

SEQ ID NO: 900593 - DNA, 610 bp, Homo sapiens
aaaatgagagaagattcttatatgtcttggcaaaaaagtgaataatattgagaaaatacaatgtctaaatgtctagacatygttaattgataggaaaatgacagtaactgcaatagaacaatggtcaaaaggtctgaataagaaactgcaaacttaggaagtatggtcagctctctgtacctatgggttctacatcagtgattcaaccaactgaggatggaaaatattcacatataaaaatgaatggttgtgtctgtactaaacatgcacagactttttttcttgtcattattccctaaacaatacagtataatcaatatttacatagagtttacattgtattaggtattatatgtaatctagggataatttaaatcacatgggagcatatgcatatgttatatgcaaatactacaccattttataacagggacttgagcatctgcatattttggtatttgcggaaggttctggatccaatctcccatggacaccaaaagactaactgtatatgaatacataaagagacactcaaacttactagaaatcagagacatgcaaatcaaagcaaagcaacatcacttgacacctattggattaacaaaaattg

SEQ ID NO: 900594 - DNA, 655 bp, Homo sapiens
gcggggccctcattgagaacctctgctagggcagtgcagaagggaaatgtggggttggagcacccacacagagtccctactagggtactgcctagcagagctgtgagaagagggccatcgtcctccagaccccagaatggtagatccaccaacagtttgcaccacgtgcttggaaaagctgcagacactctgtgccagcacttgaaagcagataggagggaggctgtaccctgcaaagctacaggggcaaagctgcccaagaccatgggaaccccaccttttacatcagcgtaacctgaatgtgaaacctggagtcaaagggacatcattttggagctttaaaatttgactgccctgctggattttggacttgcatgggcccagtaacccctttgttttggccaatttctcccatttggaatggctgtatttacctaatacttgtacccccattgtatctagaaagtaactagcttccttttgactttacaggctcataggtgaaagggatttgccttgtctcagatgagactttgagctgtggacttttggcttaacactgaaataagactttggggtrctgttgggaaggcatgattggttttgaaatgtgaggacatgaggtttggagggaccaggggcagaatgatatggt

SEQ ID NO: 900595 - DNA, 608 bp, Homo sapiens
gtgagagatagaccattcaagtgattgtattagaggagctatgtagttatcgtgaaaaaatatatacagttgattctcatgattagcagtagttctataaagatgctgcaaacatgaattagtgaatactgaatcattgctgctagtggaaatgctgggtccagtttcttcaagcctccggtcacaacattttttatcaactgattaatccataaccttgtttatgtgtttctgttaatgacaccttagttaatatatattgttgattcattaacaatgaactcatggccaacagcactggaactcatgcctgaacaaagctaatctaacacatatatttgctctgtaaggcagttgggaatactagataacacttcagcactataattaggcaccaacaaacagcacaaaaatgtgaaaatgtcatactaaataggctggaaggagcccacttgcttatagtactagagaaggcagtgcatcacttgttcgacctcagctaggaacactcacatgtcacacaactgaaatttgttgccactgcttgtatcaagaatgactgcaaaaatacyatgagtatagattctggggttataaatacattttag

SEQ ID NO: 900596 - DNA, 669 bp, Homo sapiens
agtataataaagaaagctagtggccattcatatctatgtgtctgcaaacattatatctggctagttatgtttatttttttgtgggccagtatcagtcagacttcaattggagaatcaggactaggagataatgataggtagagagagacaggtatatagttgataggtaggtagattcataatagacaagttgcaaggatttacgattgtgggaggtgatcacacaatctgtgagaaagctttctgcataactattgctggagcttgatgtccacagggcaggtagaacagaagggaagatgaacacaaagtggagccgaccaagcacaacctggacccacatcagtatggactgagacccgtgttagttcttgttgccactgaccagggtgatgtgagataatgcagaagccaaaaccctttgtcatggagctaactaagcatgcacacctggccagacattgcctcacaccagtgaagtgagttagcaagtatcattggtgagctcctacctttccctagttactcatttattatattaaatgttccctgttgaagttaccaatgtggtctctgtctcctaagtggacmctgactgatttatgccatccctttatttcaaggttagataaaaattaaaaaattctttctgcagataaatagataaat

SEQ ID NO: 900597 - DNA, 573 bp, Homo sapiens
acttgtgcctgtgctggtgggcacacaaagtgaagtcagcggcaacaacctttccggcagcttcttaactttaatcctggggagacatactccacggaaatacaccscagaatcccaacagccgcatactctcccggccccagagagccttaagaatacaatattactctggcagcaacacccctgtagttgtaaagtgctgtgcgaggggaaggcataagcgccaccatatacctgctcgtgttacaggctctggaatcaaagtattctcacatgacacattactaccaataacagattccggctccgtttaaaaaaaaaaaaaaaagttggggggtggctacatatttgtcctgcttttgtctaaaaaccagaacccaagtactaactacttttcattcttttcaacctttcatgaaagcaattcaaccaactgcggctccacccaaagagcttctatacttacttttcttacagtttttgagtgacgcactacaaaacgatgaaaaaaaaaagaagaagaagaaaaggaggaggcagccctctcctacagggcgtcttccgccctgtaaa

SEQ ID NO: 900598 - DNA, 636 bp, Homo sapiens
aactgcaacctctgcctcccgggtacaaacaattctcctgcctcagcctcctgagtagctgagactacaagcacatgttaccacacctggctaatttttgtatttttagtagagatggggtttcgctgtgtttcccaggctggtcttgaactcctggcctcaagtgatcctcccaccttggcctcacaaaatgctgggattacaggcatgaaccaccatgcctggccttcatcttcatcttaatttacccagacatcaccatttgcatttgggcatttttgtcagaacctttctgtgatccacatgctattcatagatgaaacctctcatccatcaggctgaaaaatgtctttatcctaaaaacagacaggaacgtgatactttgcctctccagctggattgttaatatttggactcaaacctaactctatttttgttgttttcttttagttccaggggtacatatgcaagtttgttatataggtaatttgcatgtcgaggggattttgcgtatggattattttatcacccaggtaataagcatagtacctgattggtagcttttcartcctcaccctcttcccaccctgctccaggcccagtatctattgttcccttctgtgtgtctatatgtac

SEQ ID NO: 900599 - DNA, 599 bp, Homo sapiens
tggctatgtgggctcttatttgtttccatatgaattttaaaatagtgtttactactcctatgaagaatctcagtggtaattttataggaatagcattaaatctattaattgctttggacagtatagccatttttacgatatagattcttcctatccatgagcatgagatgtttttccatttgtttgtgtcatctctgatttgagcagtgttttttagttctcattgtagagatctatcacctccatagttacctgtattcgtaggttttttattctttttgtggcaattgtgaatgggatagcatttctgatttggctctcggcttgactgttgtttgtgtataggaatggtactaattttggcacattggttgtgtatccttagactttgctgaatttgtttatcagcttcaggagcttttggaccaagactatggggttttctagatataggatcatgtcgtctccaaacagagatagttygatttcctctcttcctatttggatgtactttcttttttctcttgcttgatttgccctggccaggacatccaatactatacctaataggagtggtgagagagggcatccctgtctca

SEQ ID NO: 900600 - DNA, 650 bp, Homo sapiens
gtggccactttgttgtaattaggtgtatttatttctctactttataggtaatttgaaggtagcagtatttctctgaattctaggaatgctcaaggtatagtccatatatttttatttgttttacttattttgcagcttatgaattataagatacattaacagagttctcagggattttctttttcttgcttcatgaaaatttatttctgtttctccaaggctttagaagaatttggcttattatatattggtgttggatatatttgacgaatcaaggaataggacttatccatagttgggggaaatgttaatgtatcagcagcagtagattagacaaatgaatctacaagaccatagacatgctttgcaaggctctggaaccatggtattggccattgtgatagatgaaaatgaggatagatttttgaagcataaacattcattaagaaacaaaaaatggtcaaatataaacaagctttttaagtatattcattagaagttagagttcaggcttctcttatctgtaaatcacaaggaaatgatatttgcagtctagataatttgtgactatttgatactcatatcartcagtcaggactctgtggttccaagtaattaaacctgacttctgttagttgaagcagaaacta

SEQ ID NO: 900601 - DNA, 508 bp, Homo sapiens
ccttgaaaggaactttgcaagttctataagtttgtcattttaattctcctcagcttggaggtggcctcacgtgcttcagccagacttagatgtactatgtatgtatgtactagaatgcactataagaawgccaggaacaagtgtggtctataaagggagcctcagtgtaacgctgagacaggctcattggcagctccagtaggaaattataagctgaatattttatatatatatatatacacacacacacaatatgcatacacacaatcgcacacacatacatacacacacacacattttaaaagctttctgcaatagccatccaaaatctaaattgaaataaaactgaagctaggacttaacagtgctctcctcctcccctgatacatctctaatttttcttctgggggtttgggttacccagaccctccatttcagataagtctctctgtatttccacaaagtactgaaagagagcttagggactgagtctagaagcctcatttta

SEQ ID NO: 900602 - DNA, 606 bp, Homo sapiens
atggagaaatatattatgttcacaaayatgaatacttgatggataaccacatcaattctcttcaaattatgccaaaaaaaatcaatattctacaaggaaattttacagaagttgacaagttcattctaaagttgacatagaagaataaatagccaagacaatttgaaagaaaaagacaaaataattaaaagagtgtgatactagcccaggggtagacaaacagatcaatggacaggacagataattcagaaacagtcaagtacatacacagaaatttggttctagacaatggtggcactacaaatcagggggaaatcagaccactcaataaaaggagctaggattagctatgcataaggcaaattagatcactaccatataacaaaataaaattgatggaagaaaaaagaaccctaaatgtgaaaagcaaaactgcaggacattccacagaaattataacattgtgattcctttgactttcttacttgatacaatttctaggctttaaactgtcctacttgttctcctgaagggcactctgtacccagaactgaattctccttgtaattcggaagctgcagagttagagtgtgagcatcactttcc

SEQ ID NO: 900603 - DNA, 594 bp, Homo sapiens
agtctggctagtagtctatctatgttgttgatcttttcagaaaaccagctcytggattcattgatttttttgaggggtttttcatgtctctatctccctcagttctgctctgatcttagttatttcttgtcttctgctagcttttgaatttgtttgctcttgcttctctagttcttttaattgtgatggtagggtgttgattttagatctttcctgctttctcttgtgggcatctagtcctataaatttccctctacaccctgctttaaatgtgtcacagagattctggtacgttgtgtctttgttctcattcgtttcaaagaacatctttatttctgccttcatttcattatgtacccagtagtcattcaggagcaggttgttcagtttccatgtaattgtgcgattttgcatgagtttcttaatcctgagttctaatttgattgcactgtagtctgagagactgtttgttatgatttctgttcttttgcatttgctgaggagtgttttacttccaattatgtggtcaattttagaataagtgtgatgtggtgctgagcagaatgtatattctgttgatttggggtggagagt

SEQ ID NO: 900604 - DNA, 623 bp, Homo sapiens
tatgagtctgtttttgtaccagtaccatgctgttttggttattgtagtcttgtagtatagtttgaagtcrggtagcatgatgcctccagctttgttctttttacttagaatttctttggctatttgggcttttttttggttccatatgaattttgaaatagtttcttctaattctctgaagaattagaagaacttctagagttcattgtttgagtttggacccagagagcccctaaacatgtaaatggtagtttaatgggaatagcattgaatctgtaaattactttgggcagtatggatgttttcatgatattgattcttcctatccatgagcatggaattttttccatttgtttatgtcatatctgatttccttaagcagtggtttgtagttctccttgaagaggtcctttacttctcttagctgtattcctaggtattttattctattttgtagcaattgtgattgggagttcaatcatgatttggctctctgcttgcctgttgttggtttctaggaatgctagtgaattttgcacattgattttgtatcctgagactttgttgaagttgcttatcagcttaagaaggttttgggctgagatgatgggtttttctagata

SEQ ID NO: 900605 - DNA, 619 bp, Homo sapiens
tgttttttcctctcacaagaggactcccgtgtttggagaaccttagagtagttgctaccttcccacttctagtgcaatctgaatataaaatgataccatgaggcccaaggaagggcagaaggactgagaatgtgggtgtctctgcacaatagatgtatgaaaacaagtgtctccacagacttacctgcattttcacttagctcttggtcagtttcttcaaatctagctttctctctggatatcttttacacagaatgaaatatgaatgaacatatatgtgtgtatatacacacacatacgtattcttagaatatgaatatatatgtgggtgtgtatatacatgtgatatacatacatccatcttctggaattcttctggtttactcaaatactcataaccttcattaactaaaatccctcctctgagaaattacttctcagaaatgtgacgtatctgttcctttctcagacttccatttaacttttaagcattcattttcactaattatttaacayccagattgtgccatctttaatatcagggattatgtatattacttctatatttatataattacaatttgcattcaagtatttttgatgctttgattatatctca

SEQ ID NO: 900606 - DNA, 724 bp, Homo sapiens
tgctaagaaatttcgaaataattttaaactcaaggaagtcaatacattgtgtggattttaaaatatagctcaagtataactggaaactctgaattttcattttaattcttgccataagattcctactagtttttttatattattggctagaaagaaatgttgggttttatttttttttatttttcttttttcttttttttttagagacggggtctcactatgttgcccagggtggtcttgaactcctgggctcaagtgatcctcctgcctcagcctcccaaagttctgggattacaggcatgagccaccatgcccagcaaatgttgggttttatatggcaaaactgaataaagagaaagtcacaaaaaatgaagtcaaaagcagagaggatgggctcagccaaattttcagtgttattgaaaagccaccgggtcacatgaggctaatgtgaaatatagcagacacaggcttcggagttggaaagacctgggtttgaatcacactctgccacttagtgtctggcttagtattgtcatatagtaaatggactaataatacttattttaggaagattaattgaggtgatgtctgcagagcgtttagtacagagccagaaccataataaacactcaaatttattattgttgctattattgttgttatcatcattatagtagagtgtataaaatcawgttgaaaatcctcatcatcaacggattaaaaa

SEQ ID NO: 900607 - DNA, 576 bp, Homo sapiens
tgcctattcagatattgcttctcatatatggcatcttgataggccaagracaatgtataatttctattgctttccaaacatccgcaaaatgtttttagttatctcaccaaaatgataggctactaagacaacatgataaaaacagcattaggtttggtgtccacagctttggtcagagatttcattttatgaattacttaacatctttgaacctcggtttccttatccttaaaacgagggtaaggatacctgctttacaagattgttgaaagattaaataggataatttatgcccatttcctgtaacagagaattatacaaatggaatttattgcatgcccttctcttccatatccccaacaccacctcctcaccaattctgaagtactgtgtcggatataggagtctctacaatggatacttcctaagcaacttactatctgaaagttattaaagtcaacatgttggccaattaccttgccatgggagtattccaagcttaagtatgacatgaccacatctgcagtagcatcacagtagttttgtctgaacctataacccttccatggaggcctg

SEQ ID NO: 900608 - DNA, 596 bp, Homo sapiens
aattaataaaatgacttcattaaagattataaaaaagaaaaagtgttaggtgtcttaactcttctcataattcacttttattacttgactccccatctatsaaatcctgagtcctaacgtggaacctgatataaatgaattaaaacaaatttaacagtgggcaaagtaattattggaaagaccacgaactctgtcaacaaatgtccatgtacttagccagatggaagaggtcatttataaagacatgctttttaataaagagacaaattagaattatcaaatacactgccagcagagagaagtgaaaattgtgatttctctggtcaaaaggtaagctaaagagtttgaaaagcagacctacatatctcaagatcctcaagaattatcatcatattaaaacataaaatatattttatgtcaataacaatcattctaaatcatgagtaagaacttagactataggcttaggcttatgaaaatgagaaaattatattttattttaaaaaaccatttcattaaaaacaaaaacaaggaataccactccctctttaagacaatgagcaatgagctgcagaatccatttcttttttctctcc

SEQ ID NO: 900609 - DNA, 623 bp, Homo sapiens
ttgtagttcccataatccccatttgttgtgagagggaccccgtgggaggtaactgaatcgtggggacaggttttcctgtgctattctcatgatagtaagtcagtctyatgagatccgatggttctataaaggacagttcctttgcacatgctctcttgcctgccgtaatgtaagatgtgcatttgctcccccttccctttccaccatgattgtgaagcctccccagccttgtgggattgtgagtccattaaacctctttttctttataaattacccagtcttgggtatttcttcataccagtaagaaaatagactaatacaatcctcttctggctttccttgatttttcattattgttgatatacagattataaacctctttttctttataaattacccagtcttgggtatttcttcataatagtaagaaaatagactaataaaatcctcttctggctttccctgatcattcattattgttgattatacagattagggaagagcaaccttcttgttcagaggaataagcaaattcctatacggattctctttgtcattgtttctatttagtatctctctgctcttcaagctctgcccagaatgtttaatggtaacattaaaca

SEQ ID NO: 900610 - DNA, 595 bp, Homo sapiens
actatccttggtattggccaatgctgaagagactagagaaagaaaatggcagtgtcgcagttaaggtttgaaaatggcaatgggggctcagtggaaggaaggacaataactttcattttacagatagacaaatggaaggttgggggatgtaagtgacttcttcaagatgaatcagccaaccagcaacagaactgaactgctgatccttccttcctttcctatgatgcccgagtctcagttgttacccctactcgtgatgcctccaccactgccactcatcaagtgctaatattttaaagaagtcctcctgtgtttgtcaaaagggagaaggtatcattaacataaaattttgcccagagacaggagaagatacacagtctttctttaaaacaacctccttcagcagtagcttgcctattgaatttttgtaaatagaatcatagtgaaatttgccattaaaaattctgtgataattmtttttttaaaaagttaaaaaaaaaaaagagcatggaaattagtgtcaacactgttggtatagagtcttatcttcatcgcaccttggctgtgttcctgagggcaaatcattaaacctctt

SEQ ID NO: 900611 - DNA, 596 bp, Homo sapiens
agtttaccaaccaagtttctgccatcttcaggagactcaccttacttataaggacccatataaacttcaggtaaagggatggaaaaaggtattccatgcaaatggacaccaaaaagaagcaggagtagctattcttatatcagacaaaacaaactttaaagcaacagcagttaaaaagaacagggacattatataatgatgaaaggactagtccaacaggaaaatatcacaatcctaaatatatatgcacctaacaccagaactcccaaatttataaaacaattgctactagacctaaaaaaaggtatagatggcaacagaataatagtgggggacttcaatactccactgacagcactagacaggtcatcaaaacagaaagtcaacaaagaaacaatggacttaaactataccctacaacaaatatacttactagatatttacataacattctacccaacaactacmgaatatactttctattcatcagcacattgaacattctccaagatagaccatatgataggccacaaaacaagtctcagtaaatttaagaaaatcaaacctatatcaagtactctctcagaccacagtgg

SEQ ID NO: 900612 - DNA, 549 bp, Homo sapiens
gggcgaaaatttttgcaatgtatccatctgacaaaaggctaatatccagaatctacaaagaacttaaacaaatttataagaaaaaaacaaacaaccccatcaaaaagtggatgaargatatgaacagacacttttaaaacgaagacatttatgtgaccaaaaaacatatgaaaaaaagctcatcatcactggtcattagagaattgcaaatcaaaaccacagtgagacaccatctcatgccagttagaatggcgatcattaaaaagtcaggaaacaacagatgctgaagaggatgtgcagaaataggaacacttttacactgttgggagtgtaaattagttcaaccattgtggaagacagtgtggcaatttcttaaggatctagaactagaaataccatttgacccagcaatcccactactggcaatatacccaaaggattataaatcattctgctataaagacgcattcacacaaatgtttattgcagcactattcacaatagcaaagacttggaaccgttcaaatgtccatcaatgataggctggac

SEQ ID NO: 900613 - DNA, 549 bp, Homo sapiens
gggcgaaaatttttgcaatgtatccatctgacaaaaggctaatatccagaatctacaaagaacttaaacaaatttataagaaaaaaacaaacaaccccatcaaaaagtggatgaaagatatgaacagacacttttaaaacgaagacatttatgtgaccaaaaaacatatgaaaaaaagctcatcatcactggtcattagagaattgcaaatcaaaaccacagtgagacaccatctcatgccagttagaatggcgatcattaaaaagtcaggaaacaacagatgctgaagaggatgtgcagaaataggaacacttttacactgttgggagtgtaaattagttcaaccattgtggaagacagtgtggcaatttcttaaggatctagaactagaaataccatttgacccagcaatcccactactggcaatatacccaaaggattataaatcattctgctataaagacrcattcacacaaatgtttattgcagcactattcacaatagcaaagacttggaaccgttcaaatgtccatcaatgataggctggac

SEQ ID NO: 900614 - DNA, 549 bp, Homo sapiens
gggcgaaaatttttgcaatgtatccatctgacaaaaggctaatatccagaatctacaaagaacttaaacaaatttataagaaaaaaacaaacaaccccatcaaaaagtggatgaaagatatgaacagacacttttaaaacgaagacatttatgtgaccaaaaaacatatgaaaaaaagctcatcatcactggtcattagagaattgcaaatcaaaaccacagtgagacaccatctcatgccagttagaatggcgatcattaaaaagtcaggaaacaacagatgctgaagaggatgtgcagaaataggaacacttttacactgttgggagtgtaaattagttcaaccattgtggaagacagtgtggcaatttcttaaggatctagaactagaaataccatttgacccagcaatcccactactggcaatatacccaaaggattataaatcattctgctataaagacgcatkcacacaaatgtttattgcagcactattcacaatagcaaagacttggaaccgttcaaatgtccatcaatgataggctggac

SEQ ID NO: 900615 - DNA, 618 bp, Homo sapiens
tctgtctttaaagccattgtacttcatgtgcttcatgactgattagaattccctatttgcgggatattaagtgatttctgactttttattcctgctcacatattgttaggcttccttccagcaaaactttgtacatctcctttattacttacttgggaaggataaattcctagtgaacccaattttcttgattctcaattctgtgctctttcaactcagccatgctgcatgcctgttgaatgtggctgctaattaatgaagtctaagattatgagcagacagaccacaagaaagcggatcagttatatatgatcttgcttctattacaaagcaaaagaaaagactaggagaggcaatattgaaaagagctgtgtttctgtgattttcaagcaaatgaaaaactggggaaggttgtagttaattctggtcctttaaaacccatgtttctctggtcatggctgacaaccactttggctgtccttaccttgggatttgcagcctcttgaccccgaaccccatctaccaacaatgacagtccacaggaacttgcagtgttccgtaastgttccttaagacaaatctataaatcagcaagtaagtggcaaatttatcaggcac

SEQ ID NO: 900616 - DNA, 667 bp, Homo sapiens
ccataaatagtaggccatatcatagaaaaggaaagcccattttctggggaggaattcaagccagctgcagaaattcacataagtaaagaggagccagatggtcatagccaaaacaatggggaaaaggacatgaaggcatttcaaagaacttcctggcagcccctcctatcacaggccaagaagcctgggagggaagaatggctttgtgggccacacccagggccctgctgcactgcagagcgtggagacactgtatcccagctgcatctctccatccctgctgctccagttccagctgtggctcaaagaggtccaggtacatctcaggaagctgcttcagagggtgcaagccataagccctgggggtttctgtatggtcttaagcctgcgggtttgcagagtgcaagagttgaggcttggaagcctccacctagatttcaaaggatttatggaaaaacctggatgtccaggcagaagcctgctacaggaatggaaccatcatggagaacttctactagggcagtgcagaggataaatgtggggttggtgaccccacacagagtccccacttaggyactgcctaatggagctctgagaagaggcccatcatcctccagaccctagaatggtagctttactgacagcttgcaccctcagcctggaaaag

SEQ ID NO: 900617 - DNA, 667 bp, Homo sapiens
ccataaatagtaggccatatcatagaaaaggaaagcccattttctggggaggaattcaagccagctgcagaaattcacataagtaaagaggagccagatggtcatagccaaaacaatggggaaaaggacatgaaggcatttcaaagaacttcctggcagcccctcctatcacaggccaagaagcctgggagggaagaatggctttgtgggccacacccagggccctgctgcactgcagagcgtggagacactgtatcccagctgcatctctccatccctgctgctccagttccagctgtggctcaaagaggtccaggtacatctcaggaagctgcttcagagggtgcaagccataagccctgggggtttctgtatggtcttaagcctgcgggtttgcagagtgcaagagttgaggcttggaagcctccacctagatttcaaaggatttatggaaaaacctggatgtccaggcagaagcctgctacaggaatggaaccatcatggagaacttctactagggcagtgcagaggataaatgtggggttggtgaccccacacagagtccccacttaggcactgcctaatggagctstgagaagaggcccatcatcctccagaccctagaatggtagctttactgacagcttgcaccctcagcctggaaaag

SEQ ID NO: 900618 - DNA, 624 bp, Homo sapiens
atatatgtatataaaaatatattcctgtatatgaaaaaaatctaaagaaaatggttaaaccagtagcatgagtcatctgtagattaaataatgttaatctttccggcatttccatttttgtgttatgttcaaccctaatatatttgaacattagcaatgactatgagttgtaatagatgaatagagatttgtttagccacccttgaaaaagcatgatttgcaaacactttcatctcaacatgctcatgtagatgtagtaagtgacttatttccacggatagctaatatgccgaacctgtgttcataaagtatgtaatgaaaatccccctaaatgggacattgttaaaattgttctttagaatcttccatctttactttttatcttgtatccaggttagaattagtctttagagtaattctagatatagaataagttatagaatcagaagaaggaggatgaaaatatttgctggatttcaaatgacctgcagactacagttcatagaacatcattctgaaagtctgttcttgcacattttcaggaaattgcttgattcatcattttttagaagttaatgttaaggtaatttttcccyatgatgttggttcacacttttcaacaaa

SEQ ID NO: 900619 - DNA, 655 bp, Homo sapiens
ctccctaagacagtagccagcttcaaaaactggttggttgctgttctggcagtatttgctcccctttccgataaaaacataccagatccacaygtcagctacccagggagactgtccataccgcgcagcttgagctgaggtgccagggacccctggaatgggaaggaatgcagcccgcactggaaaagccctatgtccagacacccacaaagcctcccccaggcctctctgggactgtcaactcctggtggctcggctcaggggagctgcagagaatctgccctcagactgctgagaagacacagcctggaaaaggcggcagaggctcctttgtcattcacactaaatatcccttggattgaaatccagatctcagtttagataaaagggctactcttgcctgtaagtttctctgggcaattgttcatttatgaaatgaagaccttctttaaggcctctgtaaaagttttatcctttcttcatagcgtcttcaaactttattgctgaggaggcctggcaccattgcagcgctcccaaagcaatccactaaggtgcccggggtggccacagggcagggcgccccaggaggctctgggctgaacccgaaactttcacatgtaagacacttagactacgttttacatttctatcaaat

SEQ ID NO: 900620 - DNA, 656 bp, Homo sapiens
aaagatatataccgtatgtgaatgttttgttctaataatcagatgttagatatgtagaactcattttctttcagaaatagtattatctatgtatttttgaatgtctctatgttgttagtgttttacagayagcactcagtgttgctaacacagaaatgattcataggcgctgaataacaccaagtccttaagccaaagtacagacagtgggcccgaacagattaagttaactcactagaaatagaaaaatgtttctataaaagtacttttaatacttatttacaaatctaaagccaatatgatactgatgaaggctttctttattttattttatttattttattttttgagttggagtctcactctgttgcccggctggagtgcagtggtgtgatcttggctcactacaacctctgcctccagggttcaagcaattctcctgcctcagcctcccagatagctgggactgcaggtgtgcattaccacatgtggctaatttttgtatttttagtagagacagtgtttcaccatgttggccaggcaggtctcaaactcctgatctcaagttatccacctgccttgggtcccgaagtgctgagattataggtgtgagccactgtgacctgccaaagtctttcttctaaaatgaaaattta

SEQ ID NO: 900621 - DNA, 663 bp, Homo sapiens
atgctatgattagcatctttatacataatacatgttgtgaatataagattatttccttcagataaattaccasttaattattaagtcaagttttaaaaataattttatgataaaaacaaatagcagtataagtaactgtataattaagtgtttctagttgttttcataatggtaataaccatcttcacaccaaaaaaaaagaaaaatgtctgattctattataattgctaatattgagtttgtttcataaacaccactttgacaatttgataggaacatatctttgtgtattttcatgtttcaattgttaatgtggttgacaaaattatttttgatatcagctctatatatttttcttttttcctttttggttcctccatacttgctctagagagacaaccttccatttgggatgtttagaataatattaccttgacacagaatccaaaattactaccttgtgaatgtcttacggtgtcagatttttacttcaaatcaatgcaattaatgtttcaactaactgataaacacagtttcagatgttaatcctgttaattatatgcattgcctttaaattatctgtcatccattgaagtcagcatggaactttagcatccaaaactttcaacagagctgattggttgagtggcagactttcatttt

SEQ ID NO: 900622 - DNA, 606 bp, Homo sapiens
aggatccaggaatatgacagaaaggtggaataaacattaattttgtgcagtctttggtaatttttttgtttcttataactacaaagctttgctacaaatttatgcatttcactcaaatcagtgatctatgtttgtgtgatttcctaaacataattgtggtttataaaaaatgtaacatcataattgcattcctaactagaattagtatgtctgtttttgtatcttttttttatttttattatactttaagttttagggtacatgtgcacaatgtgcaggttagcaccttgtattacttaggttattttgctttggttaaaaatggctcaaggagtaaagcagtcccattcatattaagacactatacaaaactgtaaataaaatgtgtacagtgaattgtcttttaggcaactagatttgtccttttattcctccatctttatagaagggatttgtacttcttattgcaagacagtctctgtattatgtcttcttttgtggtgtcttccatgtgaacatttttaaaataagggaaatatggtggtaatagaaaattcggaaaaaccagkagtagcaagcttcagagtctcagggtagaccaaattt

SEQ ID NO: 900623 - DNA, 674 bp, Homo sapiens
gctggctccttcatctgcccctctacctttatgatttactgagatttaatattccaaaggcctgccgaatacttctattaaaatgtctcactgggattcaagcttcacctgtccaaactaatactatattttataaggaagtacacagaaacaccgaccctaaatttttttccacatatctcatatttattctggacaaaactaccagatacagaattgtatcctaaatacaattctgatgacgtcacttaaatgctcaaaagagggctctctatttctcaggaagcaatatctgaattttcttttcaatttcattgagagaactaacatgaccccaaactttctttccagtctcagtcatattcgtgcttcttacactgagcacttgctcagggcctcctttgctctagcatgctgcttctctctgtgtgactgacatcttacaagacccaggtctaaggccattaacctcctgatacattagatgcccacttttacctgtgatagttggtgaaataaaatgtcataaatataaaagaaaataaacgtatattaaatttccaaacatgtcagaagcagtttctacagggaataatgcayctcaacgcatccttaaattaacaggcaaagcataataggaaatattatataagagaaaatagttaaccgtaaat

SEQ ID NO: 900624 - DNA, 571 bp, Homo sapiens
tcccctgtggtggtttttgtttgtttgtttgtttgttttttctttcttgttctcctttccaccgtgcgaaaggagcccacttataagcaaatttacaacacaagctggaaatccaatctctcaggcaagaaaaagctggattttaaaataactcaggaaggtggaatttgagaaaggaatagctgcagttttgatcatgtgtcaaatctgcaacggctgagtgaactccgggagctgcctggtactgcctggctctacgggctctgagctgagcaagaggttggcaggtggtgatggagacagggcaggactgctgtaggcagctctgatgaggaggcaaggagaaggctggggatatggcacagacccagttttacctccagagatgcctgcatcattctgtcatgatccaataaaacatggacctggaagagccatggtttgtaaggcagcaagcagctacctgtgygagatctaggcctaaaacacacagcaagactgaatcctctagcagtgaccagctcaggctggagggtataagcagttgacaccacagagctgctctgataat

SEQ ID NO: 900625 - DNA, 632 bp, Homo sapiens
ggctctatcagtccttgcatatagccatgtattcctaagtaacaccktccttttcatcctaagtaatttgcctctgacatctccttcagcaacctgcattgggcacagcctgtgtgcatgactcagctctacaggatgtatcaaagagacgtatacctaggaacatgcagaggcctggcctccttgaacctttgccaggaggccagagctgtaaggaatgggcctctcctgtacattgttcagactctttaaggtgaaattgcagatgctcagttgacatcaagagtttgagtttataccaagtgaggccacaacaggcacaggcaggacctcctagaaacaggaaatcaggaggacagggccatgccagggctgtgatggagttggggcctgagaggctttcagaatccagcccaactctagtgcccaggatatcttggagccctcttagaagcagaagctcacagtctcctattctttccattaaagacaagctgcctcctactattcttacctgacttaaaaatttctgtttacttgtagcttctgctcatttgggcaaatctaagtctaaaagcctttgcagattgctacttttggcatgatttctgtggttccactatcaactggtt

SEQ ID NO: 900626 - DNA, 621 bp, Homo sapiens
cagcctcctaaagcactgggattagaggctgaacmactatgcccagcctgctaagcaatcttaattaaacacattacttaacttctctaatattcactattcaaatccaaaagtaagtttaacaattctgatttgcatattgggaataaattaaatgatacacttgcagcttctaatgaaatgcaagatgaacagatgcatatagtaggcatttaatgaatacttactgaataaaatccactcattctccatttcattttctttctaaaaaatatagaaagaatgggtatagatgtatgtaggcataagtattatgaatacatatatatgcatatatatgtaattccctgttctaggaaatttcatctatggggtgggtgataaccagttgctgcaatttattttagcaaaatactttaaagtttgacttttgaaaactattttctagactagcaaattagccttttcatattaaattagcttcaaaaattgtattatgtattatgttacaagggtatcacctgtcctataacttcaggccagttgttcattttcttattataggatatttatatatatatataaagaaagggacagatgggagcagagcggaggcgttga

SEQ ID NO: 900627 - DNA, 629 bp, Homo sapiens
aatattccattcaataatgataatatacctagttaaaatacctaagaataagctcagtaagaaatccacaaacctatcgtaggacacactacaaatttttattcatagaaataaaagatatgaatatatgaatagatataagatgttcctagataagtttgaagttcacaacatgccgattctttacacattattaattaaatataattttttccctaagcctcaaagatctcttttactcttttggttttttggggtttgtttgtttgtttgttttgagacaaagtctcgctctgtcgcccaggctggagtgcagtggggtgatctcggctcgctgccacctccgcctcctgggttcaagcaattctctgcctcagcctcctgagtagctggaattacaggcacccgccaccatgcccggctaatttttttgtatttttagtagagacagggcttcaccatcttggccaggctggccttgaactcctgacctcatgatccatccgccttggcctcccaaagtgctggcattacaggcgtgagccaccaygcccaacctcttttggtttttaatgatattttatatgcttatgagcccaaaaatacactcatagccttgccctctctta

SEQ ID NO: 900628 - DNA, 445 bp, Homo sapiens
aatatgacaaaacaacattctttaacacccccaaaagattaagctaatcaagaaggcaccacagaaaggtgaagtccaacttaaataaataaaaaagcrtaatacaagatatgaaaggaaaattcttctgtgaaatagcataaatgaaaaacaatcacattaggtaatcatgactcactcagagaaatgcaaaatgcactggaaagtctcagcaatagaatcgaacaagaaagaacttcagagctcaaagacaaggcttttgaattaacataatccatgaaagacaaagaaaaaagattattaaaaaaaaaacgaagcatccaagaaatttgagactatgttaaacatccaaacctaagaataactggtgttcctgaagaagggaaatctaaaagtttggaaaacatatctgagggaataatggaggaaaacttccccggccttg

SEQ ID NO: 900629 - DNA, 536 bp, Homo sapiens
caaggcctcaaatagagatttaggartgaaagctctaggactaggaatataaatacaccaagaacatgactagccagggaggcctgagtccttgactctaacttccttcagagactacagtgcactggctgtgcaccaagtctggtgtagggaggatacaccaggtaccatacaggtaaagcctttgtaattgcctatggtcaggcctgaaaaatcacacataggtttttaaccaggagtcaaactcctcaggaacctcatatccttttgcacagaacacagaacatcccgatatgattagccaacttcctttgctgtattatcacattgtgcatattcttcctcccattaaaacagagctggtccttctacctgttctgtggtctttggtcccatttactttccttaacttatgacctattaaaagaaattctaaacattgacatttaaacactgttaagtatcttttatcttaaaaacaacaacaacagcacagcagtcatctatccactattggctctgctaatgcaatttac

SEQ ID NO: 900630 - DNA, 610 bp, Homo sapiens
ggattaaatcaatcaccaatccttgcttggtgttctgtagctttcttgtgcttgaatattgatatctttctctagatttgggaagttctctgttattttttcttcaaataaactttctaccctcatctttctatctccttttaaaggccaagaacttagatttgctcttttgaaattattttctagatcttgtaggtgtgcctcattcttgattattcttttttcttttgtctcctctgtgtattttcaaatagcctgttttcaagcttactaattctttcttctgcttgatcagttctactgttgagattctgccatgttcttcagtaagttaattgaattttttatctccagaatttctgcttgattcttttaaattatttcagttgttttgttaaacttacctgatagcattctgagttccttctctgtgttgtcttgaattttgttgagcttctccaaaacagctattttgaattctctgaaagctcacatctctgttactctgggattggtcactggtgccttatttattattgttaatttagtgagttcatgttttcctggatggttttgatgastgtggatgttcaccaatgtctgggcattg

SEQ ID NO: 900631 - DNA, 627 bp, Homo sapiens
gtttcatcattcaataataatgtaatgttggaaaaaattgyttaattttctagtagcaaacaaagctaattccacttctcttatttactctgagaatcatgagataatatatgtaaagtgtctaggacagtgccagggaataaagagatatataactaaatgtgaaagaggaaactgtcacagtatagagcagcctaaggacatatgacaactcagtgtaatgtagtatcctgggtgatatcctgtaacagatgaagaacattaggtaaaaacaaagaaaatttgaataaagtatgagatctggttaacaatcatgtatgaatattgattgttgcactcattgtgataaatatactgtactaatgtaaaataataataataagggaaactgtatatggagtatgtgggaactctgtgtactaacttcatgattttttgtacgtctaaatctatcctatttaaaaaatatatatattaaaaggaaggtaatcattttctccctaaactcagtgatcctgtcccctctgtcaaattttctctttacttactcctgccatcgggatgatgatgtttagctccaacagcattcaaataaagactagatgagaagacaagatgtgatacata

SEQ ID NO: 900632 - DNA, 592 bp, Homo sapiens
aactctctagcattcagtaagcattttaattaattttaacatttttattattttgtttttatgttaaatttcttcaytgacttttaaaattacatctgtctacctttgtgatttaagtaaatatacaacatttccttttcttggtatcttaaacttcctctttgactacttttaaaattctacttgatgcatttaactttttttaaatgtcatttataaattaacttggaaaaaagactgaagtaggcgtgatttataatttgaccttccttactaataaatgtgttcactttatattttcttcaacacttgggaaataaagcagtatctcctctaagttaaatttctaccagaactagaagatttatttgatgactaataaataaaatacattatattattatattatgtaacatatcataatttcttatttatattaattataaaatatttatacgtgagtatataatatagagccaggcacagtagtggatacctatagtcctggctacgtggggaggctgaggtgggaggcttgtttgagtccaggaatttgaggctatagtgtgcaatgattgcacctatgaagagc

SEQ ID NO: 900633 - DNA, 639 bp, Homo sapiens
cttatcaacatggcattttaatccatcaaagccaaaaagggggactctgtcttctcaagaagtgtttagttcctccttcaakaattttgatttaagttagaccctaccaggatcacttcccttttgattaacacaaaaccgatgatttgagaccttaattacaccttcaaaactccatcatctttccatgtactattggttatagtaagatcacttgtcctgcccacactcaaggggaagggattaaacagatgtgaataccaggaggaggcaattatgggcagtcaactttgagtgtgctcaccttaaaaagatggccattatattctttctgtccaactatataatcttatttggttacagtggtgaaaagtgtggcatctattagtttctagatttctctaatcatttctcaatattgtgaaattattttgttaaagattgtccaataaatatctttaaatttcttcatttatttctaagaatttctctcctatatgctacttactgttttgcataataaaattatgtgttttttttttaattttcaatgagttgtatttttttcaagaaataattttaaccttgtgtttatttatatattttacaagttcatctagacgatccagccacagtcaa

SEQ ID NO: 900634 - DNA, 631 bp, Homo sapiens
tattgtctgcagacgagggatgactgtaaatatacaatcatgaatttagggacaaaatcaggttttatcrgtttagtgatatcacatagtgtcatgggactgagtgagataacttgggaggaaagggagaacaggtgtggagccttagtgcatgccaagtcagatgtcatgaggaaaaggaaaacccagcaaagggacacattgcaagaagaacattaagaaagtgggagcctagaacagtgcttctcaaagtgtggtctgtggacttgtagcaggtatgggctgggagctctttagaaatgtaagcactcagaccacacccaaactcactaagtaagaaactctggaggtggatctcaggaatctgtgttttgttttttgagatggggtctctctctgtcacctgggctgaagtgcagtggcacgatcatagctcactgcagcctcaacttcccaggctcaagtgatcctcctacctcagcctcctaagtagctgggaccacaggcatgcgccaccatgcctggctaattttttatttgtagagacggggtctctctgtgttgctcaagcctctcctgggctcaagtgatcgtcctgcctcagcctcacaaatgctgggattacaggcgt

SEQ ID NO: 900635 - DNA, 631 bp, Homo sapiens
tattgtctgcagacgagggatgactgtaaatatacaatcatgaatttagggacaaaatcaggttttatcggtttagtgatatcacatagtgtcatgggactgagtgagataacttgggaggaaagggagaacaggtgtggagccttagtgcatgccaagtcagatgtcatgaggaaaaggaaaacccagcaaagggacacattgcaagaagaacattaagaaagtgggagcctagaacagtgcttctcaaagtgtggtctgtggacttgtagcaggtatgggctgggagctctttagaaatgtaagcactcagaccacacccaaactcactaagtaagaaactctggaggtggatctcaggaatctgtgttttgttttttgagatggggtctctctctgtcacctgggctgaagtgcagtggcacgatcatagctcactgcagcctcaacttcccaggctcaagtgatcctcctacctcagcctcctaagtagctgggaccacaggcatgcgccaccatgcctggctaattttttatttgtagagayggggtctctctgtgttgctcaagcctctcctgggctcaagtgatcgtcctgcctcagcctcacaaatgctgggattacaggcgt

SEQ ID NO: 900636 - DNA, 294 bp, Homo sapiens
acatggtgaaatcccgtctctactaaaaatacaraaattagctgggcatggtggtgcatggctgtagtaccagctactcaggaggctgaagcaggagaatcgcgttaatccgggaggtggaagttgcagtgagccaagatcgtgccactgcactccagcctggcaacagagtgagactaagtctaaaaaaaaaaagaaaaagaaaaaagaaaaaaaaagaaagattgtcctggtaaagtctcctgggtgttatgcagatagagtgaatcaaaccttagaaatataataacataa

SEQ ID NO: 900637 - DNA, 636 bp, Homo sapiens
aactgatcttcaacaaggattccaagaataaacaatggggaaaagacagtctcttcagtaaatggcattaggaaaacagaatatccatatgtatataaataaaattacaaccttatattccatacacaaaaagaactcaaaatgtaaaacctgaaactgttaaacttgtagaataaaacacagaggaaaagcttcatgatgtttctcttaagtccatttaatgttgcataaaagaatacctgaggctgggtaatttctaaagaaaataggtttatttggcacaagattctgatggttggaaagttcaaaagtgggcatctgcatttggtgagagcctcaggctgcttccagtcatggcagacagcaaaggggacctggcctgtgcagagatcacatgggaagacaggaggaaagagagagagagggaaaaggtgctgggctcttttaaacaaccagctcttatgggaactaataaagtgaggaaacactcacccctgagagagaactagtctattcatgaaaaatctgcccccatgacmcaaacatgtcccgttagaccccatcttcaaccttaaggatcaaattttaacatgaggtttgaggggacaaacatccaaaccacagcaacattggtct

SEQ ID NO: 900638 - DNA, 649 bp, Homo sapiens
acagacaaaccatacccaaaccatagcagtttgattattactgactcagtgaaaaaattttaagaccttttctcttgaaacaatttatcatgttaactgatattctaccattgtcttcttatttaattacttttaaaaactagtatagattattataaacacaaatacaattactggtagccaaggcacaattaatggccatgaatagtaactggttcctcttagaccctgctactcctcaggtctcatcagttggttacgcttaccaagtgctagttgaatttgtatacaagtctgtttatttcagttcttcttattattgtcataacattgttcaaatatgtaaaacaatgaaagatagttgaaaaatagagacttgttactctgaatgttatagtaaatgattttaaaagactttaaaaaggtcattactttaaaaaaaaagctgctaagatacacatagacgaggtaattgaaaaaaagtagatgaatttattatcaggaaagatttgccattcaaatttggcytcacaaatctccctacccattaaaggaaacagcactggaatacagagctagaattagggatgaagtttgtggaagaatgactacacagaattcaaagcagcagatccatgctcaaaggaaa

SEQ ID NO: 900639 - DNA, 699 bp, Homo sapiens
atttaaagagggtaccaaaataatggaaagatattccatgttcatggattaaaagaatcaacattgttaaaatgtcccattacccaaagtgttctacagattgactgcaatccctatcaaaatacacatgacagtctttacagaaatagaaaaaacaatcctctaatttatgtgaatataaagaaaagcaaccaacacagaatatcaaaagttattttaagcaaaaagaataaaactgaaagaattacattatctgacttcaaattacactactgagctatagtagccaaaacagcatagtactgacataaaaacagacacatagaccaatagcacaatataaagaacctagaaacaaatccacatacctacagtggactgatgtttgacaaaggtgccaaatacatacattggggaaaagacagtctcttcaataaatggtgctgggaaaactgggtgttcatatgcagaagaatgaaactagacccctatcccttgccatatacaaaagtaaaatcaaaatgtataaaagacataagtctaagacctcaaacagtgaaaatactaaaagaaaacttggaacaaactatctaggacattgstctggtcaattgaataatattccataaggacaggagaccaaagcaaacacgaacaaatgagatcacaccaagttaaaatgtttctgcacagctaagg

SEQ ID NO: 900640 - DNA, 615 bp, Homo sapiens
attgttccaaacacttttggaaaactaaaaatagcaaaccagcaattgacagagcacacttcagcctaagaatatcaacacagaataaccaacactcaaacatatatacttgcaaaacttctggactttaaacaaaagaaaaatgctttggtaatctaagccaaaaaaagaaaataccttaaaagggaaggaaaactggataatcatcagacactttgacagtaacattttatgctagaagaaattagagaaactatgagccaaagattttacacccacacacacacacatctgacaatcaagtattaaagacaaattgctatcaacatctaagaactcagggattatgactcccacagcagtttctaagaaatcgactaagaacaagctgcataaaaccaaagtaactagagaaatattagtgtacacttctaggtataaaggtggagactcaataaatgagactttattggaaaagtgaaactgcatgaaagttaaaagagaaatagtatcctttttagtggctctatgttcacacaatgtaaagtacaattattaaaatatggggaaagaatgggaagagcctagaraaactgacttctttcagtaatcata

SEQ ID NO: 900641 - DNA, 651 bp, Homo sapiens
ttttcatcagatgaaaaatccagaggatgttttcattgttgagctaaatgaatctgcaagtctatgctgccctctagggcggcctacagtgcctttaggcgagtagcaggagcaacacaaaacttaacagaggtttccctgcggagaaactccctttaagaaaaaaggagaaaccaaaaaggtgggccagcaccggaagcgggggcgcgggttcgggtagcggggacgcgcacgcaccttgcgcgtcttcgcccctcctgcggttgccaggcaaccggccccggaagttgcggcaggtgcgtccgcagcgggcgccgctagccagcggaagatggcggagggcggaggccctgagcccggcgagcaggagaggaggtcttccgggccgcggcctccgagcgcgcgggatttgcaggtgaggcgaggagccgggggagggagcgcggcggtggacgcgggctggtgacggcgcgggctggtgcgagttggaggccacctctggcctcggcggagcctttccccgaccccgtctggggatagaatccggcrcccggtctcccgatgtcgggtcttgacactgtggtggtcgtgaacacaagtgcccaagcctccagcgctggtgctttgtctcccttccaccccacgtatgat

SEQ ID NO: 900642 - DNA, 679 bp, Homo sapiens
aaaaatgttcttgaattatttcactaatgaatcatctcttctgtgttctctgttctctcttactagaactcctaccacaaaatctcctagattaattccctaattgttttacctttaatctccaatttcctgttccttttcatgtttataatattctcttatctctctgagaatatcagtgatttttctccctctccatacatagtctttgttttctgcaagttgctttttactgggtatttgtttcagtctcagcctttcaggctaatagctttgctcagatgtctggtaatcttggtcatacctgagtaagtttcatcattgctgagtgattgggaactctgagcatgtgggtggggcttattgattatggaagggtgaccaacaaccctggtttgcctgagactatcccagttttagcactgaaagtcccatgcaccaggaaaccctgtagtcctgggttgaggtcaccctagttgtgatcatctttatagggcaaactgcctggaagttttcattgggatccctatgtgagtgcctttaattcttttcccttgmgctgacagattccctagagaacgcaattccattttcctgcatggaagtcacagccttgcttgtgaacattcctgggctaggattaggaatggcagaattctcatcctgtaatcctacttta

SEQ ID NO: 900643 - DNA, 634 bp, Homo sapiens
ggtagcttcactttgcagtttgccctctcactccctgaagctagggccctagacttggtacctccccctaaataaatgtttgagattgaggagttaatgtatcaaggaaattgactttccagtgaaaargcagggatatctccttacaaatgaatttgcatttcctttcttctccctggtgcttaccccgccccatcattaactgtttagaaatatgtttaatttattttaagaaactaatacagttatatgccactaacaatgacttctctttttagacttgagaaatgcttgtgtcccacattttaaagaaaaatcagtgtcaattctcaattattctgggaataacgatttagtgcagcggttctctgccttctcaggcccaaagcctccctttatgtaacacatattttgagatacccctttaccattctaaaatgaaatttgcaggtaatataacctaactagccacataatcacacaaaaaatataaaatataaattgcaatataaaatagaaatttaaaaaatgtaactgaaaataatgtttcaataggtaaatgacaaaactgaagataaattctacaactttccaaaatatttcacagggagtggaactaatctggatgagaacc

SEQ ID NO: 900644 - DNA, 576 bp, Homo sapiens
ctgacttcacagctgtaaaggcacctgggaaagatgaagagaaacaggtagaagagtgacagtttaaaaaaaaaatccatccatttaagtaatctgaaatgaattaaaagagtcacatatgttaaaatgcaattcacatccaaaaatgttccctttgtggaaattgtaattatggcgttctgaccacaagacttttgtcttgtttagttttgttttgggagcacctcacaggattaggttaactaggaacacacactgggaaacaactgcactaagttttcaagaaaggattatgttctctgcatcattcaggagcagtactcatgcatttcaggaaggtttccatccctatcagacatacctggctgtatatcaaaagtccatgctcctctttcatacagggtagagttgctgctaaaaagtgggtgagcagctagggactctatttctgccagctcctcccccacctttgcagcttgatgcagtcttgcaattaamtcttagcaaaggaagggatgttcaccagcatgaggtccccgccacaatccttagtgttctttattcctctgctacgtg

SEQ ID NO: 900645 - DNA, 658 bp, Homo sapiens
tacataatatatacaattatgataccctttattatccataccaggagacttttaagagtgaaagtgggacaattaagttttatactgagacagacatgacccagattgttcagtaactgaaaccatatggtcctttaccacaccacagttcatcacaccatagttcacagtatagctcagatttaatctggcaatgagtagcaagtcagtaactaaatctttgttttcttctttggtattgcttttctaagtctcccttggagtgctgttgtcttgaggtctagcagtgatgtgctgtgagcacaaatgatatgatgtacttccaacattggtctagaaaagtcttctgcatgctatccttgagtttcccattttgtgacctgagtttctttcagggcccaatattaaaacagtgaatccactaggttgaattagcatgggttacgaatatatgatgagaggtacaatacctcctcagagctgtaggttaattagaaagaatcttctacttgtttgagagacattgttcatccrgaggtttgttaagcagctattattatccaataaaaacttattctcaatacaatccttcaaatagtcgctacccgtagattaaagtgaatatgagggcaaaattctatgacccattttgataata

SEQ ID NO: 900646 - DNA, 631 bp, Homo sapiens
caaaaatattcttcagaaatgaagaaataaagtcttttctagacaagtaaaaactgaagaaatccattaccactagagcaaccttataagaaaggcttatgggagtcttacatctggaagtaaaaggacaaaatttaacatcatgaaagcatatgaaagtatgaaattaactgacagagcagatacacaaggatgagaaaggaatcaaaccctatcactacagaaaaccaccaaagataaacaataagagaggaagaaaagaacaaatgatacacaaaacaaccagaaaacaacaaaataacaggagtgtgctctcacctatcaatagtaatcctgaatataaatggttggtttcaattctccaataaaagatatagagttgctgaatagatttttttaaaaaaagaaacaagacccagttatatgcatataagaaactcatttcacctataaagaacacacagactgaacatgaagggatgaacaagaatattctacacaargagaaaccaaaactaaatgggagtagctatatttatattagataaaatgaatttttaagtcaaaaactataaaaagagaaaaaaagtcattatataatgataaagagatcaattcagccagaaaatat

SEQ ID NO: 900647 - DNA, 625 bp, Homo sapiens
gggggaaacaaataaaataatcatacaattgaaccagcttattgccaggagaacttacagattgtgacgcgaaaagcatgaagcaaggtggaacctagaagtctctctaagtagaggaactgggcctggaaaycaaagagaccaagacgcctagagtttgcagggcagaatagcaaagaggtgaaagctgcaaggacaaagaattctggagatgttcaggcttactccttgagtgtgcagctgagtaccgatcaacccatgcatatgagtaaactactagagaaccaactgaaaggattataggaaataatcctaactctcacatagttttagaacagctcctcctgttcacaatggtcagagtagaaagccttataattaacaggatatcaggtagaaaacttagaaggcttttgcctcagtaggaggtaaaactagccctgaactaaatgctgctctggtcctacctgagaaagcagaaagacagacataaaagggtcaaactctttccaagtgatttaactgtatcccttaacaagctcaagagtacgaaaatatctggaccaaaaagggtaatattacaatgtctggcctctaatcaaaaattactagacatgtaaagaaa

SEQ ID NO: 900648 - DNA, 545 bp, Homo sapiens
tgtgacacccttgaagttgcaggccagatgccactaccacacatgggtcactgtcaacgggccacaaccccaatgatgggcacttaactcaataataccagatatcagacaactgtggcttcatctgtagagctctctggagtgcatcataaaggaagtaacctttttcttttttctttgcttttcttttttttttttattttgagacagagtctcactctgtcgcccaggctggagtgcagtggcgcaatctgggctcactgcaagctccgcctcccgggtttacgccattctcctgcctcagcctccggagcagctgggactaacaggcgcccgccaccacgcccggctaattttttgtatttttagtagggacggggtttcatcttgttagccaggatggtctcgatctcctgacctcgcgatccgtcagccttggccttccaaagtgctgggattacaggcgtgagccaccgcscccggcctctttttttttttttttttttttttttttgagatagagtctctgttagccaggctggggt

SEQ ID NO: 900649 - DNA, 712 bp, Homo sapiens
ataaatttgaaatattgtgagaattatgaaaatgtgatacaaagacctgaagtgagcwcatgctattggagaaatggtttcaatagagttggtagtcacagggttgccacaaatcttcaatctgtaaaacacacaatatatgtaaacctcggtaaagtaaagcacaataaaatgaagagtgcttttaaatatatgtatacacatttagatatatttgtttttagcaactgcctagaactattactaagcaggtcacacaagatacatacagtgttgtttgttactcattttcatcacagtttatgctttgatggttctatcttgaatgcatatccatattaagactaaagacgcaaacaggtaatcatgtttttcacaaatcaagaaattatcaccagttaaaaaactgggtcatcatcaaaaacaacactttaacatctttcctggatattttagaaagttcattaattaatttcagaaattaatttaaaggtaagatgtcatttattttgagaaaattaaacactaagcaaaatgaaaaaatgtctagaaacaaacattgttctgttcctgaaaatggcagaaaagataacattatccaaatgtaagggaaaaagtctgcaaaaagcaggttttttccatatctaaacttaaaagtctattctctaaatttgaaagtagaacacaaaacatatatcttatttttctctga

SEQ ID NO: 900650 - DNA, 590 bp, Homo sapiens
cccttgggttggttcttccctcttacgtgccttggtaaaaccccggaattctgggcatttaaagcactgggagatcagccccttatgtatgcccatcaatttaagcaaatttctctgcatgttcttctttggggactccttatgggaccatttctcatcataagcaataaactctgacactcctatgagaccttagtcacctaaggtgtcttttggccagaaggatctgtgtctctcatatttgtgacttatcatgtcctcataaacttcttctataaatttttctattctttctttttatgaaagaagaatctaaatgtggcaatttcagctgaccttcaaaatctagccagcttaacatcacaattttgcttaagccacagacatttacttcctgttaaagagcaactgctttctctttaaccaaatttcaaatgagagaaaagttcataaattgtattagtttgttctcacatcrctatgaagaaatacctgagactgtttaatttataaagaaaagaagtttaattgactcacagttctgcatggctgaggaggcctcaggaaacttaaaatcatggcggaagggg

SEQ ID NO: 900651 - DNA, 578 bp, Homo sapiens
tctggccatggttggtgaaactaaggggttcccatatggaggtgcctaaccgccaccaccckgttcgcttaagggaccagggttgtttttttttcttccccctttctttttcagtctttcagccactatttcctagtagctctttggaaattgagggcaattggctggggtcattccctggtattgcctgaaggccaaggagtgaatgggaataattgccctaactggaaggggaaaggactcttttttaaaaaaatattttctgcttgtggtccctggtccctacatgtgatccagtgcagagcaaactcacacgtttcaggtgacttaaaccatttttttatgctaaattctttccttcccctattcaactggctaagggcaaaagaagcctacccagcctccagttcctatcattaaagttcatggaatgggaaacatgggaaagcgtggccttaacaaattataaggatgctaaaagtcggagattacacccaggtaccgagagaaagctcatagtaggctctggagggaaagcatgcaaagtggcacctgtgcccacctaaggtcagagactt

SEQ ID NO: 900652 - DNA, 579 bp, Homo sapiens
aaaaaagcaaaacatggtgaaagttagatcacttatcacagttatacattctttataggtacccatattccaaatataagttatagatwtaatatttggattttttcagaggaattagtctataagagaattcagcttccctttaaagatcccaaggatcacttttggctatatttttagttaaaacatgtttttgtttcttaaaagaccatactggcatttgaaatgaaacacaatttggttaatcattggatatacttagctttatctgtattgaagttttgacatttggggcagcagtagaaaatcttgaaaaatcttttgggccatgtacgggggctcacgcttgtaatcccagcatgttgggaggcctaggcaggattgcttgagaccaggagttcgagaccagcctgggcaacatggcaaagccccatttctacaagaaacacaaaaagttagctgggtatggtgccacgtggctgtagtcccatctactcgagaggctgaggtgggacagtaacttgagccaaggaagtcgaagctgcaatgagccatgattgtgccactgcactccagcct

SEQ ID NO: 900653 - DNA, 579 bp, Homo sapiens
aaaaaagcaaaacatggtgaaagttagatcacttatcacagttatacattctttataggtacccatattccaaatataagttatagatttaatatttggattttttcagaggaattagtctataagagaattcagcttccctttaaagatcccaaggatcacttttggctatatttttagttaaaacatgtttttgtttcttaaaagaccatactggcatttgaaatgaaacacaatttggttaatcattggatatacttagctttatctgtattgaagttttgacatttggggcagcagtagaaaatcttgaaaaatcttttgggccatgtacgggggctcacgcttgtaatcccagcatgttgggaggcctaggcaggattgcttgagaccaggagttcgagaccagcctgggcaacatggcaaagccccatttctacaagaaacacaaaaarttagctgggtatggtgccacgtggctgtagtcccatctactcgagaggctgaggtgggacagtaacttgagccaaggaagtcgaagctgcaatgagccatgattgtgccactgcactccagcct

SEQ ID NO: 900654 - DNA, 600 bp, Homo sapiens
actcttagggtttcggttaccrtatacatcctgctgacatcaaaattaccatctccagcccacttttctcttgagtatcggatacttctgtctcagtcttgaatatcacatcctgcttagttgctatcagtacttaaatgtctcacaggaacttctaatgcagcctgttcaaaactatatttactaaaaacaaataaaaccttgtatttactgttatctttccgattcagtctgtctttacacacacatactttgccccttttctgtgttctcttagtgagtggcactaccatcctctcacatgtaagaattctagttgtcacctttaacattttaagtacagattttatttatttttattttttattgttttgaagagatggagtctccccatgttgtccaggcttgtcttgaactcctgggctcaagctgtactctttgccttggtttcccaaagtgctgggatcacaggcatgagccactgcacccggccagattttgttgattttttcttaatccattagtaattagatggtgatagtattaatctttcaaagtccatctcaaaatgtactttcttcttaaagcctttcttaattt

SEQ ID NO: 900655 - DNA, 587 bp, Homo sapiens
tgttgattttgtattctgcacctttactgaatttatcagttctaacagctttttggtgaagcttttagggttttctatatatgaatttgtgtcatctgctatacatagaacttttaaattactggaatagaatgtagaaggaggaatataaagaaatgtaattcaacaaaagagaaggagaaaaagaaaaacagaaaatatttcatttttatctgctattatataagatggaagcaataaagccaggcatgtattaacacagtaaatgagactccatctacaggctgttaacaagaaacatcccttaaaaaatgatgaacattggaaatatctggaaagaaagtatctcagataatcacgaagaaaaatgaagtgcaattaaatataaatttgaggtcaagagcggtggctcatgcctgtaatcccaccactttgggaggctgaggcaggcggatcacttgaggccaggagttcaaccccatctcaaaaaattagccggacatggtgggacgtgcctgtaatcccatctrctcaggaatccgaggcaggagaattgcttgaacccaggaggcggcggagattgcagt

SEQ ID NO: 900656 - DNA, 578 bp, Homo sapiens
ctacagactctttttcttggctttattattatgtttaaacatttttttagacaggatcttgttccgtgtattagtccattcttacactgctaataaagacatacctaagactaggcaatttttttttttttttttgagatggagtctcactctgtcacccaggctggagtgcagtggcgccatcttggctcactgcaagctccgcctcccatgttcacaccattctcctgcctcagcctcccgagtagctgggactataggtgcccatcaccatgcctggctaattttctgtatttttagtagagatggggtttcaccatgttagcccggatggtctcaatctcctcaccttgtgatctgcccacaccgggccaagctaggtaatttataaaggaaagaagtttaattgtctcactgttcagtatggctggggaagcctcaggaaacttataatcatggtgaaaggtgaagcaaacatgtctttcttcayatggcggcagcaaggaaaagtgctgagcaaaagagggaaaagctctgtataaaatcatcaggtcttgtgagaactcattcactatcat

SEQ ID NO: 900657 - DNA, 612 bp, Homo sapiens
ataaacacgggagtgtaggtatctttaaaagaaggtggtgatttcatctcttctgtgtatgtatccaaaatagggtcactgttgggttataaggtggttaggttttgaatttctttaggaacctccatactgttttccataatgggtgcaccaatcatcattcccaccaacaatgtacaagtgttttattttcttcacaccctcatcaatatttatctcttgtcttttttataatagccatcctaaagactgtaaggcattttatttctaatctcagatttcactgtagaaacagtgatgacacagtctccagcttccctgtctttgtctctggagaaaaaagccaccctgacttgcagggccagtcagtgttagcagctactaagcctggtaccagaagaaacctgagcgggctcccaggctcctcatctatggtacagccctgatttgtgatagtgggtcaggacagggcttactctcaccatcggcagsctggagcctgaagatttgcacttcatcactgttatcagcatagtagttggtgtcccatactgattcaacatgcaacaaaaacctccaggagacctaaggtgtttatttgattataccacc

SEQ ID NO: 900658 - DNA, 552 bp, Homo sapiens
ggaattattcaagatcatccagctagttgaagagcatcacttagaattctggtgacccctttttaggacaaagytgttcctaaataattctaaagatgtgccagtaacttgctaagaacattgaagtacaagtttttgtgtagatatatgttttcctttttcttgggtccacacttaagagcttcctggatcatgtggtaactctatgtttaaccacttgaattgcagactgttttccaaacctgctgcaccatttttcatttccaccagcagtgcaaagattctattttattgccaacctatgcaatgagaagaaaaacctctgagtgaggaggtatttagaagaactagaatatatccagatgtaagaaaataaatccaaggtagcttagagatgcccattaaatagtttttaaatttttcctagtcttcccaaacctggttacatgtttttactacctggtggatggcactcactcgcaatggtgtttagagttgggaatggactcaggaagtggaaaagttccttcagacaaggaagaactggttcaa

SEQ ID NO: 900659 - DNA, 552 bp, Homo sapiens
ggaattattcaagatcatccagctagttgaagagcatcacttagaattctggtgacccctttttaggacaaagctgttsctaaataattctaaagatgtgccagtaacttgctaagaacattgaagtacaagtttttgtgtagatatatgttttcctttttcttgggtccacacttaagagcttcctggatcatgtggtaactctatgtttaaccacttgaattgcagactgttttccaaacctgctgcaccatttttcatttccaccagcagtgcaaagattctattttattgccaacctatgcaatgagaagaaaaacctctgagtgaggaggtatttagaagaactagaatatatccagatgtaagaaaataaatccaaggtagcttagagatgcccattaaatagtttttaaatttttcctagtcttcccaaacctggttacatgtttttactacctggtggatggcactcactcgcaatggtgtttagagttgggaatggactcaggaagtggaaaagttccttcagacaaggaagaactggttcaa

SEQ ID NO: 900660 - DNA, 559 bp, Homo sapiens
tgatccttggaattttcttttctgcacatcaaaagcattgtctgtctcctgtttttccacctctattatccaaattgtgtttgaaaaaatgtattttttaaattttcattattcttgattaaaagaccagtatcttattgctaacatcttttaataccaagagaaactaaattcatttttttgactttgtttcctgtgtatttattcatttatttaaaaataactttggaatacaatgcagtcgttgagaattcagacttagtgacatttttgttaaagattttcgtcgtatttggtcacataaagttacatcaattttctatcaaacttttttaataacacagatattttattccaaagaagtgaaaaaatgcattgtaagaaatgatgtgtttcagacactgccaccaactttctccacaagatgttccaagttgragaacatcctctggaaaaaaacttaaattttgtgccgtggttggttaaaaccaaggtcaagaaaggctgaggaagagacaacattctgtaagattctttagtttttatgtgtgtgggctgt

SEQ ID NO: 900661 - DNA, 646 bp, Homo sapiens
atccacactcttcccagcatctcaaatatctccccagkttacttccctgtcaattccgtgttccatctatcatcatcctaggcttccgctgtattttatttcaatatttattaatttttcctatacttaagctttatataatttcaatcatacagtatttactctttgacgttttgcttattttgatcaaaatatttttgagtttcatctgtgttgtttctctggcagtaatttgtgcctttttattgaggcacaattttccatgaatatgccaaaatatattcatttttcaactaatgatttgtttttggtttaagaatattactggtaaaaaccttaagaacattcttgtgcttgtcttttgtgaacttatgcactcatttctcttgggaatattcctaagaatggaagtgttgagttataaagttagcatagattttgtcttagtaaacattgacaatagtttactgaaatactgaacatatttacgtgaaaccaaccacgtcataaaagtctcaattgctgtcaatctttttcagtactcagtactgtcaaacttttattatatctagggtggaggccaaagcaaccccatcttggatgctaattttccatgtctgacttctgattaacctgagttctggga

SEQ ID NO: 900662 - DNA, 658 bp, Homo sapiens
agctaagagaattcattaccactaggcctggtttattaaaaagaaatgcttatgggagttcttcaagcataaacaaaagggtgataattactataatgaatacatatgaaaatataaaactcactggttgaggtaaatacataggcaaatccagaatgctccaatactgtaatcatacatatttcttgtatgaaggctaaaagttaaaatggtaaaaaataactaaagctacaataagttgttaagaaatacacagtgtaaaaagatgtaaaatatgacatcaaagatataaattgtgggatggtagggtaaaagtctaaagtttttgtattcaacagaattattagcttaaaacagtagatgatagctataatgcaagatgttttatgtaagcatcatggtaaacacaaaacaaaacactgcagcatatatacaaacaattaaaaaaagaatcaaagtttagcactacagaaaactactgaaacccaaaggcagttaaaaagagaggaagaaaggaacaaaagagctataaaacaaccagaaaacaaataacaatatagcagtaataagttcttacctatcaataggcactttgaatgtamatggattaaattctctaaacctgggcaacatagcaaaaccctgtctctactaaaaa

SEQ ID NO: 900663 - DNA, 645 bp, Homo sapiens
ccaaatctgacctgctagtttttcatgacttcatgtattgtaccttttccatggaccaaatatttgtgtaccyccagatttacatggcgaaacctaatctccaagttgatggtattaggaggttgggcctttgggaggtaattaaattatggggtcagagccttcagaataggatctgtacctaataaaggaggcccagatagtttgtttactttctccgccttgtgaggctatggggagaagatggcttcctgtgaccaggaggaaggccctccccagatatataacctgttcatgccttgatcctggacttctcagactccacaacttgagaaataaatatatgttgtttataagccacccattgtatgatattctttgatagcagtctgcatggactaagagacctgctaaatggcaacttcagtatcctcccaagctctatttttcctcattcttcattagtgaccaaatactgcaagtctacgtcaggaacttttcctaaatttagcctgctatccattataactactactgcattaatgatcttccttatcatataatctcagcttaacctaccatctgccttctaatttgtttttctcactagatgttttacactccttatcatcaattatcttacag

SEQ ID NO: 900664 - DNA, 619 bp, Homo sapiens
atagtgacagtgtggttgcagaatgtaacatgataaaatccatgttttaagatcacaaatcagtcaggcctggacaatatggaattgagaktggcacatggaaaataaggcagtttgtgtcatgattcataaatgagatcatgaggccctaaaatggcaactagaccattagtcagatgacaatagtttttcagtgccataaggtgttggaaatacataagtggatattatggtatcctcatcctctccctaagttcacaacccagtagagaacacaggcattcataaaaaatgccttatgtggatgggagtggtggcacatgcctataatcccagaattttgggaggctaagacagcaggatcacttgaactcaagagtttgggattagcttgcacaatatagtgagatctcatctcaacaaaaaatatgattttttaattagttgggtgtggtagcgtgtgactgtggtcccagctttttggggagctgaggtggaagaatcacttgatgttgggaggttgaggctgtagtgagccaagatcacaccaccacactcctgactacacagcaaagtgagaccttgtctcaaaaataaaaacaaacaaaaaaacccatgt

SEQ ID NO: 900665 - DNA, 619 bp, Homo sapiens
atagtgacagtgtggttgcagaatgtaacatgataaaatccatgttttaagatcacaaatcagtcaggcctggacaatatggaattgagatwggcacatggaaaataaggcagtttgtgtcatgattcataaatgagatcatgaggccctaaaatggcaactagaccattagtcagatgacaatagtttttcagtgccataaggtgttggaaatacataagtggatattatggtatcctcatcctctccctaagttcacaacccagtagagaacacaggcattcataaaaaatgccttatgtggatgggagtggtggcacatgcctataatcccagaattttgggaggctaagacagcaggatcacttgaactcaagagtttgggattagcttgcacaatatagtgagatctcatctcaacaaaaaatatgattttttaattagttgggtgtggtagcgtgtgactgtggtcccagctttttggggagctgaggtggaagaatcacttgatgttgggaggttgaggctgtagtgagccaagatcacaccaccacactcctgactacacagcaaagtgagaccttgtctcaaaaataaaaacaaacaaaaaaacccatgt

SEQ ID NO: 900666 - DNA, 594 bp, Homo sapiens
atttaggttagtattctggagcaactctttaccagatttgtgaytgtgaattatttattaaactcaaagttcctcaattttctcaattcaaaataaaaataatagcacccgaattggtgaaagtaatactgacagttgtaacaaacatccccaaatgcaggatgtttcaaatcctatagaagagtatttctcagtaatataaattccaaacagaatgttactgagtgtcaggttagctctagtccaggtgctggcttcttccaccatgcgattcatcaactgaagctcatattgtttcccaggttgcactgggagttggtatccagccattagtcaagacaagataagggaaaattgcaaaataatgaaaagcctttaggggccagtgtggaagtgatacatactagttttagccacgttcctctcaccagaatttaggtccagctatgattgccacacttaagtaaaagaggggaatgggtgggaaatatgttccatctctgtgtttaggaaagataggagatgaatttcattaatagctagtcagtctctgccatggcagttatttcatagcattgtgaagattattaaact

SEQ ID NO: 900667 - DNA, 595 bp, Homo sapiens
tgttaccttcccagaaaggggtgtggaaaagtgattgaagcttgaaaatactgaagccattagtagaarttccatctcctgaaagtggtgattctgaaattatataaggcaaaattaacaattatgcttaattactttcactcatgtgttcattaaaatcaagtgctgtcagcccattcgttattacggagtcgtaaccttgatatggtcatttccttctattttgcctaaatttcctttccttgtgccaaaataagcagaacacatgctcacctataaaatgcaaaatcttgcgatatttttaaaagaaaagactacattgccttaatagatcctttcttgagatttcattttactttgtagataatgtatctttttgctactttgctataaattttaaacaaggaaaagtatcaaaatcagcacatggctagtgtgtatgggcccaggtcctataaataactatgccagctagtcctaatgtggaaaaatggaaaaccagatcctgttaacaaaaggaaaattccatttttcatacatggtactgctcttattcctcgcccagtgaaaaacaagcactttccttttctccgtg

SEQ ID NO: 900668 - DNA, 594 bp, Homo sapiens
tattagataaatgcaaaccaaaaccacaacgagatactatgttacaccgttcagaatggccattattacaaagtcaaaaaataacagatgctggcagggttgcagagaaaagggaaygcatatacattgctgatgggagtgtaaattagttcaactactgtggaaagcagcgtggtgattcctcaaagaactaaaaacagaactacaatttgacccagcaatcccattactggatacatacccaaaggaatataaatcattctgttataaagacacacacacatgtatgttcactgcagcactgttcacaatagcaaagacatggaatcaacctgaatgtccatcaatggtagattgaataaagaaaatatagtacatatacaccatggaatactatgcagccataaaaagaatgagatcatgtcctttgcaggaacatggatggaactggaggccattatccttagcagactaacacagaaacagaaaagcaaatattgtatgttctcacttataagtaggagctaaataatgataacacatggacagaatgagggagacatcagacactggagcctacttgagggagaaggg

SEQ ID NO: 900669 - DNA, 631 bp, Homo sapiens
tcataagaatttttaaccagagcctgtcttcttaacctctcacctttctccgaggagtgtgttgttttcccttttgaaaaaagttacaaaaattaaagttagttttctgtaacacgaaaaaatttgttttaaaaatcaaaatcatgtcaagtatcttctcagactacagtagaataaaactagaaatcaactccaaaaggaaacctcaaaactatgcaaatacatggaaattaagtaatccgctcttcaatgatatctgggttcacaatgaaattaagatggaaatttaaaaattctttgaattgaatgataataatgagacaatttatcaaatatttctggaatacaacaaaagcagtatgaggaggaaagtttatagcattaaatgtctacatcaaaaagtctaaaaaaaagcacaaattgacaatctaatgtcacacctcaaggacctggagaaacaagaacaaactaaacctaacactagaagaaggaaagacataacaaagatcagaacagaattaaatgaaattccaagaaaaaaaaatacagaagstcaataaaacaaaaagctggttctttgaaaaactaaataaaattgatagaccagcagctagattaatcaagaagagaa

SEQ ID NO: 900670 - DNA, 646 bp, Homo sapiens
ttctggtttctttcaggcatggttctcctaaacttttcataaatcaaaaacttttcaccattcttccacccaagcttgactataaattagatttttgttcttgcttcaattttagcagcattcatgttgctctgatagggacacctttcaaactgatagcttatccttggtgtcacaagctagatcctgtgcagagaggttataacaagttgttatgtttattttgatgcaaaaaatttaaatccgtgcatgggtgttttcataatatgcattttctgcaaatgttttgaagaccccctcatatttttggtgaaaaatctttgattattttttcttttgattaggattttgtaatatcactttctgtagaaagaaaagaaaatttcacttgcttgtgaaaatttctagcatggttgatggaaattaattttttcagtgttaataattgggatatataaactctgactcacacacagattactcctagtttgtaagcctgctgtaggtttgtgttttaagagcagatgaattcagaaaattctatttcacaatattcccatcaaaaatacatatgaaatatctaaatatatatgcatgagagttataattgtakgtgctgtttatagttagtatatttctaacaaga

SEQ ID NO: 900671 - DNA, 668 bp, Homo sapiens
  misc_feature 544: n = A,T,C or G
cagaaagatagcagaaaagtagcatttaccctctggcttattttagaagccatgggtagagttgaagctctcagaaatgacrctctgtgtccttccaacccaatcttctctcctaaacactccaccccatcctctaaccgaagtccaaagtactccaacaaatttaacctagagccatgtaccaagttagaattgattacatttaagctacttccaattaccagagccttgattctgtggcatagccagatgttgggccttgttgtggatggcctcccagagcatttaaatctggccaaggagccaaggtaaatgcactgggccagtggagctcctccaggcagggacagcaccatcatcctttttgtgacctccccccagtgcctccatcagtgcctggtagaatacctggcactgtattaaactgaaccctaaactttttatttccctggaagtgctctgcagagtcatggaaaaatgttgagacagaaagctcagcactcctgaggttgggctggaaggagtgtgggcagcagggccgttnagagtgcttaaagagtctctcctgatcataaagaagacgtgatctgcatgccaaatggaaaaagctagagtcctaagagcagggagagcaaacggctgggaaagcctcccccaagaggagaaaa

SEQ ID NO: 900672 - DNA, 604 bp, Homo sapiens
catgtgtgtactacttagtggtaagtctgggacccatcttctcatttctaaacatttttatgctaaatagaattagatttatgtatgtgcagtttggggatgagcccaaagttttataaacaaatttatggtgtcactttccctcttgctctccatggcagccccagtaatttttctcgtgcttctttttgattgtccagctagaaaccacctactttcataattctaccatgcctggggctaattagttggaggatcaaaagtgagaaagaaaggcaattgagtttggatacattatattgacgcaacagatccactacatggagatgaatgttttctacattcagagctttggctccaacaggcctccattgctgactgatgtcaatgtcactgatctcttcaccatgggatttcctggtgactgaagaatgagaaagcatagaaaaagaagagaaagaaagtcaaaggatttaccytcattctttttgagttttagaaattccctttcaagctcatacatgcagtactctctacctttctctctgcctgcactacaatgctcaattccaggtttcaggctttgttgaattttaggctggga

SEQ ID NO: 900673 - DNA, 491 bp, Homo sapiens
gatagacaactggagcttgttttctgtacacccagctataggctatcaacttaaaacttgagasgttttttttagtgaggcttgttaatgtctattatgtgaccagtcacaactttataattacatgaggaccatcatgtggttggatgttttcttacactgacaagcagataggcgctttttgaccatacattctccatgtttctccattgtcatctctctgctgtttctgctgataattaaaacctatgaaattcatgactaaatccgatatttaaataatttattgtatgttttacagacaagctgtatccttcacttattgaaggtacaattaaaaacacataaaactttaattcatataatgtttaattggtaggtttgaagccaattatggtaccagtgtactctttccccagttttaattcctatattagttttcattaaaaatgttaaattaaaagaaattgtcattaagtatcagagaaagc

SEQ ID NO: 900674 - DNA, 633 bp, Homo sapiens
taggctgtctacgacttcaacaaaaacattttatactaatcaattggctttacggaatttaccataaagaatatyggttattttactatgatttgtaaatcatgtgccacacatcctttatgtcagtaagattcataataagtttgtgctgtgtgtgtgtgtgtgtgtgtgtttgtgtatgtacatgttataggacatataagagagatgattgttatagaatatataagagagatggttgtaccacaaacccagtaaagacagagcagatattaccaaatgtaaaatttccaaagacagaaaattagacatgatgagtccagatttccatatttaaaatttgtaagtataggtgtaaatctgggtcacaggaaatctttacaaatgaaagaattaacagatgctgatcaaagcagatggaattgaccagtgttttacattttaaaaaaaattacctatagtcattgtttatacttttcttctcttcacaggaagtattaactcaagcaactaatattcgctaggttttatatatatatagggagaatatatacacatacacgcacatacacacatatagatcagatgctgtactaaacatactacatggaacattcatttagtgaccacaat

SEQ ID NO: 900675 - DNA, 678 bp, Homo sapiens
tttgcaacgcagcctgaagtagttgcagagtcttttcctgttttggatgcccctgaaagctggcagccctttggrtcactaataagtgggccagtgggacatattcaaataaaaaatgtgctgcttcaaaaatccaactaggcctagtaggtattgtgcctctttcttggttataagaggggcctcacgcaacatcttgttcttcaccctggaaaggatattttgacaggcttcccaagactggacctctaggaacattacggaggtagaaggtctctgaattttagtcacatttatttcacatcctctggtacataaatgtctcaccaataattcaaatgtgcttgctacttcttgctcactcatcaaatcagcctaatttcatcaatgagatggatgaaatcatcgtgatactttacagaagtgaagagcaatcaaggtctctctgagtaagattatgacaggaagccagagagttaatatacccctgagcaaggttaataaatgtgtattgctggccttgccagctgaaggcaaattgcctctggtggtccttatagacaggaataaagaaaagggcactggccaagtgaatggctgtataccatgtgacaggagatgtattaatttgctcaaaaaataaaccatatctagaatatcagctgcatgttgattcac

SEQ ID NO: 900676 - DNA, 572 bp, Homo sapiens
aaaaatcacaagcatccttatgcacaaataacagacagagagccaaatcatgggtgaactctcattcataattgctacaaagagaataaaatatgtaggaatccaacttacaargcatgtgaaggacctcttcagggagaactacaaatcattgctcaacaaaaataaaggaggacacaaacaaatggaacaatattccatgttcatagataggaagaatcaatatcatggaaatggccatactgatttatagatttatcaattcaatgccattctcatcaagctaccaatgactttcttcacaaaattggaaaaaactactttaaaattcatatggaaccaaaaaagagcctgcattgccaagacaatcctaagcaaaaagaacaaagctggaggcatcatgctacctgacttcaaactatactacaagtgtacagtaaccaaaacaatatggtaccagtaccaaaacagagatatagaccaatggaacagaacagaggcctcagaaataacaacacatctataaccatctgacctttgacaaacctgacaaaaacaagaaatggggaaat

SEQ ID NO: 900677 - DNA, 606 bp, Homo sapiens
aggaacagggtggcttgtagagtaataaacaaaatgactaagaagataaatgagagaaccatggatgctgccatctccttcctgaacaggccaagaataaatggaaagaagaaatcgggaaagaagtcatgwcttgggctctaagtgggggtgaaggaggcttgctctgcaacatcactttgcaggggccttccttgagttgcctcttgagtgaaggccatcaggacaactatctggttttcagtgacttcctttgaaaatcttgcctaagtgatttagtactctgttttgatatttggagatcctttgaaatctgtgatcttagagctttagccaaaccaagggtccactttgtcatgttgctactcttggacagtggtgctcagttggggcaggagatggtaattttgccctctagtgggcatttgacaatgtctagtgagttgccacaactgatggatggtgctgttggcatctagtgggtagaggccagagatgctgctaaatatcccgtaacgcctaggatagcccctagcaacaaagaattatccagccctaagtgtcaatagtagcaaagctgagaaaccctgatgtaaggcaagttaa

SEQ ID NO: 900678 - DNA, 606 bp, Homo sapiens
aggaacagggtggcttgtagagtaataaacaaaatgactaagaagataaatgagagaaccatggatgctgccatctccttcctgaacaggccaagaataaatggaaagaagaaatcgggaaagaagtcatgtcttgggctctaagtgggggtgaaggaggcttgctctgcaacatcactttgcaggggccttccttgagttgcctcttgagtgaaggccatcaggacaactatctggttttcagtgacttcctttgaaaatcttgcctaagtgatttagtactctgttttgatatttggagatcctttgaaatctgtgatcttagagctttagccaaaccaagggtccactttgtcatgttgctactcttggacagtggtgctcagttggggcaggagatggtaattttgccctctagtgggcatttgacaatgtctagtgagttgccacaactgatggatggtgctgttggcatctagtgggtagaggccagagatgctgctaaatatcccgtarcgcctaggatagcccctagcaacaaagaattatccagccctaagtgtcaatagtagcaaagctgagaaaccctgatgtaaggcaagttaa

SEQ ID NO: 900679 - DNA, 668 bp, Homo sapiens
ggtgaagacaggaaaatgtgggcaagtttggaacttcctagagacatgttgaatggctttgcccaaaatgctgatagtgatgtggacaataaggttcaagctgaggtggtctcagatggaggtgaggaacttgttgggaactggagcaaaggtgactcttgttatgttttagcaaagagactggtggcattttgcccctactgtaaagatgtgtggaactttgaacttgagagagatgatttagggtatttggtggaaaaaaattctaagcagcaaagcattcaagatgtgacttgggtgctgttaaaggcattcagttttataagggaaacagagcataaaactttggcaaatttgcagcctgactatgcaatagaaaagaaaaacccattttctggggagaaattcaagccagctgcagaaattagcatacgtagcaaggagcctaatgttaatccccaagaccatggggaaaatatctccaggccatgtcagagaccttcagcagctcctccaatcacaggcctggagtcccaggagtaaaaaatggtttcctgggctgggcccagggtcttcrtgctgtgtgcagtctaggcattttgtgccctgtgtcccagccactccagccatggccaaaacaggccaatgtacacctcaggctgtgattt

SEQ ID NO: 900680 - DNA, 620 bp, Homo sapiens
cgctgtgcgtggccatgaaaaaatatttttacatagctactatattcatagaatttgaccttcaawagatagaaaacgcagtgcaaaatgcccttcacacttccatttctggtttcccaggatccatctctggagatgaccactgttacaagtttctcgtgaatcctttcagagatgtttcatgcctatagaagcatcctgtgtgaacgtgtgcctgtgtgttggggggagggtgtgtgtgtataatacctccactttatcctatttacaaagggttgtataccatacaaactgttttgcatcttagattttgtggggagtggagatgagactttttataggaaaaattttaagaacacttatattatgaaaagattaattttattaacaaaagttctatgttggttaatttgtattttgtccttttttttaaaaaaagatttccttttgtagctgtttcaattggctttgctgtaaataaaaaggtatgattttttaaacgtatagttgattatatgccttgctctcattttctgagaaaaagtaaatgtgttttcataataaattcaggtttgtctgtatatttgattatataactgcattattttgaatataagcta

SEQ ID NO: 900681 - DNA, 645 bp, Homo sapiens
ccatgcctgtgtgttctcataattatgcaactccagcgaggagactgaaattgtttcctcttattgccaggtactgtcactttatattttgttatttcartctttttttaagccaagaaactagaaggctacttttaggaaagggctctgtgcatgaaaataaagaggatctaaggacgggcataaatgagatactcttccatgagaaagtctttagtgggctttgagatggcagtatttccatctcaacacccttggcagttatttctgggtttgtggacatgatccaaagatttgagatgaccagaaatactacctctagataggtggcattttattgtaaaatgttcttccttctttccttttttatattttaaataaatatgtattgatcacctatcatacactagtactattctaggcattgatatataataaacgacctcattgattttacatcataacaggagaaaatagcaaaaaaaaaaataaaaatttaaaaatttaaaaaagtaaaacagagaatgtcagatggtgaaaagtataatggagaaatataaatgaaggaagagggagaaggaatactggaagctgcattttaaatagtcagcaaggtgtcttagtttgggatcctctaacagaata

SEQ ID NO: 900682 - DNA, 691 bp, Homo sapiens
tagaactcaggattaagaaattctctcaaaactgcacaactacatggaaactgaacaatctacccctgaatgactactrggtaaataacaaaattaaggcagaaatcaagaagttctttgaaaccaatgagaacaaagacacaacgtaccagaatgtctgggatacagctaaagcagtgtttagagggaaatttaaagtactaaatgcccacatcagaaagtgcaaaagacctaaaatcgataccctaacatcataattaaaagaactagagaagtaagggcaaaagaattcaaaagctaggagaagacaagaaataactaagatcagagcagaactgaaggagatagagacacaaaaaaaccttcgaaaaatcaaggaattcaggagctggttttttgaaaaaattagcaaaacagatagactgctagccagactaataaagaagaaaagagagatgaatcaaatagacacaataagaaatgataaaaggggtatcaccactgatcccacagaaatacacactaccatcagagaatactataaatacctctatgtaaatataccagaaaatctagaagaaatggataaattcctggacacaaacaccctcccaagactaaaccaggaagaagttgaatccctgaatagaccaataacaagtttggaaattgaagcagtaattaatagcct

SEQ ID NO: 900683 - DNA, 646 bp, Homo sapiens
aagtgcatacctctgaggaatgagataagcttcataagatttctaccattccagccccacaggagagagtaaacctgctcacacacccagcacatcgctactacaaccagcatcagagaaagccatcacacaaagattttctataaccaggaaactcacacagagtctttgccattgaaagtacccaaagccaaaactaggtgacaatcaactataaacattaaagttacatcctcaaggtggggcagcggggagaagaaagtttttaaaaatccctgtccaatcaaaaacaaattcaaaaataattagaagaaacagtctacccaaataagaaggaaactagaaaaataattctggcaatatgaaagaacagagttctataacactcccaaaagatcacactaactctccagcaatggatccaaaccaagatgaaatttttgaaataccagataaaaaattcaaaaggttgattattaaattattcaaggagataaaaaggaaaggtgaaaaccaacataaagaaattaatgaaacaattcaggacatgaatgaaaaatgttctaaagagacagacattgtaaagaaaaacamaccagaacttttggaagtgaaagacacatttagggaactacaaaatgcagcg

SEQ ID NO: 900684 - DNA, 656 bp, Homo sapiens
ctgcccatcattcgtggtgtggttccctgccttccagcgtcactccgcctttaattaggaacagtgtcctctccttccccagcaactgtggatcagctatggccccagtaactcagtaagtctctccaccattcagggagctatagccacacctccaacaaggtaggaatcccagccttgcagagagccccctctaagtttatatctcctttgggcactgtctgtcagcccaggggattctttagagtcatctctgtccttttacagataatccccttatagttaattatatcaggagtcagcaaattttttttctctgcccaactgtgagcctctgccagctgtagcacaaaagcacagacaattataaatgaatggggtagcttgatttgacctgtggtaagctaaatttagcccatgggatatggcttatcaacctctgctgtatgttaagctttccctgttaaaattactatgggacatctgtctcatctgtttaggggcaaatgctgagtgaactctgagggacaaatscaacaaatacgtcaagtaggaaaaggaatagaaagtatcctttggaagtgctagtgactgtatcaaaagcagtctcagtaaaatgcttaggtgaggacgatgccaggttgtggagtaaatag

SEQ ID NO: 900685 - DNA, 599 bp, Homo sapiens
catttgttacatttaaaaggattctgtgcgtgtgtttaagggaactgagtgcacttttctctttatttaacctgatcacaaagattggtcatcatcttatctcatgtgtttatttgccccaytttaaaagttatgctaaggaaagaaaattgtcttattaattgtcatagcaatttgttgagcaatttgttgagcagactattagaacatggttagccctaaggcatgttccaatttgctgaactgaaactgtaggcataagagtttttgcctacattataattgccactaagccaatttcatgctgtctaaatcttgatataaaatgttataggtttcagcataccacttttgttcccagcaaaggtggagtaacagagaccagatttaccctcccaccagaattataccaaaaaaacaggcaagatatacgaagcaatgcttttcaaggcagcggctatcataccaagaaagaccatgatccctgaaagacaggaaacaaataaagcaagccttatgattgccacaacttactgccttgagagagtttccaagtcatggtgcaaggagagcgaacccaggcagagtccagtggattc

SEQ ID NO: 900686 - DNA, 599 bp, Homo sapiens
catttgttacatttaaaaggattctgtgcgtgtgtttaagggaactgagtgcacttttctctttatttaacctgatcacaaagattggtcatcatcttatctcatgtgtttatttgccccattttaaaagttatgctaaggaaagaaaattgtcttattaattgtcatagcaatttgttgagcaatttgttgagcagactattagaacatggttagccctaaggcatgttccaatttgctgaactgaaactgtaggcataagagtttttgcctacattataattgccactaagccaatttcatgctgtctaaatcttgatataaaatgttataggtttcagcataccacttttgttcccagcaaaggtggagtaacagagaccagatttaccctcccaccagaattataccaaaaaaacaggcaagatatacgaagcaatgcttttcaaggcagcggctatcataccaagaaagaccatgatccctgaaagacaggaaacaaataaagcaagccttatgattgcyacaacttactgccttgagagagtttccaagtcatggtgcaaggagagcgaacccaggcagagtccagtggattc

SEQ ID NO: 900687 - DNA, 606 bp, Homo sapiens
taattaccatgttagtatttcctccagttttgtctccctggtgtttttctggtgttgttgttgatttgattttcattacaaaagtggaatctgtgagaatgacacctaataaattgtgttcwtgaggcttgcggggttgggggttgtccatcagtagcatgggggctggccaggaaagatcgtggtgagagtggagtttgatgagactttgagcaatggacagatttgggcagcagaggtaggcaggtggcatttcacagggagagggtggtggcagaaaggggtgggaagggtgagagcctcagagtggctttaaaatacgtccacaagttccttgataatcaatccacaaagaggtagagtccatgccccctgtccttgaaactgggtgggcctctgtggctgcctcaatgtataaaatgaggtggaagtgatgttgtatgacttcaaggctgggatagaaaaggccacgtggcttctgccaggcaatcttgggacatgtgctctgggagccttgggccgccatatcaggagccagctgtcccaaccaggatctgaaggtaactgcatgatagagctccatgcaagagctgcccagctgaaccc

SEQ ID NO: 900688 - DNA, 619 bp, Homo sapiens
taacaatggcatctccaccgagcccttctgacggtttggctggatagcctgcatacagtctttccatcttttgagtgattcctgagttacctaatatttttccaataattacttttcttcttaaatcagacractatttttgtaattaaaacccttagttcatgctacacaaatatattctaaggggaagtagcagagtcccatttcaacttttggaccaatgacccaggaagtaagccaggccacttggaaaaactatggaattctttttgaatgagtctgcttgtaatgtcactctgctacttccttggtgagctatttgaactctctgcctttaacctcccctttgttcatagggctcgtcctccagtcactactgtagaggcaggaggggagctcttatatccatagctgcttgattccccctgtattttgtctttctgttaatgcacataagcacatcatagactacataacagcagtgtgaggagttcaatacatgcatgtagacatacatctcaaccaaacttagtgtcagaaaaagcaacttcaaaattcctaattcagtgaaaacaagaagaacatggttggtccaaatgccacgacaagctcaacaatc

SEQ ID NO: 900689 - DNA, 681 bp, Homo sapiens
ctgactttcaatgttgtttcaacaccgaaaaaatatgatggcttattctttggtatgagaagtcattttgatggtatttttaccctattaaacaaaaatgggatttaaaaatctggttcgggatgttcaaagataattgctaaggcaaattttgcaatttgagaaaacctaactgtaatgatccatttattcagttatttgttaatactcaaattagtaattttcactctgaatggtaaataaaatgttaataaaaaataacaagacatataaactttccctaatgagatgcagttaataaaaacggttgtttacttcagagtatttactataaacatgtccacttatgttattttattgctatctatatactctttcagtttactgtattactgtacttttctctaaaactttaaaaatctgttatctaaaatcaattctctaatgctaattttgcaggaaaactgtatttcacattattaatctcattaatataactttcctataaataagcatgaaacatttggaggatgcatatataatgagtgcttggttactatagtagcgaatgtcaaactaattgctaaaaaaagtctaaaggttttcacactttgaaaaatctagtatatcatctatcattattctccaatattgtggcaaraatagtcaccgcaagtaaaa

SEQ ID NO: 900690 - DNA, 661 bp, Homo sapiens
agaatgatcttgtttacattagaaacaaggctaatataggactaaacagctgtcttaaattatttgtaatcaaaattttgtctgatatgctgtcgtaaakgttgctatgcccttatttgtttcatgcagatattgatcatttaagaataatatctgcatgatgacaaaatgcctgcttaatttgttaagtgagagaaaagtcaaactttttgatgaacagtttattaactttttgcaattatttatttattgttttgttatttggtaaagacacactctctgttggcttaaactgtaaactatagcaaggatttgcatacactttaatgggaattctataatttgaccgttatttcagatatccacaattaatcataccctgtgacttttccttttctctcttttaaagtgattttatgaatgtatgctccttaaaagaggtagttttgcttgtctttagttgagtaacattagtccagcaacaaaattagcaaaagtataatggtaacttgcaaagtttctataacaacgatgctatcctattgggaccacatggtatcacatatgttatgccagattactcactcttaacagacacctgtggttcattaacaaaatgtgctggagtatccctaattatacaaacaattgatagtttaaa

SEQ ID NO: 900691 - DNA, 706 bp, Homo sapiens
tcctgccaccaagtttcacagtgtgttagcttataatttctatttttattataatttatatttcatttaaacttctttactcatttttaaamtaactgtacttaacatttttagctatattttcagacatttgtcattattatttttaagaaccagctcttgcatatataaactccactttttactgattctttaactttatattttatcatacctcattctccttaacattgctagattatgtttaaattttaccttaaaaaatacctaaatgatttgctggggttttttgttgttgtttgttgtttcatagtgaaattatttaatactaatatatttgccatgagaacagctttggctgcacctcataaggtgcaccattttgtttattcccttaatggtgttactattttctaaataacctatgattgcaagtgttttaaaaacacatttcatggtgtgtatttgaggtttatatcctgatgacatgggatatagagagatagtaaaatggctatatagtgaagcagatgaacatagctatcatctcacatagttactatttgtgtgtgacaagagcagctaaaatctacttaacaaaaatccctaatactgtacaattttattaactttaatcctcatgttgtacatgagatctcttaattagtaatccaacacatgtgctattttgtattctttggcctaa

SEQ ID NO: 900692 - DNA, 610 bp, Homo sapiens
ctacgacagtttcaacacataaagcaaaatcagcatgttttaaatcaccttgtaatgggttgagaaagaacttcttatttctattttcttttctctttaatggattaaagtagcaaataatttcaagttagcagaacaaaacagtcaaaagattattctagaggaagattgtaatattaaaaatttcactttagagaatgtaaccactaagaagaaaaatcacaatataatttaatgaagcatggggattattttgctggtggtagtcaagcctgaaacaaaacaaagtagaataaaaccccaaagcctaaagtcaaagagacctcccaaggcccagtttacctgttaaaccagtcatctgtgtaccgagggtaaggataggggtcgttgctgctgaagtcgtaacttgcttcggcattctgaaaaacacaaggcatctcattaggtccgtacagccagaggcgcagtaaagggaaagcgctgggagactttaaacrtttctagtcctccctggagtgctggattagtgtgctgcactggaccaaacctcacaaaattgtgttggagccaaagcatgtctttggggttttccatcctctcttgatattct

SEQ ID NO: 900693 - DNA, 562 bp, Homo sapiens
tctcctgacagtgactcccatttgccaaaccctacaggaagctagaggacatgagaggcacccggaggtgatgcagtctgggagggccaggctttcagcgttttagagaggcatggagaaggatggagggtgggcacctggggagatcctcaggtggacaatggccactgagggatgcccagcattgctatcagccctgccctcaaagagctgcagtctagtgaagatactcatacagcaggtctgccaggtaaacagcgggggaccttaactggaatggtgtcttggggtatgggggcgtgggtgtgtagaactgaagaccactttagacatcttcctgcatacattaatatacatgaggggttgggtgggaggtgtaaaggagtagggaagatattggtgtcaaagctgagggtgacaggcaaatggagaaaaggatgatgtatgctgggtgagaagtaaagcctgatgacataaatttcaaataaatgaaggcatagaagtcagtaggagttgatcaygagcaggcaggtggtagagggtggaataggaaatattcaca

SEQ ID NO: 900694 - DNA, 398 bp, Homo sapiens
agcatggcattttttttagtgtgcarttttggccaagttatttaatttcctcatatctcagagagatatagatactaaactcacatgattgttctaaggaaatgatataattgcctgagagatgttgtcagaggtaactgttattattaaaactattagtattattacaaaactcaaattcacaccagccctcaaggttctgctacccctaatctaataagctatgtagactgtaagaataaatgttaaaaacaaatgattaagtcacagaatgattgaagtgaagtgggaatacagaaaaaaaatttgtaataaatttttgaatcagtgtaccatgtctgttagcttttattctatcattctatccctgggatcttacattaaaaaggaaactatct

SEQ ID NO: 900695 - DNA, 591 bp, Homo sapiens
aaaattgtagatatttatttccttgcttataagtactacctaaataatagactcaatttatcttttggcttgcaaggcctaaaatatttactttctggccttttacaatgcttgctgacacctaaactaactttgtccccttctcatctttctctatactcaacaagatggatatatttgaaacatctatcagcttaaaatacttcatagcattcccactacccttagaaccaagactgacattcttaaaatactcttcattacttttcaattatcattttgtaccatattacttagtgccctatttcaattatactagacttcccattattcttagtcaacatgttctatgctgcctcagggaacttatagttccttctgcatgaaatgctattctccctcctcttgcttatttactattatcagagtttagaactaaagtaaactgccaaaactttagagaaaacttttctgatatctctgacttggtcaaccgytccacaatcctacacagtatttgattttgtaatacaaatgtctcttatttctatgatcatattataattaaaattcacatttatttttgtgcat

SEQ ID NO: 900696 - DNA, 542 bp, Homo sapiens
gtatacctgtctgacttggctttttatgtgagtattagattttattttaaaatactgttaaaatagctatagtgtgtattgttaaattttccattgtagtttttgtttgaacagaaaagagccatgtccttttattgtgtatttaattgccaaacttacctctctctttaatacagtctgttcttacttatgtctcttcttcattgtaatagcctacagagaccagttcatttctggagatgctgtttgtctctttgtttcttttagattttctctgctttcattaactgctcagctagtgtatgaattcaggactgaaacttggtgttcttactaagcacaacttagctgattggattgtctcctttcagtctactcgtctggcctagttttgctatgagtttgaggattctattctgtgrtgaattcagatcaattgtgagcctagttaatcctgtcttctcctgaacccttggaaaaagattatttctgaggatggcccacaggttaatgtcagtctcaggcaaggagaatgtagccta

SEQ ID NO: 900697 - DNA, 611 bp, Homo sapiens
agaaatatgtgcatgcatgcaaaatgtaggtmataaaaagcatgagatgcttaaaggacatgaaagaatttctcatgagattattttaaaaagtccttgggacgatcttgtttcagacatacaagcattagctctctgtcttcatgctttcccagcttcagtttgtttgggcctgccaagagtgatttcatcctagtatctgcaaccttcccattagcccatcagaggagcacttctaatggtcagagaagtggtacagctttaggcaatgataaggtgtagggaacaaaaggttggaattctggatttccaagacagctaaaatgtgagggctaaaatcctggagagaagaaaggtgcagaaaagggagcctgatatttggcaccatttttattctctgggcatttgataattaagctatatagggcaagaggctgcaaagctaaacagtaacaaccgaaaagcagagcagtctctggcagtcacatggtaccaagaaattttttaaaaattgggtttaaaacttgaaaaagaggaggagtcattgcagacacttcaggctctaagctgggaccactggaaggttatattctacaagcagaggtagacca

SEQ ID NO: 900698 - DNA, 621 bp, Homo sapiens
ccccagtcccctggagacacatgctgtcaggaagtatttcatgatttctatcctattttcttttcctttgagtttgaacaccacaggtcttgtttaatgaggccaggtttttcgtggaagttttgggattgaaccaaggaagagaggatcaggaacagtcagaaagctgtgcacattttcaacaactaccgacagcagtgagtgcttgggaagcagtgagatcataggctgggaagatgggaaatcatcaggaatcccgggctgatgaaactttagaggtctttggaaagctcccctgattatcacctcctcttctctctctcctaatttacctccaggaactacagacctttatctcacagtgagagccaaagcttcaaaagggtgattagtactgttgccaaaggaggaacagtcaatatcagctcttttccaaacccagtccttgatagaaatgctctctgtaaactcagatgaagagatgacatctgttctgattattgtgatatagcccactgcagagcacaaagcacatagtagatctttaataagyatgtgtccagttgagtggcatcagacatctaaagcagcaggaagcacttcacaaatcaagttatagaa

SEQ ID NO: 900699 - DNA, 594 bp, Homo sapiens
acaaattcctggcagtactatgagcatttaatactcacaaatgattttctgattaaagagaattttttttttcagcccaattggagcaacacttggttacagttaggttagacctgtgatttttatgaaatgcctggttaaagtgtattgttctaactctctcacctgtatgaacctcaccccctcaatctctcccttcctttttgcatgaatcaacacaggtccctaatatgacaccatataatgtccccagccccagcctctttcatttagatcttgggtaacctcagcttattcagattagataaatagtaagtgcttggagataacaaccagaactcttcaggtcctctccataatacccactagtgatttctgtaatatcagagtttagtgcttttcccaattacaataggcttaccttgctccttgcaatttgaagtgaaatgtctgtgatttcagtatgtgcatagagcaatggacgtgtggcttaagagcacaagctacgtaawcctaggcttttctgaggattcagcagcctaaatgcatagagaatcatgagagcattactgcaggaacagagcatttccatct

SEQ ID NO: 900700 - DNA, 678 bp, Homo sapiens
ggggtcaatacattggaaatcacacattatttcrtagcataaaattcacaggcccaagataaaggtatacttgcaactaataagtgaaaaaaatattgaattaaggagaaagtaaaaggaatgatgatcctctggacatctgcttctgtggtttttcacttcagtgctacctctgctattaagaacccagtgtgcacattggctgaagacaatctgttgttgcagaatttaaatacagacatattatgttttcatatttatactgtgaccaagagaatcctcattcaggcctcagccttgtatttttgctaccatttccaaacaggaggtgaaagccctgctgtcacggtgctagggttatggaataattaacatccacaggtcccctggatcccttgtttatatgagaaatggaagaataaaacaaccatgcaaaaataatgaatatcacagctaattttggaaagcccattaaaataacaaatcagcaatgtcttcaacaaaaatcactggagataagaatcatacagaggactgtttcttttgcaagaaacaatacatactttgcaaagtatacatttttaatgctgaggtttttaaaaactgatttaatctttcatttaatattttcaggtttatttactatgcttgatatttcatacctagcaatacattaaa

SEQ ID NO: 900701 - DNA, 599 bp, Homo sapiens
ttaaagttggaggaaagtaggtttagttacagaaggacagcatgaatagtatctcttgcatgatggcactcttctgtatcttcattgtggtggaatttgcatgattatgcatttgtaaaaacacataatatatacctatgactaaattttaatatgtggaagttagaaattcactatatgtaagttagaacaaatttttatttcaatttttattttagattcaaggagcacatggacagatttgttacactggcatattgtgtgatgctgaggtttggagagcacttgatcccatcacccaggtagtgagcacagtttccagtaggtagttttccagcactttctccctcccctccttcccctttttgagttcccagtgtctattattcccatgtttctatccatagttacccaatgtttagctcccacttataagtgaaaaagtggtgtttggttatctgttcctgcattaattcgcttaggataatggyctccagctgcatccatgttgctgcaaatggcatggttgcattcttcatggctgcattgtatttcatggtatacatgtaccacatttttttaaattcaatccatcatgg

SEQ ID NO: 900702 - DNA, 607 bp, Homo sapiens
ggacctaaatcttaaagctttgttgattcattggaaattctaaatgcaatatttcacctttggtctttcgttacataatggataacacagttaacccatctttccctgatgataatgttggtctttacttaaagggcatcataatttaaatgctgtaaatttaagaaatagataatcattttttccataagattatggcaaggcagcctgggagtaactcatgagtttctttcagcatctgccaagagcagaggagcattcctttatggctttcttcttaatgggaaaatgagtgggtttacgcacatctctgtttaatttgggaccaaatacatctcttaagaatccttacttcctcttagagagtgttaattctaaagcaattatagcgtgacaggtggaaaccacaggtaaaaacacagctgcacgcctttaaatgatgcctataaacatttggaaataacctaggatatttccatgatcttacaagatggggttstcagcaagccattcctgctctccccagtggaatgctttcaagacagcaagtgatgttttacacgttgctgaactacaaaatacaacatgatcttgtttgctctcccca

SEQ ID NO: 900703 - DNA, 577 bp, Homo sapiens
  misc_feature 548: n = A,T,C or G
taagttgtgatgaggaatgaggaataacctctctcttcaagttcatgcttacagactacttaaatctaatctagaagaaacaaacaagcacatcttgccttagtatactaccgccactcctctcctaaaccaaagttcataataggttagcacaacattccagcctgtaattgcttacataacagtgcctttctgatgttcttcctttctcatatgaaacccccaaaatgaaaagaatttatatttaaacaatgacttgtacctgcctcagttatgctcttatgattaaatgttttatggggcaaaataaatacataaacaaaccagggtacaaaatcttgttagaaagcttatttaaaatctgcacacctctttctgccacactgtgaaatatgtttccccagatgctgcaaagttaaaaagaaaaacttcttttgcttatcacggcttctcatcctttcctgagcagatttagtatcaggccaggtctaaatcttgcactgccttttgcacwagcataataatgccactgttacctttgattgagncttcatgtcttcagaagcctccttaccgt

SEQ ID NO: 900704 - DNA, 586 bp, Homo sapiens
cgacagagcaggggctgggaagggtgctggggcacagcccagccctggcatggatagggcaggggtccaagagacctgcaggacactgcagagtaacttgcatacagggcgagagagggcatgtgggggagggcrggcagacagtgcctgatgcaggccatcccgggacctgggacctgcgaggcccagttgtggagcctcctgctgtggcggggcacggggcttctggggaccaaagtctggaaaaggggccgggaagatggacagggaaagcccttggaggtggtctggttacctgggtgagctaggagccacagtcatcataccacggtcactagggccagcatggtcacctagaagcctgcaaacagtgccagcctccaggccctgtgccccgaggtggcctttaatcttgcactcactctctaggaaatgatggggcagtattctgtgttgagggaggaaaaacactcccttccaaaagcatgacaggcagaaagcagagaagggccaggactggctgagggcggggagctgggcctctggggtggacacacccttggtcacattgtgagggtagcttggt

SEQ ID NO: 900705 - DNA, 562 bp, Homo sapiens
attgttctagctgtaagtcctagctagagcaatcagataacacaaagaaataaaggacatccaagttgaaatggaataagtcaaattaagtaatatgatcttacatttggaaaaatctaaagactccacagaagaaaaaaaaatactattagaactgataaacaaaatttagtaaagttgcagaatacaagtcaccataaaaatttaacagcatttctatatgccaacagtgaataatctgaaaaagaaattttaaaagcaattcagttacaatagtcacaaataaaatggaacacctagggattaacttaaccaaagaagtggaagaactctacactaaaaactaaacaaataaaagttgatgaaagaaattgaagaggacaccaaaaagtgtaaaaaaaattcattttcatggcattaaagaatcaatattgttaaactgtccatattagcaaagtaatctacagattcaatgcaatccctatcaaaatacaaatgacattctttataaaacatgtatggaatggcataracccagaatagccaaaggtatcctaaggaa

SEQ ID NO: 900706 - DNA, 568 bp, Homo sapiens
caaacaatcttaattggactctattcagaaatgtagagcctttttagttaagcaaggatagttcctagtttgtcaaattccataagatgtcattcatttcaaaacagatgctggttgagtaagaagcaaaacttcaccagcataggtatgttttaagaagtataaccttgaaccctctcctctcagtctgtttcttgtacatacatatttatcgtcaattgaaaggttttgagcgggaggtggtgattaaatgagactattagcaaagctcaagtcaggacggcctgatttcacttctacaccctgtaaaatgacggctgttgaaccgtgtggtctttatgccattagcctatgtaaagtatagataaagaaacagcccacgaaatgccatctcctatggacttgcatgatgctcagcctcatcattcagttgtgaaaaacattgcaaaggtagtgtagagttcccatttaccacacactcggttcccccttattcaccgtttaacatcaatatgaatatggtacatatgcrtgatttaaaaaccaataccaatttgttaagtataat

SEQ ID NO: 900707 - DNA, 568 bp, Homo sapiens
caaacaatcttaattggactctattcagaaatgtagagcctttttagttaagcaaggatagttcctagtttgtcaaattccataagatgtcattcatttcaaaacagatgctggttgagtaagaagcaaaacttcaccagcataggtatgttttaagaagtataaccttgaaccctctcctctcagtctgtttcttgtacatacatatttatcgtcaattgaaaggttttgagcgggaggtggtgattaaatgagactattagcaaagctcaagtcaggacggcctgatttcacttctacaccctgtaaaatgacggctgttgaaccgtgtggtctttatgccattagcctatgtaaagtatagataaagaaacagcccacgaaatgccatctcctatggacttgcatgatgctcagcctcatcattcagttgtgaaaaacattgcaaaggtagtgtagagttcccatttaccacacactcggttcccccttattcaccgtttaacatcaatatgaatatggtacatatgcgtgattwaaaaaccaataccaatttgttaagtataat
